United States Patent Application Publication US 2019/0348154 A1 - sequence listing, part 75

SEQ ID NO: 282863 - DNA, 1017 bp, Morganella morganii
atgaattatctgttaaccggctttgttcagaaagatacccggatcctgatgtttaatcccggtgctgatatttgcaacttccggaacggtgcccgttatgttgtcagtgcggctccccgttcaatggatggcattccgtccggcctggtaccggcagatgcacagccgctgctgacagatgagcgggtactgcgtttcctggataatcctgccgtgataaaagccgccggcggtctgtccggttcccgtcattacgttaaatctgtgggctactgccagattgatgatccggagaacccttatcaccatcacgaactgaccatgacccgccataaagacggttttatccggacgtgctggcaccatgacaacatcttccgggaggggaatatccaccagcagcaggcggatgaaatactgttgcgtaaccaacgggcatttgtggcacgcagtatctttaccgacctgcggctgcccggcggccatcttttgaatccttccgatttgttcacctggtctgtgatgcatcgtgtcagtgagcatcttccggccttcatctgttcttacattctgatgcagtcaccggaagaagagataaccggcaccatgacggagcattccattgttcaccggacgcgctcacacagccggattgttcaggacatcgttgagcagataaaaccggttgttgctactgatatagagccggagccaccagccagttttatgcggatcccgaagttaaagcgctgggagtgtccgaagtacctgcaatgggtgaagagtcagccgtgctgcgtatgtggtcagcaggcagacgacccgcatcacatcatcggtcacggcaccggcggtaccggcacaaagacacacgacagcttcaccattccgctgtgtcgggttcaccacgacgaattacaccgcgacccggcagtatgggaagcaaagcacggcagccagctggagttgttatttaagtttatgaaccggtcatacgggatcggtgtttttggttaa

SEQ ID NO: 282864 - DNA, 159 bp, Morganella morganii
atgccacggaaccccttaacgttgatcatcattgctatcatcctgctgactactgctctgttggcgggttgttatctgtattcactcccgaattactgtaagcctctgcagggttacccgctggacggtgtgatccattataagtgtgaagcgctatga

SEQ ID NO: 282865 - DNA, 759 bp, Morganella morganii
atgatcacaaacgattatcagaagctggaaccgggtaatgccgtccggctttttgaggttgatggttccgcgttcggcgtgccggatgttttacggttccatgcttacaacattcctcacacagaagcagagattacggctgcaggcggtgaccctgaaaagctcccggcaaaatccatctggtggcagggcgaagagtaccgcgcctggccggtgcaaatcgagggtctggaagcatcaacaaccggttcaggtgcgcagccgaagttatcggtggcaaatctggacggttctgtcactgcactgtgtctggcatacgatgacatgctgaaagcgaaagtcacgatacgcgatacactggcgcattatctggacgcagcaaactttccggacggtaatccgtcagcagatccgacacaggaaaaagtatcggtcttttatatcgacagcaaatcatcggaaaccaacgaagttatcgagtttgaattagccagtccgatggatttacagggggtgctgatcccgacgcggcaactgcattcaatgtgcacctggtgcatccgtgggaagtacaaatccggtgacggctgtgattatgccggtcagaacggatatttcgataagcacggcaaccgtgtggatgacccggcacaggatcaatgcagcggcatgctgaataccggctgctttccccgttttggcaaaaacaatccgatcccttttggcggctttccgggaacatcactactgaggaaatag

SEQ ID NO: 282866 - DNA, 588 bp, Morganella morganii
atggcaaaaattgaactcggtggtgtgctgggtaaaacctttggtaaaacacaccagcggcttgtctgtaccacgtccgaagccgtccgtgcattgtgctgcactgttccgggctttgaacagttcctgaataccagcaaatcacgcggcttaacttacgcggtatttcgcggggaaaagaatatcggggtggatgacctgggttttccggtgactgatgatgttatccggattgtgcctgtcgtggtcggtagcaagagtggcggattgctgcaggttattttcggtgcggtgctggtggccgctgcgttctggaccggaggtgcgtcaatggctgcgtggggggcgctgcaaacagggatggctatgaccggtgcatccatgatacttggcggcattatccaaatgctgtccccgcagccgggaggtcttgccatgaaagaccagggcgaaaataaaccgtcctatgcgttcggcgccccaacgaacaccgtttctcagggctatccggtaccgatcggttacggtaaacgccgcatcggcggagccgttatctcagccggaatttacgtcgaagatcagcagtaa

SEQ ID NO: 282867 - DNA, 504 bp, Morganella morganii
gtgaaaggtaccggcgcaggcactccggtacagccgaaggggctggatgcatctgttaccggtacggtcgatgcctctgccgtgttcacctggaaagatattaataccctgaaacacgccattgatccggcctaccgcaacagccctaagttccggctggcttttaatgacagcaccctgaaagtgctcacggaaatggaagacggcaacaagcgtccgctgtggctgcctgaaatcaccggcgtggcaccttcgaccatcctgggtatgcagtatgctgtggatcaggctgtcgacagcatggaaaccggcaagaagtttatcttctgtggtgacttcgatcgcttcattgtccgccgtgtcacctatatgacgctgaagcgtctggtggagcgttatgcagaatatgaccagaccgcattcctcgcgtttcatcgctttgactgctgcctggaagacacctccgcgattaaggcgctggtggccaaagctgcgacaaagtaa

SEQ ID NO: 282868 - DNA, 297 bp, Morganella morganii
atgcaggaacggattaaaggacgccgggtatcgaagaaagtaaaagaacgactcagggcgttggtatggctggcagtgcaggactatacccagaataaagacgggtattactatcagtctgaactggccgagctggtgggtgtcgagcggaataactggaatatgcactatgaaaagcactggcaggaactgcgattgatttgtaaaaccttggactgtagggcattacgaaaaatgagaaacaacagggcggaaatatggcgtaaaaatacagctaaaacttgcaaaagtgaataa

SEQ ID NO: 282869 - DNA, 147 bp, Morganella morganii
atgcctaaagaaacagctgacaatctggatcggtattacaccgacagccgggtgattttcatgcgtgacggctatgagcatccgtgctttgaacctctgaaaacctttcaggagcggtatacacgtgtgggcgaggtgaaaccatga

SEQ ID NO: 282870 - DNA, 759 bp, Morganella morganii
atgatcacaaatgactaccagaagctggaaccgggtaatgccgtccggctttttaaggttgacggtaccgcgttcggtgtgccggatgttttgcggttccatgcatacaatattcctcacactgaggcagagattacggccgctggtggtgatccggaaaaattaccggcgaaatccatctggtggcagggagaggagtaccgtgcgtggccggtgctgattgacgggattgaggcatccacaaccgggtccggcgcacagccgaagttatcggtggcaaatctcgatggctcaatcactgcactgtgtctggcctacgatgacatgctgaaagcaaaagtcacgatacacgatacgctggcgcactatctggatgcggataatttcccagacggcaatccggcggcagatccgacccaggaaaaagtctcggtcttttatatcgacagcaaatcatcggaaaccaacgaagttatcgagtttgaattagccagtccgatggatttacagggggtgctgatcccgacgcggcaactgcatgcaatgtgcacctggtgcatacgcggcaaatacaaatccggtgacggctgtgattatgccgggcagaacgggtatttcgataagcacggcaaccgtgtggatgatccggcacaggatcagtgcagcggcatgctgaacacaggttgctttccccgcttcggtaaaaacaatccgatcccgttcggcggttttccgggaacatcactactgaggaaatag

SEQ ID NO: 282871 - DNA, 1692 bp, Morganella morganii
atgaccaaagtcaccggccgtactatcgatcctgcttatgaagtacatcttgcattgtatcaggccattaccggaccggaagagaatcagaaagcctataaacaggttgctccggatttttttgacctgattgtgattgacgaatgtcaccgtggcagtgcgtctgaagattccgcctggcgggagattctggacagcgccactcagattggcctgacagcaacaccaaaagaaacagaagacgtctccaatatcgattattttggtgaaccggtttacacctattcactgaaagagggaattgaagacggtttcctcgccccttacaaagtcgtgcgtgttgatatcgatgtcgatgttcagggctggcggccggttaaaggtcagctggataaatacggcaaagagattgaagaccgtatatacaatctgaaggattttgaccgcacgctggttattgatgagcgtactatgctggtggcgaagactatcaccgattacctgaaacgtaccaacccgatggataaaaccattgttttctgtaacgatattgatcatgcagagcggatgcgtcatgcgctggtggtgcttaatcctgagcaggtattgaagaacgaaaaatacgtgatgaaaattaccggtgacgatgatatcggcaaagcacagctggataactttattaatccgaaaaagccttatccggtgatagcaaccacctcagaattgatgagtacgggcgtcgatgcgcagacctgcaagctggtcgtgctggatcaaaatattcagtccatgaccaaatttaagcaaatcatcgggcgcggtacgcgtatcaacgaaaagtacggtaagttgtggttcaccattctcgactttaaaaaagcaaccgaactgtttgcggatgagcgctttgacggcgtgccggaaaaagtgctggtggtcagacccggtgacatttccgatcaggattcggattttaacgagcaacttgatgcggaaaatgatgataataccgccggtgaagcgcgggaagataccgctgactatcaggttaaccgcgacaggtctgaaggctgtggtgaattccatagtgatgatgatgacgacaaagtccgtaagttctatgtgaatggcgtgcatgtaaaagtgctggctaaacgagttcagtattatgattctgacggtaaactggtgactgaatccttccgtgattacacccgcaaaacaatgctgaaagacagtgagtacgcttcactggatggctttatgcgtaaatggaagaatgctccgcgcaaacaggtcatcattgaagaactggagcaactggggattttatgggatgtactggccgaagaggtgggtaaagatctcgacccgtttgatttgctctgccatgtggtgtacggtcagccgccgttaacgcgtcaggagcgtgcagcaaatgtgcgcaaacgtaactattttacgaagtatgccgaaccggctcagcaggtacttaatactctgctggacaaatatgctgatgaaggtgtgcaggaaattgaggacgttctggtgctcaaactgaaaccgtttgatgcgctgggccgtccgggagagatcatcagagccggctttggtaacaaagcagcgtatgagcaggccgtcaacgaactggaaaacgaaatctaccggttaccgccacgattagcctga

SEQ ID NO: 282872 - DNA, 204 bp, Morganella morganii
atggcggatttgtaccggtacttcaatgccgtgcagcagcatgttggtggtacacagcaaatgcggaagctgctttttctctacgccgcagatctgtttttgcagtattttgtggtcttcggtggtattgacgtaatgctctttcacatggtcaaacgcacaggcgaggaaaccgccggtaccgcacgccgggtccataattga

SEQ ID NO: 282873 - DNA, 570 bp, Morganella morganii
atgagtaatataactagtattattcaagattgcattaaccctgaattcaccctaaagagagaaagggaatcctgggttataacagaagaaaacccaaatgcgaccaataaaaaattattggtgaatggaaatggaatttttgggttttcacttgatagtaaaccagaagaaaaacctgtatggaaattcataaaaaataacgcattaaaaggtatgtgttctgtttgcgatggaatatttgttacaacctataaaaacatcgactattttatcattattgatctaaaatcaatgaatactaatggagccaaaaagcaaataatcacaggaattcatttatgtgaatggatttactctgtattaaaattacatggacatttaaataaagatgcaaaattcataggtgtaataagtaaattatcaaggagacaacagacatctaaaaaatcatcgattagaactcctttgcctccacctgaaaattacaatggattccctattttttctttggaaaattacaatagattatcgataaatgacatttgtaaagaaatcgaaagtcaaaggtaa

SEQ ID NO: 282874 - DNA, 876 bp, Morganella morganii
atgaatttaattcagcttctaaaaatagaatatgatgaaaatccagcatttttaataccagcagaaagaaatggcattcatttattttttaatgaattaagctcaagaagaactgcactcttacaccacgcatccaaagaacgatttgatttaagctcattgctaaatgatgtaatgaaatcaaagtactctgttccaatcgccaattatattgactggcttaatgaaattaaaaacaaccgtagaaataaaatggggcattaccattcattagctgaagaactaaaaaaaataatttcagggaaatatatagtagaccctgaaggccaaatttatttctcaacatataagagaggagagaaacctgccagtaaaattgaattacatttatcttcatcaactgttaaaagtttatttggattatggttttatctggaacatcaagcaaaatcgggtgatgtactaatgatagatgagccagaattaaaccttcacccatcaaaccaaagagttattgcacgatttctagcaaaacttgcaaattcaggaataaaagtaatcgttagtactcacagtgattacttcatcaaagaaattaatagcttaatgatgctaaaaaatataccgcagagccttaaggaaaagcaaagctctattatgagaaaacaagggattagtaaagaatcgatcctggattcaaatcatgtggctgcatatatttttgaaaaaaacactgtaactgaaatgcttaaaactaacgaaggaattttagcaaatacatttgatgatgttattaactcaataaataatgacaatgatgaaatttattattcattaatagattctatttcttctgatgaggataacaatgagtaa

SEQ ID NO: 282875 - DNA, 453 bp, Morganella morganii
atgaactggaaagaagcggtaattgctgcgctgtttattactgctgcctggtgggtatatgacacttaccgggataatcagcagctaaaagctgataacaaaactctgagtggtcagctcgcagagcaggtcgccattaacaagaactaccaggaacgcgcacagaaactccatgagctggacactaggcacacacaggaactggcaaatgcaaaaactgaaattgaccggctgcgtattgctgctgaccgtagccctgaacgggtgtacatcaaagccagttgtccaaagaccggcagcgataccgccaccggcatggatgatgctgccaccgcccgacctgatgactccgctatccgaaattattggttactcagagagcggattgcagagtcagagcagatgattaaggggttgcagggctatataaatactcaatgcaaaactgattag

SEQ ID NO: 282876 - DNA, 495 bp, Morganella morganii
atgaatatttttgaccctactatttttcctgccgttacagctctagccggctcttttgttggcgcaggaattacggcattaagcggcatatgcatggaaaaaataaagcacaatagaaatattaaaatatataccgctggcttcattgcggaagttgaatcattagttgagattattaaatgcagaggctatatcacattactagaagatatcctcaacacgctacctaaagaccagttaatagatttcaaagtcctaattcctgaaaactacgctcgcttttatgatgcaaatattgcaaatgtaggttttttgaaaccaaccaccgctaaaaatttagttgttttccatcaatacttacaatcagtagttcaagattttaaatcagaatcaatttttagtactcaaggttacgattacgattcactgaaagagatgtttgaattactgaataaagtaatactgttagctgatgaaattaaattaaacaaataa

SEQ ID NO: 282877 - DNA, 411 bp, Morganella morganii
atgtatctgcagccaggccagccgctctatgtgttactttatgcctctgcaatcatattcttctgtttcttctataccgcactggtatttaatccaagagaaacagcagataacctgaagaagtccggtgcatttgtaccaggaattcgtccgggagagcaaacggccaagtacatcgataaagtaatgactcgtttaactttagttggcgcgttatatattacctttatctgcctaatcccggagttcatgcgtgacgcaatgaaagtacctttctactttggtggtacttccctcttaatcgtggttgtggtcatcatggactttatggctcaagtgcaaactctgatgatgtcaagtcagtacgagtctgcattgaaaaaagcaaacctcaaaggttataaccgttaa

SEQ ID NO: 282878 - DNA, 594 bp, Morganella morganii
  misc_feature (136)..(145): n is a, c, g, or t
gtggcccgtatagcaggcattaacattcctgatcataaacatgctgttattgcattaactgcaattttcggcatcggcttaacccgttcacaggctatctgtaaagcaacgggtattgctgaagatgttaagatcnnnnnnnnnngtgatggtactggctgggattggctgacgacaatttctatgtatctgcagccaggccagccgctctatgtgttactttatgcctctgcaatcatattcttctgtttcttctataccgcactggtatttaatccaagagaaacagcagataacctgaagaagtccggtgcatttgtaccaggaattcgtccgggagagcaaacggccaagtacatcgataaagtaatgactcgtttaactttagttggcgcgttatatattacctttatctgcctaatcccggagttcatgcgtgacgcaatgaaagtacctttctactttggtggtacttccctcttaatcgtggttgtggtcatcatggactttatggctcaagtgcaaactctgatgatgtcaagtcagtacgagtctgcattgaaaaaagcaaacctcaaaggttataaccgttaa

SEQ ID NO: 282879 - DNA, 177 bp, Morganella morganii
atgtcgctgatgactgcaaaacaaaaacacgccaaagaacaggttattgagttgttcaatcaggctgacatggatgaaaagcagatcgagcagattgtatcggagtggcgttggcgcagggagaacgccaaaacaagccgcattctccatcagtgcagaatgaggctaccggcatga

SEQ ID NO: 282880 - DNA, 543 bp, Morganella morganii
atgcgctaccgcaacagtcgtgaagtcgtcggagaagtgagaaacgtcacggtcagtcagtcatgcggtaaatggtacgtcagcattcagactgagtatgaagcgacagaaccacaacctgaatcaacctcaatagtcgggcttgatgcaggcgttacaaaacttgccacgctttcagacggtacggtatacccgcccgtcagcagttttaaagtaaaccagcgaaagctggcaaggcttcaacggaaattaagccgtaaaatcaaattcagtgccaactggcaaaaacaaaagcgcaaaattcaacgtctgcattctcatattgccaatatcaggaaagactaccttcacaaagtcaccagcgaaatcagcaaaaaccacgcaatgattgtcattgaggacttaaaggtcagtaacatgtctaaatcggcaaaaggtacgacagaacggcatggacggaacgtaaaagctaaatctggtttaaaccgcgcaatactggagcagggctggtatgaaatgcgccgtcagcttgagtacaagtag

SEQ ID NO: 282881 - DNA, 609 bp, Morganella morganii
atgagcagtaatgaaagagaaacccgcagctatgtcggagaggtacgggccgcgccgggagaagaggacaagccgacccacattatcggtctggcctcggtgtttaattccctgtcagagccgatgtggggattccgtgaaattatcaaacccggcgcattcgacgatgtgctgaatgatgatgtgcgcgggctgtttaaccatgaccgcaattatatcctcggccggtcctcttccgggacgttatccctgagtgtcacagagcaggggcttgtttacgacatcactgcgcccgacacgcagactatccgggatctggttattgccccgatgttacgcggggatgtcaatcagagttcattcgcgttcagtgtggcggtgaatggtgatgactggtaccaggatgatgacggcatggttgtccgggaaattcacaaaatatcccgtctgtatgatgtcagtccggtgacttatccggcttatcaggccgcgaattcaaccgtgcggtcaatggaagcgtggaaagaagcacgcgacagcggcggtttagccaaagctatcaatgaaaaactggcgcgtgagcgtcttcttacattaatgaatgcataa

SEQ ID NO: 282882 - DNA, 402 bp, Morganella morganii
atgattgccggaatttttaatgtgccggcacacatgatcaatgacctggaaaaggcgacattctccaacatttccgaacaatctattcagtttgtccggcacacagttatgccgtgggtggtgaactgggagcaggagcttaacaggcggttgttcacccggcaggagcgccgcgccggattttatgcccggtttaatctggccgggctgttacgcggaaccccgaaagagcgtgctgaattttatcattacgccattactgacggctggatgagccggaatgaggcgcgggcatttgaggatatgaacccggttagcgggctggatgaaatgctggtcagcgttaacgccgcacaacctgtcggcagtaaatcaaaaggtggtgaaaaagatgagcagtaa

SEQ ID NO: 282883 - DNA, 312 bp, Morganella morganii
atgattctgcataatgtgcttaaaactatatacatagacaatgacgacaatgattttttgaaatatgaaatcatgggggagcacggtggcgatgtaacaatagcgatcgtatcagcggaaattaagtcagtagttggcggaatagactgttatctgtgggctaaagtcggagagctaacatttgagtaccttgacccgccaaagagaggatcattccagcagactgtagcaatggaatctccgccggggagaagtatcagcaccgtaatgcgggaatgcaaaaaacacagagctacctggcaaagaccgtaa

SEQ ID NO: 282884 - DNA, 774 bp, Morganella morganii
atgattggttttttatttgccaatattcaacaatttactgcaagccaagatgttgtccagcgctacattgtgactgattctatcgaacagactaaacgtactttaatcacaaatgctaaattagttgctgttattcctgttttcttttttgccattggttcagccctgtttgtgtattacaaacaaaatccaggtttgttacctgaaggttttaataccggaggtatcttacccttatttattgttacagaaatgccagtgggtatttccgggctaatcattgcagctatctttgccgctgctcaatcgagcatttccagtagcttaaacagtatttcaagttgctttaattctgatatctatattcgcttaagtaaagttgaacgacgttcagaacaaaaaatgaaagtcgccagattagttataattattgctggagtattcagtagcttagcaacaatttggttggttttatctgacgaatctgaaatatgggatgcttttaacagcttaatcggtttaatgggtggtcctatgaccggactatttatgttaggtatttttgttaaacgtgctaatgcaggtagtgcggtcgcaggcattatagtaagtatcattgctgtattagcagcccgttatggcagtgaccttaactttttcttctatggtgtaattggtgctatgtcagtagttattgttggtacaattactgcgccatttttctccgcagcaaaacaaatttcattggatgatagtgaaatatccgggaactaa

SEQ ID NO: 282885 - DNA, 207 bp, Morganella morganii
atgcgtaattacttaatgatatatttcatgtcaatttttgattacttccatttactggtaatgcacggttctgccgtgcctgttaccgatgatatttatacgctcgaagaatgtgagagccgcgcagtgcagataatgactgtgcggaatgttgaattagtgtgtgcagaggtggttcgtgaaaatacaaggcagattaatcagtag

SEQ ID NO: 282886 - DNA, 393 bp, Morganella morganii
gtgaaaatacaaggcagattaatcagtagccagcgctatcttgacgataatatcgttatggataaagcactgcgatttaaggtttttattgttgacatcattccggtcattctgcgtggcaagcaatacaccctgttatgtaatggtcatcataattatgctgctgcaaagttaatcgggactgaaccgcaattcagaacacccaagaaattagccaaagtatttaaccaatactcgcagagtgaaaaagaaacctttgtcattaataacctgaccgatagcgatttatatgatgtcgatacaggtgaggtcatacaagagttacttatgcctgacatgaataacggagtattccaaaacaaattaacaaaaggattgcggctttatcaatga

SEQ ID NO: 282887 - DNA, 390 bp, Morganella morganii
atgttcgttcacaagcataagggcgtcatcggggcgctgcggcgtgtcgtggagccgctcggctatctgatcagcgttactgaatggtggaaaaccggcgaccggaacggaacattccgcctgacagtcggtgtatcggaaaccggcatcaccgaagaaacctattacgagctggagcgcctgatattcgacgcaaagccagtcagccgccacctgctgggattgtctattaacctgagcacatccggcaatttttactgcggtgctgccgccaacaccggcgacacgctgactgtttatccctacataccggaaacggtacgggtggaaagcgcggactatctcggtgccgcactgataaccattgataaagtgagagtaaacccatga

SEQ ID NO: 282888 - DNA, 309 bp, Morganella morganii
atggcaataatcatagtgaaaaaatcacgcaagcctgaatttttacgtggcaactcagcaaacaggcgtcacgccaggagaaaggctgaagcgattgccaccaaaaatgtaaaaatgaagttggaggaaatattcagaactgaaccggacaaaagtccaatgaaccgggtagaaaaagccacatcagcatgcagtaccccgatttacgattcaccggataactgctgcttaaacactactgccctgtattcaactaagcgatataattcaaaaccaaaaacagaatttggtatcacggccagagcataa

SEQ ID NO: 282889 - DNA, 204 bp, Morganella morganii
atgaaaaagaagcaggttaagttatcccggatgtttaaaggcgggaggtttgtcgggtattgcctcagtgttgatggtgagatgttatcccaccagaccgacataaagatagaaacaacagcgccgccgcattcatctatatctgttggttttctctggcgttcgtctgtggttgatgatgctccggatattcaccttgaatag

SEQ ID NO: 282890 - DNA, 198 bp, Morganella morganii
atgacgattaaaaaactcctaagcctatcacaaggctctgtagtgtcattagatgggcttgcgggtgaaccccttgatattcttatcaatggctacttaatcgcccaaggagaagtcgtggtcgtttctgataaatatggtattcgcattaccgatatcatcaccccttcagaacgtatgcgccgtctgagtcgttga

SEQ ID NO: 282891 - DNA, 321 bp, Morganella morganii
atgaaaataaacagcaggaaactggcactggtttcactgatcctgtcatattcacaattctccgccggggcggaaaataccgcaaaacaggatccggacagtgacacactaatcgtcaccgcttcagggcgtgaagaacagcagcgaaaatccaccgttaccacccaggttatcgacagcgaccagattgaacgctcacgggcggaaagtctgaccgaattactggcacagaacagcgtcccgggcagacatccattaatatccgcggtgctgcaacggatggtcagggaaaagattttgccggacaggtgctggtattag

SEQ ID NO: 282892 - DNA, 651 bp, Morganella morganii
  misc_feature (605)..(614): n is a, c, g, or t
atgaccgttgagaagctgattaccgaccatatcgatatctggtcttctgccctgcaaacccgctccgcagccgggcgtggcagtaatggcaaaatcgatctctatggtattaagaaactgcgtgagctgattctggaactggcggtacgtggaaaactgatgccgcaggacccgaatgatgaaccggcatcggagttgcttaaacaaattgcgaaagaaaggaatgatttagttaagaataaagtgattaggaaacctaaagcacttgaacaaatcgcactagctaacacacccttcgatttacctgatggttgggaatggtgttatttaaatgatattggtaattggggggctggagccacaccaagccgctctaattcaaaatattataatggtgaaattccgtggtttaagtcaggtgaactctcctcagattttatttctgattcagaggagaaaatcactgaacttgccttgcaggagtgttcacttcgcgataataaagccggggatgtgttgattgcgatgtatggggcaacaattggtaagacatcgatcttaaatgttcgtggtacaactaatcaggcagtatgtgcctgtacccnnnnnnnnnnaccccatacagtgggatttctaatatatatttgttaa

SEQ ID NO: 282893 - DNA, 318 bp, Morganella morganii
  misc_feature (297)..(306): n is a, c, g, or t
atgaatgatgacaataataaaaacaaatggaaaaatatcagtaataccttatcgagaaacataaattcactgaaaagtgagtttactgtcggtaatctgtattcatcatcacagttatttgattctgttaaatttcgtggtattcgtctgacaacagacagaaccatggatccggtcagtaaaacaaactatgttccgtcaatttccggcatggcaaattcagaagccgttgtcactgttgttcagaatggtgaaattatcctgagacaaagtgttcctgccggtccgtttaatctnnnnnnnnnncctgtatgttaa

SEQ ID NO: 282894 - DNA, 909 bp, Morganella morganii; identical to SEQ ID NO: 282853

SEQ ID NO: 282895 - DNA, 900 bp, Morganella morganii
atgccttatttattcttaacgctggcggcgtgtttctggggcgggaactatgttgtcgggcaccttttggtgactgaagccgacccggtgattttatcgcaactgcgctggctggtgacggcggttttactgatgacgctgtatttcagtcaggtgaaacagcagtgggaattcatgaaaaaggcaaaagggataattctgtttctgtcattatgcggacaggttttattcccggtcacattgtatattggtctgcaatataccacagcacttaatgctgctatttatatgtcggcaacgccgtcaattgttttactgatcaatgcgctggtgtttaaagaaaaaattcaggggaaaaattatattggcgtattattgagtacgttaggtgtgatttatctgatatttaaaggtaatctgaatttttcagaagtgatcagtcatctgaataaaggagatttgtgggcactgggatccgccatcagctgggcgttgtattgtgcttttttaagactgaaaccccgtgaggtgaaaggtaatgcatttgtggccatcagctcggtgaccggcagcctgatgatgttaccaatactgattatttatctgttttcacatgattttcagatcagcaatatgggaaattatgcctcgccgctgtttatatccgggcttgcctatctggttatttttccgtcttggctatcatacctgctgtggaataaaggtatcctgactatcggtgcaacaagaggggagattttctctcacctgatcccgctgagtggcggtttctttggtgttcttttcctcagtgaaaaattacacagtttccattttttaagtggtgctttaattatttccggaatttatttttgttcttctgcgaaaaaacaggggtaa

SEQ ID NO: 282896 - DNA, 909 bp, Morganella morganii
gtgaactggtcaggtaccgccggtgccgctgcaacattctccgcaacttctcagcagacagatgcagaagggaaagccacggttaaactgaccagtaccacaacaccggtctatgacattgtggtcagtgccgcacagggaagtcaggctgcggttaatgcggataagaaagtctcctttgaagagctgttctcaacgtcagtgctggtcattgatgcggttgcagccggagataagccggttaacggcgcacacgttaagattttctcggaagatggatctgaattgctgtacgaaactacaacgaatacaaccggtaagtttaaggttgatctggttggcggcaaatacgcagttaagatcacagcgaataattatgacgactacgatgactttatggtcgtgaagagcggcgcggatacaaactttaagtttgcattgtctccggcgctgggaacacagttcggccgtattattctgcagtggagtgaagctccgggagatctggattcgcacttaatggttccgcgtgtcggcggtggtgcacggtaccatgtgtactacagcactaaatctccggcaggttcggatgcatcactggataaggatgaccgctctgctccgggtatcgaaaccattacgatgacatcaccgcatcaggggacttatacgtatttcgttaaaaacttctccggtccggatagcaagttatcaacagccaaggtacaaattttcctgaataaggatttaactctgaagccgggtacgtcgagaatgatgagctttgatgctccggacgcgagtgtacctacaaaagcgcaatggattgtatttgatattgtggtggatgctaataatgaggtagaggtggtaccaaaaggaacggtgtcatcaacagaaccaacttaa

SEQ ID NO: 282897 - DNA, 1095 bp, Morganella morganii; identical to SEQ ID NO: 282742

SEQ ID NO: 282898 - DNA, 258 bp, Morganella morganii; identical to SEQ ID NO: 282841

SEQ ID NO: 282899 - DNA, 192 bp, Morganella morganii
atgcagtccaccatcaataacctgaacaactctgttaacaatctgagcgctgcccgcagccgtattcaggatgctgatttcgcaactgaagtgtctaatatgagtcgtggccagattctgcagcaggcgggaacatctgtactggcgcaggcaaaccaggtaccacagtcagtactgagcttactgcgttaa

SEQ ID NO: 282900 - DNA, 552 bp, Morganella morganii
atggggctgaggaaagtaacttcaagggcaggattaacagaaataaaaaaaccgggtaaaaacccggtttttttacgcagtaacagattactctgctgctgcttcagtctgggattcagcgcggtcaacaagctcaatgtaagccattggagcattgtcaccagcacggaaaccacatttcagaatgcgggtgtaaccacctgcacgctgagcgaaacgtggtcccagctcgttgaacagttttgccacgatttcgttgacttacgtgatgttcgtcagccggaagtgaaagaagaaaaaccagaattcgatccgattttactgcgcccagtagacgatctcgaattgactgtccgctctgctaactgtctcaaggcagaagcaatccactacatcggtgatctggtacagcgtacagaagttgagttgctcaaaacacctaacctcggtaagaaatctcttactgaaattaaggacgttctggcatctcgcggcttatctctgggcatgcgtctggaaaattggccgccggcaagtattgctgacgaataa

SEQ ID NO: 282901 - DNA, 336 bp, Morganella morganii; identical to SEQ ID NO: 279919

SEQ ID NO: 282902 - DNA, 3207 bp, Morganella morganii
atgacacaaatcacaggccgcaaaggtggcggcggcagcccgcgcacgcccgtcgaacaaccggacgatttacagtctgttgcaaaagccaaattgctgattgccctcggtgaaggggaatttgccggtgagctgaccgggaagaatatctttctggatggtaccccgctgctgaatgctgacggctcggaaaattttcccggtgtggtgtgggaataccgtcccggcactcaggctcaaacctatatacaggggatgcctgcggcggagaatgaaatcacggttggtaccacggtacaaagcagtacaccgtgggcacatgcattcaccaatccgcaattatctgctgtccgcgtccgcctgaaatggccgtccctgttccgccaggaggataacggggatatggtcggtaacgaggtggcatacgccattgatttacagactgacggcgggagctggaaaaccgttgtggacggacgtgtaaagggcaaaacaacttccggttatgagcgtacccaccgcattgatctgccgcagtcggccacatcctggacactgcgtgtgcgtaaaatcacggcagatgccaacagcgcaaaaattggtgacaccatggtgctgcagagttacaccgaggtgattgatgccaaactgacctatccgcacaccgcgctgctgtatattgagtttgactcaaaacagtttaacggctccatcccgcaggtcacctgcgagccgaagatgcggatcatccgtgtaccgtcaaactatgacccggagtaccggacgtattccggtacctgggacggttcgtttaaatgggcatggaccaataacccggcctgggtcttttacgatatcgtgatttccgatcgctttggcctcggcgaccgcatcaaaatgcagaatatcgataaatgggaactgtaccgtgttgcgcagtattgtgaccagccggtaccggacggcaagggcggcagcggcaccgaaccacgctatatctgtgatgtgtatgtgcaggatcgcaatgaagcctatacggtactgcgcgattttgcagccattttccggggtatgacctactggggcggcaatcagattatcaccctggcggatatgccccgggatattgattacagttacaccaaagccaatgtgttggacggtcgtttcacctattccggcagcagcagtaaggcccgttattcctccgcgctggtgtcgtactcagatccgctgaacggctatgccgatgcgatggagccggtgtttgaaaatgaactggtttaccggttcggctttaatcagctggaaatgacggcgatcggctgcacccgccagtcagaggccaaccgcaaaggccgctggggcatcctcaccaataataaagaccgtgtggtgacattcggagtggggctggacggcaacatcccgcagccgggctacatcattgcggtggcggatgaaaacctgtccgggaaagtgaccggcggccgcgtcagtgcggtgaatggccggagtatcacactcgaccgcaagccggatgccacggcgggcgatcggctgatgctgaacctgccgtccggcaaatcgcaggcccgtaccattcagatggtcacggataatgtgatcaccgttaccacggaatacagcgaagtaccggagccggaatgtgtctgggtaacggaatcagacgagctgtgcgcccagcagtatcgggtggtgagcgtgactgagaatgatgacggctcgttcaccatatctgcggcgatgcatgatccggacaaatacgaccggatagacaccggcgcggtgcttgatgagcgcccgatcagtgttattccgcccggcaaccagttcccgccgaaagatatcaccatcagttcttattctgtggtgaatcaggggatcagcgtcgaaaccatgcaggttacctggtcaccggccgagaatgccattgcctatgaggcgcagtggcgacgtgatgacggtaactggatcaatgttccgcgcaatgccaccacttcgtttgacgtgcccggggtctattcaggccgctatctggtgcgggtcagggcgattaacgcggcggaaatctccagcggctgggggtattcagcggaaacccggctgaccggtaaagtgggggatccgccgatgccgctgaatttccgtgcgtccacgctggtattcgggatcaaactgaactgggaattcgggagattcacggaagacaccctgaaaaccgaaattcagtacagcaaaaccaatgacgggcagaacctgttactgctggccgatgtgccgtacccgtcccgctctcatgagcttgccggtctggccgccggtaccgcgttttatttccgtgcccgcctggtggataaaaccggcaatcagtccccctggactgactttgtgcgcggtgtggccgagttcgatgcatcaaccattattgatgaagtggccgccgggctgggtgactcacaaatcatcaaagacctgcagtcgcaggcggatgataattttgaggccattatcaataacgccaacaacgcttacggccagtggggctactggcagcgcgaaaacggcgcgatgaaagccgaaattatcgaagtccgcaactacacggtcacggaaacaactgcacttgcagagaaactggatgcggtacaggttaaagctgaagacggtctggcgctggcgcagaactccatccgggcgcagtgggacatggccgccggcgaagcatccgttgttcacgatatgaaagtccgcattcattacaacggtgaggactattccgccggtatgattatcggggccgagctgaaaggcggggaggtgaacacgcttatcggctttaacgcgcaaaagttcgcattttataacccgtccagtaaatccatggatctgtttatgtacatggagggcggacagatctttatgcgtgaggctttcattaatcaggcctggcttaatgaagtggttgtcactgacaaaatgcagtcggaaaactatgtgccgggtaaaacaggattcctgattgatgcgaagggtggtaatgctgaatttaacagtgcgacatttcgcggaactcttgatgttcgcagcgcggcatcaggtggccggatggaaattaataacgcaaagatagatgtttttgatgaaaacaacgtgttgcgggtcaggatcgggaggttgtcttga

SEQ ID NO: 282903 - DNA, 252 bp, Morganella morganii
atgaatactgtatttctgttaatggcggagtttgaaacatctcagatcccgctggcagtagtcgcaaagaaattcctgaatatgaccgagtcatacgcggataaaaaagcgaatttaggtgagctgccatttccggtttaccgggacaccaccagccagaaatcgatccggatggtacacattagcgacctggcagaatggattgaatcagagagagccaaggccaaaaatgaattacagaaactcacttga

SEQ ID NO: 282904 - DNA, 480 bp, Morganella morganii
atgaagaatgaatcactgaaagaagtagtaaaaaagatgtgctgtgccatgccgggtggacgggaagcgctggccggggcgctggggatgtcactgacgacattcaacaacaacctgtatgagaagaacggctgccggttttttgacaatgacgaactggaagcaatggaagacctgactaaaacccgtcacctagtcgaataccacatggaccggcacggtattacgccgatggaagcgatagaacccgaaaatatcgacgaagtggaattattcaaaatacagacaaacctgagctcccaccagggacaacttgcatcacttatccagaaaagccttgaagacgatgtactgaccacggaagaaatgacggtcatctataaaaaaatgaacaaggtattcgcctatgcgctgggttttgtcgcatcactgaaagcggtctacggggtgggaaatgattcaggtaaccagaaagggtga

SEQ ID NO: 282905 - DNA, 201 bp, Morganella morganii
atgagcagattaactcattcagaaccagaaaagcaatttaaatgcctcgttattggtaatgaaccgtttcgttatgttgaaagcatacctgctggtggcatagcggacaactaccgggaagcaccggaaatggtagagcgggcagagctgaaagaatactggtcaaaatactattaccgcagcggaggacaggatgcctaa

SEQ ID NO: 282906 - DNA, 366 bp, Morganella morganii
  misc_feature (317)..(326): n is a, c, g, or t
gtggacagcggaacggatatcgccaaagaatccgcggatattatcctgctggaaaaagatctgatggttctggaggagggtgtcattaaagggcgcgagacattcggtaatattattaaatacctgaatatgaccgccagctctaacttcggtaatgtattttctgttcttatcgccagtgcctttattccgttcctgccgatgctggccattcagttactgattcagaacctgctttatgatatgtctcagcttgcgctgccgtgggataaaatggataaagaattcctgcgcaaaccccgtaaatgggatgcggnnnnnnnnnngctttatgatctggattggcccgacatcgtctgtatttga

SEQ ID NO: 282907 - DNA, 438 bp, Morganella morganii
atgagcaatattcagatgatattagaacgctggggggcatgggttgcggataacccggaatctgtaacctggtcatcaattgccgccgggtttaaagggcttatccccgtaaaggttaagagtcgtcagcaatgtactgataatgatgctctggtgatatccggcattatggcaaaactgaacatccgcaacagcgatatgcatgatctgctttttgattactatgttttcggtaagacgtttattcagttggccaagaaatacgggtgctcagacactcacatagggaaaaaactccagaaggcagaagggctggtggaaggaatgctcataatgggagatgtaaaactggaaatggacggtacatcacatcatggaggtatgcggacatttatgaacaaattacatgatttaaaaattaatgctttacgatcgtaa

SEQ ID NO: 282908 - DNA, 498 bp, Morganella morganii
  misc_feature (412)..(421): n is a, c, g, or t
atggccgcttttgatcgcaatcttcaacttaaaattctggaacttgcagtagaggaatatccggagcaaataaactcaatacctttagagttatcttctctggatgataaaactctattacaaaatattgcttacctcagagatgaggggttaatcctgggcggaatcgaggaatcatttgatggtattgaaccagcattagatctcctttctgccacgaatgatgctgttaatttacttagtgatgaaggcagcatctccgcctctttaaaaattgttactgtgaaattgcatgatgaaactttatctgcactgcgtgagttcattgcccagaacgttcctgacccagaagaaaggaaagggtatttgcagcgcttaaaagagcttcccgctgacgccacaaaacacatcnnnnnnnnnntgcttcaactattgggtaaggggctgaatcagataccggacgcaattcagtggctacaaacagtgctccgttcttaa

SEQ ID NO: 282909 - DNA, 345 bp, Morganella morganii
  misc_feature (247)..(256): n is a, c, g, or t
gtggacaatgttgcaagcgatccgcggaaactaagaatttactccttggttttccataagaacgcattaacgctgtcaaccgacaatacccatgatgatttttggttagagttacatgaaactgtcggttgggtgaagtttgaaaaacaccatgaagaaagcgagtttgttaagaacggagcactgtttgtagccactgaattgcgtccggtatctgattcagccccttacccaatagttgaagcannnnnnnnnngatgtgttttgtggcgtcagcgggaagctcttttaagcgctgcaaataccctttcctttcttctgggtcaggaacgttctgggcaatga

SEQ ID NO: 282910 - DNA, 384 bp, Morganella morganii
gtggcgaatccgaaactgtcattaaaagaactggcactcagtccaaaaaacgccttccgttcaaagatggtgaaggtacctgaatggaacggagtcaccgttattcttcgggaaccgtcttcggcagcctggctcagatggcgtgagctgatgaataccggcgcagacggtgatgaaaaattgtcagaggcagaacaggcgcagcgcaatctgcgtgcagatgtggtgatgttttctgatgtgctgctggatgaagataaagagcgggtgttcagtgatgacgacactgaagaagtgatggttgtttacgggccggttcatgcccgtctgctgaaacaggcacttgatctgatgaccacgccggatgaagcggaaaaaaagtag

SEQ ID NO: 282911 - DNA, 708 bp, Morganella morganii
atgcgtaaaaacattcaggcggccatttttgcacatgcagaacgtgagtacccccgcgagtgctgtggggtaatcgctcaaaagtcccgggtggtgaaatattttccctgtcgcaatatcgcggtttctccggaagagcacttcgtattatcgccggaggattacggtgccgctgaagattggggaacggtgaccggtattgttcacagtcatccggatgccaccacccagccgtcagaactggataacgcacagtgcgatgccctcggtgtgccgtggtatatcgtcagctggccggaaggggatctgcggactgttcagccacgcggtgagcagtcattacttgggcgaccttttgtgctcgggtttacggactgctgggggctggtaatgagctggttcaggcaggagcatggcattgaactgccggattaccgggtggattatccctggtgggagcagggcgaaaaccggtacacagataattggcgggaggcgggatttattcaggttgatgacccacaacctggggatatcattgtgatgcaggtgcaggcaccggtcgccaatcatgccggtattttgctgggtgataatatgctgctgcatcatttgtacggacacctgagtcagcgggttccgtatggcggttattggcgtgatcgcacagttatggtgctgagacataaattacacatgacaacgtga

SEQ ID NO: 282912 - DNA, 192 bp, Morganella morganii
atgcgcatgcctgacaaatattccagccctacagcatacgcctggggacttataacctctgcttttggcgttttatctctggaccagtgggctattgtcgccgggatcatctgtactgtcgggacgttcctggtgaactggtattacaaacggaaagaattccaactgaaagccggagaacatcatgaataa

SEQ ID NO: 282913 - DNA, 351 bp, Morganella morganii
atgccaccacgcataccccgcgcctgccgcaaacgtggctgcgcaaagacaactaccgaccgcagcggatactgcgaagaacatcgcaatacagggtgggataaccaccagcagggcaagagccgacacgaacgcggatacggtactaagtgggatcggctacgtgcggtggtgctgaacagggataagcatctgtgtcagcagtgcctgcgtgaaggacgggcaactgaagcaaagacagtcgaccacatcactcccaaagcacatgggggaaccgatgcggaaagcaatctgcagagcctgtgctggccatgtcactaccggaagactgcaacggagagaacacgatga

SEQ ID NO: 282914 - DNA, 615 bp, Morganella morganii
atgtctgaagtctataaggcaataagtgccgtagccaaggaattggctgagacaggcatcaaaaaagggagcaggaattcacaacaggggtttatgttcaggggtatcgacgctgtatataacgcccttgccccagcgctggttaagcatggcctgattatccttcctcgcattatggagcgttctgtcacggagcgacagacacaaaaaggcggcaccttattttatgtcgtggtgaaagctgagtttgattttattgccacggaagacggcagcaaacacacagtgaccacctttggtgaagctatggatagcggggacaaggcaaccaacaaagcaatgtcaatcgcctataaatacgcagccttccaagcgttctgtattcccaccgaagaaactgcaattgatgctgacgcagaggttcacgatgttgccccgcgcagccacacgcagattctgagtgactataccgaatttcttaatgtcacaagtgacacaaagacgattgaggctgaatacaggaaagtgtggcaaatgctgaacggcagcgacaagcaggatgagtgtaaacgactcaccggcatcaggatcaacgaacttaaacaggcggcataa

SEQ ID NO: 282915 - DNA, 384 bp, Morganella morganii
gtggcgaatccgaaactgtcattaaaagaactggcactcagtccaaaaaacgccttccgctcaaaaatggtgaaggtacctgaatggaacggtatcgccgttattctgcgggaaccgtcttcggcagcctggctcagatggcgtgagctgatgaataccgacggggagggtgatgaaaaattgtcagaggcagaacaggcgcagcgcaatctgcgggctgatgtggtgatgttttctgatgtgctgctggatgaagataaagagcgggtgttcagtgatgacgacactgaagaagtgatggctgtttacgggccggttcatgcccgtttgctgaaacaggcacttgatctgatgaccacgccggatgaagcggaaaaaaagtag

SEQ ID NO: 282916 - DNA, 285 bp, Morganella morganii
atgactaatggcctggcatccccgggggaggtcacaatttctggtaactggtcaccggatgaggggcaggaagcgctgcgtgctgcctatgacaatgacacgatccatgcgttcaaagtggagtttccgtcaggtaatggttatgccttcctggcggaagtccgtcagaacagctggagtgtggcaaccagcggggtagtcaccgcgtctttcacgctgcgtatgaaaggtaagcctgttccgctgaaaaacgggacggtaactgagccgggaaagggggaataa

SEQ ID NO: 282917 - DNA, 471 bp, Morganella morganii
atgtcgggaccaccgaaaaccccgtcacacctgcgtttggtcaggggtaacccatcaaaacgcccgatcaataaaaaagaaccgaaaccgccgtcaggggtacccccaactccgaagcattttaccaagcaggggaaatactggtttaagcggatcggggaagaactcgatgccatgggcgtgatgagttcgatggatgccaaagcgctggagctgctgatcgaggcatacaccgaataccggcagcactgcgacaccctggacgaagaaggttacacctacacaacacagagtgatggcggaccactgataaaagcacacccggtggcggcaatgaaagccgatgcctggaaacggatccgggcaatgctgggtgaatttggtatgaccccggcgtcccgctcgaaggtaacgattaacacaccagccgaagaagaccctttcgaggcatttatgaaaaagcgcaaatga

SEQ ID NO: 282918 - DNA, 141 bp, Morganella morganii
atggcaggcatagcatcgttaggcgtcggcgcaaatatggaccttaatcagcaaatggacatgctggaaaaagcagaaatgcgccgtctggagccgttaactgcccaaaaaccagaccttatccggaaaaggtgttgctga

SEQ ID NO: 282919 - DNA, 912 bp, Morganella morganii
gtggaggatgacacttttttcgcggccatttacacgctggataaagatgatgaaccgttcgatgagtctgtctggataaaggctaatccggggctgggtgtctgcaaacgctttgatgatatgcgccgtctggcgaaaaaagccaaagagcagatagccgcccggcctaactttctgaccaaacacctcaatatgtgggttaacgcggagtcgatctggatggactcaggaaaatgggacaactgccctgaaaacgcgccggatgatgaactgaagaactacccggtctggatcggtgttgacctggcaaataaaatcgacgtggccgcggcaattaagatttatgaagatccgcgcggacaggtgcatgttaagtgcaaattctggctgccggaagaccggatagaaactgcgccgaaccatattgcggagctgtaccggaaatgggcggccgccgggcatctggagctgactgatggtgaggttattgatcatgacatcatcaaagccgacattctggcatggtgcgaaggtgatgacctgcgtgagctcgggtttgacccgtggagcgcggtgcagttctcacgccgcctggcggaagaggggatcccgctggtggaagtggcgcagacggtaaaaaacatgtctgaatccatgaaaacagtacaggccgatgtatattccggcaaatttcaccatgaccacaacccgatgatgtcctggatgatgtcgaatgtgaccgtaaaaccggacaaaaacgacaacattttcccgaacaaatcgacaccggaaaacaaaatcgacggaccggttgcgctgtttactgccaaatcgcgccagatggtgaacggcggtggtggttccgacttcctttcctctctggatcctgacgaagaaattctattcctatga

SEQ ID NO: 282920 - DNA, 228 bp, Morganella morganii
atggctttccggatattgccggatgcacaggagaaagtccgcgaatatgaggaactggtggcagcctgtcggcggggagtaaaaaaggtccgctgtacggacccggtaccggaagagaaccgggccactctcaccgaacgggaatttgtatccgtctataaccggttgtttacggccttcacggcaaaacagcgggaactgagaagaaaaaacggtctggcgatgtga

SEQ ID NO: 282921 - DNA, 165 bp, Morganella morganii
atgatgctttacacccgaattgcggcagaggaaccggccggaactgaaatcacttccgggtacatcatggagaaatacggcgtatcacgcagtatcagccagtcagctgtcagggttttagcgaagattgaagcggtcacgccgacccggtggcggggggaatga

SEQ ID NO: 282922 - DNA, 153 bp, Morganella morganii
atgctgggcttctttgaatacgtcgatcagaaccattctgacaacctgagccattcggttatgaccggctgctttaacctgatctgtgatttctgctatttccagtgcggtaatatctttaagtttcagcattccgcagtattcccggaataa

SEQ ID NO: 282923 - DNA, 201 bp, Morganella morganii; identical to SEQ ID NO: 278737

SEQ ID NO: 282924 - DNA, 477 bp, Morganella morganii
gtgacggatttgtgtcatattcccggcacgatcatagatatagttgcgggtgtaattggcgtaactggctttatcaaacggggaaatatccggcagggaactgcgttgctgtccggtattggccatctcgcgcccggtggcgctgaccagctgatacagggtgtcgtaagtgtatcggttttccggcaccactttctgattatgccagaatcgcgtctcctcggcgctattggtcacacacagcacattgccgaccggatcgtattcataacgcagatcctgaaatatttttttccgtgccggatgttcggttttgacagcaatcaggcgctgggtttgcggttcataagtgtaagtggtcactacaccgttaccgtgctcctcacacagcttctgcccggcagcggaatacgtcacagacttgataatgattttctccgccccgcctttcaccgtcacccggctggtactcagtaa

SEQ ID NO: 282925 - DNA, 306 bp, Morganella morganii
  misc_feature (258)..(267): n is a, c, g, or t
ttggggcaactgtcatggctgttgttcctgaaaattttcgatacccaggaagaagagctggaactggagctggatgattatcagttcccgatcccgaagcgctatttatggcgcagctgggcagcagacagtgagggtattaccggtgatgagttactggagtttgtgaacgacgatctttttccggggcttaaaaacctcatcgcgccgatcgataaaaatccgcgtggctttgttgtcagacaggcgttcagcgannnnnnnnnnctatatgaaaaatggcacactgctgcgccaggtgattaa

SEQ ID NO: 282926 - DNA, 324 bp, Morganella morganii
atgaaaaagaacgacctgattgaatatatcctgactaattatccggattatgcggtattcaggcaccgcggaaatgccaaatggtttgctatcataatgtcagtatctgctgataaaataggcgccggagacgcagagaaagtagtggatattgttaatgttaaggctgcgccggaaatggttggctctcttcgtttaaaggatggtatctatcctgcgtatcacatgaacaaagaacactgggttacgataatactggatgctgagttcagtagtgaagaactgaagtcattaattgatgatagttacagactgacctggtaa

SEQ ID NO: 282927 - DNA, 336 bp, Morganella morganii
atgaaagaatctgatttgttttctttgcttgacccggtgctgccgggcagggtttttccgtatgtggctccgcaggatgagcccaaaattcagccgccgtggtgtgttttttcactttatgataccggcggcgatgtgctgtgcggtcgtgctgagacaatgaccaatatccagattgatgtgtatgcaaaaaccatcgatgaagcccgccggatccgtgaactgtctgttgctgctgtttctccgctttcaccggcggagttcacagagaggcaggggtatgaagccgataccgcgctttaccgggccacgctggagtgtcaggtctggcaataa

SEQ ID NO: 282928 - DNA, 264 bp, Morganella morganii
  misc_feature (234)..(243): n is a, c, g, or t
atgaacggtctgccggcaaccagtacggccccggtgccggccggccagtgtaacggagccgcttgcaggcgctttgccaacagtgaggaagccgctcaggtggtcacacaggtgctgggcagcaaatcggtccgcacctgcaccaatccggcggattgtcagagcggcggtgaggcggagcaaccgggcagttcccagccaggaaccgggctggcaccggtgctggagaccacnnnnnnnnnnaaatttggaacagctgcataa

SEQ ID NO: 282929 - DNA, 252 bp, Morganella morganii
gtgcgcaaacgtaactattttacgaagtatgccgaaccggctcagcaggtacttaatactctgctggacaaatatgctgatgaaggtgtgcaggaaattgaggacgttctggtgctcaaactgaaaccgtttgatgcgctgggccgtccgggagagatcatcagagccggctttggtaacaaagcagcgtatgagcaggccgtcaacgaactggaaaacgaaatctaccggttaccgccacgattagcctga

SEQ ID NO: 282930 - DNA, 177 bp, Morganella morganii
atgaaaaaactctctgggttaatcgctgcacctcatacaccttttgctgccgatggcagtgttaattatcctgtcattgataaaattgcagaacatcttattgcaactggtgttacaggtgcttacgtattaggaacaacaagagtaaggttaattataggaaaccagctgctttaa

SEQ ID NO: 282931 - DNA, 246 bp, Morganella morganii
ttgaaaggtggcaaacttagtattcagggtaaacaacctgcagaagtagttaatgaatcagagaaatgggtacaccaagggatattaaaaagccagttttcattagaatttaaccttggtaagaatgtcaaaattcggaatgcagaattatcctgcggattgctgacattggatatagagtatgaaattccggaagaagaaaaaccacagttgatagctattgaaaataaagatataaaggcttag

SEQ ID NO: 282932 - DNA, 558 bp, Morganella morganii
atgaaagatctgctttccatatttaaagtaagtgtcaaagactcgcctatagcacctgattactgccgactgttgttgctctgcgtattcactgccgggcagcgcccgtgggaattgatggcgaacaccaaagacaactgggacaagaaaaacagtacgctgacggttccgcctcatatttcaaaaaactcggattatcatgtaataccgttgtcaaaatcagcaacggctgttttacaggctcaggcaagactctatccggactccaaatttttattcccggcaaaaacacaggaggggcatttgcagccatcggaatatgcaaagcagatcaaaaaattctgtgatcgcggggagtttgttaaattcactccgagagatatcagacgaacatttaaaacactagcaggtgatatggggatcagctctgaaatgcgtgacaggctgcaaaatcacaagaagcctggggtgtcttcaaaacactatgacagatatgactacataagagaaaaacgtgagatcatcagtgcatgggaaagaaaattactctctctataa

SEQ ID NO: 282933 - DNA, 729 bp, Morganella morganii
  misc_feature (690)..(717): n is a, c, g, or t
atggaaagtgataaacataatttacttttttcacggatagttgagcaggcacttccgggattttcagataaattatcagcaagaaaaaatgaaaaatcggttattacccgtctgaagcagggaaaaaaagggctgatggctgactatcccggactcggatatccggatgctgaaatattgcataatcgtctggcagttgcagttcatactgtggcccgtaaacaacgggaattacgtcagatcagtgagtttcgttcaccgcgcgaagaaaaaggactgaaagcattaacccggcaattaacttatgaagatcaattctcgccaaactgggcgggaaatactttaccggatgcgatagattcaggccacggcgctgttgcttatctttatgacctgcttacatttgtggaaagaatgattgaaccgaagggagacagtgataaagcgattacactcaaacagcgcagaccggatatttataatattttactgaatgaagagaatgtaaacggaagtatttccaaaattcagattattaatcaaatcatgagtactgcaataagtcagcaggaaaatagtgaagatcctgagaaactgatgctgaatgcacgctatccttaccagtttccgtttgaaaactatatgaatcagatttatgccgtactggatgaatatgacctatctataggnnnnnnnnnnnnnnnnnnnnnnnnnnnnatctataggtga

SEQ ID NO: 282934 - DNA, 1677 bp, Morganella morganii
gtgctgtgccgccgccgtaaaaataacccgctgtttgtcggggaatccggggtcggtaaaaccgcgattgcggaagggctcgcctggcgtatcgagcaggatgatgtaccggaagtgatcaaaggctataccattttttctctggatatcggctcactcctggccggtaccaagtaccgcggtgatttcgagaagcgctttaaggcactgctgaaagtgctggagaaaaacgaaaaaagcattctgtttattgatgagatccacaccatcattggtgccggtgcggcatccggtggtcaggtggatgcggcaaacctgattaaaccgttattatccaacgggaagatccgggtgattggttccacaacctatcaggaattcagcaatatctttgacaaagataaagcgctgacccgccgtttccagaaaattgatatcaatgaaccgactgccgatgaaaccgtgcgtatcattaacggcctgaaagcccgatatgaggcacaccacgatgtgcgttacaccgcgaaagctattcaggcggctgtggatctgtcggtgaaatacatcactgaccgccatctgccggataaagcgattgatgtcattgatgaagccggggcaagaacccgtctgatgccgctgagccgccgtaagaaaaccattggcgtcggtgaaattgaggcaattgtggcacggatcgcgcgtatcccggaaaaaaccgtttccagcagtgacaaagatctgctgcgtaacctcgacagccgcctgaaaatgctggtcttcggccaggatccggcgattgatgctctgacggaatccatcaaaatgagccgtgcgggtctggggaacgagcagaaaccgattggtgccttcctgctggcagggccgaccggggtcgggaaaaccgaagtcactgtgcagttatccaaagcaatgggtatcaagctgctgcgctttgatatgtccgagtacatggagcgtcacaccgtcagtcgtctgattggtgcacctccgggctatgtcgggtttgatcagggcggattgctgacggatgcggttatcaaacacccgcatgcggtggtgctgcttgatgagatcgaaaaagcgcacccggatgtctttaacctgttattacaggtgatggataacgggacactgaccgataacaacgggcgcaaagcggatttccgtaacgtgatcctggtgatgaccaccaacgccggtgtgcgtgaaacccagcgtaaatccatcggttttaccgagcaggacaacagcactgacgcgatggcggaaatcaaacgggtgttcacaccggagttccgtaaccgtctggacggcattgtctggtttaatgcgctgtcgcagccgattatcgctcaggtggtcgacaagttcattgttgaactccaggcgcagctggatgcgaaaggtgtttccattgaagtgtctgcccgtgcccgtacatggctggcagaaaaagggtatgacccggcgatgggcgcacgtccgatggcccgtgtgattcaggataaactgaaaaaaccgctggcgaacgaattactgttcggtgagctggtgaacggcggttcggtgattatcgatcttgataagaagaaagatgaactgacttaccgcttcagtgccctgaaagagaaatccggcgacccggtagcctga

SEQ ID NO: 282935 - DNA, 576 bp, Morganella morganii
atgattaattacaaaaccgcttcaaaagatgaattactcaaagaatttaagagactctctaaagaaattggtgataccccagtaggcgtaaaaaaagaatttcttcaccttcctaaaattttatcggatggtgaaacaccgatttctgttgttagtggtgcaatggatggtaacacctggcttattacattaaccaataaacgcgtcattttcttagataaaggtatgatgttcggtgtaaaacaagtagatgttaaccttgatgatattgttagtgtcggcggtaaaactggcattatttttggggaaataatggtcggcacttccggtcagaactacaccatatcaaatgttgtaaaaagttcagtcattccatttactaacttagtaaataaagaacgcgataaaaaaaaagccagtaacatacaaaataccaatcaagttaattcacctgccccaacttcatctaatgatgatttgatatcaaaacttgaacgcctatctgcactgaaagaaagcggcgtattaagtgatgaggaatttcaggttcaaaaaagtaaattgctgaactcctga

SEQ ID NO: 282936 - DNA, 228 bp, Morganella morganii
atgcgtccaaatattacaatcacagttccagaaccgtttttgcccgttgatgagttttgccgccgacacggtctgccggataaaactgtcagggatatgattaaagatggccgcctcccggttcgtggaaaaaatccgaacatgaagagcggaaaagtctttatcaacatgctggcgctgactgttgaagctgccgcatcctgcaacatttcactggaagcgaagtga

SEQ ID NO: 282937 - DNA, 252 bp, Morganella morganii
atgaccagacctgcacctgtttttatgccagccgaaagttacgaagccgataacgccgttgttatcgaatgtgtcattaaacaaaaccgtatggatgaacgccgcacagttgctgatcgctacgcatcccgcatgcgcgttctcggcgcgatggccgttcgggacaagttggattgttatcagattgctgaactgcttgagggtgaagcgagccgggcagagaacgaaatccgggagagcgaccatgcctga

SEQ ID NO: 282938 - DNA, 519 bp, Morganella morganii
atgaatcctttatggcgaattaatatgaaagatttttttgctaatttatttaaatgcacatctgaaacaatgatagaaagagttaaaaatcctattgttggttcttttgttttttcttggctattttttaattggaaagtgattttaattttattatttagtgataaaagtatagatgataaaataaatactatatcagtattgatatcatatgaatcatttttgtttccattgggtttttcttttttatatagttggctgcttcctatattttcgttatgtattgattttctattgaaaccagtttattcaaaggtggtttctatacgtacagatagggaagttagtgaatatttatcaagagaaattacaggaaggaaaagggctgatgctgaattagcatatgaattacagaagacaggaggattagaaaaaattcagaggatgcaagaggaaattacagcatctaaagatagagaaggaactttaatgaaagaaaaagaagatgtaaatacttaa

SEQ ID NO: 282939 - DNA, 201 bp, Morganella morganii
atgaaaataaaagaaaattcctccatgggagatgtgaatatttattttcaggatattatcctatcaattcctaaagtaaagggtgactatcctgatttagatgacctttttacacgggataaaacaattttagaatttattaaaagccttgatgtggaacaattgttattcttggatgagaaattatctaatatcttctaa

SEQ ID NO: 282940 - DNA, 783 bp, Morganella morganii
atgtcacaactgaaaacaacatggctctgtatcgccacggaaggcgacaccgtcgacgggaggattatagagagacaggacattattgatgtcgtcgaactttacaacccggcgctgtataccgcacttatctggcctgagcacaatcatgatgctgacccgatgggtgaagttgccgaactgatggcagaagacgatgaaaccggcaccttgcacctgtttgcaaaactgatcccgttcatcaatctgattgaagccaacagccggaatgactttctttttacatctgttgaattcacggaggacggtaacttccgggggacagggaaatcatatcttgaaggtttgggtgtaaccaatgaaccggcgagtgtcggaacaacacgactcaaattctacagcaaccagaaaaggaaccgaaaaatgccattagatacaagctggcgtaaaaaatttaacatcgctgatcctgagccaacaccggaaccacaaccggcaccggctgatgatgccaggttgcaggagctggcgcaggcactggccgcagcggaaaacaaaattgctgaactggaaaaacagcttgctgatactcagcaggacgtgaccgaagtacaggaagacgttgataccgtaaaggaagtggttgataccgaagactttgcaaaactgcgcgataacctgcctgatattacaaaaaacttcagcaagttgaatcaggttgcgtcccgcacgccgtcccgcaatccgcagggaaataaaaacgaacgttttaatttcctttaa

SEQ ID NO: 282941 - DNA, 1017 bp, Morganella morganii
atgcaactgaatcagcgggcgcgccagtttttaaagcagtatgcggctggtctggctaaagcctacggggttgaagatacctcacgatatttcgcactgactgacccgaaagaaacctcactccgtgcggctctgatggaagaagtcagtttcttaaacatgatcacggttgtcgacgttgaccagcttcagggacaggttgtgtcggtcggtaatccggggctgtttaccgggcgtgtggaagacgggcgtttttcacgtaaaaccaatgtggacggtaacacttatcagctggttgaaactgattccggcgcggcactgacatggcatctgctgtctgtgtgggcgaactccggaacagaaaatgagtttttccagcgtatgcagaacttcattaatgaatgttttgcactggatatgctgcgcatcggttttaacggtacacatgtggccaaaaccacagatccggaaacctacaaaaacggcgaagacgttaacattggctggcatgctatcgccaaaaaatggaacgacggtaaacaggttatcaccgaacaggcaacattaggtgaaaacggtgatttccgctcactggatgccatggcgcaggaaatcgtaaatacctgtattccggtgcaataccataacgacccgcgccttgtggtgttacttggtgctgatctcgtagcagctgaacaatatcggttatatcaggctgctgaccgtccgacagaaaaaatcgcggctcagatgctgggtaccacgattgccggacgcaccgcgtatatcccgccgtttatgccgggtaaacgtatggttgtcactaccctgtcaaacctgcatatctacacacagcgcggtacgcgccagcgtaaggcggagtttgtggaagaccgcaaacagtacgaaaacaaatacctgcgtaatgaagggtatgcgctggagtaccctgaaatgtacggtgcaattgatgaaagcgtggtgactatcggcaccgttgcggagccgaaggagtaa

SEQ ID NO: 282942 - DNA, 132 bp, Morganella morganii
atgaacggccagacgggaaaagacgttagcgaaccggcaacggatttgcaggatatgtacggcaattgtgccgcacgacacaaccagctggttgatgaaattaacatcagaaggaacctgaacaatgagtaa

SEQ ID NO: 282943 - DNA, 357 bp, Morganella morganii
atgaaaatgcattactacaaagacaaaacaaataaagtatgggtgtatgacgatgaacaaatcagggaaggatgggttcgtgatggcctattgaaaataactgagtcagaagcaaataaaattttatttccggaaccaacaaaagaacagttaattgaacaggctgagtcaaaaaaacaactcctgatcaccgaagccaaccaaaaaacgcaaatatggcagactcagctaatgctcgacatcatcactgatgaagacaaagcaagcctcacggaatggatgctgtatgtgcaaaaagtccaagccgtggacacctcaaccgccccggatatcatctggccggagaaaccggaatga

SEQ ID NO: 282944 - DNA, 1023 bp, Morganella morganii
atgaacaataaacaaagaaaaacacttgatgcaaagaaattatatgataatgcagtcgtctctatccaattaggaattgatgattttgaactatcaaagaatgagcctacaagagcactttcctctgtgagaaatctctttgcaggtgtcctattactgtttaaatataagttagcagcatcagttaatgatcctgaagatgcatatgaactaatttttaatccacctcaaattattccaatgccggatggggaggggggctttaaatgggctcctaatggaaagtttagaaatacaacaatagatgttcaaggtattgaagagcgttttgaaagctttaacatagaagtggactgggatgtaattaaaaaattgcaggaatgtagaaatcatttggaacacttgcatccaaagcatacaaatggtgagctggctgattttattgcaaaactttttcctatccttagtaattttataactaatgagttaaatgagttaccttctgatgtgttaggagtaagcacatgggatgtcatgcagaaacacaaagattattacaatagtatgctcggtatatgcaaaagtgaatggtctaagattgctataacaacagaattaattaatctagtatcactgtgtaaatgtgatatgtgtggctcattgctaattgctcctgatgctgagagtgctaaaaatcaatatagcattactccgggttcctttgatttcaaatatagatgtaaaaactgtggatattcttacgcaataactcctttattaattgaagcattaagaaatgatgaaatctataaccctcatgatggagagttagattataaatatgagcaatgtaatgagtgtggagttgaaggctttttgatatctgagcaaaggtgtgtttggtgtgaagccactttagaatatgaagaatgcagtgtttgtggtgatgcactcggtcaagaagaacaaggatttaatgggctatgtagttatcatgaaaatgtatcaaacaaagacgactga

SEQ ID NO: 282945 - DNA, 180 bp, Morganella morganii
atggcacgaaaaactaaacaacaggccggagaaacccgccgccagattattgatgccgcgttaaccgccttcagtgagcagggcgtgtctgcgacgtcattagtggatattgcaaagcaagcaggtgtgacccgtggtgcgatctattggcacttcaaaaataagaagtctgttcgataa

SEQ ID NO: 282946 - DNA, 198 bp, Morganella morganii
atgaaagacagatcgcatgatacggcgatggctgagtacttccgcgccgatccaacctatgcagcggaactgcttgccgaagtccgccgcgacggcaacccagccgagctggccattctgttgcggcagatggccacggcctcggcaagtgacgcgaggccggatgacgccgatacagtgcgcactctacctcgctga

SEQ ID NO: 282947 - DNA, 813 bp, Morganella morganii
atggccgacctgactgcctttgagcgtcgtaagctcgaaaagctgtttgggatggggggcggttatgttttgaatttttcagaccgcacctattccgaattcttcattgattaccgtgtggaaatcgatgcagcccagtaccgaacaggtggcgactccaaggccaagcggatgcgcacattctgggatgttgctcccaatcatacggctggccgtgtgattgatggtttgattgctgtaggtattcaagaggactgccttggagacagcaatcctctgctgatcgaggattgccggaagatcgcccatcgccttctcagtaaccagccagtggctgagctggatgcgttgaccgccattgctgatgagcgagatttcgaggtggtggcggagcacgtccgcgaggcaatcgagaagaatcaacccgagggcgggctggatcggctgcatactttcgtcaacaaattcatccgcgtgacgtgtgaaccgcacggcatcactatcactcgtgataagccgctgcatagcgttttcggagagtacgtcaaggcgctgcgggaaggtggccatcttgagtcggccatgaccgagcgcatcctaaagtccagtatttcagtgctggaagcctttaatgacgtgcgtaataacaagagtcttgcacacgataacccgatactgaattatgaggaaagcttgttgatctttaatcacgttgcggcatcagttcgttttatcaagtccctggaagcgaagataaaagctaaagtgacagaggtaaaacacggtggttgggacgaaagtatccctttctag

SEQ ID NO: 282948 - DNA, 567 bp, Morganella morganii
atgacgaacagccaagtccacctgcaagggtggatttcccttttgatagcgccggaacatgaagagcgggctaagcagatacgggccaaacgtgaccgccagtatggaaacatctacaccgaggctgccactgatgagcgatgggtgggcgacctaggcgagatggttttcaactcgtggcttaagcacgaaggcattcaaggttttgagtgggtgctggacgatgcagccggtcagcctgatttcgtgacggccctgaacatccgcatcggagtcaagacggtgaagcgcaaggtgccgccccgcgaggactacaccgcccagatcaccgcccgccatgcgggggaacccatcgaccagttcttcttcatgacctacgaaatcgcaaagcgccgcatgtggctgttggggggtatcaaccgcgaatgctttctgcaggaagctcgctattacggtgctggtgaatgtgtacatgccaactacaagattcgacaggggcatgagatttataacattgagatcgctaagctaattccgccaaaggtgtggattaagacggtggcgtag

SEQ ID NO: 282949 - DNA, 957 bp, Morganella morganii
atgaaagataagaacgattacattgaggctgctcaacaagtcattatttcgttggggctaccgaaggcacagcataacgagcgctcggccctttgcctgttggccctgttggatctcacgccgggtaagtcatgggccgacgcggaaaacccgttgatcggcataacacccataatggattgggcgcgcgatcacttcgacaaggcttataagccgaacacccgtgaatcggtacgccgacagaccatgcaccagttctgcgacgcggggttggctctctacaatcctgacaagcccgaccgtcctgtgaatagcccgaaggcggtttatcaaatcgaacccgctgcactggttctgctgcgcaccttcggaacccctgcatggcatgacagcctcgttgcttatctggccgagcgtgaaacgcttgttgcccgttacgctaaagagcgcgagcagaaccgcatcccagttgagattgcaccgggccagcaaatcaccctcagccccggagagcacagcgagctgatccgggccatcatcgaggactttgctccgcgttttgctccgggtagcgtgctggtctatgccggtgacacgggcgacaagtggggttactttgatgcacccttgctggccggattgggtgtcgatgtggattcccacgggaagatgcccgatgtggtgttgcacttcacggagaaaaactggctgctactggtggagtccgtcaccagtcacggcccagtcgatggcaagcgccataccgagctagcgaagctgttcgccggatcgaccgccggactggtttatgtgaccgccttcccaaaccgggccatcatgggtcgctacttgggcgaaatcgcttgggaaaccgaagtgtgggtggcagatgcaccgtcccacctgatccactttaacggcgtgcgcttcctcgggccgtatccggccgagggctga

SEQ ID NO: 282950 - DNA, 1470 bp, Morganella morganii
atgaaccaacagttagacaccgcagacagcgtgcgccgtgaggtggcaccccgtaccgcgcagaaacacaaagccgaatttggccagtttatgacgccttcgagcgtggcccgcttcatggcgtctctgttcccatccagtaccgtgcagacctgccgtctgctggatgcaggcgcgggtgtgggcgctctgtcctgcgcctttctcgaccgctgggtgacgggcggctttggctttgagaccgtcgaggcgaccgcctacgagatcgacgacaacctgcgcggccaccttgcgcagcacttgggcgggtacagccgcgtgacaccccggatcatcgcgggcgattacatcgaactagcgaccgccgaaggtctgggtgatcgaggctatacccatgcaatcctcaatccgccttacaagaagatcaacagccaatcagcccaccgactggccctgcgcagtgtcggtattgagacggtgaacctgtattccgcctttgtcgcgctggccgtgggcgaggcagcgccgggcgggcagatcgtggccatcattccgcgcagcttctgcaacgggccgtattaccgcccgtttcgcgatttcatccttgcgcgggcagcgatccgtcacatgcatctgtttgagtcgcgcagcaaggctttcaaggatgacgaggttctgcaggagaacatcatcatccgcttggagcgtggtggccagcaaggggcggtcacgatttcgacctctactgatgacagcttttccgatctcaacacccacgaacatccattcgaccggatcgtgttcccggatgatccggagcggttcattcatgtgccgaccacgaccgagaaaagcgccatcgagctatcgcccgccgtgcgctattcgctggccgacattggcgtgaaggtatcgaccgggccggtagtcgatttccgcctgaaggcacatctgcgcgacatgcccgagcagggctccgtccccctgatttaccccgggcacttgagcacgaccggcacggtctggcctgtgccggggttgaagaagccaaatgcgatcatgcgcaacgacgagacggaaaagtggctttacccgaacgggttttattgcgtggtgcgccgcttctcatcgaaggaggaaaagcgccgcgtggtggcaagcatcgttgatcctgccgcctttggcgatcattcgatgttgggcttcgagaaccacatgaacctgtttcacgagaacaagcacggcttgcccgaggcgctggcccgtgggctggtcttgttcctgaacacaacagcagtagatgagcatttccgtcgcttcaacggccacacacaggtcaatgcaaccgacctcaagctgatgaagtacccaagccgggaaaccctgatccaacttggtgagtgggccatgcagcaaggaacgctcacgcaagacctgatcgacaccaagctgggaaccctgaccgaatga

SEQ ID NO: 282951 - DNA, 708 bp, Morganella morganii
atgcgtaaaaacattcaggcggccatttttgcccatgcagaacgtgaatacccccgcgaatgctgcggggtgatcgcgcaaaaatcccgtgtagtgaaatactttccctgccgcaatgtcgcggtcacgccggaagagcattttgtattatcgccggaggattacgccgttgctgaggattggggtacggtgaccggtgttgtacacagtcacccggatgctaccacccggccgtcagaactggacaaagcacagtgcgatgctctcggtgtgccgtggtatatcatcagctggccggaaggggatctgcggactgttcagccgcgcggtgaattaccattactcggtcggccgtttgtgctcgggtttacggactgctggggtctggtaatgagctggttccggcaggaatgcggcattgaactgccggattaccgggtggattatccctggtgggagcagggtgagaaccggtacgctgataactggcaggaggccggatttattcaggttgacgacccgcaacccggtgatgtgatagtgatgcaggtacaggcacctgtcgctaatcatgccggtattctgctgggtgataacatgctgctgcatcatttgtacggatatctgagccagcgggtgccatatggcggttactggagggatcgcacagttatggtacttagacataatatagtcatgacaaaatga

SEQ ID NO: 282952 - DNA, 258 bp, Morganella morganii
atgagccggcaggaagaagattacgaaatcggtgtgtacgacgacccgctgataaaggcgatccaccacgtggatgacggacgggattatacacagcggattattcacgatatgcgacaacggtactacatcagagcggggatatacctaatccgcccaccagcaccacaggtcgttgcgccgaagttaaccccgacaatgacgggcaaaaaacggaataagaaggtcaggaaggtgagcaatgaacaaacaatttga

SEQ ID NO: 282953 - DNA, 141 bp, Morganella morganii
atgaacaaacaatttgaagcgatgatccgccgcatgtacggcagccggtacagcttagagcgggatatggaaggcaattacgcccgtgaaattgttcgccgcatgtttgaagtctggcgtgctgctaaggggatcaaatga

SEQ ID NO: 282954 - DNA, 321 bp, Morganella morganii
atgatgaaaacaactgatcagtacctggtgcaaattatcacagtcgccggtcatgacccatctgatattacagatgctgtctgggctgccggttaccggaaaacagactttaccactgagcaggttatcgaaatggcggttaaccagaccgctgataccgtgctgaacggcttccctgttgagacactgcctaaaacgctggatgacctcagtcagtaccatctgaatgggattatctttgaagcaaagtgggaaggtacgcctgcagcagtggcaaatgcagtattggtgaacgggtataaaaaggagtgtgaaaaatga

SEQ ID NO: 282955 - DNA, 189 bp, Morganella morganii
atgagcgattactggagtacggcggaggttgccgcttttctgaaagtaacggataaaaccatcattcggtgggcgggatcgggaaaacagaaaaaagacggtttcccgaaacccaaatatacgacgaagcaacatcaatttgatccggaagagatcatagcgtggcgttctggtaaacgattttattaa

SEQ ID NO: 282956 - DNA, 1236 bp, Morganella morganii
  misc_feature (692)..(701): n is a, c, g, or t
atggggtgtgatatggctattacagattcctggcttcgttctgtgaacggaaagccacaacaaaaaatgctgacaaaatcggacagggatggcttatctgtcagggttacgccgctgggtaaagttgtatttcaatttcgatatcgatggaacaataaaggtgagcgtatcgatataggtacttatccagctaccggcctcaaagaagcgcgtgacagtgctgtgttttatcgtggtgaaattgagcagcatcgaaaccctaaggtggtaaaacgagtaaaaaaacagcaagcattggcatcttatagtgtcgagatggttattcgcgaatggtgggctgtttcactaaaagatatacaagttaaagccgatgaaatactgaggtcttttgagatttatgtctttcctaagatcggtgaattgccgcatgatgagacagatttatatgtgtggttacctttgctggagagtgttataaaaaacaaacaagcaacaggtgcccgtattttaagctatgcgaaaactgcgcaccgctgggggattaggcgtggtttaataaaaaacaatccgttagctgatttatcaccagtggatttcggtgttaaaaatataccgagagatcgggtactggctgacgatgaattaattttacttttcaaaattattgatgataaaaaatttaatccaagaannnnnnnnnnaagaaatagagttattattaaactagcattgctctttggttgtcggattggtgaattacttaaagcaaaaataattgattttgattttaaatctgatatctggacagtaccacctgaaaatcataaaaccggaaataaaagtaacaagccactaatccggccaattattgcttctgcgaaacaattgataaatgaggcgatttcattgagtactggggagtatttgtttaccgtgtctaggggtaggaagatggtggagggtggtcattatagttttattcgaagtttaaatgcgaaaatgtctgttcattacaatgactataaaacatggtctatccacgacctgcgcaaaaccatgcgtacaggtatatctgacctgactatgcctcatgtggctgaaattatgctgggtcacaaattgccgggagtatggcaggtgtacgataagcacacctaccttgatgaacagcgcgaggcttatgaaaagtggtgggataaggttaataaaatcgtttaccagaacgccacgctatga

SEQ ID NO: 282957 - DNA, 435 bp, Morganella morganii
atgaaaactaatgaattaatatttttattagaaaatatgtcaaaaataatggcatattatccaaataaaaaaatagaatatgtacttgtagatatattacatctacttgaactccgagagttaaaaataaaaaacactaaagaaatcgctaacaaaaaacaaaaaacgaccctaaaaaaaacaaatgatgaaattaattcagtagacacagaacctgaaaaatcgaccttaaccacctctttaaacaataaagaaaatgaaaacttaaatcacttatctgttagtgagctaaaaagaatggccagcaacattggtataaaggcttcatcaagacaaaataaatcaatattaataatgaatatttcaaaaaccattgaaagaagaaggattgattcggttattaaagataaggacaacaacatcgataaaaaataa

SEQ ID NO: 282958 - DNA, 270 bp, Morganella morganii
atgctcggtattatatttaatatggtagatgagtatagtgaaaagcccaaagaaactcacgagaaaaccattgcagatgtaaaaacccaacatcaaaacatggtatttgaaaattatataactaaaggagatggtatatcggttgcttctgaaaacaacttaactgttttcagtcatgcatcattacctcgcgccaaccagaatgcagaaaaacaatgcaactacctaaccaaaatagtgaatgaactatatgaaaaactggataattaa

SEQ ID NO: 282959 - DNA, 237 bp, Morganella morganii
atggaaaacattcaacgccgttttcagcgatggaaaatcattatggtaccgagtgaaaaatcctatgaaagctgggatgccatggtgactggtgaaaactttcctgaagaagcacgacagacttacaaaacgcaccgaaccaaagcaattgatcggacattaaaacaacctgattacgtccatacaatgtcagaaagtggaataactgtccgctaccgtcttgaacgctggaggtaa

SEQ ID NO: 282960 - DNA, 303 bp, Morganella morganii
atgaacgcagaattaacattacgaaccattggaactattttgagcgtaatcggctcaatacttataacttggaggggatataacattctcaaatgggtgaaactcaccttaaatgctcatgaaatatcgctggttgctattaagagtattatcaacaatagataccagcccgcaccaatgatagaaggcatgactactcatttggataattacgaaaaaggtccgggagctaaattactggttgctggatttattgctatcattgcaggcgttctttgttcggcgatttctttttgggtgtga

SEQ ID NO: 282961 - DNA, 450 bp, Morganella morganii
atgaactggaaagaagcggtaatagccgcgctgttcatcgccaccgcctggtgggtatacgacacctaccgggataaccagcaactgaaagcagataacacgaccctgagtagtcagctcgcagagcaggtcaccatcaacaaggactatcaggaacgcgcacagaaacttcatgaactggataccaggcacacacaggagctggcaaatgcaaaaactgaaattgaccggctgcgtattgctgctgaccgtaaccctgagcgggtgtacatcaaagccagttgtccaaagaccggcagcgataccgccgccagcatggatgatgcagccaccgcccgacctgatgactccgctgtccgaaattattggttactccgagaacggattgcagaatcagagcagatgattaaagggctgcaggactacatcactgcggaatgcattaaataa

SEQ ID NO: 282962 - DNA, 654 bp, Morganella morganii
atgaaatctagagaattaaagactattcataacctgattgttactaactataatgtagttcctgtcacagcaactcaattccgtcactccttcactcctctgacaacagatacagaatatgtttattacggaaattccgaaccaatcttaaaaaatggtgaccgatgcacaattggctatgatgaaaatgaaaataatgaaaaaataattgaccgctcgtctctttcaaagatagagaatacagacaaagatatgagttttttatattcgatgtatttatcaaaacaaaaacacgatgaaaacaaagctaaaaataataacagggtcactccacacatagtaaatggtaaatattattggggtaaaaaatatgcttggagagagtttgggttatttatatctcaggatgcatttcataaatacatggatagcataaatcataccaaaattaaatgtactacagctgctgatggttatcctcaagggcaagattcttttgcatacctagaagatggcattgccgatgcaatgaaaagattagtggattcagctgaaatagtaaagaatggcccctattttaaatcacctttatatatggaaggtaaaaataaatttcaaataagaggaactcaagccattacggataaaaaatag

SEQ ID NO: 282963 - DNA, 594 bp, Morganella morganii
atggcacagcatagctttatcaaactccccaatgatactcttgcgcctgcaaatccggcagcaagggattacctgcattcaaaagttaagtgcggtgatgtgctgtcagcagacttcaaaaaggcacgtaacccacgatttcatcgtaaatatttcgcactcctgaacctcggttatgaatattgggaaccggtcggcggcactatttcgccggaagaaaaagaactggttcgcgggtatgtgaaattcctcgcgtattacacggacaatgacgatgctctgcagacagcggctgacgtctatcttgatgatgtagcacaaaagcgcgcgcagaatattaccgcgacaaaatcctttgacgctttccgctcctgggctatcgagcaggccggccagtacgacacctacgaaatgcctgatggcagcctgcgccgtgtcgccaaatcaattagctttgccaaaatggatgacctgcagtttggcgaactttataaatccacactcgatgtgctgtggaacttcattctgtaccgcaatttttccacgcaacaggctgctgagaacgcggcagcacagttattagattttacctga

SEQ ID NO: 282964 - DNA, 288 bp, Morganella morganii
atgatgacaaagctgaacataattttactctcagttgcagtagttacagctgccggatgcgccatacgcacaccggttatcacaacggttgactgtaccgcgttctaccgggaagcaactttcccgaacccggttcacaaactgcacctgataaaaaagaaagacgataacaaacggcaccagaacaccatctggtacaaacaatccggcctgaacggggttaaattctccggtggctggatcccggaaaaagtactggagggaacggaatgtcggcattcggaataa

SEQ ID NO: 282965 - DNA, 3180 bp, Morganella morganii
atgacacaaatcacaggccacaaaggcggcggtggcagcccgcgcacgcccgtcgaacagccggacgacttacagtctgttgccaaagccaaattgctaatcgccctcggtgaaggggaatttgccggtgagctgaccgggaaaaatatcttcctggatggtacaccgctgctgaatgctgacggttctgaaaatttccccggtgtggtgtgggaataccgccccggtacccaggcgcaaacctatattcaggggatgccggcggcggagaatgaaatcacggttggtaccaccgtgcagagcagcacaccgtgggcgcatgcgtttactaacccgcagttgtctgcggtccgcgtccgcctgaaatggccgtctctgttctgccaggaggataacggggacatggtcggtaacgaggtgaaatacgccattgatttgcagactgacggcggcagctggaaaaccgttgtggatggacgggtgaaagggaaaactacctccggttatgagcgtacccaccgcattgatctgccgcagtcggccacatcctggacactgcgtgtgcgtaaaatcacggcagatgccaacagcgcaaaaattggtgacaccatggtgctgcagagttacaccgaggtgattgatgccaaactgacctatccgcacaccgcgctgctgtatattgagtttgactcaaaacagtttaacggctccatcccgcaggtcacctgcgagccgaagatgcggatcatccgtgtaccgtcaaactatgacccggagcaccggacgtattccggtacctgggacggttcgtttaaatgggcatggaccaataacccggcctgggtcttttacgatatcgtgatttccgatcgtttcggcctcggtgaccgtatcaaaattcagaatatcgataaatgggagttgtaccgcgttgcgcagtattgtgatcagccggtaccggacggcaaaggtggcagcggcactgagccgcgctatatctgtgatgtgtatgtgcaggatcgcaatgaagcctataccgtgctgcgggattttgcggccatcttccggggaatgacctactggggcggaaaccaaattatcaccctggcggatatgccccgggatattgattacagctacaccaaagccaacgtgctggacggtcgttttacctattccggcagcagcagtaaggcccgctattcctccgcgctggtgtcgtactcggatccgctgaacggttatgctgatgcgatggagccggtgtttgaaaatgaactggtttaccggttcggctttaatcagctggaaatgacggcaattggttgtacccgtcaatcagaggccaaccgcaaaggccgctggggcatcctcaccaacaacaaagaccgcgtggtgacattcggtgtggggctggacggcaatattccgcagccgggctacatcatcgcggtggcggatgaaaacctgtccgggaaagtgaccggcggccgcgtcagtgcagtgaatggccggagtatcaccctggatcgcaaaccggatgccgcgcctggcgatcggctgatgctgaacctgccgtccggcaaatcgcaggcccgtaccattcagatggtcacggataacgtgatcactgttaccacggaatacagtgaaacgccggaaccggaatgtgtctgggtaacggaatcagatgagctgtacgcccagcagtaccgagtggtgagcgtgactgagaatgatgacggtacgttcacgatatcggcggcgatgcatgatccggacaaatacgaccggatagataccggcgcggtactcgatgaacgtccgatcagtgttattccgcccggcaaccaattcccgccgaaagatatcaccatcagttcttattctgtcgttaaccaggggatcagcatcgaaaccatgcaggttacctggtcaccggcggagaacgcgattgcttatgaggcgcagtggcggcgtgatgacggcaactggatcaatgtgccgcgcaatgccaccacctcgtttgacgtgccaggggtgtattcaggccgctatctggtgcgggtcagggcaatcaacgcagcggaaatctccagcggctgggggtattcagaggaaacccggctgaccggcaaggtgggagatccgccaatgccgctgaacttccgtgcgtccacgctggtattcgggatcaaactgaactgggaattcgggaaattcaccgaagacaccctgaagaccgaaattcagtacagtaaaacaaatgacgggcagaacctgttactgctggctgatgtgccgtacccgtcccgctctcacgaactggccggtctggctgccggtaccgcgttttatttccgtgcccggctggtagataaaaccggcaatcagtcaccctggactgagtttgtgcgcggcgtggccgagttcgatgcatcaaccattattgacgaggtggccgccgggctgggtgactcacaaatcatcaaagacctgcaatcacaggcggatgataattttgaggccatcatcaacaacgccaacaacgcatacggccagtggggctactggcagcgcgaaaacggcgcgatgaaagcagaaattatcgaagtccgcaactacacggtcacggaaacaactgcacttgcagagaaactggacgcggttaaggtgactgctgacgacagtttcgccatggcacagaactccatccgcgcgcagtgggatatggccgccggtgaagcatcggtggtccacgatatgaaagtccggatccattacaacggtgaggactattccgccggcatggttatcggggccgagctgaaaggcggggaggtgaacacgcttatcgggtttaatgcgcagcagtttgcattttataacccggtgaataaatccatggacctgtttatgtatatgaaggacggtcaactttttgtcaaagaggcattcatcagtgaagcctggataaagagccttatcgttatggatagtatccggtctgaaaattatgagcagggtaagcagggtgtttttattgatatgaagaccgggaaaacagagataaacggctctgctgctgatggcggacgtatggaattcaaaaacgatcagcttcgtgtgtgggatgagcaggggcggttgcgggtcgaaatcggaagattaacggggtaa

SEQ ID NO: 282966 - DNA, 477 bp, Morganella morganii
gtgcagccgaaggggctggatgcatccgttaccggcacggtcgatgcctctgccgtattcacctggaaagatattaatgccctgaaacacgccattgacccagcttaccgtaacaacccgaaattccggctggcttttaatgacagcaccctgaaactgatgacagaaatggaagacggtaataagcgtccgctgtggctgccggaaatcaccggcgtggcaccttcgaccattctgggtatgcagtatgctgtggatcaggctgtcgacagcatggaaaccggcaagaagtttatcttctgtggtgacttcgatcgcttcattgtccgccgtgtcacctatatgacactgaagcgtctggtggagcgttatgcagaatatgaccagactgcgttcctcgcgtttcaccgctttgactgctgcctggaagacacctccgcgattaaggcgctggtggccaaagctgcagcaaagtaa

SEQ ID NO: 282967 - DNA, 585 bp, Morganella morganii
atggctgagtggaggggggttccgtatttttttgatgcaaccggtaagttgcaggaacaggtttctgtggttgttgggaaaattccacaagtagtagtggaaacctccttttcttgggagaccgtcatcagcgctttctttgccgcattaataccttcttttattgcttggtatgctttaaaaaataattacaaattagccgaatatcaaaataacttatcagcaaaagagaaatggattggtgattttaggagtgctctggctgaatatgtggctgaggcatcaatattaacagcaaaactaataaccttgccatcttgtgttacgagagacgaggaaagagcagcggaattttccaagtataaattgttactattactgagcagcgcaacggaatgtgaaattaaattagcaaaaaatattgtttcaattaataacttaattgtaaatcttaaaaaaaatacaaatggtctatttgtaaatttacaaagccgtaaagatactggggctgaaatacaaaaacacttacaaaatttaatggtgaattctcgggatgttatacttgctaagtatggcaactactaa

SEQ ID NO: 282968 - DNA, 1017 bp, Morganella morganii
atgaattacctgttaaccggttttgtccaaaaagatgcccggatcctgatgtttaatccgggtgcggagatctgcaattttctgaacggtgcccgctacctggtgagcgcggcgccgcactcgatgaatggcattccgtccggcctggtaccggcagatgcacagccgctgctgacagatgagcgggtactgcgtttcctggataatcctgccgtgataaaagccgccggcggtttgtccggttcccgtcactacgttaaatctgtgggctactgccagattgatgatccggagaacccttaccaccaccacgaactgaccatgactcgccataaagacggttttatccggacatgctggcaccatgacaacatcttgcgggcgggtgatgtccaccagcagcaggcggacgaaattctgttacacaaccaacgggcgtttgtggcacgcagcatctttaccgatctgcggctgccggctggtcatcttcttaatccttccgatttgttcacctggtcggtgatgcgccgcgtcagtgatcatcttccggcctttatcagttcctacattctgatgcagaaaccggaggaagagataaccggcaccatgacagagcattccattgttcatcaaccgcgctcacacagccggattgttcatgacatcgtcgagcagataaagccggtcgttgttcctgagatagaaccggagccgccagcaagttttatgcggatcccgaagttaaagcgctgggagagtctgaaatacctgcagtgggtgaaaagccagccgtgttgtgtgtgcggccagcaggcggacgacccgcatcacatcatcggtcacggtaccggcggcacaggtacaaaagtacacgacatttttactatcccgctgtgccgggttcaccacgacgagttacaccgggatccggcagcatgggaagaaaagcacggcagtcagctggagttgttatttaagtttatgaaccggtcatacgggatcggcgtttttggttaa

SEQ ID NO: 282969 - DNA, 789 bp, Morganella morganii
atgagcaatctgattattgtcgatggtattaatgtgcgccgtgatatggccggtcgctattgcctgaatgatttgcatcgggccgctggtggagaggaaagacataagccgccttactggctgagaaatgcacagacagagcaacttattgccgagttgcaaatctgcgactcgggtacacagccggtaaatgtgttgcgtggtggcaccgagcagggcacctatgtgtgcaaagaactggtttatgcctatgcgatgtggatcagtccttcattcaatctgaaagtgatccgcacgttcgatgtggtggccggaacacagcaggcgatacagctggctgataaggttcaggccggagctatcctgctggagtctatggcgaaaacactgaatctctcgaattcctcaaagcttggcgggtatcagaagctgcaaaagatggctggtcttcctgatctggctccgtcctatacgattgatgcaccggcgggcgcggtggatggttccagcagaccgacaacatccttgactacactgctgaaaaatcacaatgccgcattgtctgcgaccagagcatacaaacgccttgctgagctggggattgtggaacagaaagcccggccaggatccagaggcacacagcgcctgttctggtcgataacaacgcggggactggcgtacggtaaaaatatgacatccccggcaaatccgcgggaaacgcagccgcatttctttgagagcaaatcagcggaacttctggcactgatgatgactccggcggtggcctga

SEQ ID NO: 282970 - DNA, 153 bp, Morganella morganii; identical to SEQ ID NO: 280032

SEQ ID NO: 282971 - DNA, 708 bp, Morganella morganii; identical to SEQ ID NO: 277634

SEQ ID NO: 282972 - DNA, 198 bp, Morganella morganii
atgcaaacagaacctaccatcaccagcaatatgtcagccgccgatgtcgcactgtggatcaccgacaaagcaaagtccattaataagttgcaggtgctccgtgattcgagagcaagccaccagcgtttaattgatcgcctggataaagagatcgctgagtgggaagaccgctgcactttaacagtgcaaccgcagtaa

SEQ ID NO: 282973 - DNA, 279 bp, Morganella morganii
atgacggagaaaacggtcaaatgccgcctgacggcgctctgcggcttcgctttccggattacccggctgctttccgcgctgctccggttctttgtcatccacgaaggtctgatctgccgagcgcagttcctcttcgcgggtgatctgctcattcaggcggtcaaactcagttttggcctgattccactcgccgcgctgctcctcggtcatgacaccgtcaccgactttttcatggatagcacgcatttcggtggcgatagtattacgtttttgttttaa

SEQ ID NO: 282974 - DNA, 693 bp, Morganella morganii
atggactcaggaaaatgggacaactgcccggagaatgcgccggatgatgaactgaaaaattaccctgcctgggtcggcgttgacctggcaaataaaatcgacgtggccgcggcaattaaggtttatgaagatccgcgcggacaggtgcatgttaagtgcaaattctggctgccggaaggccggatagaaaccgcaccgaaccatattgccgatctgtaccggaaatgggcggctgccgggcatctggaactgactgacggtgaggttattgatcatgacatcatcaaagccgacattctggcatggtgcgaaggtgatgatctgcgtgaactcgggtttgacccgtggagcgcggtgcagttctcacgccgcctggctgaagaggggattccgctggtggaagtggcacagacggtaaaaaacatgtctgaatccatgaaaacagtacagggcgatgtatattccggcaaatttcaccatgaccacaacccgatgatgtcctggatgatgtcgaatgtgaccgtaaaaccggacaaaaacgacaacattttcccgaacaaatcgacaccggaaaacaaaatcgacggaccggttgcgctgtttactgccaaatcacgccagatggtgaacggcggtggtggttccgacttcctttcctctctggatcctgacgaagaaattctattcctatga

SEQ ID NO: 282975 - DNA, 1686 bp, Morganella morganii
ttgttttacaaatcacttgatctcacgaccgatataaaaggattggcaatttggcgcgcacttaccgtctcggaagatacgctcttttttgcaatgaataacttatatgaaacagggtttgggaaagtaaccttaaatcattttttgtggatacatgagttatttgagcataacaaaattgctataaagcatatgctatcagaaatagataaacagtgttttgatagtcatttatgtgtttatgatgatataatttcccctgaggtttacacgcaattattaaaagtttacagagcatcttgtgactatagtcatatttgcactctatttatatcacttcataaaaaattaacaagtgctatgcatcagaatgacgagatacacttcaattataataaaattgatttggagtactccattcttcaccatcacctatcttctgatcccccccttgtagggaaatctgggtttcaagtcttatatgaactaatgtttcttgatattaacaatgatttaattcaaggggtactatcaaatactcatttcgaaggtgagttaataaattatcctcacagccaaaaacttatgtgctacttatatagtcaaatagcctcgttttgctttccagttgatgagaggtggatgttctcttgtttttccctatcggagtttagagcgtattttcgttctttaatttgtatatgtattcatcatactattgctgtactatttaatagtagggttcatggaataaaaggaggtgggcttgagcaaagagtattaagaataaataaatccctgctcaaggagattatttcaaaatattcaggtctatcaaatgagacaattgaaagaattaccgaatttctgacatatggaaaaaatgtcaaatccccagatccggctttgcaaccactcattgatgttggaaatgagtatatcatacctaattacctcgtaatcacatcaaactttgaccgaaatgcgctgactctttacagtagaattgatgaaaaaggattcaataaaaccagtcatttatttgaagtggaaatgacaagaaatattcttagtgagattaatggtaaatttacatctcttacaaacttaatgcttcccaaaaaagaaggtggtgaaattgatctgattcttttggatgaaatctccaaaacaatattgatttgtgaacttaggtggatgttgcagcctagtgatccaaatgaaatttttaatcgacaaaaagtatgcatagaaaaagtagagcaggctcagaaaaaagttaacgctgcaaataaacataaagaacatatcttacgaataggatgttgtagtattaaagatttgagtaaatggaacgtgaaaggagtggttatcttggatgggtatacaggcgtgcaatctgatacgggtatcattatcctacctaaaatagtatttactaaaatagtggagataagtgaatcacttaaagaggtatatgatttttgtgctagctataaatggctgcctcattcggatcactttggcaaaataaatatcagaaagactaaattttccgattatacattctttagtcaaggcataaattcatttgactcgatgcattatttaaaagattttctacccctgtcacttattaatcatagacatggagctgttatgctatatgaaaaatatgttcaatga

SEQ ID NO: 282976 - DNA, 1983 bp, Morganella morganii
  misc_feature (1826)..(1835): n is a, c, g, or t
atggtatctccgcgctggcatattattactggtggttttggaggcttaggtcgaattacagcaagttggttagtaaggcaaggtgctaaacgtatcgctatattggcaccacgagctgatagcagcgcattagattggatgaataacttacagaaatctaaccagctagaaataaaatggctaacatgtgattgtcgtgataacgctcaatgtcatgcagcactcactcagcttgaaaatgaaggtggcattgaggggcttatacacagtgcaggtattttggatgatgctcttatgacacaactcacccctgagcgtatgtctgacgtattttctgttaaagcgatatctgccaaacaattttgtgatgctttagaaaaaacagatgccagttaccttattttatactcctctgccgctgcaactataggctctgaaggacaagcagctcattccctcgcttgtggatatttagatggactagctgaatatgcacgtcgcaatatcaagggattaaccgtcatttctatcgcttggggggcatggcaaagtgttggctttgtggcagaaaaacaactccatgataaattacaacacaaaggtatgagtacgcttactactgaggaaggactggcacatttagatgcttgtctgctagataatacctcttgtcgccttgcaatgcgcttagcaactccacctttaatgacacaaaaaacgcctttatttcatcagactaatcataatgatataaattatgataatcatgaacttaatcacacacgccagctttgcgaaaccccaactcaaacggatcaaacagagccggtaagccctaacagggttgattatcgcgttggtgataacttagagcagtggctaacagcatgtatcaaacaactgttgcgtcttggtgatgaacatattgatactcacattgaactattccaattaggactagattcactctctttcctcgacctcagtgcggaaattaagaaacagtttgcggtcaatattgacgctgaacaatcttatgatgatatgactattgctggtttagcctcagttattcgaaccgcagcacctgagaaatttactgtgacagaagccccccataatcaagacaatatttcccacacaatggagtcagaacgatatgtcccatttccattaacaccaattcaacacgcctattggatcggacgtaaaaacctctttaactacggaggtgttgcttgccatgcgatttttgaatgggattgtcaacgccagatatgggagccggcctcacttgaaaaagcttggaataaggttattcagcgtcatgatatgttgagaatgatcatagatgatgatggacaacaacgtatcttaaaagaagttccttattttcattttattcaacatgacctaacaaatttaacccaacaagagcaagaagagagcctaacacagataagggaagctctttcttatcgggtattaccgactgagtcatggccattatttgaagttgaaatttcttggctaaataatgattgttacagattacatatcaatctagatttactgcagtttgatactatgagctttaaaattctgtttgatgatctatataacgcctattcaggacaagaattaataccacaaacatttaccttccgcgactactgcttaaaaaatcaaacaaatcgtaacagtgatgagtggaaaatggcatggtgttactggcaagatctattatctgatttaccttctgccccatatttaccgataaagaatgcatccattaccgaacaacctcgctttacgactttccaacnnnnnnnnnnatgtttctatagcgcaatgggacaaattaaaacagaggtggaaaaagcatggtattacaccatcagcagggcttttaacactttttgctttagttttaggtcgctggacaaaataccctgcctttacactaaacttaactttctttaa

SEQ ID NO: 282977 - DNA, 501 bp, Morganella morganii
atgacgcaagttaaaggcgctgtaaatgcgttgctatcatcgaattatgtttttatctgcggcgtgggttcctcggggatcacagcagaggatctaaaaaataaactgatgcgtattggatatcgggtggatgctgttaccaataaccattttatgtatatgcaggcttccttattgaaaccgggtgatatcgcgatcggtatcagccattccggaaattcaccggaaacagttcatgcactgaaacttgcaaaagaagcaggggctaccacaattgtgctaacgcataatttaggttcacacattatggaatatgccaattattatctgattaatggtaatcgccaggggaaattacaaggtgattctattggtacaaaaacagcacaactgtttgttttagatttactgtataccctacttgtccaggctcagcctgaaatggtcaaagagcaaaaactgcgtacactaaatgcattgaaaagtaccaattcagcatga

SEQ ID NO: 282978 - DNA, 585 bp, Morganella morganii
atgacggatttgtgtcatattcccggcacgatcatagatatagttgcgggtgtaattggcgtaactggctttatcaaacggggaaatatccggcagggaactgcgttgctgtccggcattggccatctcgcgcccggtggcgctgaccagctgatacagtgtgtcataggtgtatcggttttccggcaccactttctgattatgccagaatcgcgtctcctcggcgctattggtcacacacagcacattgccgaccggatcgtattcataacgcagatcctgaaatatttttttccgtgccggatgttcggttttgacagcaatcaggcgctgggtttgcggttcataagtgtaagtggtcactacaccgttaccgtgctcctcacacagcttctgcccggcagcggaatacgtcacagatttgataatgattttttccgtcccgcctttcaccgtcacccggctggtgctcagcaatccggcgatatcataagtgactttctgctggtgacccgccgcatccgtggtgttcagcaccgcaccggtcgcatctgccgtggtctgtgtggtgtatttttcggctga

SEQ ID NO: 282979 - DNA, 363 bp, Morganella morganii
atgagcgaaaataaccgcatgaccagtgtacctgagtttctgggcgatctggatgccggtgtgtttatgaacaaaatatctgccgcgcttaataatgtcgctttgggtacagacatgaacggcggtaccggtgaagtgcatctggtatttaaatttgtacaaatcgatgatggtcgccttgaagttcaacataaactgaaaatggttaccccgaccaagcgcggtaaaaaatcggaagaggatacaaccgaaacaccgatgtgggtcggtaagggcggcaaaatgactctgcttccggaagaccaggggcaattatttggtattgacggaagtgttgacgggaaattaaaagccgttaagtaa

SEQ ID NO: 282980 - DNA, 450 bp, Morganella morganii
atggctgatatggggctggatttatccggttttgctgaactgtcccgtgatctggaattactcagccgggctgaaaatacccgtgtgctgcgggaagcgacgaaagcggcagcggatatgctgcgggatgaggtccggcagagtgcaccccgcagaaccggcaggttagtgcgcaatatcgttaccggcggtcagcggagccgttataaaggtgaggttgtctccggtgtgtacatccggggaaccaatgccgccggaaccaacagtgataacacactgaaaacggacgatccgcgtaatgcgttttactggcggttcctggagaacggcacatccaaaatggcaccacaaccgtttatccgcccggcatttgacggtaaggcagatgaggccgcggatctggcgctgagcaaactcagtcaggctatcgataaggtgctgagcggatga

SEQ ID NO: 282981 - DNA, 273 bp, Morganella morganii
atgcagtgccgtatcgatgaggataatgatcaggaagatgaattactcctgacctatcttcaggcggcaaaaaagcgggctgaaaattacattaaccgcaatttgtatgacagtaacattccggagagcgaccccgatggcctgattgtttctgctgatattgagctggcattgatggtctgtatcggcagtctctatgagtcacgggaaagcggagcaataccggcgggtttctacctgttgcttgacccgtacaggtttataaatttgtaa

SEQ ID NO: 282982 - DNA, 324 bp, Morganella morganii
atgcaggccggaagattaaggcaccgggtcacatttcagcgtgctgagcgggtaacgttgccatccggacaacgtgaaagtcagtggttgcccgttgttgtaacctgggcggaagtcagacccgtcagcggccgggagctgctgaccgccggagcggaaatgtcagaaatcactgttcgtgtatggatgcggtaccggccggatattcatcctgcatgccggatggtatatcgcggtcaggtctacgatattcaggctgtgatcccggatgtgaaatttacccggctggaactgctgtgtaaacagggggtgaaagatggctga

SEQ ID NO: 282983 - DNA, 450 bp, Morganella morganii
atggctgatatggggctggatttgtccggttttgctgaactgtcccgtgatctggaattactcagccgggctgaaaatacccgtgtgctgcgggaagcgacgaaagccgcagcggatatgctgcgggatgaggtccggcggagtgcaccccgcagaaccggcaggttagtgcgcaatatcgttaccggcggtcagcggagccgttataaaggtgaggttgtctccggtgtgtacatccggggaaccaacgccgccggaaccaacagtgataacacactgaaaacggacgacccgcgtaatgcgttttactggcgtttcctggaaaacggtacatccaaaatgccaccacaaccgtttatccgtccggcatttgacagtaaagcggatgaggcagcggatctggcgctgagcaaactcagtcaggctatcgataaggtgctgagcggatga

SEQ ID NO: 282984 - DNA, 471 bp, Morganella morganii
atgtcgggaccaccgaaaaccccgtcacacctgcgtttggtcaggggtaacccatcaaaacgcccgatcaataaaaaagaaccgaaaccgccgtcaggggtacccccaactccgaagcactttaccaagcaggggaaatactggtttaagcggatcggggaagaactcgatgccatgggcgtgatgagttcgatggatgccaaagcgctggagctgctgatcgaggcatataccgaataccggcagcactgcgatacgctggatgaacaaggctatacctacaccacagaaagcgaaggcggcacactgataaaagcacacccggtggcggcaatgaaagccgatgcctggaaacggatccgggcaatgctgggtgaatttggtatgaccccggcgtcccgctcgaaggtaacgattaacacaccagccgaagaagaccctttcgaggcatttatgaaaaagcgcaaatga

SEQ ID NO: 282985 - DNA, 450 bp, Morganella morganii; identical to SEQ ID NO: 282980

SEQ ID NO: 282986 - DNA, 336 bp, Morganella morganii; identical to SEQ ID NO: 279683

SEQ ID NO: 282987 - DNA, 450 bp, Morganella morganii
atggctgatatggggctggatttatccggttttgctgaactgtcccgtgatctggaattactcagccgggctgaaaatacccgtgtgctgcgggaagcgacgaaagcggcagcggatatgctgcgggatgaggtccggcagagtgcaccccgcagaaccggcaggttagtgcgcaatatcgttaccggcggtcagcggagccgttataaaggtgaggttgtctccggtgtgtacatccggggaaccaacgccgccggaaccaacagtgataacacactgaaaacggacgacccgcgtaatgcgttttactggcgtttcctggaaaacggtacatccaaaatgccaccacaaccgtttatccgtccggcatttgacagtaaagcggatgaggcagcggatctggcgctgagcaaactcagtcaggctatcgataaggtgctgagcggatga

SEQ ID NO: 282988 - DNA, 273 bp, Morganella morganii
gtggctccgcaggatgagcctaaaattcagccgccgtggtgtgttttttcactttatgataccggcggcgatgtgctgtgcggtcgtgctgagacaatgaccaatatccagattgatgtgtatgcaaaaaccatcgatgaagcccgccggatccgtgaactgtctgttgctgctgtttctccgctttcaccggcggagttcacagagaggcaggggtatgaagccgataccgcgctttaccgggccacgctggagtgtcaggtctggcaataa

SEQ ID NO: 282989 - DNA, 204 bp, Morganella morganii
atgaaaaagaagcaggttaagctatccagaatgtttaaaggcgggaggtttgtcgggtattgcctcagtgttgatggtgagatgttatcccaccagaccgacataaagatagaaacaacagcgccgccgcattcatctatatctgttagttttctctggcattcgtctgtggttgatgatgctccggatattcaccttgaatag

SEQ ID NO: 282990 - DNA, 192 bp, Morganella morganii
gtgcagccagaaaacgatctgattgctattggttctggtggcccttatgcacaagcagcggcgagagcgatgttagaaaacaccgatctaagtgcacgcgaaattgcggaaaaagcactgaatattgccggtgatatctgcatctacaccaaccataatgtcaactttgaagaaatctcttcaaaagagtaa

SEQ ID NO: 282991 - DNA, 288 bp, Morganella morganii
atgctcagcaccgggaccgggctgataaccggcaaaacgaaaagtcgctgtaaacacttccctgtgcgctcaggcgcgtcatccatgacgcgcatgcttttcgtctctctgttttttacagcgcggatgcttgttagtaataaagagagcggaatgctcagcaccggggccgggctgataaccggcaaaacgaaaagccgctgtgaacacctccctgtgcgctcaggcgcgtcatccatgacgcgcatgcttttcgtctctctgccggttatctgccttttactttga

SEQ ID NO: 282992 - DNA, 258 bp, Morganella morganii
atgaccagagaacaactaactgaagccatcgcagtcgtacacactgagtttattctgattcatccgtttcgtgaaggaaatggccgtttgtcccgccttatcgctgatgttatggcagttcagagtggattaccgcctctggattacagctgctggaaacaacatccggcacattatattgctgctatccacgcagcattaaatctgaattatgaaccaatgaaatattgggttaatcaggcactcagcaaaaactaa

SEQ ID NO: 282993 - DNA, 333 bp, Morganella morganii
atgtcgaacctggtgtataacgcggtaaatcatactccggaaaatacacggattgaggtcagctgggcgctgcgtaacggtaacgcggtgttcagtgtgaaagataacggtccgggcattccggcggaacatctgtcccgcctgactgaacgtttttaccgcgtggataaatcccgttcgcggcagaccggcggctccggtctggggctggcgatagtgaaacacgctttacagcatcaccacacccacctggatattaccagcaaacccgggcagggaacggagttcagttttaccatttctgcgcggcttatcgctaagtcttctcattaa

SEQ ID NO: 282994 - DNA, 342 bp, Morganella morganii
atgaaatctactgactcagagaacgattcatttctaaaatggggactgaatcgtaatgtgacaccttgctttggcgctcgtctggtacaggagggaaaccggctacactatctggctgaccgggccagtatcaccggtaagttcagcgaagcagaatgtcttaagctggatgtggcattcccgcattttatcagccagatggagtcgatgctgactactggtgaaatgaatcctcgccatgcccactgtttcaccctgtaccacaatggtttctcctgcgaagccgatacccttggcagttgcggctatgtatacatcgccgtttaccccactcaacgttaa

SEQ ID NO: 282995 - DNA, 732 bp, Morganella morganii
atgctcccacacctcaatgttaacgatcaccgttatgtcccatcactcgatcagcttcgcaaacaggctcgcttccttagagatcactgcaatgttcaattgaaccatgcctatgagatggtcgcgtatctttatcggttttcaagctggggagagctgctaaatcacaccaccagtgatatagctatcaaggatctgcaaatcgttgctcacatgcgagaagaactccagacatacagaaactgtctgccacaatctgatctgaaacgattatcccaattagcagcgctgaagggcaccataacagaggcagtagtgagtgaccgtataaagacattaaacgatctggatatcgttcagatctataattgcctgtataacgaagaatactggggtgaaccagctccggtttcttggtatgaagtcctcgatgaaactgatagatgtttagtgctgctcgccaaacggactgctctggcggggcgtaccaaaacagtcaatcctcatattagctttccatggtttggattcagaatgtatggatatttacattctggatggaaacacactgaactacaaatgcagagaactggacagctacctatggccctcagaaaaaaaatacaccacggtattctgcaggccgtggtttgctccgtatgtcagcggtttcatccgtatgcagcttcattcactatgcagttctggtttctcagggaaaatttcatttga

SEQ ID NO: 282996 - DNA, 1365 bp, Morganella morganii
atgagtggggggaaattgccggaggggtggggtaaaacagaaataggtgatattgccgacgttatctcaggtggtacgccaaaatcagggattgcagaaaatttcgcctcctctggtgaaggtattgcctggctaacaccagcagacctgagcggatataaaatgaagttcatttctcatggagccagagatttatctacagagggatattcatcctgttcagcaaaattgatgccagcaggcgctatattgtttagcagtagggcccccattggctacgtcgcggttgcatccaataagattgctactaatcagggatttaaaagcttcgtttttacaaatgatatttaccctgattatgcttattactatctccgtaatatcaggcatctcgcggaagaaatgggtacaggtacgacatttaaagaaatttcgggtagcgcagctaaaacacttcccttcgttatggctccactcgccgaacaaaaaatcatcgccgaaaaactcgatacgctgctggcacaggtagacagcaccaaagcacgtcttgagcaaatcctgaaaatcctgaaccgttttcgtcaggcggttttggcagcagctgtaagtggagaattaactaagcacttaacacaaaccaagaaaaatgaagttactttagataagatagcaacaataatcgaccctcatcccagccataggacacccaaaattgatgatgccggcataccatatattggtataggagacattcaacctgatggtaaaattaactttacaagcgcgcgcaaagtttcagtggatgtattcatagagcatagggcgagatatactttaaacgaaggtgattttatctttggaaaaattgggactttaggtaaagcatgtgttttaccgattggaatcaaatatacattatcagcaaatgttatcctcattcagccaattaaagacaaagtatcatcagattatttgagatattttctgtcttcgccactaactatgcaggaaataacacagcaagctaactcaacatcccaagcagcgtttggtattaagaaaatgagagctttcaagtgtaaccttccctctctagtcgaacaacacgaaatcgtccgccgcgtcgaacaactcttcgcctacgccgacaccatcgaaaagcaggttaacaacgcactgacccgcgtcaacagcctcacccagtcgatcctggcaaaagctttccgcggcgagcttaccgcgcagtggcgtgcggaaaacccaagtcttatcagcggtgaaaacagcgccgccgcgctgctggaaaaaattaaggccgaacgcgctgccagcagcggtaaaaaagccgcgcgtaaaaaagcgtga

SEQ ID NO: 282997 - DNA, 123 bp, Morganella morganii
atgctgaaaatattctgctttattgccgttattcttctttcaggctgtgccggggttgatgtcggtgcatccggaggttctgaaggcgcttctgtgggaatcggtacaggtatcggcttttaa

SEQ ID NO: 282998 - DNA, 366 bp, Morganella morganii
atggcaaatgatctcgggttcactgtaaccagtgccggaaaagtgctgtgctttatgagcctgaaaagtgactacagcagctccgagacactatcaaatctgttggttatccatattgcaaagcaaataagcgaattgccattagatgaaatcatcactgaaaatatgatgttttcagttaacaattttgttgcatacattaacgataggtacagtcgccgctatataaaaaaaactttatatgaaaatgactttaaagccatcatcacaatggtagcgttggatagtaatggtttcgcttttgctgataaaatagttgagcagaataatccggtaagtcagtctactctgctctctcctatttag

SEQ ID NO: 282999 - DNA, 348 bp, Morganella morganii
atgtcacgatataaagtattgaagaaatcctttatcaatggccgcctgctttatccgggcgatgaaattgagttcgacggcatggcggggagcaacctactgctgattgaaaccggtgagcgtgtagcggtggatgaagataccaatgccggtaatgataatcacagtggtgatggcagcggtgaaggtggtaccggagcctacggtggtgatggcggcgcagataatgaactggccgcgctgcaggatcagtaccagcagctgtttggtaagaaacctcatcacaatgccggtgccgaaaaactccgcgcagatattgacgcgaaacgtaaagaacttggggtttaa

SEQ ID NO: 283000 - DNA, 183 bp, Morganella morganii
atgacaaaaacacaacacatcgcctttgtcaccagccgggtgttcgcggccagcgcgtggtatggggctgaatacttccctagtcattttgctctgtatgcaaaaacacgcgagctgatagctggcgacagggcgcaggcaatatgtcaaaaggtgattgatgaggagcggaacaatggctaa

SEQ ID NO: 283001 - DNA, 357 bp, Morganella morganii
atgaaaacagtaaaaacgagtgagctttcaggccgggcgctggattgggctgtagcgatggcaggcaaactgaaggtgtcaatcaatgagcttggcaatgtcttggtgaaagatgaaagatttattggtgtctataagccatcggagcgatgggggttgtgcggtaagtttattgggcagctatggatcgaaatatccgtggaagaaatcgatggtgttgattattggtatgcatcaccgcctcatctggttggcgactatgcaacaggcagcacaccgcaggaagcaatttgtcgcgctgtggtaatggttgagttcggtgacgcggtggaaataccagaggaactgctgcaatga

SEQ ID NO: 283002 - DNA, 222 bp, Morganella morganii
atgaaaaaagtggtggttatatcctgtttgctattttcatctgcgtcttttgcagtcagctttgattgcagtaaagcacagagtaaaacagaaaaactggtgtgcgatagtccgtcattatctcaggcagatgatgaattatatgcagattacctgcaggcaaaaaaatcaccggaaacagtgatgagtttagaaaaattgtcagagaaaaccggaaactga

SEQ ID NO: 283003 - DNA, 537 bp, Morganella morganii; identical to SEQ ID NO: 105514

SEQ ID NO: 283004 - DNA, 447 bp, Morganella morganii; identical to SEQ ID NO: 105515

SEQ ID NO: 283005 - DNA, 981 bp, Morganella morganii
atgagcctggagaaacgtatgagttatgacgatttgccctattttcgtgaccagattctggaacgcatcgactcgctcaagtgttttctttcgaacacccccccgatgatggcaaacctgatgactgtctccaccgtatctcgaacagaagagcgcctgaagcaggttaaacccatcagggttagtattaaagacgatgcttcggttgaggaaattattcaggcacttactgacatctgtgtggatgacatagagtcattaagtcatgattccaccaaagtaaccactaaatacccgggtctaatcattgtccccgaaagagcagatcttctcgaaagcttgatcacttctataaacgaagcaaaaaatgattttgctgcggcaatgaggcgtatcgataataaaaagaatgtccgttttgataaagtgcacaagaagctcccgggccttgtcgctatgcactcaacaagaaatatccttttcatcaagtcccagcttaaaaaagttactttttcatggcggctaaaccgaaaccaggaagttaaaacagcagagcaacttgtgagtttgttggagcgcaggagagcctcagaagtaaaaaatgtagcaactaccaatttgaatgtcgtgtctaatatcgataaggctttacaccgtcttgaatttcacccactgaagcagggcgaatcttatcgcctttgtcgaactaactctttccctgttccgattgctcacatttttgcatttaggcctgaagggcaggaacgaaacgggaataaatatgctgagactgattattcagtagtaaaagcatccttgcccattttcgcagcaggcaacatacctcaattaaaaacgctctctgactgggctcctgaaaacagccagggtccgtccaaccaacggaagctgagcctgaaatatacagaactcgtgccgggggctgagctgggcattttcattgtcagccccgaaaattaa

SEQ ID NO: 283006 - DNA, 906 bp, Morganella morganii
atgcaatggatttccacagccagccagaaaatcgatgagcgtctctatcgtgtctgcgtctgggtaaaaaaatatcacgctgatgcgattaaccgcgttgtgctaaccgttgatctaagtaaagcccgacatgaccctgacgaggaccaggtaagagcagagctgctgtgcggccattattttttgcttcgtaaggaaaacgcttcgaactctgcgcctgatgatcaaaagtttgctttcctgcctgacgggcgcaatctgtgttggcagaccgcaaccccggtgcttcagcatctcctactcaataaaaacgttcctgagtcgctgaggttgcttacggactacatacatatgcgtctggccaggctgacaatggtacctatgtccggaaccatcatgaacgaggctctgctggacagcatcagctgggttaaggtggatttgacctacttctggcagtacgaacagctcagctctcatctgggacccatccagataacccacaaggcacttgtacgcttcgggcacctggcaaagaatgatgaaaactccagtgccataagaattctgcgtcagcgtctgtcttcagaattcttacaagaatttcagatggctgaggatgagctaaagcgcaaacagtcgttgatgggcaccatggacgtgaaaatgctgtttcatgctcattaccccagccagaagatgctggtggctcgatataaaaatggttgggtaatggtggattgttttctgtttcaccataccaaacctaagaaaaaagcaaaaaacaaaactactgtggctaagcctcaacttaaacagactaaaagagaagggagtgaaaatggaactgggcattatggtgtgcatcgtgttgttactctcagtggcggcggcgtggatcagtaa

SEQ ID NO: 283007 - DNA, 330 bp, Morganella morganii; identical to SEQ ID NO: 105518

SEQ ID NO: 283008 - DNA, 1176 bp, Morganella morganii; identical to SEQ ID NO: 105519

SEQ ID NO: 283009 - DNA, 213 bp, Morganella morganii; identical to SEQ ID NO: 105520

SEQ ID NO: 283010 - DNA, 1083 bp, Morganella morganii
atgcgtaagagttacacatttggtattccatttggactccagagagaatcaggactctttttagatattacagaggtcagccggggtatcgactgtaactgcatctgccccgcttgcaaaactgatctgttagcaaagcagggggaggtcaagctttggcatttctcacacagtactgctgtagccggtgactgtgatggtctgatggaagccatccggggaaaaattattgaagtcatcaacgagcaccaggttcttggtttcccaaatcttctcgctggcgacgatggtgggccggtttcactgaatgaggttagtggaagcggcagtatgttcggaggcacagctgatctgttcgtaaaggttaatgatttatgtgtggccgtctttctggacagggatcgtagcatttctgcgaagttaacctttgaccaccttcatccttccgaaagagttgccgcattgcgtatcgatcttccagatattgaatatgaaatcagtcaggtgcagctcgggcgacgtaaaacaacatacagtgagtgcattgaaagcctgatcattgatgagaccagttcccgggaatggctatatcatccattaatgcatgaacttgaatctgaacctcttcaggagtatcggggacgggagccttcagaggaagggcctcttcttcagcgccttgctgactgtaagatgaaattgcctgatatccttccgggcagtcataacgcgttagtcaggttacagcaggatacgattgtatgtctgtgtcggttaacggttcgggcttatgacattgctcagaccgatgaatttcctttgttccttcgctatttcaggttgcactgcctggaaaacagcgaacatgtcagttacgaaagactgatctgctggcaggaaatgatttcaaaaacccaggaaggccagtccttgacacaaaacgaacttgaatatcttcatgagattgtccgcatcgccttatacaatcaccggcttaacaatgtcagtatttcagatgttaaaaaccatgacacaggaaaggagagcggcagggtagagccacaaaactattcactcttataa

SEQ ID NO: 283011 - DNA, 1557 bp, Morganella morganii
atgatgaccgcactattgcggtgttgtggtaagggatacgctttttcggtgatcaatatggcaaatatcgttacgtgcaaaacaaaggacggcgaaacagtccagtatgttgacgaggtaattggttcgggctcgatgaaggatgtttacttttcgcctgataaatcatacgtcgtcgctttttatcataaaccgcagaacgagcaggcccgggatcggattgatatgatcaccggacgctacaggcaaaacatttttggccagtccggaggtgaatactggaaggacctgttttgctggccgacccatgttgttgagcatggggataaaatcggcatcgtggttccaacctacaaaagctactttttctttaaatacggctctaaaaacgatgattttcttggcataaaaggtcgtgaaaaggaaggcaaatggtttgccagcgccagcaaccagaacaaatttctcgacccacgtgaacgaggcaatacgcttacctatctcaaggtctgtctgctgctgacaagagccgtcagaaggatgcatgcggcaggtctctgtcacagcgatctaagctataaaaacgtgcttatcgatccagaaatgggacatgcctgcatcattgacgtagacggcctggttgtccctggaaagtatcctcccgacgtggtgggcaccccggattttatcgctccggaagtggtgaaaaccagtcatctttccaaagaggatccgaaccgcgtattgccaagcattactactgaccgtcatgcgctgtcggtgcttatctacatgtatctgttcttccgtcatccgctacgtggcggaaaaatacatgacatgtcggatgaagtacgtgatgagaccttatctatgggtgagaaggcactcttcattgaacatccgacagacaaaagcaatgcagtcaaagtcagtcagctatcgtccttttcactgccctgggctgacccggagaaaattccttacaccatcatgggcccttatctgacacctttgtttgagcgcgcctttatagatggcttacacgatgccactaaacgcccgaccgccgatgagtgggaaagcgccctggttaaaacagtcgatctgatacagccctgccagaacaaggcgtgtgaacagaaatggtacgttttctcgggtaagacaaagccggtttgtccctactgcggtacgccatacaagggtaaattaccggttctaaatttatattcttcccgaaaggaaggcagttatcgtcctgacgaccaccggttgatggtgtggagcgggcagtcaatctatgcgtggcatgtgaatcgcctcattgcgccaaatgagcgtacaaccgatttgcaaaggaaacgagttgggtattttgttttccataacgatcagtggtggttagtaaatgaaggcataaatgggcttatgtcattaccggataaacgacagattgccattggggaaaaaattgaactgacgaataacgctcagtttgttctgtcaaaggaggaaggcggcaggctggtcgtcgttcagttagtagaaaactaa

SEQ ID NO: 283012 - DNA, 1638 bp, Morganella morganii; identical to SEQ ID NO: 105523

SEQ ID NO: 283013 - DNA, 1041 bp, Morganella morganii
atgagacgccttcccgtgttttttgtcctggactgttcagagtccatgattggtgaaaacctgaaaaaaatgactgatggtctgcaaatgatcgtcggagatttaagaaaggatccacacgcacttgaaacagcctgggtttcggtaatcgcatttgccggtgtagcccgtacgattgtacctcttcacgaaattgcctcgttctaccctccccgccttcccgttggcggcggtacgagccttggggccgcattgcgtgagctgaccgtacaaattgatacccaggtcagaaaaaccactcatgaggcaaaaggcgactggaaacccgtcgtgtacctccttaccgacggacgtccgactgacgacacaaccgcagaagtgaagcgctggaaggatcactacgcgagaaaagtgaatctcattgccgttggcctggggccgtcagcggacctgaatatcctgcggcaactgacagagaatgtcatgctgttcaccgagtctcaggaaggggactttacccgcttcatcaaatggatcacggcctcggttacggcgcacagccgcagcgtcggggacgacaaacaacctgagctcagccagactgaatacatagtccggctggccaaggacgagccagtaaaagcgtacgacgaaaactgcgttacgcttaccggccgttgcagcaagacccgtcgtccgtacctgatgaagtatgaacggccaccagcaagggtttccgggctcgatttcagtctgaacctgaacagctttaatattgccggatgctatcccatcgatgaggactattttgcgtggtcagatgccaccgctaccggtttgcaggtaaataccagcgaactgcatggcgtaccgggttgcccccactgcggtaatgccagtgcgtttgccctgtgctcatgcggaaagttgctgtgtattgacggcccggatgacgtgatctgcccgtggtgtgaaacaggcctgtcattcagcaatgatggcggaaacactaacttcgacgtaaacagagggagaggttga

SEQ ID NO: 283014 - DNA, 639 bp, Morganella morganii
atgcgccgcctgcctgtttaccttgttatcgacacatccggctcgatgcgcggtgagtcaatccattccgttaacgttggaattcaggcgatgcttagcgctcttcgccaggatccctacgccctcgaaagcgttcatatctccattatcacctatgacaatgaggcgcgtgagttcattcctctcacgccgctggaagacttccagttttctgacatcgttgtgccaagcgcaggcgggacgttcaccggtgctgcccttgaatgtctgatgcagtgtgttgaacgggatgtacgtcgctcagatggtgataccaaaggagactggcgtcctctggtattcctgatgactgatggaaccccttctgatgccctggcgtacggtgaagcggtaaaagcgattcgcggccggggattcggatccatcattgcctgcgccgttggtcctaaagcaggccatgagcacttaaaacagctcaccgataaggttgtgtctctggagacgctagattcaaccgcgtttgcaggtttctttaaatgggtatcggccagcgtgtcttccggcagcacaagcgcggggatcaataacggaactgatacccttccccctcctccaccagaaatccagctggtgctctga

SEQ ID NO: 283015 - DNA, 642 bp, Morganella morganii; identical to SEQ ID NO: 105526

SEQ ID NO: 283016 - DNA, 639 bp, Morganella morganii
ttgagacgcttacccgtatatctgctactcgacacgtccggctctatgcacggagagcctatcgaagcggttaagaatggcgttcagacgctgcttaccacgctgaaacaggatccgtatgcactcgaaacggctcacgtgtcagtgatcacctttgattcttcagcccgacaggcagtccccctgacagacctcctgagtttccagatgccagcactaacagccagcggcaccacgtctcttggcgaagcgctttccctcactgccagctccattgccaaagaagtacagaaaacgacggctgacactaaaggtgactggcgtccccttgtattcctgatgacggatggaagtccgaatgatgactggcgtaaaggcctgaatgactttaaagcggccagaaccggcgttgttgtggcatgtgcagccgggcatgatgccgataccagcgtcctcaaagaaatcactgaaatcgtggttcagctcgatacagctgacagttcgacgattaaagctttctttaaatgggtcagtgcgagcatttcggtaggcagtcagaaagtggagtccagcaaaaaagaagtgatcggtcttgaagacctgccaccgccgccgccagaagtaaatgtggtcttataa

SEQ ID NO: 283017 - DNA, 468 bp, Morganella morganii
atgcaattaaataccagacaggcccggatttttaagcttgccaacttactgggcaccggcaagcccgtttccgctgccgacattataaccagtctggaatgctcagagccgacattaacccgggccctcaaagagctacgcgagtcatattctgcggagatcaaatacagcaaggcaggtcattcctaccatctcgttaatccgggccagctggataaaaagacccttcgccggatgaatgaagcgctcgcacagaatgctgaactgaaaaccggtgagtccacagggaaggtcgtactcgataaggataaaaaaacagcagtgtcattatcgctacgcatgcggattctaagaaaaattgaccgtctggctgcgctgagtggctcgacccgaagtgaagcggtagagaagctggctctgcactccgttgatgaactgataaaagaatacagcactaaaaagtcctga

SEQ ID NO: 283018 - DNA, 1209 bp, Morganella morganii
atggggttcaggttcagaaagtcgatcaacattattcctggcgttcgcctcaacctgagtaacggtgcaccgagcctgagtgtcgggccgagaggtgcttccgtttcttttggtagccgggggacctatgccaatctgggcttgcccggtaccgggctgagttaccgtacccggcttgaccgggccgcgcgttccggaggtggaaaccggacggcaaccgacccggggctcagacaggcgcttgagcaggaagccgctgaactcatgtcagcggtaaccgcaatccgtaatattcacgagctgacgccggatccaaaaacaggcatcagctgggcagagctggaagcagtatacctgcataacagaacgtcgccttttcaggttccggcaccggtgcgtccagaaaagccagactaccttgcattgccggaaaagcctgccgagagcgaaggcattagttttctgggtaaatggtttgaatcggaatcagctaaagctgagcgccacgccgaaaatcttcgccggtggcagcagcagctgattgatgtggagcgtgagaatacccttcgacagcaccggtaccagcaacaacggacggcctgggccgaacagtatgcaaactggaagtttgaagctgaagaacatgaaaaacggctcgccacggctcaggcagatgcccggcagcagttccggacagacgccgcgtttttcgaatcatacctggcgggtgtgctggcagaaactgaatggccgcgtgaaacgcttgttgcatttgaagtaaagccggagctatcagcagtcctgctggacgttgatttagctgagattgaagatttccctgataagatttacggcgttaatgcccggggaacggagctgacggaaaaagccatgacgcaaaaagccgtacgcgaaaactatgcccgccacgtccatggctgcttgttccgcctggtcggtatcgttttacatacgctacctttcgacaacgtgattgtgtcaggctttacgcaacgggtcagtaagcggaccggctatctggaggatgagtatatcctgtcctgcaaatgcactcgcagccagatgtcgtcagtaaattttgaaggcatagaacacattgatccggttgaagcgttaggcgatcacccggttattagaaagatgagcagtaccttcatttttcagcctattgaaccactaaccctttaa

SEQ ID NO: 283019 - DNA, 957 bp, Morganella morganii
atgaaaaatcgtctttctccctggaatctgggagccacgctatacatgcctgcaacacgggaagatattgctgatgccgtcctgcatgggaaaatcccgggtttgcgctctctggtaatttgcctggaggatgctgtcagtgaagcagacatccccgtcgccctcaaaaatctggagcacctgctgcacgagctcagtaacagcatgcgtagtctgggtaaaaatgactggcctctggtgttcattcgcccccggcatgccgaaatgggcagatggttaaaagcgcattatgatctttccgctgtcgacgggtttgtgttgccgaaatttaccctcagttcgttagctgaatggtgggatatcatgggcgggactcacctgtgcatgatgccaacgctggaaacagaagacgtctttgacgtggttcagatgcgcgagctggccacccatctggtggaacatccctgccacgaccgcattattgcgcttcgaatcggcggcaacgatcttatgaacgttgtgtcgcttcgccgtccccgggacctgacgctgtatgacagcccgatgggctacgtcatcaaaatgctcgtttcggtcttcggcccgcgtgattttgccctgaccgcgcccgtatgtgagcatattgacgatcatgccgttatggccagagagctggctcttgatatggcacatgggcttgttgggaaaacggccattcacccgggtcagatagaggtcattcaaaacgcgctgatggtcactcagggtgagtattctgacgctctgcggatcctgaactctacccaggccgtgtttaagtcgcagggagcaatgtgtgaacccgccacacatcgccgctgggcggctggcattctggacagagctcgtttttatgggttacagaacgagcaaagcgctgatggaatcagattacttaccgtgacccagcatcattaa

SEQ ID NO: 283020 - DNA, 1080 bp, Morganella morganii
atgcagccacatgacacatttaccggctcataccagcccggtgacgtggaatttctgctaaagccggtagtcattgagatgacgccggttgagcaaaaagaagagctgattcagtcagggaagaaacattattcggacatgctcagtcaggagccagcgccaacacaatggcatcttgatttgtttcaccgggcgctggatcggggcgcagagagacttgcaaaagaagtcacacagctcgctattgctctggccgaacgcttcggtgatgagcccattgtactggccagtcttgtcagggctggcgtgccgctcggcgttatgctgcaccaggccctgcgtgacatggggaaaacctcatggcattacggtatcagcattatccgggatcgtggaattgacggtgcagccctcgacgtcattgaagagcgccatggtaccagcggtattgtctttgttgacggatggacaggtaaaggcgcaattaccggagagcttgtacgcgcactgaaagatcgcccgggctatcctgagcagccgcgactggttgttctggccgatccctgtggctgctcctggcttgcagccagtgatgatgactggctcattccttttggcatcatgggtgcgccggtatcaggcctgatctcccggtcagtatggtcctctgaaggattacatgggtgcatggtttgcgagcatctcagtgaattcgaatgcagccggatgcttgtcgataccgtcgcccatttccgtaagaagttaaccccgtcatccctcgctaccctgagctggaatatggagtcagcccgggtcttatggcagacaagtcgcgacgttatcgcgttcctggccgatgaatttaaagtggacagcgtcaatcgtattaaacccggtattgctgaagcaacccgggctgtattacgtcgggtaccggaccatgtatttgtgcgttctattgacgacccggacgttgccttgcttgtagggcttgctcgtgaaaagggaatagttgttacagaaatggggggaaccctcggccagtatcgggctgtaaccattatcaagaaggtactctga

SEQ ID NO: 283021 - DNA, 774 bp, Morganella morganii
atgaataaacccgttgttctgagcgaccttgacgacacgctctttcagacccgtcgtaaaatggtggacgagctggccctggagccattccgtaccggtgccgttgatcgcaccctgaatccacgaagctttatgacggaagaacagtccatgttggtggactggctcctggagcaggctgaactcatacccgttaccgcacggggaactgaagaaatcagccgcgtacggatccctttccactcctgggcaatcaccacgcacggggccgtcattctcacgcctgaaggcaaacccgacgaggagtggaaggcccatatgctcggccagctggctccctatcaggaaaagctgacatcgatgcagcgtctgatcactgaaatgatggacgcaaaagggatcaatgcctgggcaaggctgaacttcgaatacggtgaaacggcggtttatatggtgatgaagcaccgcgacagcacccgccttgacgagctcaatgccattgcagatgagatagaaacggtgtttccgaccgagggcttctacatccaccgcaacagtaataacgtggcctggcttcccaccccggttgagaaagggctggcagtcagatggctgcttgaaaaacttcgggctgaacgcggagtcttccccgtaattggtctgggcgacagcctgagcgatcatcgttttatgaaactgtgcagctggtttggcatcccgcgtcagagtcagtttgcagatgccatttcacagcgaatttttggagaaaattaa

SEQ ID NO: 283022 - DNA, 1143 bp, Morganella morganii
atgtctgatatcctcgaagatatgatttatcgccgtaccctctcatgcggtacgattcaggtaacccgcgaccagggtgaagtttcgctcgatgacctgtttgacatcgctgaaagacgtaacccgaaacgcgcctttctgtttgtcagcaaagtactcggcaggcacattcccgtgccaccctcagtcatgcggcaggcctacagacagcttgccagccagttcccctcgacactgacaggacccgtactgtttatcggtatggctgaaaccgccgttgggcttggggccggtgtatttgatgaagtgcgccaccagcatcctgaatctgtctatctgacctctacccgtcacccggttgatggcacgttgctttgcgagttcaaggaagaacacagccacgccaccgatcatctgatctatctgccagatgatgaagagaaaagacgtcgtgttaccaacgcacgaacgctggttttgattgatgacgaggcaaccaccggtaatacctttattaacctgctttctgccctgcgtaataccggcaagcttcaacatattgaacaggttatagccgttacgcttaccgactggagtggcaaagccttgtccgagcgcagcaccttaccagtcacttcggtttctcttgtaagcggtaagtggggatggaccccattacctgatgcacctgtcccggacatgccgaaagtcaacgtaacttcacgaggagaatgggacatccagggaaaacagtcctggggccgactggggatgctcgcacctgcggccgatctcggccatgaggtctccgtccacaagggggaacgtattctggttctcgggactggggaattcgtctgggagccgttcctgcttgctgaacggctcgaagctgccggagcacaggcattttatggatcgaccacccgctcccctatcgccgttggttatgccattgagtccgccatttcctttacggataactacgggctgggcatccccaattttgtctataacgtcgcccaccagcagtttgaccgcattcttgtgtgtactgagacacccgcagaaagtattgacacgcagcttcttaaagcgctggctgaggttgcggccgtcgtggagattgttacctatgaataa

SEQ ID NO: 283023 - DNA, 1059 bp, Morganella morganii
atgaacaagaaaatttggtttatggaaggtttatcctcccagcgagatattattcagggggtaaaatcatttgcaaaaaaaaataattttgccattaccgtttttgcctcccaccgtaacgaaagaaatgaaatcctttccgttgccgactattctttgactgaacctgaagatcctcaaaaacgtcttcagtttatccaggaaaccattcagacctacggcatccaccatattcatactggccgtaacagccagtggtttgaagaacaccgttcagccattgaatcgaccggtgccacccttactaccggtgcaacgggcgtcgactggttaactctggctgacgaaaaagttacttttgctcagtttatggagcaaaagggtctcccggtcgtaccatcctggcgggtgaatacgctggcagaattaaaaacacacctcgcggccccgccgttcactgacagcccggtatgcgtgaagccggtgacgggtatctatggcatgggattctggcgctttgatgacagtgcttcgcctatggccgtctttaatcatcccgaacatcgtctggtcagtccgcaacagtatattgcagcagcatcagctgctgagtcgtttaaaccccttgttttgatgccgtacctgccaggcccggaattttctgtcgatatcctcgcggataagggcgaaatactcgcagccgtgggacgccgtaaggaaggggctatccagtatcttgtaaacgcaggaagcgcctgggaactggcgtgtgactgcgcccgggtcatgaaggccgacgggctggtgaatgttcagacgcgaaacgatgtgaatggcaacccggtgctgcttgaaaccaacatgcgtccgtcagggggggtgggttatacccttcacagcggggtgaaccttcctgggttatttgctgcctttaagctcggtctgatgtctgaagatatggtgcgccagagcgctaaaaacaccttttctccggttgcggtgagatccattacggatgtaattgcatacccggaatcactctctaaccttctgaattaa

SEQ ID NO: 283024 - DNA, 582 bp, Morganella morganii; identical to SEQ ID NO: 105536

SEQ ID NO: 283025 - DNA, 1158 bp, Morganella morganii
atgaacctgacgccggggggcaatgcccccgttccagcccaggagttgcgggtccggatcacctcgggcggccaggtggatgcttcggcgtttcgcctgtatgccgacgggaaggtgcagggtgatgcggacatggtgttttatggtcagccacgtaacgatgatggtaccgtcagcctggtcagtgaaggccagtactcaacctttactgtcgcgctcaaccggctgaaacctgatgtccagaaaattgcgttcaccgtgacctgtgacggtgggcagacggtgtccggtcttcgtaatctttccatcgacgtggagcaaggggctaccggcctggttagcggcagtgtcgaactgagcggccgtcaggaagcagccttaattctgggtgaattttaccgtcgtaataatgactggaaattccgcttcgttgcgcaggggttcaacggtggacttaaaccgctggcagagcatttcggcgtaaatattgccgacgaaccggctcccgcagccccgactcctccggttgtaacccctccgccagttgagacaaaaatcagcctgagcaaggtatcgctgacaaaagagaagcctgcaatcagcctgaccaaacgggataacttcggtgaaatccggatcaacctgaactggcaccggggcagcggcaaatcaggctttgcaggcatgttcggctccaaaggaatcgacctggatctgggggcctttgttgagcttcaggacgggtataaatcggtcattcaggcgctcggtaatgcattcggtgattatcgcgatgaaccgtatgttcagctcaagggcgatgaccggacgggtgatgtatcagacggcgagtggctgcatatcaatggacgtgaatggaagcatatccgcgaagtgctgatttacgcctttatttatgaaggtgttcccagctgggacaagactgatggtgtggtcaccattcatgtgccggatcaaccgcccattgagacccgcctgaccgaaggtgaaaaccgtcgcacattgtgcgccattgccagactcgtaaacgaaaacggcgcaattaaagtcgagcgaattaaccagtacttcaaaggccaggacgaaatggacagggcatttggctggggatttcgctggagcgccggttctaaataa

SEQ ID NO: 283026 - DNA, 456 bp, Morganella morganii
atgagctttttcgacaaagttaaaggtgccattaactcaggccgtgacgaactgacccgccaggttggccgtttcaaaaacaaaaaattcatgcagggcaccgttgctgtatgtgcccgtattgccgtatcgagtgacggcgtaagttcggaagaaaagcagaaaatgatgggctttctgcgctcttcagaagagctgaaggtcttcgataccaatgaggtgatcgagttcttcaataaactggtttcaagcttcgatttcgatgttgaaatcggcaagggcgaaaccatgaaatacatcctggcgctgaaagatcagcctgaggccgctcagctggccttacgtgttggtattgccgttgcgaaaagtgacggtaacttcgatcaggacgagaaactggcctcccgcgagatcgctatcgcgttgggcttcgacccggctgaatttggcctctga

SEQ ID NO: 283027 - DNA, 1041 bp, Morganella morganii
atggtttccacacacattggcttcccgactgaaacggtcattgtttttattgcgctttcagtcggtgccatctttattgacctgtttatgcaccgtgatgacaagcctatctcgctgaagagtgcggcgctctggtccgtattctgggttgtggttgcgatggcatttgccggtttcctctatatccaccacggtgctgaggttgccagtctgtttgtcacgggttatgcgctggagaaagtgctgtcggtcgataacctgttcgtcatgatggccatcttctcctggttcgccgttccggatcgttatcgccaccgtgttctctactgggggatcattggtgccattgtcttcaggggcatctttgtcgccatcggtacgagcctgctgagtctggggccgtacgttgaagttgtcttcgctattatcgttgcctggacagcggtcatgatgcttaaaagcggtgatgacgatgatgaaattgaggattactcccagcatctggcttaccgcatggttaaacgcttcttccctatctggccgaagctcagagggcatgccttcctgcttaaccagaaggaagtggatgctgaactggcgaaaccagaaaacagcgatgtcaccattggccgtggtaaaaaagcggcgctgtatgcgaccccgctgttcctgtgtgtggctgtggttgaactctcggacgtaatgttcgcgtttgactcggtaccggcaatcattgccgtcagtcgtgaaccgcttatcgtctatagtgccatgatgtttgctatcctgggcctgcgtactctgtattttgtccttgaggcactgaaacagtacctggttcatctggagaaggccgttatcgtgctgctgttcttcatcgcggcaaaactcggcctgaatgcgaccgatcacatctggcatcatggttacagcatcgcggcaacaaccagcctgtatgttgtactgggtgtactggcgctgggcattctcgcaagcgtcatgttcccgggcaaacctgaatctgaggaaaaggggagttaa

SEQ ID NO: 283028 - DNA, 579 bp, Morganella morganii
atgagtgtttctctttccaaaggcgggaacgtctccctgagtaaagcagctccgtcaatgaaaaacgtcctggtgggccttggctgggatgcgcgttcaacagacggtcaggactttgacctggatgcttcagcattcctgctggcctcaaacggcaaagtgcgcggcgattcagatttcatcttctataacaacctgacgtcatccgacggttccgtaacgcacaccggcgataaccgcaccggtgagggcgatggtgatgatgaatcgctgaaaattaaactggacgccgtcccgtctgaagttgacaagatcatcttcgttgtgaccatccacgatgctcaggctcgtcgccagagctttggtcaggtatccggtgcgtttattcgtctggttaatgacgataaccagactgaagtcgctcgctacgatctgaccgaagatgcgtccactgagactgccatgctgttcggcgagctgtatcgccacaatggtgagtggaaattccgcgctgtaggccagggttatgctggtggtctggcatctgtatgtgctcagtacggcattaacgcgtcctga

SEQ ID NO: 283029 - DNA, 576 bp, Morganella morganii
atggcagtttctctcgtaaaaggcggcaacgtatctctgaccaaagaagcaccaaccatgaatgttgctatggttggcctgggctgggatgcccgtgtaaccgatggtcagggttttgacctggacgcttccgtgttcgcagtaggcgaagacggtaaagtgttgtcagatgcgcatttcattttcttcaataacaaaaccagccctgatggcgcggtagagcaccagggcgacaaccgtaccggtgaaggcgacggcgacgatgagcaggtcaaaatcgatctgaccaaagtctcagcagatatcaaaaaactggtgtttgccgttaccatctatgatgcagaagcgcgtaaacaaaacttcggcatggtgagcaacagcttcatgcgcgtttacaacaacgacaacggcacggaaattgcccgtttcgatctgtctgaagatgcctcaaccgaaaccgctatggtcttcggtgaactgtatcgtcatggcgctgagtggaagtttaaagctgtcggtcagggctttgccggtggcctggcggctcttgcctcccagcacggcgttaacatctaa

SEQ ID NO: 283030 - DNA, 1242 bp, Morganella morganii
gtgaatctacaatccggacaaaacataccacttcagcaatctgcgatcaggctgaatcttcagtaccctaccaaatccggctttaaaggcgaacccgatacctgcctgttcctgcttaatgctcagggaaaggtcagcggcgattctgactttatcttttacaataatctgtcttctcctgaaggggcagtaaagctcgttaccggttctcagcagtccagcattgagatagcactggatcgtgttcctgcgaacatcagtaaaattgcaatcaccgttgtcattgatggtgaagataccatcagtgggctcagttcgttgagcatgcaggctcaaggaatcgctgagttccaggctgagactcagggccgcagtgagaaagcaattatcctgggtgaagtatatcggcacaatggcgcctggaagcttcgtgcgctcgggcagggtttcaacggtggtcttgagcctctggccattagctatggcgttgatgtcgcacagccagctccgcagccagcaaagcctgctcgtatcagtctggaaaagaaactggaaaccagatctccgcgccttgtaagcctcgctaaaaaagcctcggtcagtcttactaaaaataaactggacacccttgaggcagcggttgcatttgtacttgacgcatccggctcaatgagtggccagttcagtaagggtaacgttcagtctgtgctggaccgcatcgccgttcttgccgcccagttcgacgacgacggtgaaatggatgtctggggatttggagagaagcataagaagtatccaaacgtcacactggacaacctagacacatatattcagtccattcgcggggctggaaagcgttcagcctgggagaacctgccgggcctcggagggacaaacaacgagcctcctgtgatggaagaaatagtcgactactttaaggactcgaaaatcccggtgtatgttgtatttattaccgatggcgggatcagcaagacccgggcgattaaagatgcaatccggcgttctgccaactaccccatcttctggaagtttgtcggcctgggtggttcaagctacggtatcctcaaaaatctggatgactttactgaccgccgggttgataacacccacttctttgccatggatgatttcggttcgattagcgatgaaaagttatatgataatctactggaagaattcagaccgtggatcgatgaaacaaaaaggttaggcatcctttaa

SEQ ID NO: 283031 - DNA, 456 bp, Morganella morganii
atggaccgcatcaagtacctgaaatggatagctgaagaatcaccaagtacggctcagcagctggtggcctggttaaacagagcaaggcactatacgcccgacatgaaagagcatcaggcaggtgtacagattcaagaaaaggggattgttgtagggcttagacaaagtactaatcgttatcatggagattgtctgaccatacatgtggtacagcttccggaagaaatacaaaacaagggatggtttaagtcttttctgaagctttgctgtgaatcgaatccctggtgcgatgttgtaatagaagacgtgaaaaacccatatttattaagcttttgtaagaaactaaactttactgtattagatgagttttacccgaatacttacatagtaaacacagatgccattatgagtttacccatcccacccttagggagatacgaaacctatctttattaa

SEQ ID NO: 283032 - DNA, 192 bp, Morganella morganii; identical to SEQ ID NO: 31746

SEQ ID NO: 283033 - DNA, 156 bp, Morganella morganii
atgtttattacagatggtatggttcgtgtttttgtttattcgatggcaactgtactctttctgccgcttggcttgttgaaaagcacgtggtggttttcaccattgtttgcgatagctgctattgattacttaatgtttctgcgtcgacaaggctag

SEQ ID NO: 283034 - DNA, 393 bp, Morganella morganii; identical to SEQ ID NO: 105544

SEQ ID NO: 283035 - DNA, 339 bp, Morganella morganii
atggcaactgaaattgaaatcatgactgtcgcggagctgcatgctcaactacaacagctggttgatgaggggcacggagatattccggtttgcgcgtcagatctccgtgcccggtatccatttaaggcttataccgttctcagtaccgcaggctataccgaagcgctgctgattaatgtgcggccggatgcccattttacacgtaaagagcccctgcccactaactgggggaaaaaccgtgtagcagagtggaacagtgatgccgatgccgttcgccagtcctgcggggccttcgcagataatcctcaatcaagacaaatgacaggtgataatttatga

SEQ ID NO: 283036 - DNA, 477 bp, Morganella morganii
atgaagcatctgaaaatgattgcagccatgttactgcttactcctttgacatcattttcacaggaaacagacagcgtggaggctttgaataaatatagcaccgctctgacagagctttttatgaaggaattgcagaagtcacagcaggcaaaaaatcctggcggaatggatttgttggctgctaacgacgctgttgcttctgcactgagcaaaaagttcttcatttttaaaccggctgatgaaaccagcatcaaaacttctgctgaaaaattaaaggcactgaaagatgataccgaagctcttgaaaagggctacaccatcattcagccagataatataggaagcaataacatttcatataaggtgacgacaggctctcggatctgctttgttcaggtcacacgcagtaagtcatcttcaaatactagaacggttgctgtcgatagcatagattgcacggggcctgaacagaaatga

SEQ ID NO: 283037 - DNA, 498 bp, Morganella morganii; identical to SEQ ID NO: 105546

SEQ ID NO: 283038 - DNA, 1389 bp, Morganella morganii
atgagtcagtctccttatgatgatgagttcagggccatccgttatattcagctccgtggtcaggatatcgcgaacgctcacgagacaattaacagtgatatagagagccttaaggcacaattgaccgggctaatcagcggcactgaacttgatgaagcggagcatcttgcgcttaaagaacatcatctgcgagaaatgactccttcagatactgccatgcattctactagtctcaagactatatatagcgaggctaaccagcgtgtatgcggtgatattggactgaccacaatactctccacggatgacctggctgttgtagatgcccggatccagaatcatattaaagaatttaatgatcgctacgcactcgacgcctgggattatgctattgcctgcggatgcgggctcatagcatccatgctggatttactttgcgtcagagccccgccaaaacctacggtgagctttacggcagaagtggatggtattttcaataaacaggtgcagaaagccttcaatgccattttgccggaggacctgagtaaaaaactctcagaaatgttccctataggggcaccggacagttcgatcaccagcgatttagtgggcgcggccggtggcgttttgtctcccacaaatcaccgcttaagagctttgtcacacgatcccatactgggcattattatcggcataaaggatatgctgaacgggacctgtacggtggttcagaatggacagatcgtggtttatccttccagtaaaggcgttactgacgaaaccaatattttcaggctcatcgccagaatgtttggacacctggcatcggatgttaatgccccctcagcaaaaggaaaccgtggcatgggtttaccggctccttttatggggctacttcgtatgcttgaggggatccctgtggggagttctaacttcggcaaacaaatagagtacatgtatgtcaacgggtatgactttcgtcagtttatcgtgacaagtattccgatgaccataatggaagttttgatgcgggttttctatgtggcgaaacaggtatcgctgggaaaaggagcttttggggagaccttactggataccatgccgttgcggctaaatccacgcttccggatgatgcttgccctgggttatggaacttccagtgctgttaacgcaggtaaaatgtatatcaccggcaatattctcaatgcaaattacgcctcctggatggggttggcctggaatggttttcactcactcaagtggtctctttatcagcgacacttaaagctttgggccggtattgaaaaggcagaactggaacggcttcagaacaatatagacagcatcgaggcattgaccatcagagcaggaaacttgccagtcaaataa

SEQ ID NO: 283039 - DNA, 558 bp, Morganella morganii; identical to SEQ ID NO: 7707

SEQ ID NO: 283040 - DNA, 3006 bp, Morganella morganii; identical to SEQ ID NO: 10984

SEQ ID NO: 283041 - DNA, 297 bp, Morganella morganii
atgatcaataatgattacccgttaaacacgctcaaccagttgcgtcccttgctcattggttttcgcaaggcgaatggcctgacgcaaaaagacctgtccgaaaggttaggtgtcactcaacagacatactcacgtctggaagccaaccctgccagtgcgagcattgaacggctattcaaggtgttttccgtcctgggtgtaaaaatcagcttctcctcggcaaccacttcttcagagaggaagcagacggaagaaatatataaattaaattcacctgcacgacaggaggattggtaa

SEQ ID NO: 283042 - DNA, 1326 bp, Morganella morganii
atgagccggaaacagcaacgtctggtaatttggatgaacggcatcaaagtcgggtactgggaaaaaagcaaaggggtagacagcttagaataccttcctgaatgggttgctgacgaacagggaaggccgctgtcattgtcccttccttttactcccgggaaccaggtctggcgtggaaatgtggtacgtgactattttgataatttactcccggacagcgaaggcatacgtagacgtctggcaatgcgttacaaggccgatagcctggagccttttgatctgctgacggagctgggaaaagactgcgtgggcgcgatacagctgcttcatgacggagatgaacccactgatttatattccgtgaagtatcacccgcttactgaatcagaaattgcggcaactttgcgtaataccacggagacattgctaccgggcaggccagaagataacgacgacttacgtttatctattgccggtgctcaggagaaaacagccctactgtggcatgatgatcggtggtgtatgccggagggtaatacaccaacgacgcatatattcaagctaccgctcggacttgtggggaacatgaaagccgacatgagctcgtcggttgaaaatgaatggctctgctcggtacttctcgaccagtacgggctccccgtggcaagaacgcagattgctcactttgaagatcagaaagcgctggtggtagaacgttttgaccgaaaatggtcaggagacggacaatggatcattcgtttaccccaggaggatatgtgtcaggccctgggcgtttcgccattacgaaaatatcaggcggacggcgggccaggtatatcggaaattatggaggttctgagtaattcagaccgtgctgagcgtgacaaagcgcagttttttatgacgcagataattttctggatgatggccgcaacagatggccacgctaaaaatttcagtatttctattgggccacagggacgttatcaccttacaccaaactatgatgtgttgtcggcatggccggtgatcggtcatgggaacaatcagatatcttggcagaagtgcaaactggcgatggccgtacgtggcagtagcaactattaccagatatatcgaatacaacgacgccactggatcaggcatggtgagataaccggcctgagtaaacagcagacagaggagatgatagaggaaatcatcgccagaaccccgggtgtcattgaacgtgttagcgggcttcttccggaccagttcccccagcagcttgcggaaagtatttttgatggaatgaggcagcaatgcaggcgcctggctgagaaatga

SEQ ID NO: 283043 - DNA, 207 bp, Morganella morganii
gtgactgaagaacaaaaaagaatagagcgggctattgagttggcttgtcgttacggcggaaccgatgaaatgcatcatctgcaatgggtcgtggatcagatggtaagagaacttgctggagaacgttatgcacagattgtagctgatgccaccagcggagaagatgggcctgatacttacaaatggagtgttgggatcgcgccttaa

SEQ ID NO: 283044 - DNA, 411 bp, Morganella morganii
atggctattttagcaatcattgcagttatcgccctgggtgggtacgcctacggatttattaaaacccgtgagctgagcgctttgcgtaaagaaatgaaactatacgtggatcgcatggaagcggcggagctggacttacacgcaatcagaagtgtagcggagcaccggttgcacggtgcaggtaaacagtttgccgacctttacagccgtatcgacggtgcaactgtgacgctgacacccgaagatcagctgttactggcaacgatgccatttaatattcaggatgtagaagacatcgtaaacgagcgcggtccaaagacaattagcggccgtccattctgggaagttgagccaggcccgcatgattatgaatatggcccgcaatatccgtatttcccagaccagcgctag

SEQ ID NO: 283045 - DNA, 816 bp, Morganella morganii
atgagagagccaagaccacgccataccttgcaggtcattcgtgtcccttctatggaggttcaggacctggggctgaccagctttgatagctggcttgacgagcacgggtatgacaaaacgaatgccagaaataaccgtaccatctgggcgagagaaggcggatggcatctgaaacgttgcagaaatcttgaaactggcacggacgatttctggtttatcgctttcgatggtaaaggcgggaagatttacccgctgaaaacccaaagagactaccgggctgcatatcgtaagctggaagcagaaggttatgcgcccgcggtcatcgagcaaatgaccacaggcgcagcatataacctggcctatccacgttccaccctaaaacaagctgagacggccaccagcgagccaattcggaaacctgacgtagatatccagggtgagcactgcgagcgcgtagtgacgcaacgtagtggcgtggcacagggtaaattcaaagctctgctcatcgagaatttcgcgggccgttgtgcggtaaccggttgggttaatggaggtgtcctggatgcggcacacattgaacatggaacccggtacaatccgtctaatggcatcctgatgactccaacaatgcatgcgctgtttgatgccgatcttatgggcatagatccggccaccctgaccgttcattttaagccaggcattgaggtgggtgagctgtttgaaggccgtaaaatcacaccgctggtgtacgatctggacttagagcggctggccgtacgctgggcagaataccagggccttgctcaggatcaatga

SEQ ID NO: 283046 - DNA, 426 bp, Morganella morganii
atgaataaaacagctttaattatgattctgggaatcctcggatgtggtaaagcatttgcagccactgaattacagctccagcaaaaacgcgttatgcatttctgtgccaatgccagccttccgttgttgattgccggtacaacttatgcgaatacgtctgacaatggacgaccagaaaaagaaagagtggcaatcctgaaaaattcagttgcaagctcgacagcttataaaatggcatctcccggagttcagatggccatgatgagcgtggtggaagatattgccgatccgaaagaattagctctacatcaaaaagaagttagacgtcttggggctagttatctttccgacagcggtgtttcatgggcttcaaaaactgtttcaccatttacagcctggtgtaactttaaccgtttagaaagttaa

SEQ ID NO: 283047 - DNA, 309 bp, Morganella morganii
atgcgcaaatttaagtacataatctgtcaccagtgcgaaggccacgggaccatggaaaacccggcatttgaaaatggattcacccaatcagaaatggctgagtgggagccagaaatgcgtgaaaagtattttgccggagcatttgatgttcgctgtgacgtttgtgccggtgacggtaagctcagcgtaccaaacgtagcggctatgtctttttcagaacgacgggttctggcagcacggcggcgtgatgagcgtcttcaggctgctgatgaacggctgtcccgccaggaacgagcaatggggtactga

SEQ ID NO: 283048 - DNA, 858 bp, Morganella morganii; identical to SEQ ID NO: 124402

SEQ ID NO: 283049 - DNA, 204 bp, Morganella morganii; identical to SEQ ID NO: 105555

SEQ ID NO: 283050 - DNA, 405 bp, Morganella morganii
atgtctgaagcactcaaatcgttaaacaatattcgtactcttcgcgcccagggccgcgagttgcctttagaagtacttgaggaaatcctcgaaaagcttaatgtcattgttgatgagcgtcgtcaggaagaatcatccaaagctgccgaactgcaagttcgtcaggagaaacttgacgccctgcgtaagttaatggaagaagatggtatcaacccggaagagctgcttggctcattccaggccaaatctacggctaccaagaaaagccgtgaaccacgcccggccaaatactcatttactgatgaaaatggcgaaacaaaaacgtggactggacagggccgtacccccaaagctctggcagaacaaattgcagccggtaaaagtcttgatgatttcctgatctaa

SEQ ID NO: 283051 - DNA, 294 bp, Morganella morganii
atgaacgtaattgcagctggaattttttgttttattttttaccctacagctttcgcttatgcttgttataaaaagagatggctagagtggatttttcttactttaattataatttttgcttctgccatttcgattcaacaatacaatgaagcgaattttgtaagtgagttaaattaccctatgtttatctccgccatatatggcctgtcactggcatggtttccttttccgattgcttatgttgttctgcgcttccttcttgatgatttacagcatgagtaccctaaacagtga

SEQ ID NO: 283052 - DNA, 456 bp, Morganella morganii; identical to SEQ ID NO: 140635

SEQ ID NO: 283053 - DNA, 666 bp, Morganella morganii
atgttctctgaacgctcagtacacttaatcacttcctgtacaaagggcaagaatcatcagggccacgtctggccgacattggacatagatccaaaacaaaccccggacgacgcagcatatgcctggagtaacattgtagacgacgccagaagtaatcaggcggtaccggcattgtccttgtattcaggtaatcactggtctacggcaaaggaaattttaaactcaaccagaaatctggagttgtggataatctctgccgggatggggtttttaaatagtcgagatcgggtgccctcttacgaggcgacatttcatcaagtaccattcaggcatgatctctggtggaaagccatcacaaaatcactaggaaagcataaccgttgcgcaactataagccagttaatgcagtccagtccgaatgatgaatatttgattgcggcttcgcctgtttatattgctgctgtccagaatgacatcctgaagggcattgagagtttgactcatcctcttacgcaactaacgatcgtgacatcaggggcatatgctggcccgcttgaagaatacttaattaagagttcttctagaatgatgaaagagctagagtgcaatatggtgtgcctgaatataaaactggctcaatacatacttaaaagtggtagtcgttag

SEQ ID NO: 283054 - DNA, 381 bp, Morganella morganii
atgacaagtacacttgacccatcacacaagcaaattgaaatgtggcgcagagctaccggttccgaaggtggactcaacgaataccgcaactgggttctggaaaatagtatgagatttacagcatacggtatccataccgttatcgtcgaaggtgaggcgaagcatataacagcgcttgatgatgttaccctctgtaacgagtgggtgaagcttaaaagagaaaacaataggctttacgcagcaaatgaaaaaatttgctctggctggcgtggttttgtgttgcgtttgttaggaataacactgtcatgcagaaaaccggtcatcttactgggggcagacgcgaagaatcaaaatgatgccgtgaaaggggctgatttgtaa

SEQ ID NO: 283055 - DNA, 819 bp, Morganella morganii
atgactcaaaaccagggttctgagccagtaccggcgagccggacagggcagctcatcagcgcccgggatatggccatgcagaaattcgaagaagggatgcggttaatctcggaagcgtcggaactgtgcggtctctctctcttcaccagcagaattatgcagcccaacgcatttggtcttccgtcgtcactggatcgcaccatcgaggaggggcgtaaggaaattgaccgtaaaacgtggaaaaggctctttgaagaaacaggtatggaccggtactggaaccataagcaaaaagaagcctttaacgaatccctacgtacggatccgcccgtcgcttccctggagattgttaagggaacattacagcatgcactggctaacagacgagacacgcttgcagaaggtttcgttgatgttctcaacaagcttgaccgaagttttaaaagcaatgcacggcaatatacaatgccgaaaaagcttgttcttcgggggatttttcctggtgtgaacgtactgaggtacaacggtttctcgcaggacaatcacttttgtttacgcgactttgagaatattgtatgcatctgttctgatactccaacacctgcaaccggcggtgggctgagtatggtcgacaggctgacggccatgagaaatacagatttcacaggcgaggtctgcgatgagaatggctggcggtgtcgcctgtttgagaatggaaacgttcatatttgtatcgacagtatctcgcttctgaatgctctgaacgatcttatcagcatatattttgcaaaccagcttccggccgcaggaaaaaaatga

SEQ ID NO: 283056 - DNA, 1206 bp, Morganella morganii; identical to SEQ ID NO: 105711

SEQ ID NO: 283057 - DNA, 1545 bp, Morganella morganii
  misc_feature (1304)..(1313): n is a, c, g, or t
atgagccaaaaattcgcagtgatgattgcttacgacgacgatccaaacgtcaaaaggtattcacctgactttcaaacgcaggatgagtttgctaaagggtggcagtcggctcttaaaaaggcacaccacacctcaggtcaaaaatcagtcatcacctgcggatgtcgtggaaaaggagaaaagcgactttatgttcgtgctttaccgaacggtgatgcctttattctcgtcaaagccgctaacacgggcattgagcatgatccttcctgtgtattcttctcccttgatgcccggcataccggcctgaaaggatatgcgagtggtgtggtccggattacaaccgaaggtgatatggctgtaaggctcggtatcggtatgacagagaaagatcctcctgaaaaatcagaagtgcctcccctgccccatgttcagcgaccagaaggaggtcaggcctcaatgaccctcctgggcttgcttagtcttttgtggacagagtctggtctgaatgtctggtacccgaaaatggcagggaaacgtaacgattcactggtacggtatcgtctgcttgaaaccgctaaacaaattcgtaccggcagagcctgcataggtgaccatttattcattggtgtacctgacccgaaacaacctgtcgctcagtcgcaaattcagcgtctttcatcacaggcgatgagtgataaacgtctcatgctcctgtcagttttacctcgctacgatgctgaaaagcatgagaagccacttaaatttttacccctgcggaattttggggggctaccgctgatttttttcaattcagaaggccattgggatagcgtaaagaaacgattttcatcggagtacgcagcatggaaatccggggcgaaaatagttgtctttgcgttgacgtcaccagctgcggtaaccggcagaggcccttctgtaagagctcatcaaattgtgctgatgcacgttagcgagaactggatacctctggactcctcctatgaggcggttgttgcagaaaagctggatgcagagcaccggcagtacgttaagcccatgcgttatgatgcgagtattagtgaggtgttccctgacttctacctgctcgacacaaaaagcgataagccgttcccgatggaagtatttggtatggccactcctgcttatctggcccgaaagcaactcaaaaaagattattacaaccgtgaatatgggccttatggatggtggcactgggatgcgaccacagcatctgaaactatggtgctgcctcattttccagaatcacgtaaacctctttcaannnnnnnnnntggcacacctgctgaaaatggagaaaaaatgtcatacatgctttcactaagcgaacagacaaaactgaacgctttcctgtcagggatccttgatgattacaagactggggttatcactcagatacaagctgttggtaaaatcggtaacgtgttttctgcactggaaagtggagactcaaaaaaggtagtgcatttgttgactgaaggacgaaaactcctgcggacgggctga

SEQ ID NO: 283058 - DNA, 168 bp, Morganella morganii
atgacgtatttcgaatcagctgaaggtgagacggtatctaaagaacgagcattaaaagaactgtccaggcattgcgttcccgaaacagatttcgaagaattctttagcgacatgggcgtaaaggaacagtatgacgctcaggaagtgttgctttggttgggatattaa

SEQ ID NO: 283059 - DNA, 1428 bp, Morganella morganii
atgaaacgttacactcatgatcttgagacagacctgaatgatgtggataaaacaccatctctgatccacaaaactttgttaacagcttcgactatttatgacctgaaatatctggctcaggtattaaatgatgaaaatggcagtaattggtcccgtgcatcccttaaacgtcaggttacatgcatacctgagcattgtgatctgagtatcgcagatggacgctatctacagactttaataccttcacgacctgctgattatgaggacaggcactttagctttatcgatctgtttgcagggataggtggactgcgaagcggatttgatgccatcggtggtaaatgtcttttcacgagcgaatggaatacttattccagccgtacttaccgggcgaactggtattgcgatgagaacgagcaccgcttcaattcagacatccgtgacatcactcttagcaaccggcccgaggttactgatgacgaggcatacaaatttatcgatgcctctatcccggatcatgatgttcttcttgcgggatttccatgccagccattcagcatcgccggtgtcagtaaaaagaactctatgggtcgcaaacacggtttcgagtgcgacactcagggtacgctcttctttgatgtggccaggatcatccgggcaaaacaacctgcaatttttgttctggaaaacgtaaaaaatctgaagagtcacgataagggtaatacctttaacatcatcatgaaaacgctcgatgagcttggctacgacgtcgcaaacagcgaaagcacgggcgcggatgatcctaaagtcatcgatggccgtcatttccgaccccagcaccgtgaacgtatcgtccttattggttttcgccgcgacctacgtctgaaagacggttttactctgagagacattaaagacttttatccggacaagcgcccttctctctcagatttactggatccgagcgtagatagtaaatacatcctctcccctaaactctgggagtacttatacaactatgcaaagaaacatgcggtaaaaggcaatggttttggttttggactagtagatccttccaatgttaatagtgtcaccagaaccctctcaagccgctatatgaaagacggatctgaaattcttattgatcggggctggtctcatgagctgggagaaactgatttccataacacatacaacatggaccgtcggccacgcatgctaacgccacgtgaatgcagcaggctaatgggcttcgataaacccggggaaagtgttttccgtatccctgtgtccaatacacaggcttacagacagtttgggaactccgtggtcgttgatgtctttgcggccgtcgccaaactgctgaagtctcgaattgaatttgcagcctcccagcgcttgcggcagttttacgacgaagtcagctga

SEQ ID NO: 283060 - DNA, 516 bp, Morganella morganii
atgtttttttttacaaagttacttttgcccatcatgattgttgtattcccagtggcgtcctgggggaactcaacaacttttgaggcaaaggtggttaagattgttgacggtgacaccataactgcgttggatgctcaaaacacaaccatcaaaatacggatgtatggtatagacgctcctgaatctaaacaggcttttggccaaaaagcaaaacaggccttaaccacagctatagcaactaaaatcgttaccgtgatagaccatggtacggatatctatggccgtatgttaggtaccatctggttagatggatatgatatcaatgcctctatggtggacagtggatatgcgtgggtttatcggttcgaagataacgccattgtccctggctatatcaaatatgaatccgcagcacaaaaggaggcaaaagggttatgggcagacaccaaccctgtcccaccatggcagtggagacaggcaaacgaaaagcccagaaaggtgaaagagaagaaataa

SEQ ID NO: 283061 - DNA, 897 bp, Morganella morganii; identical to SEQ ID NO: 118496

SEQ ID NO: 283062 - DNA, 258 bp, Morganella morganii
atgatagtttcagaagcaattttttattcttctattatttcctgggttctttattggtggtttattggaaatattactaaaaaggtagggatgcttgttgttccactcacgcttaccttcggatgttacatttatgcaattcatttggatgattccgaacagcaaaccaatttaggttgggagcagatcggttttattacctttataattgtgataatgtgggcaggaaagtttgtgatgaaaagactatctgaatga

SEQ ID NO: 283063 - DNA, 234 bp, Morganella morganii; identical to SEQ ID NO: 31730

SEQ ID NO: 283064 - DNA, 255 bp, Morganella morganii; identical to SEQ ID NO: 31731

SEQ ID NO: 283065 - DNA, 198 bp, Morganella morganii; identical to SEQ ID NO: 31733

SEQ ID NO: 283066 - DNA, 252 bp, Morganella morganii
atgctgaacgaaagagaccctgaggcaattgttctgatttccggctatgaaacgatcggcggcacggaagtcgcagaagctgatttgctcattgatatgcagtcaatatgcttagaacaggctgataatctcacaggaaaccgtaaagttgtttcttccggtggtgaagattcagtttggttaggctggaaagatgattaccgtacaaaggtgtttttagaagatgcccaaattcctgatcaagatgaatga

SEQ ID NO: 283067 - DNA, 1479 bp, Morganella morganii
atgttgctgtcctcgacgcgtaaggactggctgggtaacgtccgtggtgacgttctggccggtattgttgtcgcgctcgcactcattccagaagcgatcgccttttccattatcgccggtgttgatccccaggtgggcctctactcggcgttctgtattcctctcgttatggccttctttggcggacgtccggcgatgatttcgtcctccaccggtgcaatggctctcctgatggtgacgctggtgaaagatcatggcttacagtatttactggctgcctccatactgaccggggtattccagctgatagccggatatctgaagcttggcgggctgatgcgttttgtttcacgctcagtggtcacggggtttgttaatgcactggcaatactgatttttatggcccagttgcctgagctgaccaatgtgacatggcatgtttatgccatgactgcggcagggctggggatcatctatctcttcccttatatcaacaaaaccattccttcaccgcttgtgtgcatcgtggtgctgactgggattgccatgtggctgcatctggatgtgcgaaccgtcggggatatggggaatcttcccgacagtctgccggtcttcctgctcccggacgtgcctttaaatcttcagacgctgctcatcatcctgccatattctgcggggcttgcggtggttggcctgcttgagtcgatgatgaccgccactatcgtggatgacatgaccgacacgccaagcgacaaaaacagggagtgcaaagctcagggcatcgcgaacatctgcacatcctttatcggaggaatggcaggctgcgcgatgattgggcaatctgttatcaacgtaaaatccggtggacgcggacgactttcaaccctcacggcgggcgtggtgctgctttgcctgattgtgttcctgcgcaactgggtctcccaaattccgatggcagcgctggtcgcggtgatgattatggtttccatcgggacattctcctggcgctccattgccaacctgcggacacaccccctttcaaccagcgtggtcatgcttgccaccgtcgcggttgtggtggcaacacataatctggccttcggtgtgctgaccggtgtactgattgcttcgctcaattttgccactaaagtatcccggttcatgcgtgtaacctcagttctggaggggacgagccggacgtataccgtcaccggccaggtattctttgcatcagcagaccgctttacgagccactttgatttccgtgaagcgattgagaatgtggtgatagacgtttcacatgcccatttctgggacatcacgtccgtcagcgccctggataaggtggtcattaagttccgtagagagggcgccggggttgaaatacgtgggatgaatgaagccacccgcaccatcgttgaccggtttggtgttcacgataaacctgaagaagtcgaaaaactgatgggcggtcattaa

SEQ ID NO: 283068 - DNA, 828 bp, Morganella morganii; identical to SEQ ID NO: 105721

SEQ ID NO: 283069 - DNA, 426 bp, Morganella morganii; identical to SEQ ID NO: 23459

SEQ ID NO: 283070 - DNA, 1290 bp, Morganella morganii; identical to SEQ ID NO: 105722

SEQ ID NO: 283071 - DNA, 321 bp, Morganella morganii; identical to SEQ ID NO: 105723

SEQ ID NO: 283072 - DNA, 705 bp, Morganella morganii; identical to SEQ ID NO: 105724

SEQ ID NO: 283073 - DNA, 1404 bp, Morganella morganii; identical to SEQ ID NO: 118507

SEQ ID NO: 283074 - DNA, 318 bp, Morganella morganii; identical to SEQ ID NO: 31740

SEQ ID NO: 283075 - DNA, 306 bp, Morganella morganii; identical to SEQ ID NO: 105758

SEQ ID NO: 283076 - DNA, 672 bp, Morganella morganii; identical to SEQ ID NO: 105759

SEQ ID NO: 283077 - DNA, 177 bp, Morganella morganii; identical to SEQ ID NO: 31741

SEQ ID NO: 283078 - DNA, 408 bp, Morganella morganii; identical to SEQ ID NO: 105761

SEQ ID NO: 283079 - DNA, 315 bp, Morganella morganii
atgcgtaaatactggtgtccagagtgcggaaagccaactccaactgaccaatcgactgtaaatgtaggtgacaaagtcaatattactattgagcacaccaaaataaccccgtcccgcactactgtgcgggttgttagtcgggtcggtaaagtgactgatattaaagatgatatcgctgccgtcacttatcgcggcaaggtttaccgggtacataccagagagttgattcctgccggtgctcccagcgggattgcccgcgccgtgtttggtgagtgtgaatgtggttcgctgccggagggtactactgatgattag

SEQ ID NO: 283080 - DNA, 288 bp, Morganella morganii
gtggttctgccggaagctatgcggcagccgggggcaattgaaccggcaaaagcggattttctgcgggcaattaaggtgattgagcaggagatcagcggaaaaacatggctgtgcaatgatgatttttctgtggcagatatcttcttatttcatatctcacgctgggcaatgatgctgggctttgtattgtcagaggatttggtgcattacaccggcgagctggaaaagcgcccggcgctgcaacgtgcccgtcagcgggaacaacaggcggctgaaaacgcacgataa

SEQ ID NO: 283081 - DNA, 1554 bp, Morganella morganii
atgataaaaaaaacagcggctgctgctgtgatggcgacggcctgtggctgcgcatggggcagcacttacacttcttctccgccggtttctccggcctcctgcgccatactgtcagaggtggtgattaagcagcgtgaattaattgagccctcttatctggcggatgaatttgaaaaaagcattaccggacactgtctgacatcagaacagatggcagaagcggtaatgacactggagtcggtggtgcatcaggccggttttatcacagcacaaatcagtgtgccgccgcagaatgtcagcgacggtaccctgacacttcactatctgcccggttatctgagcggctaccgcgataaagagagcggagatgagcatttcgggctgaacctgattttcccgcagcgggcggacggacagctgaatatccgtgatactgaactgggaatgtcccatcttaatcagttgccgggtctgggggctcaggctgccgttgaacctgatccgcagaaccccggcaacagcatcatcaccattacccggcagaaaaaacgcagcatcagcggctcacttgaaatcagcaactacggtagcccgtcaaccggcagcaggcagataactaaccggctcagtcttgaaaatccgttacagctgtatgaccgcctgtttatttataccctgcgggatatggaccgcgaccattccgccggggtgaaatttatttatggccagtaccggatccctttccggtactgggaatttaccgcaggcggcagttacagtgagcagaagcagcaatacccggtataccggggatcactggactattttacccgcagcaaaacgctggatctgagcttcggccgtaagctccttctgactccggcacatgatctcaccctcagcagcggcatttctgcggtaacccggcatgtcacactcggacatgcgccgctgatattgcctgagcgccggtctgtttactggaataccggactgaatcaccgctggtatctgccggatttcaccttgcagtatcaggtgcagtataagcattcactgaaccgctttggtgcgctgccggtaacagaaaaaaagctgaaaccgacccggcagctgatggcagaaacaacactgacagtaccgttccgccttgccggtcagccgttttattatgaaggcgttatgcgcggctttattaatgcagataaagcagatgagatggattatgaatccctgagcggccgttattcggtacgcggctatccgttttcccacagcatgagcgccgcgcgggcttttatcagccgtaatgaggtggtctggcagcaggtattgccgggacataatctgtatctggcagcagatgccgggctgccgggggcaaaaatttccggaggtgcgcgatctcatcgtctggcgggtacggagatcgggatgaaggggttttataaatcactgagctatcaggtctttgccggtctgccgctgaaagaagcggaacgtgtacgggccttttcaccggcgggcggattttctgtcagtgtcagttactga

SEQ ID NO: 283082 - DNA, 711 bp, Morganella morganii
ttgattaacgtttactcatttacatcagcaggacccagagtaacaaaccaagattctatcttggtttttgacatacctaacagaggcctattatgctgcgttgctgatggtgtcggaggaaatcaggggggagaaacggcatctaaaatggctgtagatattataagccagacattgacacaaaaccctacattgacgctttcagaagctataatcatcgctcatgaaagcatactaagtatcgcagacaaaaatgaatcgctctcaggtatggcaactacaattaccgctgtaatcataaatgataatacgcttgagttgataaactgtggtgattcaagagcatatatcttgagaggtaatggattacaacagctatctcaagaccatagtgaagttgctcggttacttaaagaaggtagattaactcctgagactgctattgattatcctcggaaaaatattcttgaaagtgcattaggagcccataaaccccttcaattacatgaaataaaatttaatttagaacttcatgatagggttgttttaatgtcagatggtgtatcttcagtagttaataaaaaagaattcagggatctgtcaaaaaaatatataaaccttaatgaatttggtactgccctgactaattacacggaaacaaagggtacgaatgataattattctttaataatagcacagattgattattaa

SEQ ID NO: 283083 - DNA, 1329 bp, Morganella morganii
atgaatttaactatacttgatagaatcggtagtggtggcttcggaaatgttgatttagtcataaatgaaaacggtgatcagtttgcacaaaaaaccttctctataaaccaacctcaaccattatcagaaagcctagctgacaatgtaaaaaaaagatttattagagaagcaaatatacaatcgggaattaaccataaaaatattgttcgtgttgtccataaaaacttactatgcagtcctccatcttttctaatgcctgtcgcagaatcaagtctcgataaagatataacaagaaacaaaactcttgatggtaatttcctaaaggctatagtcgatatactatcaggtcttgaggaactacattcaatcgggatataccatagagatttaaagcctcaaaatgtgcttagatttagtgatagtgatggcatgtattatgctatcagcgactttggtttaatgtctgttaaagatacccaaatatccgcacttactaaaaccggtatgaaaatgggttctgattactatacagccccagaaattgtttctgatttaagaagatctagtgcagcttctgatatttattcagtaggttgtatattacacgattttgttggaacatcagaccgaataccatgtggtgaaatagataatgattccagcccctatgcacatataatgcgaatttgcactaggagagaccctagcagacgttttcaaagcgtatcgatgcttagagatgctattatgaatattgatgcttcgacaataacacatataaatgctgaggcgtctacttatatagctgcacttgctggagatactgagttaaattctcaaatatgtcgtcaattagtagactatgtcagtgataatattgataatgataacgcaatagcaattttccaaaaattatctcttgatacaatagataaaataataaatttagatatatattctgcagcaagattaggtgaattgtattctcagtgggtatctgaatacgcattctcatttgaacaatgtgatgcaatatgtaatcgattaagtagatttcttactattgatgatctcaactgtaaatcagaagttttagttgcaatgcttttaatgggtacttcacacaatcgctggtatgtcgagcgaaaatttgcatctgaatgcggatcatcaatgccttccgacttagcaaagcggttagcattggaattgggcatacttgagagtaagatgtgtggggctatagcccatttagagcgatcgattggggtctcccaccaggatttacaccctgaaattgtgaacatgatacaaagagtgtgccattga

SEQ ID NO: 283084 - DNA, 288 bp, Morganella morganii; identical to SEQ ID NO: 76838

SEQ ID NO: 283085 - DNA, 243 bp, Morganella morganii; identical to SEQ ID NO: 76839

SEQ ID NO: 283086 - DNA, 156 bp, Morganella morganii; identical to SEQ ID NO: 76840

SEQ ID NO: 283087 - DNA, 258 bp, Morganella morganii; identical to SEQ ID NO: 76841

SEQ ID NO: 283088 - DNA, 252 bp, Morganella morganii; identical to SEQ ID NO: 76842

SEQ ID NO: 283089 - DNA, 771 bp, Morganella morganii; identical to SEQ ID NO: 76843

SEQ ID NO: 283090 - DNA, 369 bp, Morganella morganii; identical to SEQ ID NO: 12613

SEQ ID NO: 283091 - DNA, 711 bp, Morganella morganii; identical to SEQ ID NO: 76845

SEQ ID NO: 283092 - DNA, 435 bp, Morganella morganii; identical to SEQ ID NO: 76846

SEQ ID NO: 283093 - DNA, 348 bp, Morganella morganii; identical to SEQ ID NO: 76847

SEQ ID NO: 283094 - DNA, 1578 bp, Morganella morganii; identical to SEQ ID NO: 76848

SEQ ID NO: 283095 - DNA, 2910 bp, Morganella morganii; identical to SEQ ID NO: 76849

SEQ ID NO: 283096 - DNA, 195 bp, Morganella morganii; identical to SEQ ID NO: 76850

SEQ ID NO: 283097 - DNA, 483 bp, Morganella morganii; identical to SEQ ID NO: 76851

SEQ ID NO: 283098 - DNA, 555 bp, Morganella morganii; identical to SEQ ID NO: 76852

SEQ ID NO: 283099 - DNA, 1032 bp, Morganella morganii; identical to SEQ ID NO: 226683

SEQ ID NO: 283100 - DNA, 1155 bp, Morganella morganii; identical to SEQ ID NO: 76855

SEQ ID NO: 283101 - DNA, 888 bp, Morganella morganii; identical to SEQ ID NO: 76856

SEQ ID NO: 283102 - DNA, 717 bp, Morganella morganii; identical to SEQ ID NO: 76857

SEQ ID NO: 283103 - DNA, 171 bp, Morganella morganii; identical to SEQ ID NO: 76858

SEQ ID NO: 283104 - DNA, 1044 bp, Morganella morganii; identical to SEQ ID NO: 76859

SEQ ID NO: 283105 - DNA, 237 bp, Morganella morganii; identical to SEQ ID NO: 76860

SEQ ID NO: 283106 - DNA, 708 bp, Morganella morganii; identical to SEQ ID NO: 76861

SEQ ID NO: 283107 - DNA, 2631 bp, Morganella morganii; identical to SEQ ID NO: 76862

SEQ ID NO: 283108 - DNA, 315 bp, Morganella morganii; identical to SEQ ID NO: 76863

SEQ ID NO: 283109 - DNA, 291 bp, Morganella morganii; identical to SEQ ID NO: 76864

SEQ ID NO: 283110 - DNA, 318 bp, Morganella morganii; identical to SEQ ID NO: 76865

SEQ ID NO: 283111 - DNA, 741 bp, Morganella morganii; identical to SEQ ID NO: 76866

SEQ ID NO: 283112 - DNA, 438 bp, Morganella morganii; identical to SEQ ID NO: 76868

SEQ ID NO: 283113 - DNA, 318 bp, Morganella morganii; identical to SEQ ID NO: 21468

SEQ ID NO: 283114 - DNA, 315 bp, Morganella morganii; identical to SEQ ID NO: 76870

SEQ ID NO: 283115 - DNA, 654 bp, Morganella morganii; identical to SEQ ID NO: 226698

SEQ ID NO: 283116 - DNA, 402 bp, Morganella morganii; identical to SEQ ID NO: 76872

SEQ ID NO: 283117 - DNA, 438 bp, Morganella morganii; identical to SEQ ID NO: 76873

SEQ ID NO: 283118 - DNA, 327 bp, Morganella morganii; identical to SEQ ID NO: 76874

SEQ ID NO: 283119 - DNA, 258 bp, Morganella morganii; identical to SEQ ID NO: 76875

SEQ ID NO: 283120 - DNA, 246 bp, Morganella morganii; identical to SEQ ID NO: 76876

SEQ ID NO: 283121 - DNA, 195 bp, Morganella morganii
atgtttcacatcatgtttgggactattttcatagtgatgagtgtggcttctttggttgggcttgttttacacggccatgaatacacaccgggacactttgggaatatgaccgcattgtgtatcgcatcgactctggcgtgggtttgggcgctttcagcagcgaaagaatcctggtacatcctgaagagtcgctaa

SEQ ID NO: 283122 - DNA, 585 bp, Morganella morganii; identical to SEQ ID NO: 76877

SEQ ID NO: 283123 - DNA, 885 bp, Morganella morganii; identical to SEQ ID NO: 76878

SEQ ID NO: 283124 - DNA, 429 bp, Morganella morganii; identical to SEQ ID NO: 76880

SEQ ID NO: 283125 - DNA, 552 bp, Morganella morganii; identical to SEQ ID NO: 76881

SEQ ID NO: 283126 - DNA, 273 bp, Morganella morganii; identical to SEQ ID NO: 76882

SEQ ID NO: 283127 - DNA, 360 bp, Morganella morganii; identical to SEQ ID NO: 76883

SEQ ID NO: 283128 - DNA, 216 bp, Morganella morganii; identical to SEQ ID NO: 76884

SEQ ID NO: 283129 - DNA, 825 bp, Morganella morganii; identical to SEQ ID NO: 76885

SEQ ID NO: 283130 - DNA, 480 bp, Morganella morganii; identical to SEQ ID NO: 76886

SEQ ID NO: 283131 - DNA, 303 bp, Morganella morganii; identical to SEQ ID NO: 76887

SEQ ID NO: 283132 - DNA, 423 bp, Morganella morganii; identical to SEQ ID NO: 76888

SEQ ID NO: 283133 - DNA, 255 bp, Morganella morganii
gtgaatacaacatttttattgatggccgagtatggaacatctcagattccgctggcgatagtagcaaaaaaatttcttaacattacaaaagattatgctgaaaaaaaagcaaacctaggtgaactccctttccctgtttatcgggatacaaccagtcaaaaatctattcgcatggtacatattaatgatttagcagaatggattgataaagaaagaaacgaggcaaaaaaagaattatacgctataaacacctaa

SEQ ID NO: 283134 - DNA, 201 bp, Morganella morganii
atgcataaaaaacaggttttggcctacttcggtggaacaagcaaaacggcacatattttaggtatttcccatagtgctgtttgccaatggacatctgtcgttccggaaaaacaagccttgaaaattgagcggcttactaatgggaagctcaaatataactctgcactttatcaacatagcagcactgagaagctcgattaa

SEQ ID NO: 283135 - DNA, 465 bp, Morganella morganii
atgaagaatgaatcactgaaagaagtcgtccgggaaatgtgcggcgtaatacctggtgggcgtgatgcaatggcaggggcacttggattatccattacctcattcaataaccgattttatgagaaaaacggctgccggttttttgatcaccacgacctgatgatgatgcaggaagtatccggaaccgttttgtatgccgagtatgtggctgctgaatccggcatgttgctggtggatggtcctgtttgtgacacgttggatcgcaccgatttatttgaacgaggcataaagacatctgttatgcgcggctcagtagatatatgtatcggcaaagctattgaagacggggaaattacagaggatgaggcaaaggagatcagaactgcgcataacaaacacatgcaggccagaacagaagaggttgagtccacaattattttgtatacacgggctccgaaagggtga

SEQ ID NO: 283136 - DNA, 126 bp, Morganella morganii
atgtcgctacagcaaatgttgaataaagatgctaaaaaaagcataaatagcttttttacacctaaaaataccagcgaaaaaaagaaaccaagtaactattttacaaaaatattaaatcaaaaataa

SEQ ID NO: 283137 - DNA, 1341 bp, Morganella morganii
atgaataaaaatatagtgatagatttcctgaatgtttactttgcatgtattgaggacaacatcttgactgctgaaattgctatctataataaaaactgtgttgctttagctgctgattccgcagttacaatctcatctggttctgagactggtaaacaaaaaatctacaatggtgctgaaaaattatttgccctttcaaaacatcatcctgtaggtttgatgatatttggcagtggaagtctgtcgtcatccccgtgggagatagtaatcaaagcttacagaaaatatttaggccaatcctcttttagtaaactagaggaatatgccgatgatttttttaattttattgaaactcatgatgaaattatcacgcaaggcatgcgggaagaaagttgcttccagttcttatctggtagtgttttttctggtttattggaatcatttaactcaacgaaggacggcacctactggagtacttttaacttcgataactacatcgttgagctagaggagtactgtaactcagcattatcagttctctctgagatagactttcttgatggttttacccatgatgatattgatgtcgctcgtgagttttgcctcaaatatacatctaccatttgccaccagggactagaggcggagaaattgccagatccgttccttaatttactaaatgaaatttttgctataatgttgtgtaagaaaagcgatattggaaacacgtctggtttagtgttagcaggatatggcaatgatgactactaccctaaagtattatcgtatgatgtatctggtatctttaaaaataagctaagaaaatcacttaacaagcaaaagtgttctgataatggcgcttgtggcgttactccttttgcacaagatgatgaagttaagtcatttatgcaaggagcaagcccaagagtgatggatcatctccatgatggctattctaactgcttcactcagtttgtcgctcaattagacaagattttagactccaaagtgccggataatctatcaataaaagatgaaattgcacaagcatctcagattcttttttcagatttaaatgagagcgttacaaattttttacgtgaaaactacataaataaagttattgatatggtagagtttttaccaaaacaagacatcgcttacatggcggaatcacttgtcaatctcactgctttcaaaagaaaaatttctgatgatagcgaaaccgtgggtggaccaatagatgtcgcggttatatcaaaatttgacggttttatatgggtaaaaagaaagcattattttgataaggatctgaattatcgcttctttagtcgaccatag

SEQ ID NO: 283138 - DNA, 270 bp, Morganella morganii
atgtttgataatgatgccgaaggatccagagggttaactgagcaaggcaaaaaaaatattcgctttcgcgaactacttgacagtattaggcttgatattagtgatactgctaaatggggtagttcctcaactagttacaagttaagcaatgaagataacaaagatttttcagaagcattggttaattacttcgaagaacgcgagtatgatgtttcacaaaaaggtaatactctgtacattagttgggttttagaagattctgatgactga

SEQ ID NO: 283139 - DNA, 2799 bp, Morganella morganii
atgaatttatctgaaattggtgaactgtgcgcagacaccccccggatgacggtatttgatcccagagggctgacagtgcggacagtggattttaaccgcaaaatcagtacagatatacccgaagcactgataacccgctatcagtatggagaaagaggtgaaatgcagatgtgtgctgatccgcgtttcagtgtctctgcacagggaaatgaacccggatatcagaatctcgtttctgccacagatttactgcagcgccctgttcatcaggtcagtatcgacagcggtgaatcattaagcctgttgcatgcggatggccagcctgaatggacaacaggaaatccgggagaggaggcagtcagccagcgttttacctacgatcgtattggacgtttgctgtcacagcacagtcttaacggaacagaagagatcttattacagacccggcgttacagtgatggtgttgataatgccgaagaatataattgccgggggcagtgtacagagatacagaataacgccggaactgaaacatttacggagtttgatatttccggcaaaaataaaacgttcagccgccgtttctggtcagtacgtgaccagagtgctgatttgaatcatccgcctgaagaagaaatgcggatgtggattcaccgtaatgatttatcggcatcaggtaacgtccggcaattatcgttgtcctgtcatgaatccggacaggaacgcgctgtttatacacgccgcaatgggtacaaccggcgcggacagcttatcagcagtcatctgactgatgagggcggaaacctgcatgcattactgatatcggcagattatcatgcgaatggtgcgtgtcagcaggaaatgctgggtaatggtgtgacccgttattatgcacaggaacatttcacaaaacggctgttgcgtatttcaacctggcgtccggggggaaataaaaaacgttacccgattcaggatatttcgtatcagtatgatcctgcgggaaatgttactgagcgttatgatctgggccgggaggatcagtattttgataatctgcggatcacggcacataatcagtatcactacgattcctgctaccgcttacgccgcgctgaaggccgtgaagcgctgaatggcggaaaaagtacaataacgccgcttatcagcggatcacagcagttagtgaattatcagagatggtataactatgataatgcgggcaatatgacgcagcttcgtcacagtgccggacataataactggactcaggttttttctgtctcgccggagagtaaccgcagtttaccgcagccggtttcaccgtatgaagtggaacgcttttttgatagtttcggtaacctgaaagaaagtaacggcgtgcattttacccgcgactcacagcagcagcttgtccgcgcggatggtgcacggcgggcaaatggcgcgtcggactatgagttttatcagtatgacagcagcggtcagcgttgcagtaaactcagcagccggattgctgacggtatcactcaggcccgccgccgggaaacggtgacatatatttccggcatgcgtttgtgtgagtatgactacgacggtaaaccacagggtagtcattattcactgagctttccgctggccgggcattcagcggtggtatgcctgtctgagcgggagccggaaaagaaagaaatgcccctttctctgatgcgttataactgccttgatgcgcagggctcggtcgcgctggagctgagtgcagagggcgatattattacgcaggaggaatattatccgttcggcggcacctcactgttcagttcgcggagtgagagtgaagcagactataaatatcaccgttacagcaataaagaacgggataatcttaccgggctttacgattacggattccgttattatgcgccgtggttgtgccgctggatctcgccggacccgctgggaatagctgatggtatgaatgcttattgtatggtgcgcaataacccggtgacatacagcgatagcgccggtctgacgtcacagacaattgagttgcaggaattgcggccttcatccgagtatcggagaatagcatcatcggtatataacaccaccaccgaaccggtacctcagaagagcattggtgaccggttacgcagtgccggcagagtactgagccgtcctttaatcgctatcgcacagggaattgcccggatagggcgggcaatccgaagtgttatcagcgggctccgttctgcattacagcgtttcagggggacaggtgatggtgctgatgagcagggaatgcagctgttgctaccgatggaaactgagtcagaagatttttcaggcagagttcgtatcacagaatcagttttgacgtattcaccggaaaataatgaggaagatctggcctgggatggctttctgccggacagcgacggagagcaggaatatctttgggacgaaagtgatttcgccatagattacgggtctgaggccggtactgatgaaatatttggtatcgggggacttgataaaaataactatgaggatgatcagttatccgattatagctgggatgatattagtttgagatcggaatctgatttcggaggggataacgttaattatccatatgaagcgtttaatattacagaagggccatacgatgacacaacaccacttctgaatggttcaaataacagagcaacaccggcagccatttcatcactggtattatctgcctcgattttcagcttgctgtggtggtatcagtctcagcatacctaccgccgctga

SEQ ID NO: 283140 - DNA, 363 bp, Morganella morganii; identical to SEQ ID NO: 80769

SEQ ID NO: 283141 - DNA, 828 bp, Morganella morganii; identical to SEQ ID NO: 28366

SEQ ID NO: 283142 - DNA, 432 bp, Morganella morganii; identical to SEQ ID NO: 28367

SEQ ID NO: 283143 - DNA, 729 bp, Morganella morganii; identical to SEQ ID NO: 50969

SEQ ID NO: 283144 - DNA, 561 bp, Morganella morganii; identical to SEQ ID NO: 102670

SEQ ID NO: 283145 - DNA, 246 bp, Morganella morganii; identical to SEQ ID NO: 102671

SEQ ID NO: 283146 - DNA, 216 bp, Morganella morganii; identical to SEQ ID NO: 52322

SEQ ID NO: 283147 - DNA, 855 bp, Morganella morganii
atgatggagatggactttaaaatgcacaatgatctgggtctcggtttcatttgtaaaaatgcaagaacatcgtcaaagccaacgttaagaaaagttacttttccggtaagcgcatatgaaacgtctaagctttctttaaccggttttcaatgccccacagcctgccgatttcctttttttgtgctatgcatgataatccataaccatctttcgtctgcatgccctatcaaccaaaatgaatgttcaaatcatatatcgcaattttctatcgacattaaagtacaagattggcttagccgttcaagagtagcgtttattgatttccataatctaagaaatacagataaaaccacattaataacagtggaacatcttgaagctttacttactgttatgtcaactactcttgtcgcttacgctccatattcaaaaaagagacttaactttagctttctaaattcatttactttgtctaaaacttctcaaagttacacattaactttcccggtagttctcagtccgcttttagatgctcttggcggtttcattcaggaatgcataactgaaaaattgttaaaacgacgaaattcgaatttcatggtttacgagtatcttaaacgttcaggccagagctctcataaagtggaggacattaataacgacttacagcttaaaactctaaatataagacttatgagtgtccttactgggctttctcagcaaggactcatttcatttatttgcgaaggaaagaggggcgaccggagaatagaagagcttcagtttataccttatgttcaacgaactcaccctgaggtattaacttttcaggaatggattagcccagttgattag

SEQ ID NO: 283148 - DNA, 543 bp, Morganella morganii
atgagggaccgtttcaacaaaacctgtatttctggtcaaccgcttcaaagagcggctttgttttactccctgaatcgcctgggctataacggtatgtgccgctataactcagaaagaatctattcagtgccctgggggaaacatacagaactgaagcttgacttcaataaaatagactacctttcatttcgtctttcaggtattgaactgatcaccgctggttttgaggagactctggccgcaaccggtgaaggagatcagatttattgtgatccgccatatgacaaaacaagcaaaactagttttgtcagttacgatggtaaaccgttcagccaaagcgaccacgtgctgttagcaaatatgctcgttgacgctcacagaaaaggcgctgctgttgcgatatcaaatagcctgacaccattcactttgggcctctatgaagagcgtggattcgtcatacacagactcagcgcttaccgatccgtaggaagtaagccaaatacacggaaaacggaaacagaaatactggccgtgctgaaatag

SEQ ID NO: 283149 - DNA, 1164 bp, Morganella morganii
atgagtgttttactgacagaacctacacagcaagctaatgacaaggtctttaaaacggcccatgttgccttttcagtagttactggcacaggtcgttacgtcaccgggcttaaacagttccgtgatgcaaaccctgaactttgtactgaagtaagtgaccagaaagcatgggctatccacccttcagtaattcaggtcacgccaggcttcaactcccgcgaaatgggaatgggtgacgattactataagctccctgaggttgaagaacacatctacaacatcaagaatgcctacattcgaggtgactatgtagaccctatccgagtacgtgttattgatggggtaccttttgttcgccaggggcactgccgtttaaaagccgcaatgatggcatgtcatgaaggccatgacataacaatcctttgcgttgagattaaagaagatgaaattggctgtgagctcgcgaccattgatggtaaccgtggtcttgcgctttctcctgttgcgcttggcgagtcctatcgtcgcctacattctcttgctggctggtcactcgaacgaattgctcaacgtgaaaataaaagcccgacgaccatcagttctcttatccgcctgacaacctgttctgttgttatcaagaaatggattcatgctgacgctatttcgtatgtcaacgtgctttcactgatcgatgagctcggtgaaacagaagcaatttcacgtatcaagaagatgatcgcggaacttgagcaggccgatgcgaatggcatcacggtgaaaaaaacccaacatggtcaggtacgagtcagaccttcagacttcaagccagcacggattccgccggttattgccacaaaagccgtagaaggcgtcaaactcatcaccaccagcttattacagaaactgggggatattgaattgccggagctgacagattcaagtgctgacgaagaaatcaacattacgttgaaccgcagtactctggagatgctgagaaatctttcaaaagagatcacagaatcagagaacaagcagcttcgccgtgcggagaatcgtcaggcaaaacttaatggtgagaagccaaaatacccacgcaaaaaaaatgctaagaaggcaggggaagagaccgatcaggatactgacccacagccggacgcagaataa

SEQ ID NO: 283150 - DNA, 879 bp, Morganella morganii; identical to SEQ ID NO: 52347

SEQ ID NO: 283151 - DNA, 318 bp, Morganella morganii; identical to SEQ ID NO: 52346

SEQ ID NO: 283152 - DNA, 1692 bp, Morganella morganii
atgtcatctcttgattctgaagctaaacccgataatgcaggtcacagcgtactggctttaacaacctctcatagcctggtggttagctcttctgaaacatttcttccagatatgcgcaaagagctcggcattatcgcggatcttgttgagtcctataatgatgaactctgcttgttgaaacacatggctgtccagttcaaaacccacaatcaccagaaactttattcttatctctcaggctacaaccacagtatctctgaagcggatgccttgttcgcggaaaacgctctgagatctgaatactggaaacgcgttatggcactcactgatgttttgcctatcatgtcggatgccaaacgtaacgaatgggataagcagtttacggccgaccgctatattatgccgcctcaggtgatccctgatttcacagctgacgctgtagtgggcaccgtcgttgctttgcttaatgaccgcaatcaatttattaaagaaagggtttacgacgtcttccagtctctgagccgcagtcacaagaccaacaaagcttttgggttctccacccgcatgattactaccggagtttgcgagccgtctaaataccgctggcagaaattaagggtggattttaaagagtctggcatttcaccactgagcgagctccgcgttatatgcgcattcttccgtggcgaacaggtgaaggcgatccataacaccaaatcattggttgaggcgttggtcgaacatgaggggttcagaaaatggatctgcatcgatggcaatagtattcgtttcagggtttacaaaaatggatcaatgcatattgacgtccaccctgacatcgccgagcggcttaacaatattttatcagctatcgtaccgctagcattacctgccgaccgcatggctcatagcaagaaatctttggaggcattccctgtacttaagcagtgcatcgactttgatacacggatgcagctttctgaactgatgtttaagaatgacggggacaataaatggagttgctggacatctttagggtctctcgccgaacgcaaatcttcgagtgttgccgctgacacccttcggttcttaggggcaacagtaacaaaatacgatgtgacattttcctatgatccgtgtgaggttattcgttacatcggccagataggggagatgcccgatattgtatcacatcagttttacccttcatcttgccgaatcagcgaatatgtatattccctgctcggtgcaggggaaggggataccctcctggagcctaatattggccatgcggatttgcttaaatcattccctgccggtgtgatcgttactggcatcgagcttgatactttgaattgcattatctcccgggctaagggatacgatacgacagaagctgacttcctcacatggtctaagtctaatcaacagaagaagtttgattatgtcgtgatgaacccaccttttgccgataaccgggccaggctgcatctccaggcagctgcatctcatctcgcagccgggggatctctagcagccgttcttccattatctcttcaggggctcgataaccttctgggggaagaattccggacggaatggatggacgtttttgagaacgagtttgaaaacacgaccgtttcggttcgcatcctgtacgccgaacgtattcaacaagaggaagtcctatga

SEQ ID NO: 283153 - DNA, 177 bp, Morganella morganii; identical to SEQ ID NO: 105685

SEQ ID NO: 283154 - DNA, 456 bp, Morganella morganii
atgggggacattgtgattaaaaggcgtaacattcgacgatcagtttatggattgcttattgttcttatcgccggaaatgtgtggttaggccttagagctgataaaattcataaagtgcgttatcaggatttctggtcaccggcaactgtgattaaagtaactgtaatgccttcaacgaatgaaatccagctcagtggtaaaatccctaaatcggtaagagtttcaaacaattatgttgagtactcgttaccgggcacaccctcggccaagaccatttaccgaagcgtgttagaagatgagatgctcactttgcttaatgctggaggtcaacttgaagttaaatacactctggacaagcagacaaatcgaactaaggtatgcactaagtgcttacgggtgattaaagatattaaccatcaatattcagccactgaggtaaagcatgggcagtcctaa

SEQ ID NO: 283155 - DNA, 282 bp, Morganella morganii
atgggcagtcctaaatttgaaattgctgagcaaattaaaatgtggatcgttgtttatctagtttgctttttagcactttactgtgtgttaagcgctctacatgcgctttatgatccgctaaatttacctgccctgacgtggcctatcagctgtttcgtggtgcctgaaatgacaagttttggcagtgcattattagcttttgtcctaacgccaggcctttgctctataattgctgttttattcggtaagtctacctttaaaaaagctaaaacaaaaatatag

SEQ ID NO: 283156 - DNA, 627 bp, Morganella morganii
atgttatacatgctcttatgctgttttctgatgctcaacagtacattcgttatgttcagagcaatgtctgcaataagtaaaggatccgctaaagaaaaccggtctgaaatatcgctgatagtcctagcaacacttggaattgcatcaccattcattgtcgcaatgattactattaatgaaagtatgacatctaaaacagtaacagatttttctttgggtgctcagtggtccggaatggtttcagcggtagcgctaatggggttatatgctcaacgcgtttggaaagagaagaagtccttatttactggcgctttcctggcctcttccttaatggcctttatttttactgacagccttgttttcgtatcccagaaggacaccggcgttctggctactttcgtactcgataaaaacgctggagatattgattgtagtcgcccggctatgattgtccattacagtaaaggtgttccaacggactggcgttgcccaaccagtatcatgttgatggcgtattcttcatatccttttttaccttggcctgagtatagtcatggtaccagccagtctcttacggttgttattgatacatttatggaaaacgctgttaatctcagccaaaaataa

SEQ ID NO: 283157 - DNA, 2457 bp, Morganella morganii
atgcgtaaaactctaattggctgcatggttgcaactgcccttgctactgtatcttcggcacatgctcaggtatttagctactcatttacagataccaataaggctgttcggaatatcaagcctgcaacacaaacatatcttaatcccgctggtgttttgactctgaacttgatatcgggtcttgatcggtacgagcgagtgacggtcacacgagacagcgataaaaaggttatgtattcctccgtctcgaccaaaacgagcgttgcagatcgtatcgttgctgccgatggaacagaatactatggaaaggatatggttctaccggcgctcggagaagggacctttactgtagtcaatgaaactctggatattcgccagactgtagtgagcacatctacttatcatttcatcgttgatacaactcctccacgctataagagtatttatccgagtcaaaacgcaggttacgacatggtactttctgggccactttgggagttgggccgtggcggtagtggccagttttctatatttgcagacggtattgaggatactagtggaattgacaagatccgtcttgtcattaaacgaagtaatggttctgtggtctccgacaataacctgagttatgacacagccaataaacgtgcgttctatccgtggattaaagatatgaacacccaggctggcatgccctcaagtgatcttgatgaagaattcaccttcaatttcatcgttacggacctggcaggaaatacgcttaacattcctccccagcggtttttatatgacgatcaaatgggagaatttacgccatttgcagttcatgactcacgtgtaagcaccagtgttgtacccggcatttcttcgggatacgtcccgtttaaacgaggccttacagtgctggaaaacccctacaagttggttatacgtatcccaagaactaactggaagccatatcgaaatggtggcatgagcattaccaataactatggcggagtacaggtcctttccgaagatgccacctatgtctacgtggaagttaagctgccacagggtgccttagatggaaactactatagacctgtgaatacatatcaatggtctggaggagatcttggtcagtatgccagctggctcaactgggatcctgcctctgtaaagagtccggcttggggaagttcacccatagaacgacaaaaggctgatggaacatggttcaacagcgtaaactggaacctgttcaaggcatctgatatgcctataaaacttactaatatccgattcaatgtacaggccaggccatatgatcaaaaaatcactggcggagcaacatgcagtattccagctggctcaacaacctgtaccgtctctttgccccaggatattataaatggcactaccggctatcttcatagtggctatgaagtaaggtcaaccaccgaagcaaccttctttgcccctatatgggagaatatagcctggcatacactgggtccctccgtcactggatttgattacaatgaaaccaccaacattctccaggtttacgtgaatcaacctggagatggttcatatttcgaccatgtttatgtaaatcgagtttggttgtcagataaaaaccgtaacaacgcagaaataagcgtaaccggcaaacaaacaggtagaaatatggcgtctgggaactacacgtatgagttcaacatgaaagaggtaccagaaggcagttataacgtggtgattaatgcccaagatacattcaacaataccggtaacctcccttatcaaacggttgtcgttgataatacagcaccatctgtaagtattagctacgaaggaaaaccgatcagcaaaaacgtaacagtatatgggctggagaacgtccgtatacagctcaccgatgctctaactaaaccatccttaagccgtatgactcttcgcggtggccctgtttctgatgcggtggaattgtcttgggtgaatctgggaaacaacctgtatgcacctaattatcccaagatctttccgtctcttaatgaaggcgaaacatacactctcacagttcaggccaaagatgagatgaacaacgttaaagaaagctcagtcgaatttaactaccttccaaacaatctcgtcaggctagagaatctgaaaaccttagctgtcaatgcttctctcaaaacatctgacaatactcctctggctgttctgtatgccagccagctgcgtaaaaaggatggttcaatcgctacagggcttcaggacgcagtgcttactgtccgtaaggacgctgcattcggcgtgactgtaaatggcgtttctgcgatgccaggtgaaagcaaagagcttcaactggatttggggctcggggacagccgtagctttcctattttccctgctgtatccggccttactggcagatctgagttcatgattaacattgaagaattaaaataa

SEQ ID NO: 283158 - DNA, 1089 bp, Morganella morganii
atgactaaagagaaagatactgagcagcaggacctggtcaccagggctttctctgttagagagaaagaatcaggtaaagacatcattttgcgtcctaacagcaaccgtacggtgcagtctattgctttgatgcggctcgggctgttcgtcccatcaccaaagagtgtggggcgtcaaaatcgggaatataaaacggttggctttgacgcaacgaaagagttacagacgctctctttaatggagagcgaggggttcaccaatatttcaattgtcggtgagcgtcttgatatgtcagtagattttaagacgtggatgggcatcattcgaacctatgccaatcatccgattaacaatgacacgataagcttaaaattcactgaattcctcaagctatgtacgcctgaaaattatcgctcatctacagcgtccagaaaacgtatagacgcctccttacgcaggttagcatccgttaccttgtcgttcaccagtaataactcgtccaaagtctatacaacgcatctggtacagtctgccctgttagacccggaatcagatcaggttgtccttcaggttgatcctaagattttcgagctctatcaatacgatcataaggttttgatgcagctgaaggcaattaaggagttggccaagaaggaaagcgcccaggctctctatacgttcatagagtcattaccgccaaatcctataccgatatcccttactcggctgaaaaatcgtctgaacctcaaaacacgagcaaatagtcagaatgctaccgtgagaaaggctcttgaagagttggcatcgataggatacctccagtacaccgaaattaagaaagacggaaaagtatacttccagattcataagcgggatcccgatctgaatttgaacaatactcagcctcctttagaagtggttgaagatgaagaagagaactcagggtcttctgttttagaaggtgagttatgcccaccagctgacccgattgacggcgatgatgttcttaccgtccatgatttaaccgctgaagaactgcgctatattcgtagtcttcgaagccagaaaaagaacagcaacgccagctaa

SEQ ID NO: 283159 - DNA, 657 bp, Morganella morganii
atgcggcgagtcacggccattgtgaatctcgattggattggcgaatacggcttccggttgggccagatgtcaatggttatgcttcatccagctcattactgtagtcattgccgttcagttgagctgatgctcctctcattctatatggcgacaacggtagtgagcccagaaagtgactaccgttgtcatggccgtccagtagagcgggtcaacctcttaactcacagggtgacaacggtattaagcccagaaagtcactaccgttgtcatggccgtctggttaagcggatcaacctctcaattcacagggtgacaatagtagtgagcccagcaagtcactaccgttgtcatagccgtcccgttgaccagatcaacctcttaacttacaggatgacaacggtagtgagcctattaagtcattaccgttgtcattgccatccagaagagcggatgatcctctcaattcatacggcgacaatggcagtgagcccagcaagtcacttccgttgtcatagccttccagaagagcagatgagcctcttaattaacagggtgacaacggtagtgagctcattaagtcattaccattgtcatggacgtacagctgagctgctcatcctctcaattcacacaccgacaatggtagtgagctattaa

SEQ ID NO: 283160 - DNA, 2421 bp, Morganella morganii
atgaaacatctcgcttttattactgctgtagccggactcggtatgtctgttcaggccccagctcagatatatgaatcggcctttaaagacacgaacggtattgagatccacgccccgtcttctcgtcttatgcttaatccggcatcaccggtaactttgacacttatttcaggtcttgatcgtttcgttaatgtcaaagtcacgaaagacactggaactgtcattcttaatactacgactacacggacgggtgtatcagaccgactaacagctgctgacggtagtgagttctacggcaaaaaagtaactttgcctgctttgggtgaaggcaaatttgtcgttcagataaacgtcttagatctcaatcagaagcctgtagcgacctataactataactggctaattgatgtcacccctccagcggcaaatgctcttaccgctaatactggttctggctctaccgctggtgacgtgtggaagcttggattagaggcaacggggcagtatgacttcacctcttcgggcgtaagtgatgcaaatggtattgataagggcctaatatatatttacaggcaggacggtagcctctacagcactacacagatgcagtatgacgtatccggccaaaagatgtaccacacttactctaagaattcagttaagggaaccggaataccagacagcaacctggatgaagactttactgcaaaagttgttatcttcgataacgcaggtaatagccgaacgctgccaactcaaaaatttcgctacgacaacacgctgggtgagatgacactgtgggccgttcatgatccaaatacgtcttccagcgtcgtacccggggtttctaattatccggcttacaaagccggtatggtcgttaacgaaaaccctattcgattagtctaccggatcccaaaatctaactaccgtgcttattcagaaggtgggcttcagttcatcaatcaatattccgcccccaaagagatagctgtagacagcacttatgcttatgttgaaatgactcttccctatggctcaattaatggggatatggctcgtatggcgaactttggccagtggggagggtattatccgtcatacagcctcgttctaaacccatctgcaaaccaaacgcctgcatttgcgggtacctgggtagatttcctcgatgataaggggaactgggttaagtggaaggattttgagagtgtggcttcatcacgactgccaattaaaatttcccgacttcgttttaacgttgaagcccggccctttgcacaagagatcggcggtaaggcgacctgcaccattccggcaggaaaaacctcgtgtgaagcgcctgagacgtttgatatggccttgggtacccaaggctacaatagaatcctttacttcgttcgcagcatcagcaatcccattttgcggtctgagcaatggattatgacacgttggaacaataaacaactgccggtaataaactcgatatcatatgacgagactaacaagcagctggatgtactggcgtcacttgaaggcgatggtaactggttcgactcggtctcattgagggaattttatctttccgataagaacaccggtacccggatgtcacccacaggagtaatcaaatctcgtatctcaggtaactacacgattgcttatgatttatcccgtcagtctgaaggaaaatacaacgttgaggtcaacatcagggacttcttccagaaccagaccaataaaactttcggagaaattgctctggataacactcctccgacagtggccataacattcgacggaaagccggtaaaagacgatacggtagtgtacggcctggagaacctcaggattgctctggcagataatctgacaaccccgaggataacccgtcttcagctcgtaggtggccccacagctgataacgttgagcttacgtggtcaccggcaggcaaagatacatacatgcctgagtatccgaggctgttcccaaatttcgaaccatctgaaaattattcaattagcgtaacagttgccgatagtcagtcgaataccaaaacctatactcagaagttcagttatctaccgaataaccttgtgcagttacataatctacgcacattatcggtcagttcgcctctcaaaacgacagatggcgtaccacttgcgtacttgtccactaacgttctgcgtaagacaaatggagaaattgctaaaggggtccagaacgcaacgctgactgtgcggaaggatgcagccttcggtattaaatttaatggggcacaggcggctccaggcgagtcagttgaggtgcaaatagatatgggccagggggataatcttctgttacccgtttatccttccgaaaatgggaaagttggcacctcagaattcatgattcagatcgacgagttgaagtaa

SEQ ID NO: 283161 - DNA, 588 bp, Morganella morganii
atgttttcaaagcctatgaccactttcacaccagaacgtattgaacaaattttggaatttgccgagggtagtaacccaagcgaagcaatgagtctcagagctgacgaagttgctgtactggcacgtattggaaaggcagttatgtcgattgcgcctgtttatcagtgcgagttttgccaccatgacgcaaccgggcaacttcagtggcactgggaagatgtgaacaaagctttttatgataaatacgatccagacagacgcggaagacgtcgaatcctctataccgccccgccgatgcctttagtttcggctgacctgcttaacatggcttcatctgctattgaagacttgctcactaacaaagacagaagtggtgcgggaatgtggaatgacattccagaacagctacgacgcgcagcagaactggtaatggataatagccgggccgctgaaacagaagcgatgctgatgcgtctttatgtagaatgtgacacaggtgagcgcaggggcaacggcactcaatctggcgtagcaatgccttcttggcaaaccgttgaagaggcacgtgtgttgctgggggtgaaatga

SEQ ID NO: 283162 - DNA, 264 bp, Morganella morganii
atgacgcatactgccgtttctcaggctaatagtgctttgcagctacccacggtggagcatgtctacgcacttctgaaagcaaattgtaaacctgaccgctttgacgggcgtgacggacccgtgtggggccaggaatactcgtggaatctggcaaaagatcgcttacaggatctggagaaatacggtaaggcatatgtctcccgtcatgaagaccgtatgggggaaggatttagttttggtcctgacctgttaattattcgctaa

SEQ ID NO: 283163 - DNA, 645 bp, Morganella morganii
atgtctaaattagaactgttaaacccacaaaattctgccgttatttttattgatcatcagccgcaaatggcctttggtgtggcaaatatcgaccgccagcagctgaaaaataataccgttggcctggcaaaagcagcaaaaattttcaatgtgccgacaatttatacctccgttgaaacagaaagcttcagcggatatatctggcctgaattactggccgtccatcctgaatcaaaacctatcgaacgtacctccatgaattcctgggaagacccgaaatttgtcgaagccgttaaagccaccagacgtaaaaaattagtgatggcggcattatggacagaagtctgcctgaatttcccgaccttaatggcgattgaagccggttatgaagtttatattgtgacagatgcatccggcggtacctcagttgatgcgcatgaacgttctattgatcgtatggtgcaggccggggctattcctgtgacctggcagcaggtattgctggagtaccagcgcgactggtcccgtaaagaaacctatgacgcagtaatggggctggttcaggagcacagcggtgcttacggcatgggtgtcgattacgcctatactatggttcataaagcacctcagcgcgttattaagtaa

SEQ ID NO: 283164 - DNA, 378 bp, Morganella morganii
atgaaagcgttagacgtggtttcaactcaactcaactttattaatctgttggatcaggcaggatatgctctttcagaaattgttgtaaaacgcttcagtgctgcaccagcctttaacgaagggcactggttgttcattgcagagcaggataaccgctacattgaagtggtctgtattctctctttagcttcagaaagcggagagcagcatgttgatgtttttattaatatgttcgaagacccgattgatgatgttatttcacgaaacattgaaaccaaaacctttgcgacgctttataaatacattgaacgtataccttttactccgggtgtaaagaaagaattcttgagcagtattgagaacatcaattttagttaa

SEQ ID NO: 283165 - DNA, 429 bp, Morganella morganii
atgtctaataatactgaagtcattagctgtgatttattttcaactctatcttcacttaattttagcaccgaggatattacaggtttgactccggccaactttcgaaagggagctttcttacatgcaaaaatttctgctagccaggccacgcgagcgactgatatttccattcaattactcacggatcgtgtttcaggtgaaatgaactacgtaatagtaattggcaggcacgaaggactcctgcaaagcgaagcaattgacccaaacgctgataagcaataccgggaaaaccgttattctcgccattttatctcagtaaccgatgccagtaccaaagccctgaaaaaaacctgcaaggtaatgaaagcatatatcaaagagcaggcatttaagcctaacacctgggggcacagtttcattaagggttga

SEQ ID NO: 283166 - DNA, 258 bp, Morganella morganii
atgtctgaaaaacactttatcgttaaaatccagaaccgaaacggcgaccatgagaatagctatgttcggttactcgtcagcgattgtgagaaaaatgcttgccagacggcactcatttcagagtgccatggcgagcttgaacagctgagttttgaggacggtggggtttacgactacaacggcgaaaatcactacagtgtcaggagctgcgtggaggttgctccagaagacgttgcaactttgcaacgcttcctttaa

SEQ ID NO: 283167 - DNA, 609 bp, Morganella morganii; identical to SEQ ID NO: 118047

SEQ ID NO: 283168 - DNA, 1251 bp, Morganella morganii
atgagcacgatttctacggatttaattgcacggatctacgcagcctccgaattgccgttgagcaacgacgagctttatcgcgaagtgcagcgtgaaactggcatgtcggatgccgaattgcacgaactgaaagaatttgggtcagataaaaccagaaccagcggcgtcaaacacaaagtacgttggtttcagcagactcttcggcaggccggagtcatcgaacgcgttccagaaaaacggggcgtctggagatactcctctaagacgaaaacaaacctgcacgagtcatgggaaaagctctgtgttgtcggtttctcaacttctcttggggcatcggtttttggaaacgcctatgccttcttcagcaatatcacagagcaaattcatctttgcctgacctcgccgccttacctccttcgaaattcaagagactacgggcatggcggggggcgtggcgagcaggtttatattgactggcttctgcgtatcctcgaaccgatcgtgaaacagcttgtacccggcgcaagtgtggcattgaatatcactcaagatagctttaataggggcaggccttcacgttctctgtatctggagcgtctgacactggcattatgtgacaagctggggcttgagctcatggacaggcttcagtgggtgaatcgcagtaagcccccatcgccaacgcactgggcatgtaagcaacgagtgcagctctgctcatcgtatgagcctgtgctgtggtttaccaatgatgcgagtaaggttcgttcaaacaacttacgtgtactgcaaccgcattcagagcagcatcttaaattgcaggcagcaggcggtgaaaatcgcacgaccttttatggtgatggggcgtaccagcttaaaagcggatcctttggaaataaaacagaaggaacgatccccaaaaatactttgttttacggcaatagctgcgctgatacgagattttgccattccattgcccgcgagctaggttttccgctgcatggtgcaacgtctcctaccaggcttgcagcgtttctgattgagtttttgacagagccgggagatcttgttgtagatcccttcgctggcctgcataaagttcccatcgcagccgagcgacttggcagacgttggctggcgacggacaaaatcatggaatggctggcgatttcccgaaacctttttacggccgcaccgggatataagagtaaccccatgctggacgagctcgccgaactgtatcgggcttaa

SEQ ID NO: 283169 - DNA, 321 bp, Morganella morganii; identical to SEQ ID NO: 118045

SEQ ID NO: 283170 - DNA, 327 bp, Morganella morganii
atgcattctcaggatcctatcacgaaattaacccagacgttgcaacgcgacgatggttctcaggttcgtattgtagcgcagcggggatatggaagtgggcttacagcctcgcttgatgtgtacgttctccgtcgtgattcctctgaaagaaactggtcactgtgcggaaaaaatcctcacccagagtggagaaagatgtcagtagatgagtatcagaaatttggacgctctgaaatgctgcgttatgccacaccaggtgaaattctcagggtggcatccgctattggccagccaatgagcttcctcgatggcaaccctgcgttttag

SEQ ID NO: 283171 - DNA, 258 bp, Morganella morganii
atgaatctgaacgaacgaagcacgagcgcagcaacgccagatttgagccgactttatctcatttccgggcgcattatgtttgatgatgatgatcaggcctacctggtcgaagccgactcccctggtgatgcagaggaggctttccggcatcatattgctgacagtgccgacgacttagaaaaggtgatcatagtttcctctacaagtttcgcttcagctcacagcagtcgcgtaatttgtcggcctgccgtgaagtaa

SEQ ID NO: 283172 - DNA, 792 bp, Morganella morganii
gtggcagataattatactcaggcgtcgtttattattccctgcactcaggagcaggtaaaaatggcacaagaagcaatcacattcgttaccgaagcagaaattgcagaaggtgagcgtttgcttgataagccactgacagattgttctctgactgagaagctgatcctcagtattatcgagaaccaccctgagtatgacccttctgagccgagctttgggcaaccatcctgcccagactgcaattatgaactgttgttcgcaacagaagttaccagcagtgggctggcagtttttcatggagagaccattgatcttgaccatgcaatttgcctcacaactgccgtgctgtcggtattcgacctctcggaaatggtaacaattactgctgcatttacatgcagtaaaagccggacagatgaatttgggggtatgactattctggtcacaaaggatacccactattaccaggatggctgtcagttttctcgtctcatgaatgaggctcacaaagccggtatccagtatgctctgtgtaaagtgacgcattaccacggtgagagcagctatgtggcaagctatgtcctgagctgcgacgtagcggattcagcccaggaggtcgttaacaaacgactgaaggcatgtgccggaaaagagccagaagacggaatctatattctgtgtgaagaagacaacactagtctttcggtcgaactcgttacagaactgtctccgctcgattacgacaagctgagcaagcttctcccttcccttgacaccctttgcggcgcttaa

SEQ ID NO: 283173 - DNA, 450 bp, Morganella morganii
atgaccaataaattcatagtttctaccgttgattgtatcaatgaatttgcaagtgacgttccgcagagtgtttccttacggatagatacaatgcttgaacagcgtatccgcaaattggcggcatacgtgaaagaaaacgatcttcatttaactgagttttacttctatgacgctaactggtcattttgtggtgaagatgaaattcaagaaataaaagacatggatgaatataagcatagcgacagcataaagcaggaagcgatgctgcgggaagtaatgccatcagcacgtacggaatgcccggttattagggtgatgaaagattcatttcagctttcagctctaccacgccattgtggtgatgacatgactcttaacactccttttattccgctgtctgagttgaaaacaaataatacggcatttattacgccgccaacctataactaa

SEQ ID NO: 283174 - DNA, 2385 bp, Morganella morganii
atgtttattgaaaaaaacgactcattccttgaattatcctcagaagttatttttcctgaggcggctaatgctgccattttgaaacatgataaatgggcggatgtttgggagacgctgacaaccgatgccgatctgaactataccgatgaaaaggagactgtgagtctttcttctctggtcatgtcagccacatctgctatttatcaggctattacggacggctggacgatgtgcgtgggatacagtggcggcaaagactcccattctcttctgcacctgtttctgatggcattgatcagggcagtacgtaacggcacaaatatcagcgaacatcatttcattcagatgtccgatacgctgatcgaaaaccctgagatgcactatcaggcttcacaggttctcaaccagctcagaatgttcattgctgaacaccagctaccggtcacagttcttgtcgcccgaccgtctcttacgcagagctgggtcggccgcattctgactgggcgcggacttccgacctggacaaactccgctacacgacagtgtacaaccgatctaaagatcgcccccctgcgcaaggccaaagcgctttttttgaaaaacgcccctgcatccgttcaaaaaagggtttgcctgatgctgggttccagggatgatgaaagtgcccgtagggccggaaatatcctcaaaatgggagggcaggcaagtaaagttacccttactgagcacggtggtgaactctatccggtaaaggagtggcgtactcaggacatctggtcctttctgatggcctgtggttccgaatcccgcttccctttaccaagctttatgccggataacttcagcctggcaacgctttataaagacgctaccggagagtgtatctggtcccctgagaagtccacacgcacctcagcttgtggggctcgctatggttgttcactttgcacagccgtcttagttaaccactcaatggaagcgcttatacatgctgacccggagaagtacggttatcaggcaggcctgagtcgtcttcagcgatttctttctaagatccagtatgactggagcctgcgggattacatcggtcgtaaagtgtttgaaggcggttatgtacgtcttcaacccaatatcttttcttcatccctgactgaacgtctctttcatgtctgttgcagccttgattatgttgaagccagacgtgcggcagagaatcgcagaaagctactttccggcgaggtggacgatacggcttataaccgtcgtatggctgagccacaatttcggcttgtacaggaagcaaacgtgatccacattgatttcctctggtcgttgcactgtttcaaccctcgcccgtttcgggcaattgagatctatcgtagggtctgggaagaggccgatctggaccttcttgaggatgagcctgacatgcagcctgtgccccgtacaccaatgccagctccactctggttgaaactgcccggaggccggttcggtacagcttatgatggactgactgatacgttgccgctgatgacctattttgacgggcaggctgaccccagggcttcacgtagcctaaagaccggagagagcagttctgtcgtcgtggcattcgaggaagaggatgagctgactgttgaagaagatacggcgtcctggattatctggcatgaatacgacgggttacgccagcgcatcgctgacggtgagtttactccaacgactgctgctcagtatcttcttcgttatggcgcggtccgaatttcaaaaggcaagggcgctgtctatcatcgtctcgcacaacggggacaaaccttttcccgcctggggataggcgacagagtgtcgcttccagagctggttgccagtcggcgttttaaaatactcagtgattctgcataccgtcaggttgtagcccggaaattgcgtggacagataaaaaagttcagattctgggcatgcgtagctgcctgtgttcagttgcacgtacacaacaagacggcactcggagaaagaattttaacgttactcgaaggtgagagggaacagcaacaaggtgcgatccaggcgaagctgaagtcgggaatgatggatgcagttctaactctgtgtaaccagcgacttcgggtgaaagaaaatactaaccagccagaggagttccgctattaccgtgccgtaagagctcgtttcatgcgccatttatctgaatgccttaagccagaaaatggcggcgttatccgtgacgttatctgggaactgagggtgctgagcagtgctcacggtacgaccaaaacaggtttttactatgtcgatagcaatcgcccgacagcgaaaggactgttaaaccgccttctgatgaggatggtcaggcaggtcgtataa

SEQ ID NO: 283175 - DNA, 840 bp, Morganella morganii
gtgtataaaaccaatatacccggtatcggtgtatctgttgcgataaagacagatggcaattcaagaggcaacattccctatcattttatacgaaagtcacgtcccagttcgccgggtgttgttgggggaggatctaattcaggtttcaaaacatatatctatgttaatttagttaaaacagggagttatacttcaggtacagtagacggaagtctttttccatcaataaaaataacattcaccgacccggtatatccggagacacagtttgttggatttccttttttgatgaatacactaaacttttccggacaaacacaaattattaccagtacctgtaatattattacaccacatattactgtccctctgggaagccatgatgtcagcgaattcagaggaataggaacatatacagaatggaaaaatgcgtccatcgaactgaccggttgcaagaatttttctccgggcttttactctgcaacatctgctacgcaaaaagttaccggcagcggaacattttctgttggtccgccggatacgcgtaaccggatttatgttgtgttatcacctgtaacgggtgttatttcccgggagcaaggcataattgcactggagccatcaaatgataccgcatcgggtttaggcatacaggtagggatagataataacggaacaatcctgccggttcctatttcatctgaatacgatcttgatgtaccggatgatagtaacttcacactacggattccgttgtttgcccgctatattcaaactgatgctcccgttaaagcgggaacagcaaacagcgctctgatttataccattaattactattaa

SEQ ID NO: 283176 - DNA, 3189 bp, Morganella morganii
atgaaacttagaaaaacgatagcttcaactattattgcatcaatgattgccaatactatgagttgggctttttatatctctctcataaatatggtaatgactcctcgtatttatgcggcagacgctatatttgaccagctcgaaagtaactttaatcttgctaatcctaacgcaaatcgcaatgcgacaaccagtgctcaggacattgttgagaagtacaagaatgcggattcaggcgagaatgtcagtgggaagatcaccgagaaatacgtgggtaaagccgaatccgctaatcttaatctcggaaagtatggggcagggaactcaaatgaaagtgtcatgaaaaatgccgcatccgatggaaagtccattggtagcgccgtacaactgccgagtatgtctggagggacaatcaattcaaactataccaaggaaggggcaaagctgctctctcgggatgctaatggcaacattggtataagcagtaatcccaatactactcctggaaccaaaacaaataccggagagattttcagctcagagcaaaagcacagcgatattaagttcaatgccgcagatcgttatggggatgaggatggctttgtaaacgatataaagaatcggaaaagccagttatttgatgctcaaagttatgatggcgttgcctaccgcaccctcgtaaatgctaacaaggacaacccggcatcatctataaagcctaacgatcccatgtttactgcggggagaaatgagataacaaatgctgttgctggtactggaaactggcttcagaactgtaatgttgagacctctaaaaaaacagtaaccacacactatcctgattacaaagagttctactgtaactcgcctaagcaagataacttcagcagctgcacgataacccgtgatttctcagtccctgtttacatttcaggcggtaacggagacatgtcaatgtgcggcgataattgtgtccgtatttggtttggccgccgagatgataactactggagtgacggtgtcttcgataacgaattgaccctgaagtttcatccggatgcgaaattggcctcagcaaagatcattaatgccgagtgggatgaccacatgagggtaacacttgatggtacgcaaatttttgcgcatatcgatggtcaatatagagatagtgaatatcccgcgccaaaaggaaaatgggagctcgataaatcttggaagctagatagggtttttgatattacagataaagtaagacaatctgtttatcaggagcctgaccgtgaagtaacgatggcatcaagagtatgggtggggggaaatggtgaaggttacttcgaagttgaattaacatttgaaaatatgaagctcgaagataagcacgtccaggaaccagctggttgttacgatgctgtacaaacaccaaatacattctgccgtttcgataggtttaaagatatggatgttggcacaaagcggcttccggaaagcgtgctttcaatggcaaagccgctgtatgaaggtgataaaggttttcttacctggaagactaaccttgaaggttatttttgtgatccattggctaaagacaagatttgctcttatgacgctagtgggaaaattatgaaagacgctaatggaaaggacctctgttacaactatgaagaaattaagcgtatgcctgatgcatgtagcacttataaaaatgatgcagcatgtgtactcgataaacaaacatgtgcagagggttggttcgatgagggcactaacagctgctacatgtatgaacagaaatacacctgtgacagaggtaaggatgtagttcgtgaggttgaatcttctacaaatgcctgtgttggcatgatcccatgttctggaggaacatgcgaaactgggccaaaggaagagaacaacgattttggaaaagttgcggcttattcaaacatggttcagtacatgcagggcgaagccaaatgcgaagaccctaacgatgccaattcctgttctgtctttgaaggaaaacctgaatggtgtggtcgttcagtaggctttgtaaatggcctggcaaagacggactgctgcgaagcaccgcagggaaccgcaggagcacttgaaggtatcatgcttgccggatctatgatcagaaacactaactggaccagagttaatgctcagctaataaaatggaccggcggtgatacaggtacatgggcttctatgtccaatgcggtcggtgagtggactgcatcagctggtaaaacagtagggcaaatgtggaacaacgtcacgagctccttaacgagcatatatgaaaacgtcgctggtaatctgagcagggcagttgggtcttccgcaacttctggaggggcaggaggtgctggccagttggcacaggaaacaatgtccagcttcggtataggtcagcttaagcagatggcaatgaagaaagcctacgaattgctaccagatacagttcgtgactttgtctttaagaacgttgctactaccggaggagaggttgtcttctcggctgcggttcaaaactttatgcttgcattaaacgtgatcggttggatttatacagcctatcaggtcactaaaatgcttttagaaatgttggtagcatgcgaccagaaagagatggaagcttctattcataagaatcaaaaatcctgttttacattagatacggaacgatgcgtcaaatatctgaatgttggtttcacaaagaaatgcgttaaaaaagcaacagacatgtgctgttataattccatgttgtcacgcgttattatgcaacaagcttatccgcaattaggaatagaccctgtcgcctctaattgcgtggggctatcaataaagcaaatacagcaactggatttcgataaaattgatctgacggagtggattaatgatgcagttcaggtgggagaagttcctgatcaatattcaaaattctccgaagaatcaattgtggataatttaccattccagaatgagaactatcaacttccatcagaacgtaccaaggaagcaatgggcggtgaagaaaatatgataaaggccagacaagaaaatgctcaggctataaaagaggaaaatgtagattgtagctatttacctcgaccggccatatgtgaggtaggttcaactacgctggatccggttacgggcaagcagttgccgaaatattga

SEQ ID NO: 283177 - DNA, 1059 bp, Morganella morganii; identical to SEQ ID NO: 118104

SEQ ID NO: 283178 - DNA, 135 bp, Morganella morganii; identical to SEQ ID NO: 197115

SEQ ID NO: 283179 - DNA, 1512 bp, Morganella morganii
atgcgatcttttaatgtaaataaaaaatatttaccaatacttcctggacttgcgttatgtgcagttttaagtaatacaaatgcaagcactgagtatcaacatgatgctgacctaatcgctcagcaagcaaaagggcttggggcacaggctaaaggtgcacagcaggcagatggggctcttagccttgatgctacgctaaaatcaccagatgtgcagaagtacatagcgcaagctgaagcactcaaaaaaaaccaggacctgagcaagcaaataaaccgtggttacgtccccggtatgaatgcggatagtgttcaagcagttatagaccatacccaggctatcagggcccaaagtaataactctgaagctgtcaacgatataattagaagacgtgatgaaattcaagaaaacgccagccttaatgaagcggctctgaaagctgtggaaaataagccggaagtcatgcgaggacaatctaaaaatatcgaaaaattgtttggttcctcgggcatcacagctgctgacttcgaaagaaaaatggatagcacacgtgaagaagcactatcaactgaaaatggaataacgatctttgcttcatttagcttgccggattatgtactggaagaccttctacgtacggcctcagagcataaagctcgtgtagttttcaatggtctaaagaaaggaactactcggctaccagagacacaggcagcaataaaccaaatgattgtcaaaggaaaatttgaatctcctttgattacaattgatcctgatagcttcagtcagtatcaagtaactcaagtaccgacaattatttctaggaagcaagctcgttttgcaaaaatggtaggctccttcaacgttgagttttttcagcgagaacttgctaaaaaacccgatcaggatattttcccggttgctggtaccacttatcccgttgaagaaaagagcatcattaaagaactggaagaacgtgcacaaaaatatgactgggaaggtgcaaaaaaaagggccgtttctgacacatggaaaaatcaatggatggtcgacctccctcctgcccaggaacacaaagaatttttaattgaccctacagtgagggtcactcaggacgtaaaagataagcagggccgcgtaatagcttccgccggtgagttgattaatccactttcgagatttcctcaaaacctgacgatgataattttcgatccactcaatccgggccagctggtatgggctgagcagcagtatcgacaacgtctgggtagtggaaaagtaatgccaatgtttacccgtatccaaaaagataatggatgggatcacctaaatgatttacgtgaaaaatttaacggtaaggtgtttaaagttaacgaacagattatctcacgctttcagattaaaaacacacctgcgcttataactactgaccaagataaattccggatcaccctgtttagcgaggcagaagtccgtggtatcggagccccaaatctttcagaggaaaaataa

SEQ ID NO: 283180 - DNA, 951 bp, Morganella morganii
atgaacatcaaaagattggtactcagtgctctggttgtaggtacatcctcatatcttacggggtgctccatcggtagttccgaatccgaatgtccaggcattgaaaagggcgttatctgtaaaggtcctcgcgaagttatggagttaactaataatcgagatgatctgtctgcactggcgggggaagagtcggaatcgggaaaggagaaatcggttgtcaatgacagccgttatccaactgaaattagccctccaggggaagtcaaatatccacagtctactacccttaaaaatcagcctgtggcttattcaaaaaccgaaattaagccagttggtcagttacctgtcatgtacgataaaactttaaaaatgggtgcccctacttcatccattggaccacggcctatttctggtgtaccggttaattcaaacgtaaggatgactagcagttatagcactgcctcttcaactggtaaccctttcgttcatccggctgcggaagtcgttaaacaaacaagctatccggtttctgctggaaatgccccacgctacgttgcacctaattctgatatcagccctggtaaggatatgtactctctttacaatggccagcccgttaacccgactctcaaccctgggcagatccagcaataccgttcgcaaggttataaacaagctgtagtggctcctgaaccacttgctgttctgcaacaggggaaagtaatgagaattacttttgcaccttataccgatgataacgatgcgcttaatcttcccggctacgtttatgtcaacgtaaaaccgcaaacatggattgctggcaagaattcgacctcaaacccagctcgcatagttcctttagaagtacaggatgcggcccgggaaaatatgcagcagcaacaaaaagcaactaaagctgtctcttcgaacggcattgttagacaactgtaa

SEQ ID NO: 283181 - DNA, 858 bp, Morganella morganii
gtgaaaaagttacttttccctttaatggcggctttcgccattatggcgaatacggtcacttatgcttcagagcaggtcctaactaatagtgatgctgctgcgttaatggcaaaggcaaaggaaggtggcgtttcacccagtcagatctcgggtgtgttatcaaaaatgaaaggatataaacctaaggatgccatatacattccttctggtgggctatacctctttcaggacgaacgttcgcagctaatggcagtaacgaccgatggccgatactcccttactgggggaagccttgttgatgtaattaaacgtaaacctgttctgactgtagaagaaatcaggaattcctattttattagtcttgatgaggcccccttccctctggaaactgtagcgtccattcctctgggaaattcaaagcttaaaagacaagcagccattttcataacacttgattgtgacggttgcatggaacttgttaagaaattttatgcagatcgggacaagtatcggatagatattgttttagttccctcacccggtgagccaaaagaagagcttagaaggctctggtgtagtaaagaaaaaggaaaaataaacaacctcgatattcttcgttggctaatgggaagcaaatccgacattgaaaaaagattgctctctcaaaaagaagcagaagaatgtccggcggaacctttggtagcgtcattgatgctcgcaggaatttataaattgcagggtgtaccttcagttgtcagacaggatggtttggctggtaatggcattccaaaagatttcgactactggttgaaccaaagcgttgaacctctcttaaaaaatccatttgagacaaattaa

SEQ ID NO: 283182 - DNA, 423 bp, Morganella morganii
atggtgcgagaaaggacaacaaaaaaaattaccttcgaaattgatattgaaaaaatattgaagtatttatttttcttcgcctttgccgtattggtcattatttatggttataaaggctttatgaatgtttacgattacttcaataaacaatcccagccttcgtacaagattgcagtgcttgacatgcctgaattacgtaaggaatttttcaagcatcacggaggccgtactgctgacaatgatagatctcaattcgaagaatatttcagaacattaatgaagatctaccgtgaccgtggctatttaattattgatgcaacgcttgccgttactgtaccggatagtgttgaaatcgtcacttatatggaacttgaagatagctctgaagcggtacaatcaagttcttataatgcaaagaagtag

SEQ ID NO: 283183 - DNA, 1821 bp, Morganella morganii
atgcgtctggttggtgtggctaaggtcagatcgccattctctgattttgaaatgaaacgtgagaccagtgctgtaggcattcgaatctataaaggtgaggaactggagggtaacctgtcgaaaagccttattatcggaaggatcccacttagtactctggtaagcttcaaatctgccagtacggctaactctgatgcactcgcccccaccgaatggcagcagtcctctgataatggtcaaacctggaccatgctttccgacatgaccggaaagagaagtgtaagtatcaaaaagacagaagtaggaaagtggctttatagggcaaaaatgactaataaattcacatccaagatttcctacacagatgccttaacggtagttacctacaagcagcctaagctcagtatagatgttacagacattcttcagggctcagatatacctgtaaccctgcttgataacgatgaacctataccagcaggcaccgctgaggttctctggtcagaggataaagtcaactgggtgcagggagatacaacttacactgtggcttcagctgataccctaccgtctacgatttatgcccggatgcgttaccttgattccgatgaactggcagaggagtcttcatggaaggaaacgtctgctcggttggcagccgcaaaacccaagcgcctttctgtctcggtaacgggggtttcaaaggtagaggttggtcaaaaagttactttggaaggtaagttcacgaaccctaacagtaagtaccagaatggtaataacgtagttgaagaatggaaaacaccggatggccagacatttaagggctcttcactgtctgttacccttactgagcaaatgttggataaacagggatatgctgcttttgaatacagtgcatggttagcggacaataaggagaatacggtttctacccgtagagtttctgtcaaatcgtgggtttataaatttcccgagatgaaaataagctccaaacttaaatacgacatggcaccgaccaccctacgcgttgcgttgagcggtattaaggatggagactatcctggtgttacttattcccgtgaatggatctacgacaaagagtatctggtaattactaaagatgaaggtgacaccaaagaatttacaattgaaaatcctggcaaatatacattgatggttgttttcaaagataaccgaaacaatgaacagcgtatcgaaaatacctttgttgtcgatgaacaaacgccaatgaacgttgagatgacacccaagttctctaacaaatatatgagagctccactcgatgtaaccttaaggtcaaacatcaagctatctcattcggcggactcgatagatacggtcacatacaaggtgaacggtgaagtaatacccagcggcaaaaattattgggctcaactgatctcgggtttaaaagaaaagaaatacgagattacaattgatgttgttagtaaacttggacagagaggttcagcatctgttgagtttgatgtcgttaaaaacgcagtgcctaattgtacattgagctacacggaaaccaacctaagctggagctttaccaataaatgtgatgatactgatggaaaaatggttagatatgaatggttcatcaacggcgaattaaggaacgttttcggtagtacggctacactttctaaaaaccttaaccgtggtaagcaggacataaaagtaattgcttatgatgatagtggagactttgcaacgcagcacgtgacagttttcggaccggctgaagaggcaagtaagtctgaaaacactgtatcaataccaagcagtgagtag

SEQ ID NO: 283184 - DNA, 1839 bp, Morganella morganii
  misc_feature (1824)..(1833): n is a, c, g, or t
ttgggttcacgtgatatcacaattacagcaaactctaagaataattatttcgcacctcctgaatccaaaaagcttgttgttaactgggattatcggcctcctgtagtagaccatacactttggaattttaccgatgaggctaaaacaatcaaagtaggtggccaggacatctataccggagccaaaaccgttgctgtggccgttaaggtaccccagcaagaaacagaaggtgaatggtggctcccaacagctatgtcgctcactatgactccggatggcgtgtttaagccgacgactaaagtgactttagatgatggcactgagattgatttcaaacagtcctgggcaacccctttacgtagaactttacagccggtaagtggacctcaaaaagtcggtgatgagtacctctatatctttgacttaacggatcttataaacgggtcctacgcagcgacttttacagtagaaaatacgagcaaaaactcttctacgtacactgagcctgaaagcaaactgatgctgtctgataacccaacgcttatggttctcaaagatgggcaggtattaactaaacgagcacccgtatacttcctgaacgagattatcgttgcagctttccaggggcaggctggggttgctgacataaaatcagtaacaatagacaacaaagtagtttcgttagcacctacaaattataaaggtatttactacctgccggttggagacgatttagcagttaattcggatcacgagattactgtggtggctgaaaacctttatggaaaaaacgtaaatttcagtaccgtgttcacttatcaacctactggattcactcttaagaatctggaaaaaaacgtaactctttactcgcgcgtacgtcagtatacggacctgcttagtcaaacagctggtgataaatgcactctgtttaccacagaggaaaatgcgaatgcttacctcgcctggtatggggaaaaatcagatgttacagcatgctaccctcagtggaacaatgtccctgatgggttggagttctattttaaaggacgtaccccgggtctaactggattctttaataaaacaggtgagaatctgctcgactatcaagtctatatgattaacgggaagggctctaaagcggtttccgcaaggaatcgccgtactctgaccacacaattaccatacaacccgatcatctcttacaaaaagaataaagtcatagcaggcatcaatccgaacactgctctggcttatacgaccgggggggaggccgctcgaatattagcgaaggtggtaccagcagacgttacgatgatcgtctctcaaaacggctctgaggctgtcaaaacgtcatttaaaaatcgttcctcaaacaacgatgcaacgacctttgtacaaagggtcaaggttgctgctgcaccattgtggacaaagaacgtctttgacatagctgtagaatactcaaaggatccagaattaagaactacagacaccctcaacgtatatacggtgcctgatttcaatattcgagcatcgatggaagtggatgacaaaaaaacagccacatctcttgaagtgcccttaaaggtaacagtggggcgttataacaactccacacgtaaaagtgcatttgaccgtaaaacaatgggagaatgggacgtcacgatatactctcaaaaaagtgtatacggcaaagatccagaaacaggccgttataaaactacatacgaaagaactgcgctgactgaagcattgccggtcaatgatgcgggcattgtcgaaaccaagattaaaattgaaaatatggatctgggtaatatnnnnnnnnnngggtaa

SEQ ID NO: 283185 - DNA, 1188 bp, Morganella morganii
atgcagatatttttcagtgagctaaaaacactgtatatggagccaaatcaccaatttatccctctagatattacttttcgagattatattgattgtgatgcctatccgattaacacacaaaatgattgggaatattggttaacgcgtttaccacaattaccaccagccccacaattgccactaataaaacaagttgctcagcaaaataatgttacgccagcagcacttttgattgctgcttattgcgccacattatccgcatggagtaaaagccctgagttaacaattaatttgacattatttaatcggcatcctgtacatcctcaaataaatgaagtacttggtgattttacctcattacaattactcgattggtatacctgtgatctttggtcaaacagtatctcaatgatgcaaaaacgtttacataaagatatgcaacatcgtagtgtttcagccattaaagtaatgcgtgaaatggcaattcaacgacagatgtctcatatagagatacctgtcgtttttacctgtgcattgggctataaacatgatgaaggttttctttctcatcattcatggctaaaacctgtttggggaatatcacaaacaccacaaacatggctagatcatcaagtatatgagtcagacggtgaattatatttaaactgggattttgtcgaacaattatttgactacacaaccattttttccatgttccagcaatatgaacatatactcactaaactggctactgaaccacaatcttggcaattgccactaaataaacttataccaagatgcaataatctcgtcatcaccccagttttcaatgccaaaaataatcaaaacacacattataaacaatctactgatacacaaaaaacaggtcagacaatacaaaaactacaacaacttgttaagcaagttattggaataacgttagcacctgaaacaaattttttcgaagcaggtgccagctctttacaattggttcaacttcatgcagcactacaaaaaaatggctatagccatattacaattactgatctgttcgctagtccaaatctaagtacattagcgcaattgctttggcaaaacacttcaccaacatgtgagcaatattccgaccgagacaaacacaaaaacaagagaaagaaacggttacaactacgaactcatagtagataa

SEQ ID NO: 283186 - DNA, 675 bp, Morganella morganii
  misc_feature (611)..(620): n is a, c, g, or t
atgctgaattttgaaactttctatggtaatagtgaacctatagctgttattggtctttctggtcgcttccctgatgcacaaaatattgatcaattttggcataacataattaataaacacgatagctctcgtcttttttctgaagaagaactaaaagccgcaggtgtcgctgaacaaacttatcattcacctgattttgttaatcgtggcgcgccgttagatgaagcggaatattttgacgctactctatttaattattcacgctcagaagctgaacttatcgatccccagcaaagaatttttttacaaggtgcttggcatgctttagagcatgctggatatgccccttgcaatataaccatcaaaacaggcgtttttgcttcagcaagaatgagcagctatcctgcccagcaagatttagcattgcacaatattggccatgtccgtggcatgcaaaaattattagggaatgataaagactatctcgcaacacgtattgcatataaattaaatttaactggtccagcattaactatacaaaccgcttgttctagctccttagttgccgtacatatggcttgtgaaagtttacgctctggtgaatgcagtannnnnnnnnnatctatatcagaaaggcatgatcttctcaccagatggtatttgtcgtccttttga

SEQ ID NO: 283187 - DNA, 126 bp, Morganella morganii
atgtatgactatcagacaggtgaatataatttactgagccatatactcccggcggtgtatcacggtatggcatttccctgtactgtaccagcgtgttttccggtgctgagaatatcgtggtgttga

SEQ ID NO: 283188 - DNA, 489 bp, Morganella morganii; identical to SEQ ID NO: 160564

SEQ ID NO: 283189 - DNA, 1272 bp, Morganella morganii; identical to SEQ ID NO: 118083

SEQ ID NO: 283190 - DNA, 462 bp, Morganella morganii
atgggaaaagttactttgcctgctctgcttggggccaccgtgattggttttgtcgtatttgctttaaccagcttttactacaggtcagaatatataccaaaaaggagtgtattaatcgttccggacgcacccattagtatcgaagatggcagtaacgcttttcccgttcagacagtaataatgaacgatccaactcttattgataaatttgtaggagaggacaatattaatgaggagaatgcttttgactatcacaaaagtaacgttttggaacctaattacaaacatgaaatatctagaacgagccagatagataaagctgaaatgaatcatccatctgttcgtgaaaactgggccagagcaggtgaaccctatatcgttcctcagatgtctgacagcgaacgaaatctaaaaattaaacgattccagaaacctacaagtggagctaatcatggacattaa

SEQ ID NO: 283191 - DNA, 1356 bp, Morganella morganii
atggacattaaaaaggcctgggaaaataagaccgtcagactttctgttattggcgctctgctggtagtgattgtttatattattagccagtctattttttccacaccagttaagaaagaaaagaaaacacagaaaaaagacatgcagaccaatttgttgttagatgattcgcaaatgaacaaattgagtaatgaagaaagccagaaagtatataaagaaatggttaagcaaaaccgacttgaccaaaatgcggcgaaagaggaccgcgaaaaagcagaaaaagcccaacaggaaactaaagcccaagttgcaagtttaacttctcaacttcagcagctgtctcagcaaattaatgatatgcagacaaatcgaaacggcaatcgtaacttggatgctggtagttcgcgtaaaacgattaatgagcaggcaccggcagctccttatcagcttaatgctaatgcgccgattaatggcgtaaaccctaattacgcttctatcacacctacgcgtaatagcccaatgagaacaatcacacaaagttccattaagactaatggtaccgatggtgtcattcaggttatgcccgtgtctgaaaacagaatcaaggaaggcagagaggtcattgcaggagataaagcgcctactcggactgtacgaggtgatggtactgcgccagttgatagcaaagcgcggcatgctgcccgaaaagatgaaatgtttcttccggcaacatctattatcactggtgttctgattaccgggcttgaagcgcctacaagcctttcttccaaatcagaaccaatgccagtaacgatgcgtattaaaaaagatgtcatcatgcccaataatttcaccatggatttgcgtgactgtaaccttctgggttcagctgttggtgatctggcgtcacagcgtgcttacatacgtgccacttctatctcttgtgttaattcaaaagggaaagcttttgacgtaaaactggaagcatatgctgtaagtgaaaatgacggaaaaaatgggatccgaggcacgcttatcagccgaaatggtaacgcaattgcaggagctgcatttgccggtggactttcttcacttgccggtagcttaagtcccagtaaggtatcttcacttaacatcgaccctaattcacaggctcagtatcagtcccctaattttggtgcacttggggcattagccggggctggtgcagctcaaggtggtcttaatcgactcgtcgattactacaccgcaattgcagaacaacagtggccaatcgtagaaattagccctggccgagctattacatttgtcgttcagaccggaactacaattccaacgaatctgaccagtcgctga

SEQ ID NO: 283192 - DNA, 201 bp, Morganella morganii; identical to SEQ ID NO: 31764

SEQ ID NO: 283193 - DNA, 876 bp, Morganella morganii; identical to SEQ ID NO: 32315

SEQ ID NO: 283194 - DNA, 957 bp, Morganella morganii
atgacacattcatctgatgataaaaactatgtccgagcagttctgagctatcttggcatagattttgatgaggcggatatagtattaagtgtttgccattgtcaaagtgacgagctttcttttacctgtaatatcaaagctattgaactcaagaatgctgttgatttatatgtcgatagtatctctgagaatgaaatagaagctttaaacagagaatctttaaaatcgcgactctgttactttcttgaggtgtttgacgcagtctctggtcagtaccttgagatttcaggaaaacactttgcaactagccgttttgaatatgatgatgtttgtagtgaagttcttagcatgtctaatgatgtttctcagtcgaaaggttatgaccgggatgaatataacagactgatgcaggttgatggtcaggttatgattgcccgttttgctttgcaacagttctgggatactcattttattggactaataacatttgtatctgagtctataacatcgagcctctataaagcttatgaaacttttagtgatataagtttggcttgctataaactgagtgaatattcttattcacgctctatcaacagtgaattgacccttaatatttcacttaaagaaaatgacttctgtgaggacctatctgattgctatatggaagatgaggctttaccttctggtagggtaatttctcgacgcaacaatgactccataataagtatttatgagagctatgctgcggcttcttatattccgatgattgcatctttggaagtcgttgatgaatacggcgaagtggttactgacctctgccataccgtttatgtttcagagttaaccggtgggcggattaaaatccacgaccgtaatgacttagtatctgaagttttcgataacctaagaaatttaaatcttgcagttggagattcagtttcacaagctgcttga

SEQ ID NO: 283195 - DNA, 276 bp, Morganella morganii
atgaatgaactaaaatccaaaaacgagaacagtaccaaaagcaactttcccccggttgataatcagttttgcttttaccatgttgatttcagcatagaacgactactttcaacggccgaggatctccagcttgagtacatcttccagaaacctggaagtgaagtaagaaaggatttggttgagcgattcgaacgtggagagcgctttgttacagcttcacactgtgacaatttctgtgaaatccttggttgtcaaggccatcaggaaaatgcataa

SEQ ID NO: 283196 - DNA, 591 bp, Morganella morganii
atgattggagaaagtatttttgactgggtaatttacggaatatccattttgatatttgcctcagcactaattgaaggaaagacaactcgctacccagcactttttttctatgggagtttaattttaatgttaatcctgatagttgctggaggccttaactggtggttctacaggtcaaaatatggcgcagtaatcgttatcttcacagtggtctctttactgatgactcgattccgcctggtcatatataaattaagattaagaaagttagtttcagaaatcagatttcgtataaaaacgggttttcgtataattcttgttttgtcggataatgaggatgagcgtaatgttctgctgtctatgcttcgcaacgtattgccagagcaaacgcttattcacacgcgtgatgctctcggacctcattcagggcctatcctaaaagctcttgagctacatcatcaacagggaacaggttacatactcgtctgtgaacaacaaatctcagcgcgtacgtggttgagtatcgtagaaaatgggaaacctgatacatctatagctgttaattttcattcgatcccagaaatggagtga

SEQ ID NO: 283197 - DNA, 1986 bp, Morganella morganii
ttgagccattatttttcaaggattgaaggtgtatcttcccgttcattttatgccggcatcaatgccggtattaatttagatgcctggtattttcgccatgacggacattacaactggcaggagcataccggaaaacactatgaatcaataaataattttgtacagcgtgatataccggcgatcaaagggcgaattcgtatcggagaaacaatcacagagggaattttatttgatactctgccattcagaggtatcgaacttgtcagtgatgatcgcatgttgccgttatcacgccgtggctatgcaccggaagtcagaggtgttgcccggacaaacgccagggtaatcgtttcccaaaatggaaggattgtctatgaaactaccgtatcaccgggagcatttgttattaatgacctgaatgctacaggctatggtggtaatttggatgtggctatcaatgaagctgatggtggcaagcaaactttctctgttccgtattcatcagtcgctcagttactccgtaaaggaactcatcgatatgatcttgtggccggaaaattgaatgatccttccgtctcccatcggtttgatttatatcagctgacttatctcagaggactaacaaattatattaccggattcggtggtatccaaaaaagtgataattcatatactgcattacaggcaggaggctcattcagtacaccagccggcgcattctctgtcagtgcgatacatgccaaaccacactttaaaaataccaatatttctgacaatggcggccaaagttatcagattagttacagtaaatatattcagaatactgatagtaacctgacaattgctgcctatcgctattccacttcaggatattttgattttttatccgccatgaaaacattagatgccgagtctcacggggattctgttgtaaatatccgcagacctaaaaatcgttttaatatcacaatgaatcagggattgcctggaaagttcggacagttttatatcacaggttatacccaaaattactgggagaacaataactcagatcttcaatatcagcttggttacagtaatacattgaatagattaagctttagcattaatgccggacgaagcagaaatatacacggaaaaatggaaaataatttttacttaaatatgtctatgccgcttgctgattattcacatagccatataccaatgctgaatgccagtattaaccataacggtaacgggagaaccggtgagcagattggattatccggaagcctgggtaatgagatgcaatataattacggtatgactgcagctaattacaaccagggggcaggaagcagtatttctgtaaacggaggatggcgctcaccttatactcatttaaccggcagctatagtgcaggccgtcattatcaaaatcagtctctcaataccagcgggacacttatcgggtggtctggtggagtggtaatgacaccttacaccggcaatacattcgcaatcgttgaagccaaagatgcacaaggtgcaaaagttggtggttacccgggaattcgtatcgacgcatggggtcatgcagctgttccgtatttaaatccgtatgaaatgaatgaaataaatattgatccaaaaggtttgccacacagcgttgaattgcataatacgacagaaaaagtcgcaccttattcaggagctgtaacaaaaatagattttaaaacccaacgaggtataccattattaatcaaaacgatacaggaaaataatcaacctgttccatttggtgcagatgtcttaaatgaaagtggacagcttgtcggtaatgctggtcaaaatggtcaggtttttgctcgtgtagaaaataacaccggaactctgacagttaaatggggaaaaacaaaaaaccaacaatgcagatttatttatagcatagtggctaatcaaaataacgaatttaatcaaattaattcaatatgtaacaaatag

SEQ ID NO: 283198 - DNA, 633 bp, Morganella morganii
atgccaaaaattttaatcggtatccaagccagacttggctcatcacggcttcctcgtaaaagtgctttaccgttctttcaagacaaaacattgattgaaaatatatacaacaaatggaaaaattataataatcaatatactgttgctatcctagctccacaaggtgaatcagaagatcccttttggatatcagcttctcagaattgcaaaatagtatacggtagtgacgataatcttctatctcgctatatgacagcagctgaccatttggatgccgatattatcattcgggcgaccggagataatccatttgttcattatcaattagtagacaagtcaattaaacatttccttgataaccaatttgattatctatcttcaaaatcagatgatggatgtaatgtacctcaaggactgggcattgagatatttactactcaggcactgagaaccgtatataaaactgctgatagaattgcacaagagcatgtaagcgaagcttttctaaataatagtaacattaggtgcggatttcttttagacccatttaatgcaaaggaaatcgatctgaaaataacaagcctgacattagattatttatgtcaatatgaaatgctaaaaggattacagtga

SEQ ID NO: 283199 - DNA, 1041 bp, Morganella morganii
atgagaaaatttaccatagaaaataaaactgttggtgataatttaccatgctatattattgcagaaattggtggtaattttaaaacttatgaagaggcaaaaaaactaattgatgcggcagcaacaactggtgtaaatgctgttaagttacaaacatacactgctgacacccttgcatctaaaatagctaagtatgaaatgaaaaatactggcgctgtaagtcagtataatctgttcaaagaatttgagattagtaagagcttacacgaagaagtgtattcttatagccgaagtaaaggtctcgatgtattttcaacacccagtcatgagagcgaccttcagttattagaagatatcggaaataatgtttacaaaattggttcagatgatagcaataatttaaattttatctctgctgttgcagcattacataaacccctaattgtagctactggtatgtgtactttaaaagaagtagacgatattgtcgatgcaatatcgaaaacgggaaataataacttcgcattactgcatgctattacatcttatccaacggaatataacattgctaacctcaatgttataacaacactaaaaaatagatatccgggtattgtagttggatactctgatcatactatcgggatgcaatgctcattcgcagcaaaagtacttggtgcagatattattgagcggcactttacactcgatagaaatgcagaaggacctgatcacattttatcaagtgatcctaaagaaatgaaatttttagttgactcaatacgcatagtagaaagcgcattaggcagtggtataaaaatgcctgtcaaccaagaattaatcaaccgtcgtaataaccgaaaatcagtcgttataaataaagatttaaagaaaggtgaagtaattacaagagaatcaatttgtgtaaaaagaccaggaacaggtattgaagcatcactatacaatcatcttatcggacggacagtaaataaagatatgccgattgatgctgtattaacatgggatgaccttggtaactaa

SEQ ID NO: 283200 - DNA, 873 bp, Morganella morganii
atgtctaaaaataaagctcgcagtaaagcccttcatcaaacctttagtgaaattattccagagatggataaggcgctaaacaaacagctcttagaagttctgatgaaatatacagaacgtgataatgaactgattgttattttgaatgaggacggcccaaatatcattgaacttaagtctcttaagcctgtgtctttgttggccgaaaagctttctgcttattcaagctattatcatgtggatgttgtggagctcgtggtcaagaaaattgatttcgaaggagcttataagcttcttaaagcttccccagatgtaccactttttaaaagcttaactgaactggataaatatcttgttgaggagtttgaaaaatacggattaaattcatttcttgacgtggataatctggattactcacttgaaaaagccagtgaactcaaaaatgagcagttaataaattgggtttcggacatcatttgcaaacgtgaaaaattaactttacgtaagcgttttgatgtcgcagtaaaggcccactacgaaaatgtagaaaaaatgtatgataccattcgtccgttaatgaacaaactgggtttcccagaagatctcatgacgcacacctttagtgagttaagcgtttttgaaactaaaggatgggaccatgcaataaaatcgaaaattgagactctcgctaagcgtgaaactcaatatttagatgatgcggctaaagcagagaatcgacgtcttgtaacagagaagttggagaactctttagcgattgcaccaactaaaccaacaagaaattggttacatattgccggaattgcctgtttggtagtctgcacgttcatgtatgtaactaataaatttatttaa

SEQ ID NO: 283201 - DNA, 378 bp, Morganella morganii; identical to SEQ ID NO: 105745

SEQ ID NO: 283202 - DNA, 564 bp, Morganella morganii
atgagaagtattaatgcaaaaatagcaggaatctcattattagcttctttagtatccatgggaacttatgctgactcaacaggaaccattacatttaatggtgaattaactgatacaacctgcgaggtcgatattaacgggcagggctctgatgcaactgttgtactaccaactgtaggtatcaatgaattagttactccgggagatgttacgggcagaacttcatttaatatgaacctgactaattgtgttattggtacaaatggtaaccataacaaagttgcagcattcttccagccggggagcactgtagatttaggaaccgggcgattaataaataccagtggttctgcaggaagtgttggccttcaacttttagacgcatcaaataactattctgcaattaacattggaaatactgaccaggttaacagtaccgcttatatcaatattaattctgacggaagcgcactattaccatatgccgtcgaatactatgctgacggacaaaccacaccaggaaccgttgtcagctcagttatatataaccttcaatataagtaa

SEQ ID NO: 283203 - DNA, 399 bp, Morganella morganii
atgttgctggctgttgttaccggacagcaccttgctatccccctctccctccggtgtcaggcactcaatatcagcctgcgggatgtgattgccggatgccgtgatctgtatgtcagcaaatatttagtccactacacacgaaacacatcacagtcacaacccggcggacaggtaaccgcaaataccctgaccaccaattttaaaaaagccagagataaagccgacatcgattggggagaaggtacgcctgcaacatttcatgaaatgcggtcattgtctgagcgtttataccggaaacagggaattaataccaaaaacctgctgggccataaaaaccagcagcaaaccgataaatatcatgatgatcgtggcaaagattggataagggtgttggtatga

SEQ ID NO: 283204 - DNA, 885 bp, Morganella morganii
atggatctgcatgctccgttaactgacgccgacattgaaaatgaacgacgctataaatcagcagttcgtgccacagaaactcttgaccgagaggaagtggcaaagcgaatgcgaaaacttgatgtgatgtatcactataccggtgaaatcaagcctaatactcctgttgctttgtacctccgtaatcgtgggatctcccgcttactgagtcacttaccaaaggatttaggctttaataaccggatctactattgggataaagataagcagaaatcgattatctatccgggaatgattgcaatctatcgtgacacccgaggtcggcctctgactatccatagaacatacgtagacaaaaacggtgataaggcacctgtagaaaatccaaagctgatgatgaagcctcctgccgatatgacaggtggctcaattcagttgtttgaccctcactatgattcaggtagttcgacctggacactgggagtggctgaagggatcgagaacgcgctttctgttgtagaagcgacttcaacaccatgctgggcagccagctccgcatggtgccttgaaaacgttactgttcctgattttttactgcctccgccggatgtaaaatatataaacttttatatctgggcggataaggatattgctaactcacaaggcactcgtgccggtatcgaagctgctcagcgacttcaaagccgcatggttgagtttttggctaaacgatatcccgcatcaaagctgacaattgaagtcttcgaaccagcacaagatattcctgatgggaaaaagggtatcgactggaacgatgttctccagttaacagggcaggatggattcccgattcactgggctcctgaatgtcttaatcagctgtaa

SEQ ID NO: 283205 - DNA, 1005 bp, Morganella morganii; identical to SEQ ID NO: 31749

SEQ ID NO: 283206 - DNA, 639 bp, Morganella morganii
atggctaaaaaccctatctcaaataaggcagataacgaccggattcagatccggtctttctggatatccgaaagaaaagcaccctatgtttatagtttcttgaaaaaaacagaactttctcataggggtgaccaactggatttaattaggtcggctattagtaccgggttggtattgaataatttatttcctgacttggcaaattttataaatggtttaaacgaaagattaacacttgcagatcttaataggtttctgaatgatggaaatactatagatactgaacctaagcctcctattaatgtattgctagagaatgtcttagatcaaaagtttaaggagtatttaacacctctacaattagataattcaaagcaggattctgtttctgtaaaagaaaccttccttgtacaaaaggaacatgcctgctttggtgtgaagattgaaaatgagggaagcgatacctctataccatctgaaagcccactttcttcaggtgcatccaaaatttcaaaagaaaagtccatttcctctgtggtgccagtgctagaaaaagtatcggatgaaaatcaaaccgcctccataagcataaaatctaaagctaaggcaaacaagcgactagcgactttggcaagatag

SEQ ID NO: 283207 - DNA, 450 bp, Morganella morganii
atgcaaaataagatcattagcttcatgtttatacataaagaggcggcagtacttgcagaagctataaaacacataatgaataatttacctaaaggtgccatttctgaacctcgcgacgttgcggtgttacagcagtggttttatttcatgagtgatgcttcaatgttaaagcgtattatttcaggagagcaaaaggttactgactggttggaatctattaccagatcatttaatcaaagctcacaaacagaaccgaacgcgctacagaacacaggtattgaagctattttagattcaacaaatgtgtttcaggttgaacctgtcgtagagaacgatataaaaaacagcacgttttcaaacactgatcctgtagctgaacctgagaaatcagtttcgcaacaggaatacaatgctgaaaatggttttgatatcgagctcaaaggctggtaa

SEQ ID NO: 283208 - DNA, 501 bp, Morganella morganii
atgggttttgttggcgctgtagtggaaaatatatatttggattcaaaaccatttcggcatattcgatttgtggctgatattccagtaatatcttttctacctcatttggtgaaatatcttaagggcgcagaccatctttactgtggtaacgatgatttgcatcctcttttcatttatttttccgaagcggctacattaaaagcaggccctgtaaatctcgcgaactttcgttttgaagtttctatagcttcaactcatttacgactggtctcagagcagcctgatttgcttatcaaaggatttaaccgggataatctagaatacgtttattaccgctcagatttggcctctaaggatcttatactaggccttgttgaacacggttctcctttcataaaacatctacatggacttatacaaaagcgaattttaaacgagttctctctgattttttctgttcttgaaaagcgcgaagccacaaattcttgcttgcttccatag

SEQ ID NO: 283209 - DNA, 1089 bp, Morganella morganii
atggctgtttcccctcagatgactaatatatgggataaacaattagctggttatgtggctgccggtttcagggtcacggtattagcaactattggtcagcagggggttcagttaatacaaaaaacagtgatggttatcaatctttggttgggtgctcatctggttatttctggtgatttaagtattggccaattaattgcgtttaatatgttagctgggcaaattgtttctcctgttatcagattagctcaaatttggcaggattttcagcaggtaggtatttctgtgtcccggttgggggatgtgttaaactctcccactgaaagttatcagggcaaattagcattaccagaaattaagggtaatatcacatttcgtaatattcgttttcgttacaaacctgattcacctgttattttgaatgatattaatctggatattcaggaaggtgaagttatcggtattgttgggcggtcaggttcaggaaaaagcacattaactaaattaattcagcgtttttatatccctgaaaatggacaggtattaattgatggtcatgatcttgcattagctgatccaaattggttacggcgtcaggttggtgtggttttacaggacaatgtccttcttaaccgaagcattatagataatattgcactggctgatcccggtatgcctgtggaaagagttattcaggctgcaaaattatcaggcgcccatgattttatttctgaattacgtgaaggttataatacgattgttggggaacagggggctggtctgtcaggagggcagcgtcagcgtattgctattgccagggcattagtcaacaaccccaaaattttaatttttgatgaggccactagtgccctggattatgaatccgagcatgtaattatgcgcaatatgcacaaaatttgtcagggcagaacggttatcatcatagctcaccgcttatcaacagtaaaaaatgcagatcgcattattgtgatggaaaaaggacaaattattgagcaaggaaaacacaaggatctcctctgtaatcctgaaagcctttatcactatttatatcagttacaatcagattag

SEQ ID NO: 283210 - DNA, 201 bp, Morganella morganii; identical to SEQ ID NO: 31751

SEQ ID NO: 283211 - DNA, 717 bp, Morganella morganii
atgaaatctcttttctttactcttgatggtcatatggtaccagcctcagtgaatgtatcccttaacggagatggaaattattatgcacctatcgaaagagaatgtaacgaatgtgcgggcacaggccacaaaggggctgatgtatgtgaaaagtgtcatggggtacaaacagttggacccattattgaaaaattagtggtactagagccaattacctttctcgataacattccggaactgcgtgttaacccaacactcgaagcatggaaatccagaaaccacgtacttattgagaaagcaaaaaaggctaacactaagttttctaatagtatattggcgcaactagacaataaccgttttttgacagaacgccagctggattgtttctttacaacctttgatgtgatgttgtctgaaactccggaaaatgaacaagaaattttaaaacatagctacaatatcggccaggtcataagcattgaactaacatttactgaagtcagggccgcgtacgcaaaaagtaaagggagttatttttttacatttactggtaaagttagaaatgacgggatcgctttaacggccgataaacaggatcacattttattgggtgaacgttatcatttgactggaaaagtcagaaaattctatgattttgattcgaaaaattatgctgcaataacagtttttaagttaagtaaactccaagacagttaa

SEQ ID NO: 283212 - DNA, 426 bp, Morganella morganii; identical to SEQ ID NO: 31762

SEQ ID NO: 283213 - DNA, 891 bp, Morganella morganii
atggctgtgcctgttttcaaaactaaaacctcgtatcgagctccgctgaacaaagactacataccaaatccccgaatacttgaacaagtggttaaactgcttatcagtccggatatagatttaagtgtgtgtcttaaaggtgagtccggttctggcaagactgaaatggtaatgtacattagccacatgatgaattggccgctgacaattaagcagatcaacagcaatattcgagttgatgagcttgaaggtgagcgcagtcttaatggtggtaatacaggttttgtacacagcgatttggtaacgggatttcgtaatggtcacctcattcttctggatgaagtggacaaaatcgatcctgatacggcagcaaaacttcacatgcccattgaacgtaagccctggtcactcagtgctaatggtggtgaggttataactgctaatggctacacgcgatttattggtactgcaaacacaaacatgagtggaggcgctcgccggttcgtttcttctcaacgtcaagatgcagcttttataaagcggttcttgatagttgaaatggagaagcccgacaaagttgctttaaccaatgtgcttactaaacgatatagctctttgccttttcaggtcattgagaagttcgtaagagtagcgattgcagtaaatgactctggtacagaagacagtgtgatggatattcgtcaattagtagcttgggttggcacgtcgatgacgttaaaaacctttagtcttcttgacactttcaaaatagcttttgcttctgctttacctttacatgtggtcgatcttgttcttcaagctatagatctttctcttggcgaagacaaggataaatcgctggagtatttcacagcaaaaaagtcgagttag

SEQ ID NO: 283214 - DNA, 654 bp, Morganella morganii
atggatttagccattgaaatggcgacatcggatagtgaagaatcaccaatccttgatgctgaagttaaccatcaggatgatatccatactataggtttaaaattacaagcaaccatcaataatgtgttatcagaaacattaaatttacttgatatgacgcaagttaaaggcgctgtaaatgcgttgctatcatcgaattatgtttttatctgcggcgtgggttcctcggggatcacagcagaggatctaaaaaataaactgatgcgtattggatatcgggtggatgctgttaccaataaccattttatgtatatgcaagcttccttattgaaaccgggtgatatcgcgatcggtatcagccattccggaaattcaccggaaacagttcatgcactgaaacttgcaaaagaagcaggggctaccacaattgtgctaacgcataatttaggttcacacattatggaatatgccaattattatctgattaatggtaatcgccaggggaaattacaaggtgattctattggtacaaaaacagcacaactgtttgttttagatttactgtataccctacttgtccaggctcagcctgaaatggtcaaagagcaaaaactgcgtacactaaatgcattgaaaagtaccaattcagcatga

SEQ ID NO: 283215 - DNA, 447 bp, Morganella morganii
atgaatttacttgaaaagatcgccctcgttggtcagcgcatgaaaagcgagcagatttctctaaaggaatctctgatggcttcatcaagagtatctgtttctgatgatagtgttgatggtgttgatagactgatctataaccactgtttgaataaaaaaaatctctctgatttttttgggaagtcacgagtaacgttcaataaaatactttcggacttagaagaaaaagaacttgttggtgcacctatttatcaaaacaaaaatcatctttacacccgctgggatgttcaaaaaataatggatgccctgggttatcccaagtaccgcgatcattactttagcagagctattgttactcagaatcataaaggcggtacagggaaaagcactacatctgtagctttagcagtagcagctgctgctcagtcacaccacgccctgatttaa

SEQ ID NO: 283216 - DNA, 216 bp, Morganella morganii; identical to SEQ ID NO: 5123

SEQ ID NO: 283217 - DNA, 225 bp, Morganella morganii
atgttaggtatttttgttaaacgtgctaatgcaggtagtgcggtcgcaggcattatagtaagtatcattgctgtattagcagcccgttatggcagtgaccttaactttttcttctatggtgtaattggtgctatgtcagtagttattgttggtacaattactgcgccatttttctccgcagcaaaacaaatttcattggatgatagtgaaatatccgggaactaa

SEQ ID NO: 283218 - DNA, 261 bp, Morganella morganii
atgcgcgtcatggatgacgcgcctgagcgcacacggatgtgtttacagcgacttttcgtttttgcccgttacccgccgggctccggagtaacagaaaactacctgagcactgttatttcagcgtcagcactgttatttcagcgtcagcactgtcacccacatcggccctttccctgccggatagcggtttatcaggtgcaattcgccggtaatcgcatcaatccgggaaaccgccacatggtgagaaagctgtccggctga

SEQ ID NO: 283219 - DNA, 507 bp, Morganella morganii
ttgactgaatttttatctagtgatatatggcaaggtgttggtgttattagctcaatatttcttgctttgataggctttttgttatcacttaacactaggttccggatatttaggtcaaaaaactctatgtttacaaaagggaatgtacttcctgaagagctattggatggccaaacagcaacattatacgggaaagtcagagaagaggtttttgcaggtcctccaaattatgagtctgtaaatgatggtgacaagcctgaattttactggatattatacacgaattccccaattggcttggtaggcagaagtatggaaacaggtgaactatatgataatggttcatcatgtatgtttcagctatgtgtatcggcagaggtttatgataaacaaatttccttattgggaaaatacgtgaaagtagaggggacgatttttttcgggcatacaggacatcataaaactaaggctttattggatgtctgttctatttgtgagattaagtaa

SEQ ID NO: 283220 - DNA, 1050 bp, Morganella morganii
atgactgatatcgttaagttgttaggcaatgatgcatcatctcttcttgaacacacctgcaccaccattcccaaagacaatctttatctgccgggcgatgactttgtcacccgcgtgatgattgataataaccggccgaataccgtgctgcgctccatgcagtcactgtttaatcacggccgtctggcgggtaccggttatctttctattctgccggtggatcagggtgttgagcactctgccgcagcctcttttgccgctaacccgctctattttgatccgaaaaatattgtcgagctggctatcgaggcaggctgtaactgtgttgcctctacctacggtgtactggcttctgttgcccgccgctacgcacaccgcatcccgttccttgtcaaaatcaaccacaatgaaaccctgagcctgcctgcgcagtatgatcagacactgtatgccagtgttgaacaggctttcgaaatgggcgctgtggctgtcggcgcgacgatttatttcggctcaccggaatcccgccgtcagatagaagaaatctctgcggcctttgaacgcgcccatgaactgggcatggtgaccgtgctgtgggcttatctgcgcaacccggccttcaaaaaagacggggtggattatcatgccagcgcggatttaaccggccaggcaaaccatcttgcggccactatcggtgcggatatcgtcaaacagaaaatggcggaaaacaacggcggctttaaagctatcggcttcagccatactgatgagcgcgtttacagcacactgaccacggataacccgattgacctggtccgttatcagctggcgaactgctatatgggccgtgcggggctgattaactccggcggtgcatccggtaataatgacctggcggatgcggtccgtactgcggtgatcaacaaacgtgccggtggtatggggctgatcctcggccgtaaagcctttaagaaatcgatgaaagacggggtggcactgattaatgcagtgcaggatgtgtatctcgataagaaagtgacgattgcttaa

SEQ ID NO: 283221 - DNA, 1122 bp, Morganella morganii
atgagtgaagttaatattccaattttaatcgcaaatttcaaaccatttaggctaatatctcgtgatgattctgatatatggaatcctagcttagagcagataaataactccacatatgactacgtgaaacttcaccgagtaagtaggttcttcaatgcacacttgcctaaacccatgccagcatgttttggattcgatggaagcttaatatttccattcattgatgaatttaaaaatgataatttagttgttgaagaagttaatagaattctagcttctatatttatcggtgggatttatgtcgaatcaatcatgcctttagatatatcaaggggtatgattaatgttacaggttactaccgtcatctctccactcacagcagtaatgcaaattttcatcatgcaattggagaatgtgatgctggttcattagcttccatcagattgctcgaacctgtggttataagtgctgataagatcatatcagcatatgagtatggccataagattttgtccaaactacctacgttatctccctcactttttatcggcgcatttacatattataagcaacaccaattgtgtgaagcattagcacacgcttggattagcatagagcaaatattagagtttatttggaaaaaaacaatagtcgaagatgcaaaatctgttagtattcataagagacgaaaatttattgaatcacaacaatggaactcagcacataaaattgaaatgctctttcaaaataaatatttatgtgaggaggattattcgtttttaagtaaggcacggtttgctaggaacgattttatacataaaggattaactccctcatatgaagaatctcactcagcattaatggcactaatttcacttgtggaagttgcttcaaaaataagtaaagtggattttgaccgggctaacttagataagaatttgccaaataacccaagacattgcattccacaaactttttctcctaaaagtaatgaaaaaaatgctcttgatgctaaatattggcgagagatgaaaaaaatcccaggcgataaagattgggaaggagagtttgaatcatatccagatattatattatcagcaatcggtacaattgaaggttaa

SEQ ID NO: 283222 - DNA, 1077 bp, Morganella morganii
atgccagacgtaaccaaaatcataattgccggccggaatattgggggttttggtggcatggaaaccgtatttcgttcattcagcagattactggttgagtctgagaaaaattatcagatatcctttgtcttttttaatgagcaaaataatatcgttgatgacggatggcttagtgatctggactttattagactcaattcatccatcagaaacagaaaactaaaaagactttccttggcgtatcagttctcatctttaattaaagaaataaagccagattatattatagcttttgattctattggttgttatatttcaaagctagctcttttcttttcctttaaaaaaacacctttattttcatggaatcacttttctgtcactggttcatataaagcaaaatatttgcttatggcggataaacacctctctataagtagtggtatatcacagcagttatcaacgatgggcgtttcttcctctgatatttataccatatacaacccggtaccaacgcaggaaagaacaatatctcgtggtaataaagcaaattttctgtaccttggccgagtaatgagcggaggtcaaaagaatatgaatgaactattccgtgcattatctagggtaagtgacgactggaacctgcatatcgtaggttctggtgatgaatctgaaataatgatattaaaaaatttagctcatgaactgaatataagtgaaaaaattatctggcacggatggcaaactaatccatggagctatgtagcaaatgaaataaaaaatgtttcagcacttattttaacatctacctacgaaggcctgcctatggtactatgcgaggcaaacagctatggcatttatactgtcagttcagactgtcccacagggcctgctgatgttatccaaccatataaaaatggtgaactatatcctgtaggaaatgataacaaactgacttgcatcctgcgtaaaatagccataaatgaaacagtgacaaatcctgatataataaaagactcgatttcagaattctatgaaaatgaatatctcagtcgggtatcagctattttcagataa

SEQ ID NO: 283223 - DNA, 477 bp, Morganella morganii
atgaataaccgattatttaaaaaagtcatggctgcctgttctgccggtgcgattgctggtgcgctggtgctgatccccgcatacgagggcgttgagtacaaaccttaccgtgatgtggccggagtgctcaccgtatgttatggccataccggcagtgatattcagcccggtaagttgtacacggacgcagagtgcaaggcgctgctacatgacgacctaacgaaagtccggcgcgcggttgacccgatgatcaaagtgtcgattgatgacaacacccgtgcggccatctattccttcgtttacaacgtagggcccggtgcgttctcgcgttctacgatgctgcgtaaactcaataccggtgacatcgcgggtgcatgtgacgaaatgaagcgctggacgtttgctggtggtaaacagtggcaggggctgattaaccggcgcgaaacggagaaagcgatatgccacggaaccctttaa

SEQ ID NO: 283224 - DNA, 141 bp, Morganella morganii; identical to SEQ ID NO: 278464

SEQ ID NO: 283225 - DNA, 1077 bp, Morganella morganii
atgtctgtaaaaatttacgctatgtataataataaaggcggtgtcggtaaaacaacattaggatttaatattgcatctcaatttgcagaacaaaacccagaaactcaagtgctagttattgatttgtgtcctcaagcaaatatatctcaatatttgctaggtggtggagatcgaggatacactacaaatcaaagtcttcaatcttcaagtacaagaaggaatgtggttgggtttcttgattggttgttagatggtaattcaaattttacaagtataagacgaccatttaaagttcaagttaaccaatacaatagccatataagtaaaaatttatttcttatagctggtgattcatttttagaatcacttacattagctctaaactatgcggttattagtccagcaaatagatatgcatggatggaatatatgactgcattccgtagactctgtaatttagagcatacacaatcagaatataatgatttggttgtttttatcgactgtaatccaagcttttcaatatatactcaaatggctttgctttcctcggatatgctaatcgtaccaatgatggctgattatagctctttagaaggcatgaaaggtatcatgacccttttatatgggcattatccatctgcagccgctaaaaattatgcagaaaaatttgttacattccatagtcaagcagtacaaaacaatttagagttccctaaattagatagatttattttcaataacttcactactaatttaggtgttgccagcgcttatgattcaataaaagaatctttatgtagttttgcattcgatcagtatgtaaaatttccagatttatttacaaaccgaaacattacaattactgatagaaatacatggcaaaatgaatttttatcagaagttaaagattttcatacatcgggaaaggtatcagcaagcttaggcatacctttattcaagttaaccaaacagactcattacacaatgcctaatggtgaagaaatcaatgtagttcgagaacgataccgtgaggccagaacccatgttgatcagctggtaaataaatttaattaa

SEQ ID NO: 283226 - DNA, 522 bp, Morganella morganii
atgaaaaaggtaatcacggtattgctcaacggctgggtgtgggcggtcgtgttcttcggtctgtggatgttcagcatgctgtcagccgaacaaacggaaagcaaacataaagacaaggttatcactgaccagcaaaagatgattgataatgcatacaccagcatcgatatctttgaccgcgtggccgccgcaaacgccagccggaatatgcaggcagaagccaaatcacaggagaaacagattgaataccgcaccattatccggaaagagccgacctgtaatatgtatattcctcagtctgtttctgatgggctgctcagccacgtccatgccatccgtgaatctgcaatgcgttccgattccggcgtcactgacccagccggtactggcaccgttgccacccgccgactgacatattgccaggcggttgaatggatagagccgctactgacagcattggataaggcgaacgggcagttgatgaaaatcagaatggtggatatgaagaagggtaattattag

SEQ ID NO: 283227 - DNA, 192 bp, Morganella morganii
atgcgtatgtccgataaatattccagccctgcggcgtatgcgtggggtgtctttactgctgcttttggtgccctttctctggatcagtgggctatcgttgccggtattgtctgcaccatcgggacgttcctggtgaactggtattacaaacggaaagagttccagcttaaagccggagaacatcatgaataa

SEQ ID NO: 283228 - DNA, 201 bp, Morganella morganii
atgattacaaaaatacataacattgatgaaaaaggaacatcatttcgttaccatgaagataacaatgaaaaaaataatttaatggatataaatcacatagacctttacgaattatttaataatatggagagatttaaaaatatcttcgatgaaatcatatctactcttgactattttgataagaataaccaacttgattaa

SEQ ID NO: 283229 - DNA, 789 bp, Morganella morganii
atgagcaatctgattattgtcgatggtattaatgtgcgccgggatatggctggtcgctattgcctgaatgacctgcaccgggccgctggtggagaggaaagacataaaccgccttattggctgagaaatgcacagacagagcaacttattgccgagttgcaaatctgcgactcgggtacacagccggtaaatgtgttgcgtggtggcaccgagcagggcacctatgtgtgcaaagaactggtttatgcctatgcgatgtggatcagtccttcattcaatctgaaagtgatccgcacgttcgatgtggtggccggaacacagcaggcgatacagctggctgataaggttcaggccggagctatcctgctggagtctatggcaaaaacactgaatctgtcgaattcctcaaaactgggtgggtatcagaaactgcaaaaaatggctggtcttccggatctggctccctcctatgcaattgatgcaccggcgggtgcggtggatggctccagcagaccgacaacctctctgactacgctgctgaaaaatcacaatgccgcattgtctgcgaccagagcatacaaacgccttgctgagctggggattgttgagcagaaagcccggccaggttcacgtggtacacagcgcctgttctggtcggtaacgacgcggggactggcatacggtaaaaacatgacatctccggcaaacccaagggaaacgcagccgcatttctttgagagcaaatcagcggagctgctggcactgatgatgactccggcggtggcctga

SEQ ID NO: 283230 - DNA, 1608 bp, Morganella morganii
atgcttacttacggatctgtatgctccggcatcgaggccgcttctgtcgcctgggaaccgatcggaatgaaacccctctggttcagcgaaattgaaccgttcccgtctgctgtactggctgcacactggccgcaggtggataacctgcgcgatatgacaaaacttgccgcggcggttcgcgccggtgatgtgcctgcgccggatctgctggtgggtggtacgccatgccaggcattcagtgttgccggattacgcggtggcctgagtgatgaacgcggacaattaaccctttcttacgttgaattatcggacagcattgatgaaaaaagagaacaaaacggtgagcagccggcaatcattgtctgggaaaacgtccccggtgtgctcagcagcaaagataacgcctttggttgcttccttgcaggacttgccggagaaagtgaagaactcaagccgacaggggaacaatggacaaacgttggttatgtgtctggacccaaaagaactatcgcgtggcggatcctcgatgctcaatatttcggagtcgcacagcgccgccgtcgtgtgttcgttgtcgcaagtgctcgaacagacgtctgtcccgcagaaatactttttgagtacgacagcctgcacggggatattacgccgggcggagaaacggggaaagaaattaccggcactcttgcggcgcgcactcacggagggggcgggcttggaacagacttcgagtgtaacggaggattaattccggcgagtccggatgcagaaaactataccggcaatagcgaacccagccgggaagtggttgcagccctgaccaaaaacggtgtcggcgcaacaggtgcagacgacaaccaggcgcaggcgggacatctgatatcggtagttggtacgcttgctgcacactcttttactggtggagctggtgggcgtccggatggagcggcagccgggcactttattcctgtttttggtggcggtaactgcagtggaccgatagatgtagcggcttgtctgacagcaaaaggtcagcgaatagactttgaagtagaaacctttgcggtacacggcactcaagatccggatgtaaatcatgagctggcacacacgctgggacgcaaccacgggcaggaaaatgcctgtatagcattcagttataaagactacggtggggatgccaccgaaaacctgtctccgacattacgggccggtaacagtagcaacagcaaccagaatagcggtcagccgccggccatttgcattcagggtgcagtagtaggcagaaatgataatgcaggaccgcaagggaaaggctaccaggaggagcttgcatatacacaaaatgcccgtaccgaggcagatatagtgcagtgtggcatgcaggtccgccgactgacccccgtcgagtgtgagcgcctgcagggattcccagataaccacacacaaatcagttggcgcggtaaagatgccgccgactgcccggacggtccgcgttatcgctctatcggtaacagcatggcggtaccggttatgcgctggattggtaacgtattcttgccgcactgcctgaggaggaaactccggatctgcgctcagattacgtaa

SEQ ID NO: 283231 - DNA, 219 bp, Morganella morganii
atgaataatttaagtcaatatcgcaaaaaattggggctaactcaggaagaactggctaaagccattggttgcactaagggaaatattagccattacgaaaatggacgccgtaaagcagatctcgatatgtgcagagggctggtggctttttttaaccgcaacggtgtgtttgttacggtcgatgacttgtttcctcccaaaactgcacaagcattatag

SEQ ID NO: 283232 - DNA, 561 bp, Morganella morganii
gtggcaaagtgtactgattatcaacctagccaagtagaagttaacaatgttctatactgtgaaaagtatgttgatttttctggtgttagctggatggaaaagccaccaccaaacagaccgcttttatggcttcaaatgaatgtcttgccattagactgcgatggaataccagttcagggactgactattttaatccagtggaagccagatcatgagcccaagcaagatggagtagaagcattaccaaagataaatatcgtagctctttataacaaaaaaagaatatttgcagtagatagttatccatttgatgggcatacaaatagatataaagtagaacaccctgactttgtaagttacatcctaggcgcccactaccatgtttactatgaagaagccgggcgttatagtgaagtaggattcccgattaaagaagctataaaatcagatgatatcagagggttttggcagtttttttgtaaacatttaaatataaaatgtacaggcgaactccctatacctttagaagatttatctggacaaataggattaccattatga

SEQ ID NO: 283233 - DNA, 756 bp, Morganella morganii
atgatgtgctcaactgtcatatctaatcttggttttgaatgccacccgataggtgctgaattactaaggattataagcccattcactttctgtgatgatggggagcatgttggtgctttcgtaaaagaaattaatggtaaataccttgtcagtgaccgctgcgatgcgctaatgaatatggaagccagagggatttcacttacaaaaaagagaattgacgaaatccgtaactttataagccatcagggagctgagcttaacgaaagaggtgaaatcgttagttgggcaacggaagataccgttggttctgccacttccaatgtcattagagctgggatactagcctccaccttatccatggactggcatcaatcggttagagttgaaaaatttgaaagtgaagttatagattatttatatcactcaaatttaaaagatataatctcactgagatctaatgtattaggaatgagtggccacaacattgtcattccggtaaccgttaatgccgaagttccaaaatatctttttacatccagcgtaaaacaagggggtagctggaatagtgcatactccctgcttggtaagctgattgacctgaaaaatgcaaatgttgcattaaataatagatatgttgttgttgatagcgagtcaatcggtgctcaaatgcagcaattatctcttttgttcaatgaagtaagtcatgttttacctttcgctaaaagagaaaaatggatatctaaactagccgcataa

SEQ ID NO: 283234 - DNA, 210 bp, Morganella morganii
atgcaaaccgaacccaccatcaccagcaatatgtccgccgacgatgttgcacagtggatcaccgaaaaagcccaggcacttcaaaagctgcaatcactgcgtgcagagcgtgacagagagatccgcgaccacgaacgcaccatcagtcgactcgatgaagatatcatcaagtgggaagatcgctgtgcattaaccgtacaaccgcagtaa

SEQ ID NO: 283235 - DNA, 696 bp, Morganella morganii
atgagctttcaaaacgacactaaattgcatgaaatgacgtgcataaaatcagatggcctgcaccgtcattatcatttttccaatccacggaattcgtgctactggttcgatattgtgacagtgcctggttttttattcatgaccggtgatatggggacgtgggcctttagccgtatacgcgacatgatccagttctttaatcacgacagtattgattatgagtactgggctgaaaaattacagatgggatcaaatcgtagtgaagcttcagctgcatacaaagaggtcgatttatcttcaactcttgaattttatcgccggtcattagaagaatggctcgcagataccattgaaggtgaggacaacaaagatacattaagtgcaattaaaagatcatacagagaatttgcggaacgtatcggccggttaaagtcacttatatctgattattcaagtggaagaatatcagagcatgttttttaccgcgctgtagcagaggcagacatggaagaagactcatggcctggtcactcgtcaccgtgggattgggaaaatttaagtccacatttcaaaccaacacatcactacgcatgggcgtgtgaagcaattcaatatgcctgtcagcgtattgcgaataaagaactggctgaggctgcggtcgataaactgattttatttaagcaggtgtccgcatga

SEQ ID NO: 283236 - DNA, 324 bp, Morganella morganii
atgacaataattaacaaaataagtcctatcaaacctgagcgcaatcctgacggttactgggtgcatccggatgttccccgcctggaatcgaatcaggaaatagagaagtggcgcgatgaaaacaatcttgaatgcctggcggtattttgctgtgacgacattgataacttccacccagtatggttcagctactttgaagaaggtgataccaatatttcagcgtgggaaccaacaaaacccgatggtgatggctggtttatcgcctggatagcagacaatgaagacggcccggtctgtatgtgggtcagacctaaaaacctctaa

SEQ ID NO: 283237 - DNA, 669 bp, Morganella morganii
atgattagtatcaactttcttatcttatttttttcaataatatcttctgttgctatgattgtagttattatggtgttttttttgcaaaaaaaagacagttataataaggatagatacagactggaaatagaggataaaatatataaactatacaatgacatgataattagccaatctagatttaaggatgcaaatcatttaattatggattggaatgataatcaaagtaaaaatatagatagcaatgatttttttgaagctcttggtattaaaaaggacttgattgaagttgataaaaataaagttttcgttttgactccttttcaccctcgttattatagtcaatatgaggtgataaaatccactattgaagagcttgggttgcaatgtacaaaaggtgatgattcaactaaaaatgaaaatatcttatctcatattgttgtagagatttgcaaatctaatctaataattgcaaacattagtggtaaaaatccaaacgtattttatgagttggggattgcgcaagctttaggcaaaagaacaattgtggttgccgaggctgaaagtgaaattccatttaatttatccaacaatagactattaatgtttataaatggaaagcagctcagagaaaaacttaaaaaatggttggttaatagttttatataa

SEQ ID NO: 283238 - DNA, 258 bp, Morganella morganii
atggcgtcgtcacagtcgcttggcgcacgcttcctgatcctgttaatcagaggttaccagctggtgataagtccgctgctgggaccacgttgccgcttcacaccaacatgctcgcaatacggaattgaggcattgcgcaggtttggtatgataaaaggcggttggttaacggtgaaacgcgtattaaaatgccaccctttacacgaaggtggtgatgatcctgtcccacctaaaaatgatgataacagagaacattaa

SEQ ID NO: 283239 - DNA, 654 bp, Morganella morganii
atgagcataatgtctatagtcattattgctatattaatttttatcataggtcttacagtctattattttcgagctatttggaatgaacattccaacttcagcaatataactgtagggctatgtactatatttacgttactttggggggcttatacttttgatgctttaaatcaaagagataaggctgctgcagaattacaggaaatacaagagagaataaaaggcacagaatcaactttattttctataaatattacagaggaaaaaggggacgatggattctatattcttccagttgttactattaagaataatggaactgagccaatacatataggtttagataaagaatcattaactatacagagtgttaaggttgttaatgataaaataaaagcattggagacttatcatcctaatttttatgaggttatttcacaagataaaaaaactgatcacacaccaatgtatgatctgattgtacctatttctgcggaaaggagcataagttatgcactgtatgttaaaaatcctggactttattatttaacgtttaaagcaaaaactgtagacaaaaatggtaacgaagacgttaaagtaaaaaatggtaaaccaataatttggtttacttcacggtatgtgtatattaaatag

SEQ ID NO: 283240 - DNA, 1065 bp, Morganella morganii
atgccacttaaaattggaatagttaatttagcatcaaaatgctgggtagttcgtcctggtgttagatatcggtttgctagtgagtttattgagaatgagataattgctacagcacatttagataatctacagattaacgagcttacatttagtgacccaataacacaggcaaataaggctagtttacttgaaggttttaatgctataacagcaaagaatgttaagcctcaaattgagagctttgttattgatatgaaagttggtgatgttgttttcacattaaattctagccaagtaataccagggattatcaaatcaaatccatattatgctacagatatatttcctgcaaatgaaggatttaaagttcgtagagacgtacaatggggtgatcctatacctaggaatagaataccaataacaattcaaaaatcgtttaatgcgtatcaagcgatattttctttaggtgataattctaaggaggtttttcactggctttcttcattttttatcgatgggaatgattattatagtagtttgaggatagagcaatctgctgctttaaaacatcatacattaaaacaattagctgaactgattgatagaatacaagttttatcgatcatgatttctgagcatcaatcaaatgatgagaacccattaaatataaattatgaagatctgaaaaatgctatggtcagatattcaaatggtgggcttctggatttaacttctcaacaaattttaatgtcaccaggtgatttgtggttaaagtttagcagtcaatcaagatatgcaggagttgcatttttatatttaatattgacaaccataagtccagcccaagaattagaatttaccaatcaaacctatactagtaatctcgcggaaataactgaactcattgaatctaatcgtaatgtcattgagtatgagttagatattccgagcattagaaggcagttaatactgagtgctgcaaatcaaaatagtgaatttgttgattctaatattgaggaagatgactttcccagtgatggtagttcaacgcatataggtggatga

SEQ ID NO: 283241 - DNA, 813 bp, Morganella morganii
atgtctggacgtcttggggtggcggcacgtttacagcaacgtgtgacaggtataatgcgctatgccgtacaaagcggtttaatcgactataacccagcacaagatatggctggtgcagttgcgacaggtaaacgagtccacagagcagccttagaacttaaacgcttacctgagttcttacaacgcattgatgattataagggaagacctttaactaaacttgcagtcaaacttaccttattagtctttattcgttccagtgaactgcgttttgcccgttgggatgaaatcgattttgagaatgccatgtggacgatcccagctgagcgtgaggcgatagaaggggttaaacactctcatcgcggatcaaaaatgcgtactcctcacctagtacctttaagccggcaagccattgagatcttaaaacagatctatcaattcagcggtaaccacgagctgatctttatcggcgatcataatcctagaaaaccaatgagtgagaacacggttaacaacgcattacgagtgatgggttatgacactaaaacggaagtgtgtggtcatggtttcagaacaatggcatgtagctcgttgattgaatcagggctgtggtcgaaggatgcggtagaaaggcaaatgagccaccaagagcgtaattcagtaagagctgcttatattcataaagcagaacatattgaggaaaggcgcttgatggtgcagtggtgggctgactttcttttcgaaaatactcatgctttaatcactccatatgaatttgcaaaaaaagttaaataccttaactcctatcagtaa

SEQ ID NO: 283242 - DNA, 354 bp, Morganella morganii
atgactgacaatcagacgcggaaaaattccacaccgatcaaggtttactgcttaccggaagagaagatgcagattgaagcaaatgccgccactgccggtctgagtgtcgcggcctatttgcgtaaagtcggtatgggttacgatgtggagtcaatggttgatatagaacaggttaatgaacttagccgagtaaatgctgatcttggaagacttggcggattacttaaattatttctcgcaaatgatcctcgaacagttgatttttcacccacactgataagaaccttgcttgcgaaaatagaatcaactcgccaagaactaaggaacattatggataaaatcttggataaataa

SEQ ID NO: 283243 - DNA, 2193 bp, Morganella morganii
atgcatgaaaaatatagaaataaaatatctccttttatagaggaaactcatccggaatcagcttcaaaggggattccaattggttttacatcctccgcgatattggctaattggtatctggctaattttgatagagatattaaatctaagattaatccttcttactatggccgctatgtagatgatattttgtttgttttttcttcgcctaaaattgaaatagaagatagaggtaatgaggttgttaattttattaacagaagtttaagcgactttataattcctactgacgatcataaaggcttcaaattgacgtcagagtatcatgagttacccattcaaaaagataagcttatctttcattattttaataaagatcatagccttgctggattgcaggtttttaagcaagaaattgaaaatagaagtagtgcttttcgctttttgccagaagagcatatttcaagtgatctagataagtttgcatatgatattctatttgatggttctgttaataagttcaggagtatagttggtctggcggaaaatgaaacagagctttctaaatatatatcctctcatattttagctcatagattatgtaatttaccttctaacgaacataccttaaagcaaattacattattctttaaaggtgaaaatggattaaggttttgtcgattgtgggagaaggttctttcatataccttaattacaaggagatatggcttttcaataatgttttataagcaagttattgaattaatacgcaaggtcaaatggtatagaaaagatgatggtaatgtaagtgatagaaataatgaagttagtggtttggtagctgataagttaaagcagggaattcagaaatatatagacatttcactgtgcttaaatctcgcattgctagatttagatgttttgcttggggatgaaaaaccacgaaatagaagtttggaaggattgtgggatttaataaatcagcatgatgaaatgcccttgatgataaacagatttaggagaagtaatatgattcgccataatctagtttcttggcctttagctaattacaccaattatgaaggtgatcttacagaagaaaatttatatagtaaattacatggcgtttcactgtcaaaaagaaagattaataaaaccccaagatatatccatgctgatgaagaacaactatttgaattaatcgatgctttgcataccaatactttgaatgactttacagaggaaaataaatatcatgagaaaagttgctctgtagaaagtataaaagacaataaagcactggagataacgatcgatgttgacgatgctaaacataatgacacaataaaaattgctcttgcaaatatgaaggtcgaatacaaagatattgagagtgcatgtagaaaagatcagtcgccaaatttaagctatgagcgacagaaaaatctttatcgtattcttaattccgctactgatgagaaggttcaaatattacttcttcctgagttatcgatacctgtttcttggttgccatttatggctgcacattcaagaagaaagcaagttgctttaatatttggtcttgagcactgggtggtgaatgatcgtgcgaataatattttggttgagatgttaccttatacttcccattttaagcataagttcagtatgttgacattcagagttaaaaatcactatgcaccaagtgaaattaagatgctgacatcattgaggctgggtgtttcgtctcctgttcctgatgagcaaaaatatcatttaataaaatggaaaaatatatcgttttcaacgtataactgttttgagttagcaaacattgaacatcgggcacttttccgctcaaagcttgatatattatttgctagcgtatggaacaaagatattaattattatcaacatatcactgaatcagccgctagagatttacactgctatgttgcgcaatcaaatacatcacattatggtggttcgtgtgttcttcagcctactagtagtacaatttccaataaaatatatgttaaaggtggagagaatcattgtattttaacagctacgttaaatatctatgcgttacgtgaggctcaatatcgctcatttaggatagattcggattatatcaaagataatcctccaggatttgattatgacgaacttttagctcggggtggaaaatga

SEQ ID NO: 283244 - DNA, 690 bp, Morganella morganii
atgagtactttttgggaagggcttctgtcatctagcatttctttagctgtcattggctttgtctgtaaaatatttttaaaacatattgataaaagagaattggaatcctttaaaaataaactgaaatatgaaagtgatataaagataaaggaagaagaacgtaattatgatattcggaagacaagggatcttgagattggtcgttggggactaactttacttagtgctgcgaatggttttttaggtcgattgtgttatatcaaagaacagaggggactttcatcagatcaatatattattgatagcacaaaattctatttgtgtcagtaccttttctgggctcaactttttagaaagaatagagactcttctgttttttccccaacaaatgatgagatgcttattaccgagctaattaaaaatatttcaatcactttacgagagaatacactcggtttgccttgtattcgatctcttgaacagcagtacattggcgatagtctcaatattaacggtgggtgtatgacctacaaggaatttatagacgtcaacgtgttgagtcaatattcagcattaaatgattttgttgattctatcctgaacgataacaataaagagtttatcaatataatcattgtgtcctttcaagatttgaaatctggatttgaggctacactgcaaaaaaaatga

SEQ ID NO: 283245 - DNA, 1164 bp, Morganella morganii
atgtataaagtcgataaacaggaaaacaccttacactctttacaagaagtgtctttcagtagcttaggtttccgtgagcgtgaacatctacaagaatggttagctaaaaatccgcaagcattaactaaaaaagaagaagttaacgatgaactgttaattatacaaaaagaatttgcgggatttgatgaaactaaagagcgtttagatctacttgcattagataaagatggtaatttggtgatcattgaaaataagcttgatgattcaggccgtgatgtggtgtggcaatcactaaaatatgcggggtattgtgctaatttacgtcaagaaagtatcattgacatatttcagcgctatctcaaccagtatgaaccaaatgaaacacgctcagcatctgaaatcattattgaatttattggacgtgaagttgtacttaaccgcaaaggtacacaacgcgtcatcatggtagcagcacactttcgcaaagaagtgactaataccgcattatggctgatgcaatttaatattcgtattcaatgttttaaagtaaccccttattgctttggtaacgatgtctttatcgatattcgacaagttatcccaactcctgaagccgaatcgttcatgatcggcatggcacaaaaagaagcagaagaacaatcgtccggtaatgaccttcagcagcgccactacttacgacgtgagttttggactttggcattagaagagtttcgtcgcagtcgctgcgacctttttaataatcgctcaccatcaacagatcattggttagcggcgggatcaggtctcagtggagtaccttatgagctgattttttcgcaaaaagatgctcgagtacaactcaatctttcccgagctgatgcccaagaaaacacatggctatttgaacatttactcgaacaaaaatcacaaattgagcatacctttggtcatacattagaatggaggccattaccagaacgaaaaagttgccaaatagttttccttcaatcttttgatggcatggataaagaacaatggccaaccatcataaattggatgattgaaaatatgtctaaattagaacttgctttaaggcagcctcttgcagaactttcgattcagcttaaacagagtggcctaatcacagaaggtgaagaagagtaa

SEQ ID NO: 283246 - DNA, 1068 bp, Morganella morganii
atgaataaaacaattattttatatatactgaaattaattttcagacccaaggatatactcactcgtattggtttagggctgtttagtggagggataacagcttcagccggtggatggagcatgaacttggttttttcagagcaattgcttaaaaattatatcaatatttttgatggcatttctattagctaccaaaaatgctctgaagtgtttctatacattgggatctttgcgtccattttaggactgttagtgctgatgtattgcatcttcttggctgttcgtgatgtccaaaaacgtgatattgcttttattcgtgcatatgggtttgaaaatattgacccacatgcagcagaaaaaatgctttcgtccagagaaaaagtcaaaactctccccgtagatttaaaagcatttgattctaggactaaaagcaaagtaatcgaagagtctacatttatcagaaggatgataaaggacagaatacaacaccatgaagccactgtggcctatgttgcagctctagggagtattccttatttgtatatgattggtagctcaatgcgtgacggtcacttgcctttaagactatccgattttgatcgtaataaaaattgttttcatcttcttgatgcccccccaaccggtgccaagttaattaggaaatttagtggggagataacagaaaatagttccgttgttagtgtgaatgttaacaatcagatagggttagctatttcatttacgatggatatacagccatcggacctgcccgtagacctgagcgatcatacgctacatatccagcttgatacaggattcagatttgacaatcttccttctgaggaagagcaagaaaatatcactaaagaagtaagttttataatatcagaattgaataaaaaagctgatgaagtacatctatttatttcagctcaggcatcatttgttgttcgccttggctctctttatcaagaggggttacatggtgttatctatatttggcattggaattcaatcaaaaacaaatacgaatggaacttgaaaatttcaggtaaggaagtcagttaa

SEQ ID NO: 283247 - DNA, 1737 bp, Morganella morganii
atgaactattcagctatcacggattacttagccaaacgcggatacaagatatccgcgtaccctgctgaaactgaccagattgaatttttcagaattgaactggagataggggattttccggtcacgttagtccattaccctgtcaaagaaattaccggtttgcccatatttctccttgtaaacccttcagctttgcctagattggcacatacgacagtctatgaagagatcggctttgctactatatgtgtaaatgtccctgatgcggtttcagttaactacgagtgccctgaactggcgtttgaggagtcacttaaacgacatattacattacttacacgtgccttaacggaccgagattggaatacccaggaactgctgagagagtttgaagcgggatggggaagtatcattgagccggaaacgacaccatttctttgcttatcagatgagggggaggctgagtctctttctgtttttaagcctcgtaaaaacgccaaagctggacttaatacatattttttaggctatagagaaggttggaatcctgatgccctcttttcgcctttaagccagatcttgaaagagcgagaagaaactaaaggaaatggatttgtcataccacttaaagcaactatgcccgccccttggcagaaggaagaattggctcagtggtatttagaattactacagaatttgccacaggatttatttaccatgctgacaaaacgcttcggtcagcaacgagcccgcgaattttggcttatttttaatgcccaaaccccttctggaaaaacatggtttgggatccattttgcgttaaaaaatgcagttcagggtaaaaagcatcttccctttaaagcaagccacattgaggagtgggttctaaaagccctacctgttttaacattcaataaagagcgattgatgcctagaagtggggctaaccagtccttgctgtgcaagaaggtcatgctcgtaggctgcggatcagttggaggagaagttgcagataagctggctgcatcaggtgttggtcacattcatttgtgtgatcctgattcactatcgctcaacaatctttatcggcatatactgcctccagcatttgtatcatgcccaaaaacagtcgcgttatggttaaatctaaacagtaaatatccttggttagagattacaggcgacatgacaaagctacttgctctaagagatcgcaagactctttcttcattcgatcttatcattatcgcgatagggtcccccacacaagaacgcatgtttcatgattatctgattaaagaaaaaatcaaagttcctgtcatcaatacatgggttgaaggctatggagttggagggcatgctgttcttgatataccaggaacaccaggctgcttgcgatgtgcatacgttgattccgacaatttttctcgtgggctatcatctaatcttaactttcttgccacaaaccaagatttgacaagaaatcatgcaggatgtggagacgcctttcttccttactcctatacatcatcaactctgacagcacttattacagtggacctggccgtaaaatatctcagtcatagagtaaacgtctcatcgagagttagttggaagggtagctcagaagatgcgattgagtatggttttgtactgagcgaaaggtatcacgcgttcaatcgctcattggaaatattacctttgtacaatcctgaatgtgatatatgcaatggataa

SEQ ID NO: 283248 - DNA, 1071 bp, Morganella morganii
atgagtctgcagaataagtttttcaagtttcatgacgctatactgttaggcataaaggacgtggcatatgctaatgcccgtcttaaggacgaaagtatcctcaaggagataaaagctcgctttaaggaagatggattttcagttattgatgattttatacaaggttcgatggcaaccgatacggggatccgtgagaagggtcaagattttgatatcgatcgcgcaatagttattgaagcgtcacttgcgccagaaaacccaatcacccccaaaaaagcggtcctggaagtacttgaagaccgtggatttaagaatgcaaaaatcaaaaaaccttgcgttacggctgattacaagactgaagatcttcatattgatattcctatataccgccgatatgaaaatggacaatacgaactcgcggtaggtaaagcacattctgatgaagaaaatcgtcaatggtctccttcagctccgcgtgaactgattgattgggtgactgcctacgatgatagtgctgtgtatgcatctaaaaaacacgatcagtatcgccgcatcgttcgatacctcaaacgatggagaaatttcacttttagtgaaaatgttcgtcgcaaaatttattcgattggcatcactgtgatggttaaagaatcattggtcgcttcaatcaatgatgaaggttttccagatgacctgtcagccttacgcgcaactattcgtcatattttgaatgatgggggttattttagcttaatagaggctgaaaaatacaaagttaaagtagatatccctgtaagtcacacaagggatatttttgataacagtagcatcacaaccggcactcaattccgtaatcaacttgccgctctgttaaaaactctcgacaaggttgcggatgaagatagcgaatctaagcagtgtgaattgcttagaaaggtttttggcgaagatttccctgagcatgcttcgacatctactgcatcggcagtgtctactgcatccgtagcggcaagtgctggtgccaatacagtctatgcttcctcaggagctgtagggacatcacaaggcgcatga

SEQ ID NO: 283249 - DNA, 606 bp, Morganella morganii
atgcagcgcgaaaagcgcacctatggctatttctcgtcgcgccggttcgccaaccggcacgaaaagaccatgacagacgaaatcgccatgaatccatcctattttggtgtcgtgccgctgctcgaaatattgcaaactctggttcacgaaatggcgcacgcttggcagttccatttcggcgaaccgggccgacgcggctaccacaacaaagagtgggccgacaaaatggaagccatcggcctgatgccttccgataccggcaagcccggcggaaagaaaacgggcgagaagatggccgactatgcgattgacggcggccccttcatgcaagccactgaggcgctgctaaagaccgacttccgcattacatggttcgacaggcacccgcctgcaggaaccgaaatcgcggcgatcttcggtgacgccgacgacggcgacgacaacgacggcggcctgatccagcctgccccggccgggaacaaatcgaaccgggataagtaccgctgcccctgctgcggtgcgcaggcgtggggaaagccgggcctcaagctgctgtgtggcaatgacgattgcaacgccgcgccgttcgagttggccatcaactga

SEQ ID NO: 283250 - DNA, 318 bp, Morganella morganii; identical to SEQ ID NO: 18005

SEQ ID NO: 283251 - DNA, 708 bp, Morganella morganii
atgttcgagaaactgcgcctcaaccgcgcatggcgtgccgagctgcgcgagcttgaccagaaacaggccccggccactctggccaagcccgacgacagtaatcccggccgtcttctttggtgcctgccggttcccggcaagaccgatgttttcatggctttggaaaagggcgagcacgccgatcacgacaggttcgtggtgccggtgaacgccgtggcgttcaatcggctatggctggccggtggcctcaattcaagggagcggccggacggctgtttgttgcgccgggacatgcccgccgatagcaaataccgtcacgcggccgcctgctttgccgaggggccgcagtcacccgtgccgctggccagcgtctcgctggaacgcggtcgggacggcacacaatcggtcagcttcggcgacggcgtaacgcgcacgttttggctgctggccaacaacgtcgccgcgtttcccgtcctgatcgcaggggaggccgccgccaagcagctcgcccagctcgccgggacggacggcagcaccttgcgcgtgtccgaggctttccgacaggtcgaaaaagtcccgaccagcccacagaaaccgctcagcaccaaaaaggaaggggtagggcaggggcgggtgaacaacgcgcctcagcgggccgtacagggccacagaaggccgtcccgagatggcggcataggtatcgactga

SEQ ID NO: 283252 - DNA, 243 bp, Morganella morganii
atgacgctgttcagcgagtacaccgacgccgagctggccgcgttgcccgacaccatcgagccgctgaccatgctcgaactgcgttccgttctgctggcccttgacggcgatagctttccgccgcgctcgatgtacaccaagggcttggttagcgcgaccgagaagatggagcggatgcttgacgaagtgcgggccagactggtgcgcgagcgttaccacagaccggccccggtcggggactaa

SEQ ID NO: 283253 - DNA, 2028 bp, Morganella morganii
atgacgacattggtaatcgtggaatccgtcaagaaggtagagaagatcgggccaatgctgggcaacggctacaaagtcatggcgagcgtcggccacgtccgcgacctgccgcagaaagaaatcggcatcgagctgccatcgtatgcgctgacctacgagcctaccgaccgaggcaaaagcatcgtggccaaactcagggccgcagccgccgagtccgaccgcgttatcttggccaccgaccccgaccgggaaggtgaggccatcgcgtggcatctggcggaaatgctgcgcctcaagaacccggagcgggtgacgttcaccgctatcacgaaagacaaaattcttgcggccttcgcgtcaccccggccgctggacatgcagcgcgtctacgcgcaggaggcccgccgggcgctcgaccgcatgattggctatcgcgtcagtcctgcactgtcggatgccaccgggcaacgtcttggcgctggccgggtacagtctgcgggcgtccgccttgtggtggagcgcgagcgggctattgctgccttcaaatcgacccagcactacggggccgagctggtctttaacaacgacgacgcgacgagctggaaagcgcaatgggacacgaaaccgcacttggcggatggtgaaacgtacctgctcgatgccgagctggccaagcaggccgcagcagtccgaaacgtagtcgtcaccgactacgaggacagcgagaagggcaaggccccggccgcgccgttcacgacctcgaccatgcagcttgccgccggtcagcgactgaaattcaagcccaagcgcacgatggaactggcgcaaaagctgtacgagcaaggggcgatcacctatcaccgcaccgactccccgaacatggacgaggaaggtattgccgacattgccgcttacgctgccggtgctggtctgccaatggccgacaagccgcgaaaatggaaggccaaagacaacgcgcaagaagggcacgaagccatccgcccgacacacgttgctgatttggattgcggcgaagacgacgacgaaaaggccctgtatcgcctcatctggcaacgtgccgtcgcctcgcagctcgccgatgccatgtacgctgtccgcaccgttcggctcgctggcgatgccgcaggcacgcccgtttcgtttaaggcaaccgggcgcaccctgttgtcgcccggctggcaggccgtctacgcggaagacgcgaaggacgagaacgacgaaccggacgaagaaagcaacaacccgattccggccctcgcggtagacgccgcactggtagctgatgatggccgcgtgctgaccaagaagaccaagccgccggttcgcttcaagcaaccgacccttgtaatggaaatggagcggctggggatcgggcgaccgagcacctacgcggcgatcatggagaacatcaccgcccgcgagtacatcattgcggacaaaaaagagtacctgtcgcctacgccggtcggcgaacttgtctgcgatggtttggtggatcgcttccgctttatcgacctcgactacacccgaggccttgaggaacaactcgaccagatcgcggaaggcaagaccgactacctcagcgtcgtctcggcggcttgggccgcactcgatgacgagctgggcaagctggactcggccgacctgcccgtggcgcacccgtgcccgacgtgcagcaagccgctgcgccgaatcaagggccaacacgggttcttttgggcctgctcagaccgggaatgcaagaccaccttgccggatgccaaaggcaagcccggcgagcgcaaggctccaccaccgccgaccggcattgcgtgcccgaaatgcggtaaggagctggcccaccgcgtcggtacgagcaagccggtcaagcgtgggatgaagccccgtccgtatgacttctatagctgcaccggcttcccgaaatgcgatgcgaagtacaacaccgggccggatggcaagccagtgttcggcgatgacgcgaaacctgcgcaggaggttgaggcatga

SEQ ID NO: 283254 - DNA, 3324 bp, Morganella morganii
atgaaaaaggaatacgccgaggaagtcgcggcgcggatcatagagcagttggagcagggcaccgcgccgtggcaaaagccgtggcagcccggcgagctgcgcttgccgtacaacccgaccaccggcaaggaataccgtggcatgaacagcctttggctgcacatgcagggccacagtgatccgcgctggatgacctacaaccaagccgccgccgaaggcgcacaggtgcgcaagggttccaagggaacccatatcgtctactggaagttcagcgaggaacgaaaggccaccgacgagcagggccgcccggtcattgacccggacaccggcaagcaaaagaccatgaccgtgcagctcgaacggccgcgctcattcatggccgtggtgttcaacggctcgcagatcgacggcttgccgccgctggaagcacgacccaccgggccagagccggagcgtcacgcccgcgccgaggccatcttggccaattcgggagcggacattcgccacgaacccggcgaccgggctttttaccggcccagcacggacagcatcacgctgcccgagcgtaaccagttcccgaccgccgacaactactatgcgaccgcgttgcatgagctgggtcactggacagggcacccgtcgcggcttgaccgcgaccttgcgcacccgttcggttcggagggctacgcccgcgaagaattacgagcggaaattgcctcgctgatgttgggcgagcgcctcgaaatcggccacgatccgggccagcacgcagcctatgtaggttcgtggattaaagccttgaaggaagatccaaaagagatcttccgggccgcgtccgacgccgaacgcataagcggctatgtgatggacttcgagcaggagcagatgcagacgcaaacgcaaaccgtcgagcgtcagcccgtgccggaaatcgcgcccgaggttgcggccgagctgcaacgcgatcacgaaaatgccgtggaaggttattcgccgctggaaagctggcagatgatgaaagccgaggccgagcgtaacggctattccgcccgtatcggcttcgcgtctggcgagctgggcgacttctacgaaatcacctaccacgaccagcagggcgagccgtccggcatccgcacggaaatgtatggcgatagcaagctgatgaccgagtacaacggcacgcgcttgtcacagttcatatcgaacgacgacgaaagccagcctgcgacactccgcaccgctatccagcagcacgaagcggccaagctggcccggcaggccgagcagcagagtgcgccgtacacgcccggccaagagtcgcccgcttacaccgtgcagagccgccgcgtcgtgccggagaatgccgccaatcatgcaggccagaacgccgtctatgtgcagctcgatgacggccgcaaggcttggggatttggcgcgaccgacgaagccgccgagcaatccgccgtagaacgtgcgcagcgcgtcggcctcgatgccgaccgagcaccgacccgcgccgttctgcatgagcaaccggagaagcctatgcaatcgcgcacctatctggccgtgccctatgccgagaagaacgaggcgaaggcgctgggagccaagtgggataaggaagcaaaatcatggtacgcgcccgagggcgtggacgtagccacatcgggccttgcccggtggagcgtggacaaggccaacgtcgtcactgcatcggaacccaagcccgccatcgagcagttcaaggacgcattgaaggacgcgggcttgcagctcaagggcgagatcatcacggacgggaagatgcagcgcgtgcccgtcgagggcgaccgaggcggtgccaccagtggcgcatacgcctaccacgaagccgggcgcacgccgggcggcttcatccagaactacaagaccggcgaagtcgtgcattggaagcccgaaggcaagacgccggaacttagtgccgccgaccgtgcgcggcaggccgccgaggcgaccgagcagcgcaaggcacgcgatgcggcccgccagtccgagcacggagcgaccgccgccgccgcgcaagcgttgtggaacgaggccccggccgcgaccgctgacaatgcctattgcaaagccaaaggcatcgccaacccggtaggcctgcgcgtcgtgccggacagtgtttcgccggagactgccgcgcacgggatcaagatcgccaagacagccaaggaagccaaggcgctgcgcgaggctgacccggccaaccgggttttcaaagcgggcgacctgctgatacctggcacagacggcgaggggaaattgtggacgctgcaaagcgtcaatccctacttcaaatcgttcatgaagggcggccggaaagcaggcctctacaccgttgccggtgcttccgatccgcgcaaggcgctgtcccaagacggcaattctcctttggtgctcgccgaaggctacgccacagccgacacggtttcgcgtctgctgggcggtaagccggtcatcgtggcattcgatagcggcaatctcgacgcggtggccaccgagctgcgcgagcgtcacccgtcgcggccgctgttgatcgccgccgacaatgaccacaacgcgccgaaggagctggatgccaacggcaagcccaaggtcaacgtcggactggtgaaggccacagaaaccgcagagaagcacggcggcggcgtcatggccccgcagttcaacgacggcgagaagggttccgactggaacgacctcgccgggagccgtggcgacgaagctgcccgccggatgctcgccgagcaaatggcggtagccaagcgtgatgccgccataactgccgagcggttgaccacccttgcgcgtacccgcgacatggaagcccgcaacgacccgacgacgagcgccgacgatgcggccgtagcaacagagcgcgggcacgcggccgaagtgctggccggtgcgcaatccgcactcagtgaggtgcgcagcatggccgccgatggcgtgaccggcaacaccaaaggggcaacccgttctgccgctgccgtcaaagccgggatagaccggaagaccgaggcgatgcacgaccgcgccaaagaggaacgcgaggaagtgctgaaccacggccagaccggcccgctcgatggcgtcaccgctggcgtgtcgtggaaaaagttacccgagcaagccaagcaggcgctcatcgaggacgtgaagaacggcaaggacgtgaccttgccgaaggacgccccggccaagctcaaacagatggcaggccttgaaccgacccccgcgccgcgctcgcgtagccgtgggattgatgcaggcctttga

SEQ ID NO: 283255 - DNA, 897 bp, Morganella morganii; identical to SEQ ID NO: 17999

SEQ ID NO: 283256 - DNA, 567 bp, Morganella morganii
atgaaaggtcgccgcttcggaatcgccgccttgtgcgcggccgcagtgatcggcgttgcgatcacgaccggctatcacgcaggcctgcgcctcaacttcacggactcggccccgcatgggctttggcttgtgcagaccgccgaagcggccagcatcaagcgtggcgagctggtcgaggtgtgcccgcctgcctcgccgattgttcgcctcatgggcgaacggggctacctcgcgcccggtgactgcgaggattccggcgtaaccccgctactcaagccggtgtcggcggtagcgggtgacgccatccagttcgagccgggccatcccgtgaccgtcaacggcgtggccctgccgaacaccgccgctatgcccgcgctgccgggctggcctgccgggcgctacatcgtgcagcccggcgaggtctggctgttttccagctacagcgcgggcagcttcgacagccgctactttggccccgttgtgctggccagcgtgcgcggcattgcccgcccggtcgccgtgatcggcgacccggcggccatcactacgggagtaaccaaacaatga

SEQ ID NO: 283257 - DNA, 1959 bp, Morganella morganii
atgagcgataaaaattcgtcggcgggtaagctgcggcttatcggcggcgtttatttagtgctgtttatcatcggtttgaacagcatatgtacgcaatttattgcgtaccgggttggctaccacccggcacttgggccgtcactgttcgggcagctttatatgcccttcgactggtggcgatggctgttcaagttctacgactcagcgcccaattcctacaactatgcctttgtgattttcgcgctcggcgtgctggtcggcctgctgacctatgttctctggatcggcttcaagacgcgcagctcgcgtaagcatgaagacgttcacggaacggcacacttcgccacgctggacgaagtacgcgaaaccggcctgctaccccgtgagggcaaacaagggcagggcgtctactgcggggcctatgacgaccccgaaacaggcaccacgtactacctgcggcacgacggcccggaacatgtttgcgcccttgccccgacccgttcgggtaaaggtgtgggccttgtcattcccaccctgttgagctggccccattcggtgttcgtgctcgaccgtaagggcgaaaactacgccatgacttcgggctggcgtcagaagcacgccaacaacgtgatcttgcgctttgacccagcgaagccgggcaccggctgcgcatggaacccgttgggcgaaatccagttccgcacccgctttcaggtcagtgacgcgcaaaacatcgcgctgatggtcatcgactccgatggcaagggcatcgagtccgaccacttccgtagtgccgcgttcgagctgttggtagggctgatcctgcacgcgctctacaagggcgaacaggtaggccgcacgccctgcttgcaggacattggccacatgctgaccggcgtgggcgacttcgccgcgccggacacggccaacgaccttgtagacgacccggacggcgacccgaaagcactggccgggctgttcgatgaaatgcgcgaggtgtccatcaatgacggcgacccggcgaaccgggaagcgcagcttgtcattaccggcgtcggcacccgcatggccaacaccccggcccgcgagctgggcagcatcatttcgacggcgaacaacgcccttgcgttgtaccgcgaccctatcgttggcgagaacacttcgcgcaacgacttcaagattgccgacctgatggatcacgaccggccggtgtcgctctatctcatttcgacgccgaagacgtccaagcgccttgtgccgcttacccgtctattgttgaccatgatcgtgctcacgatggccgacgaaatggagtttgacgacggccgggccaagacggcgcacaagcaccgcttgctgctgatgctggacgagttcccgacgctcggcaaaatcgaagtgttcgaggaagccttggcctacatcgccggttacggcatgaaagcctacctcatcacgcaggacgtgcagcagctctacaaggcttattcaaactacgaaagcatcatttccaactgccacgtccgcatcgcctacgcgcccaacaaggtcgagacagccgaatggatgtcgaagatgacgggcaccaccaccgtcgtcaaagagcaggtgacgacttcgggcaagcggttcggtgccgtcctcgacaacgtgtcgcgcagctatcaggaagtgcagcgaccgctgatgacgcccgacgaaatcatgcgcctgcccggcccgaccaaggacgccagcggggagaagatcaccgcgccgggcgaaatgcttgtgttcgtcgctggccagccggtaatccgcggccgccaaatcctctacttctttgacccggttttctccaagcggtcgaaactcaagcccgtgccgactgacgttgtgcgcgtggcccagcaatccaagcccaccccggccgccgccgggccgtccaacaacagcaacgggggctttgtcgtccaatga

SEQ ID NO: 283258 - DNA, 2697 bp, Morganella morganii
atgattgcccatcgcatcgagcgcaagccgcaccagtcatcgaacccggccaagctggtcaggtacatggtggcggccaagggcggcatcgacccgacgagctggcagcgaacagccgactacattctggacaccgcgaacgacaccgcgaaaggcgagaaggtcgaaagctaccgcgttaccaactgcggcacggacgaccccgccgacgctgcaatcctgatcttggccactcaggcggccaacaccaggtcgaagggagaaaagacctatcacatggtcttttcgtttcaggcgggcgagcggcccccgctggaagtcctgcacgccattgaagacgaactttgcgaatccatcggccttggcgatcaccaacgggtgtccgccgtgcatgtcgatactgaccacctgcatgtgcatgtggccatcaacaaggttcatccgaccggcctacagaacatcgaaccttattacgacaagcgcaggctgatggaggcctgcgaacgcctcgaagtccaatacggacttcgccatgacgaccacggcttaggagatagaaaccatgaacacaccagagaacgaagcgaccgaatccagcttgatcgaggtcaacgaccagagcagcgcgatagtagatttcgacgatatttacgagagtcctacgatctctcgtttgccgatgaaccagaggccaaaaccctcaacggtctgcgaacgctgtccggctgccgtatggttcgcgcttccgaaagaacttcggtgctattgccgggtgattcacgcggtgatctacagcaacgaggaaaagaacgcgctgacggcctgcgacggccgggacatggcgatagaacagctattggccaagcaggaagcggcggacgcggccgggtaagcggcaaagccgccgacgcagaggcccacagcggcatcgagacgctgaccgggtacgcggcccgcgagctggccccggcgatgcgacaggcgacgagctggcaggagctgcacgacgcagcggccgagcacggcctagaggttcgccagcggggcgctggccttgtcataggcgagccagatttaggcatttgggcgaaggccagcaacgtcggccgcgacctttcgatgaaggccctaaccgaccgtcttggcccgttccagccttccgaacggcagtccgaggcgaaggcgaaccgcaagcggtacgaaccacgaccccggcggccggacaacccgaccacggcgggcctgttcaatcagtaccagcgcgagcgacaggcggccattctggcccgccgtcagggcctcgaccagatcaagcgcgagagtgcggctttcaatgcgcaggtgaggcagtggagccagacagagcgaatgcttttgaaggtcgcgggcaaggggccgaccaaacgcctgatgtacggcactatcaaacagcaggccgacgcctcgcgccagaagaaccggcagagcgcagacgctcgccgtcaggcgctgttcaaacagacgacgatgcccacttgggccgactggctgacgcaacaggccgagcgcggcaacgccgaggcactggccgtcctgcgcgaccgcgaggaacggacacgccgctggaacggggaactactgaccgccgaccgggccgacaaggccaaggctgtcgttctcgacaagctcaagcccaaggcccggaaagacgggacgatggcgtacagcaccatcgacggcggcatggtgatcgaccggaagacccacgttcaggcgcagaaagccacgaccggcgctgcactggttgcgctcgaactggcatccaagcggttcgagggccaagccctcatcgtggaaggtacagacgagttccggcttgaagtcgcccagctcgccggtatgcacggcctcaaggtcacgttcaccgatccggcgatggagcagatgcgccgcgagacggccgagcacaaggaaatggagaaggcctttcaggccgaaatcaaggcatcgagccgcgacgacttcgccgaactggtggacttcggcaaagcgccgttcgagcacgtcaagggcaaccgcaagagctacttcgtcacgctgcgcgacgggaacggcgaagaccgaaccctatggggcgtcgatcttgaaagagcggtggcaaatagcggtgcggccgtgggcgaccgcgtgcgtgtcaatcacatgggcagcgagagcgtgacgctaccggacggcaggacggtggagcgtaacgaatggcgcatggagatagcaccaaaaggaagccagacggccaagccaaaaccgaaccggccgacgcctgcaccgaacgacatggatgcggcgtttctggccgaaactggcctgtccggcaagcagacgggaagccggacaagcggcaagcccgcgcagcccgtggagtctggcccggcggtgcaaaaatggattgaagaacgcaacaaaaatagagacaaaatatcgtctatagactatcatcggctttggcaatccaccgacgcaggcagggccacatatcaaggtcgcaggcgcatggaagacggtagcgaagtgctgttgttgaagcgcggcgatgaaatgttggtcaagccatccaccccccgcgtagtcgccaaggcggcgacatggaaactaggtcgcgtcgtccaattggacggacgtggacgattcactgacaggagtaacgaggtcgaactatga

SEQ ID NO: 283259 - DNA, 300 bp, Morganella morganii
gtgaacaacgacgaaaaggccgagctggccgaccgggctgctcagtccggtttgtcgttgtccgcctacatgaaagcggccggactgaacgcgcctattcgggcaagggctgacctgtcagccgtggccgatcttgtgcgcgtgaacggcgaccttggccgggtggccgggttgctgaaattgtggctcgcggagaagcgcgggcagggtgcccggccggtggacgtggaagccatgatgaaggactttcgcgccctacaggatgaagtccgctcaatcatgatccgggtggccagatga

SEQ ID NO: 283260 - DNA, 384 bp, Morganella morganii
atggcagacacgccaagcaaaaagccccgccggggcgcaggacgtgtcgcgtttctggcccgcttagagcagttccgagaactgctcgcagcgggtaacgaacagcgcacgatctacgacgactttggcggcgaggcggaattgggcatcagctactcccaattcaatcgctacgtcgtccggtacataacaggagcaaaagacgatgggcaccaaagaaaaggcatcgggcaaatcgccccgccaagcccctccccggcccctacaggagccgcaggaggccaaccaaggggtagcagcaccccggccgaaaaacccggccaaaagcgccccggattccagcacaacccaaacagcggcaacgaccgcgacgacctcatctga

SEQ ID NO: 283261 - DNA, 756 bp, Morganella morganii
atgaacgacgtaaccactccggccctgaacaccctcgcccgtcaggttcatttcacgctgcaaggcaagggcggcgtcggcaagtcctttatctcgtccctgctcgtccagtacatcgacggcaagggcctgccggtcacagcagtggacaccgatccggtcaatgccaccctcgccggttacaaggcgtttaacacccagcgccttgagctgatggaaaacggctcgctgatcgaacgtaatttcgaccgcctcattgagcaggtagtcgaggaagacaccaatttcgtgatcgacaacggcgcggcgtcgttcatcccgctgtcctactacatcgccgaaaacgacgccatcaacctgattggcgagaacggcaagcaggtcatcattcacacggtcatcaccggcggccaagccctgcgcgacaccctcggcggcttcgcctctctggccgagcagatgccgggcaatgccgagctggtcgtctggctcaatgagttcttcggcgacattgaggccgaaggcaaaaccttcgaggaaatgaaggtctaccagaacaacaaggatcgcgtgcgcggcatcgtgcgtatcgctcgccagaccggcagcacgttcggcgaggacgtgaaactgatgctcgatagcaagctgaccttcgatgaaatcaagcagtcgccagacttcggcctcatgtccaagtcgcgtctctcgaaggtcaaaacggcgatcttcgagcagttggccaccatcatctga

SEQ ID NO: 283262 - DNA, 456 bp, Morganella morganii
atgatcgactttgacgagatacggaaacaggtggcgatcaagcacaacgtgctgatcggcaaggacgatccgatactggtcacggtcacggtcagcgatatggtcttgggccgctacctcgaactggtttccgaccagtacgacgaagccaacagggccttgaccgtgagcctgcaacagcaggtcgaacagtccaaggaaacggccgggaaggtaatcaccgacgcggccaactacgtcagcgaacaagtgcggcaggccgtgactgccgccctcgccgatgctggcaacgacgtgcggcggcagatagccaacgcgcaggccgcaagccgcgatgcggtggccagtggccgggatgcgcaggcggcgaagaccggcgcatacctggctgcggccttggccggggtcgccgctctggtggccgtggcggccttggtggtcgttcttctgaaatga

SEQ ID NO: 283263 - DNA, 360 bp, Morganella morganii
atgaaaatgatggtgtttcttctggtcgttatggttgcgtacatggcgttcttccgtgatgacggccgggacgcggcggcagcgacctatgccgcgcagcggatcaacgagcaggacaaaattctggttgagcttcaatcgctcaacgatccccacgtatcggatttcgtccgcgattggcgctactacgcgccaacgccttcgcctgagcagctttctgagcttcggataattcagcagaacatcaggaacgataaaagcgttgctgaaaagtacacgctggaatggcaaaacaagaatggcttctgctcaaaggttgaaggcatgtttggcaagatcgaatgcacgcccggcctctga

SEQ ID NO: 283264 - DNA, 369 bp, Morganella morganii
atgggattagacattggacaattaagcccgtgggtggtcggtgcttacttagtagccctattggcggttctggcgtggatcgcggtcggtgcattcaaggacgacgaactgccgatgatgccgggggttttggccatcatgctgatgggattcggcatgttcgccgtctacgaacccaagcccgacgagtgggaaacgttcaaggccgcgcataactgcaaggtcgtggcaaaacgtgacggccatagcaacaacgggataggcgtcaccactcgcggcagcgtgggctacatcatcggcgacgatacgcccgatcaggtcgcctaccagtgcgacgacggcgtgacctactggaaaaatgcgaggtag

SEQ ID NO: 283265 - DNA, 291 bp, Morganella morganii
atgaacgaacaaagagccatcgagctgctgcaagcgcaaatcagggactacgccagacaacgggccaaagacgtggcacgaggcgcagaaacgccacgtttggcggccttgcttgtgcagaagtacggcaagggcgtggtggatgctctggccgtggtctttgatagtgcccggtcggccgatccaatcatggccgtggtagacgaggaagtaagccggattgatccgctctggcaggaacacaaccgggagcgctgggccggtcgcccggctgatgtggttgccaactaa

SEQ ID NO: 283266 - DNA, 312 bp, Morganella morganii
atgaaagatcgagcacacgacacggctatggccgaagtgttccgcaacgaccccgcctacgcggtcgagctgctgaacagcattcttgaggatggcgaacagggcgaactcttgattgccctgcgccaaatggccgaggccttcggaggcgtgcgacaggtggccaagtcggccgagctgaaccctaaccagctttaccgcacgctgtcacagacaggcaacccggaggtgcgtagtctgaccgcgatccttcgcgctatgggcctgcgactggccatccagccgctgcaccctaccccggccgcccactga

SEQ ID NO: 283267 - DNA, 327 bp, Morganella morganii
atgcagcagatacggcactacctcgaccccaacggacgcgaccacttcgccgagtggcgcgatcaggtgcgcgataccaaagcgcgaatcgccatcgaccggcgcatcatgcgcttggagcttggcaacttcggcgatcacaagcccctgcgtgaaggcgtgtgggagctgcgcatcgacgtagggccgggctaccgcgtttattacgccaaggctggcttgaccgtcgtgctgctgctctgcggcggcgacaagcgcaagcagaacgccgacattgaccgggcctgcgcctattggcgtgattggcagcaacggacaggagattga

SEQ ID NO: 283268 - DNA, 444 bp, Morganella morganii
atgcagatacgtgaacagggccgcaaaattcagtgcatccgcaccgtgtacgacaaggccattggccggggtaggcagacggtcattgccacactggcccgctatacgaccgaaatgcccacgaccgggctggatgagctgacagaggccgaacgggagacgctggccgaatggctggccaagcgccgggaagcctcgcagaagtcgcaggaggcctacacggccatgtctgcggatcggtggctggtcacgctggccaaggccatcagggaagggcaggagctgcgccccgaacaggcggccgcgatctggcacggcatgggggaggtcggcaaggccttgcgcaaggctggccacgcgaagcccaaagcggtcagaaagggcaggccagtcgatccggctgatcccaaggatcaagggaagggggcaccaaaggggaaatga

SEQ ID NO: 283269 - DNA, 1242 bp, Morganella morganii
atgaacgggcctaaaccaattagtgacattgtagggggcaatctgctggccagactggagcagacgcaccagaggtatcgtgaaaaagtggaggccgcagccctgcccggcgagacgttcgagcaagccgagaagcgcctacgtgaagaaggcgagcgcgaacagaggcggaaaagcaacgaggttgcccagctacaagccgaggcaactatggccgcacagttgcgcgatagaagccctatcccgcgaagcccaatccctaacacatcgtcccccagtggacagagcaaacggagcaatcaagcctcaatgcgtcgccctcccgagagcgaccgacagcccgactttttcgtgccgggtctgtacgacgtagccaccaaggacaaccgtagcctgatggacgttgcgctgttccgcctgtcaaagcgcgacaagcgagcaggcgaagtgatccgctacgacctgccggacggcttcgttgaagtgaaggccgggccggatggcatggcgtcgatatgggactacgacattgtgctgatgctcatctcacacctaaccgagtcgatgaatcttttcaatgccgggcgtggtgccatgccgggcaagaaattcgtcccgcacgcctcagatattgccaagttctgccgtcgtggcgacggcggccgtcaggccgacgagctggaagccgcgcttgaccgcctgctaggaacgaccatcaagagtgtgcgcgagacaccatcacgcaacggcaagcgcgttgtgcgtgagacggaagcggaaagcctcattggcccctaccgcgtcgtgtcccgcaccgataccggcaaggtggccagcattgagattgaggcaccaaactggatttaccgggaagtgactggcggcagacagccggacgtgctgacagttcacccggactacttcctgatcgaaccgggccttggccgtttcgtgtaccgcctcgctcgccgggccgctggaaagagcacggccaagtgggcattcaagaccatctacgagcgcagcggtagcaccggcacattcaaagagttctgccgcatgatgcgccgcatgatcgacgccaacgacctgcccgagtacgacttgcgcgaggaagacggtcagagcggcccgctgctacttatcacgcgccgcaccgacgcgatggagctggccgccaaggacgaacccgaggcagacggcgacgagcaggagaacggcgagaatgcggccggtgtgtaa

SEQ ID NO: 283270 - DNA, 261 bp, Morganella morganii
atgcctagccgacgcgacaccgatagcaacgaaaacgaaaagccggtgccagcggagcggctgatctttgcccgcaatttccgtaaggcacgcaaggccgcaaaactaagccagcgcgcagtcaaggataagacggggttcgcacagtcatggatcagcgaggtagaaacaggaaagtcaccgctcaacatcgacaacatggccgaactggccaagtgtgtcggtgtgccgctgtggcagcttctcgttcctccgtcgtaa

SEQ ID NO: 283271 - DNA, 984 bp, Morganella morganii; identical to SEQ ID NO: 18052

SEQ ID NO: 283272 - DNA, 492 bp, Morganella morganii
atgatcgcaaatgctctgtctgcttcgccaatggcgtcgaaggcttctcccttcatgtccaaagcgcgtgcggtgctgaccaatccctacttctggctgatggccgctctgttcttggtgcttctctttggtgccatcgaaccggcgcacgcggctgacgcaaccgaaggcggcggcgcaggcctgccgtgggaaggcccgctgaccaagctcaagcagtcaatcagcgggccggtggccttcgtgatcgcgctgctcggcatcatcgcgtgcggcgctacgctgatctggggcggtgaagtctccgagttcacccgccgcatcatctacgtcgttctggtggtctgcatcatcgtcttcgctaacacgctgctgactggtgcgctgttctctggcgctgtggtgccgcacgacgctgcaatttctgccgctgatgtggccgcctacgcgaaggctcacgccgcagccctgaccggggtagggggtcgctga

SEQ ID NO: 283273 - DNA, 315 bp, Morganella morganii; identical to SEQ ID NO: 18025

SEQ ID NO: 283274 - DNA, 2508 bp, Morganella morganii
atgcttgcgttagcacccttccgtagcaaggccgctggcttgcccgatctgctcaactatgccgccctcgttgatgagggcgttgtattgggcaaagacggctcgctgatggctggtttcttcttccgtggtgacgacgcagcatccgccactacgtcagaacgcaactacctgaccgcgttggtcaaccaatacctggcccggttcggttcgggctgggctgtatggactgacgcctcgcgcttggcctcgccgggctatccagcccctgagcagtcgcactttcctgaaccgattaccgccttgattgacgcagagcgtcgggcggccttcgtcaaggaaaatacgctgtttgaaagcgagtacgcgctagtcctgcaatacctgccgccgacgcggcgggattccaagctgggcgaactggtctacgacgatgacggcgtagacgacagcaacccggccgaccggttgttgctggacttcaagaaaaagctcgatgacctgcaagacggcctcggcgatctgatgcacatgcgccgcatgggcaccatcacggtcggcgagggcgacgatgcctatcagagcgatgagctgtgcaattacctgcactacgtgctgaccaatgagcctatcgcgctgcgcatccctgattgcccgatgtatctggatgcgtggctgggctatcccgagctgtggccgggcgacacgccgaagctgggcaacaagttcatttcgtgcgtggctatcgaaggcttccccggcaactccttccccggcatcctcgacatgctcgacggcctgccaatgtcctatcggtggtcgtcgcggtttatcttccttgaacagcacgaagccgtcgccgcgctcaaccgctaccgcttgaagtggcaacagaagattcgcggattctggtcgcaagtcttcaagtcgcagaagggcatgattaacaccgacgccctgaaaatggcgcaggaaacggaggtggccatcaacgacgccaagtcgggattggtcgcttacggctactacacgccggtcgtggtgctgatgcacgaagaccgcaatttcctgtccgaacaggcccgctacgtcaagcgcgagcttgaacgcaagggcttcgcggcccgtatcgagacggtcaacgcgctggaagcgtggcttggctcgctgcccggccagacctacccgaacgtgcgtcgtcctttggtgcataccctcaacctcgccgatctgctgccgctggccagcgtctggcccggcctgcgcgaaaacccgtgcgatctgtacccggccgggtcgccgccgctcatgcacacggtaacgaccggcgcaacgccgtttcgtctcaacctgcacgtcggcgacgttggccataccctgattttcggcccgaccggggccggtaaatcgaccttgctggccaccctgcaagcgcagttccggcgctatcgcagccgtcgccgccgcgatggcagcacggcaccggcaaccgtgacggcgttcgacaaggggcgttcgctgtatgcgctgtgcaaggcgactggcggcgttcactacgacattggcaacgatgaggccgacaccccggcgctgacgccgttggtggacattgatagcgagtcagaagccctgtgggccgaagaatggattgcgacttgctacgagttgcaggccaaaaagccgcctacgccgcagcaaaaggccgagattcaccgggccatgaacctgctgcgcgaggcaccccgcgagttccgttcgctcaccgattacgtcacgacggtacaggatgccgaagtgcgggacgcgctgacgcactacaccatttccgggtcgatgggccacctgctcgacggcaaggaagacggtctgaaattcagcaattacacggtgttcgagattgacgacctcatgaaaatgggcgacgcgaacgccattccggtgctgctctacctgttccgccggttcgagcgttccctgaatggccagcccgccatgctgtcgcttgatgaggcgtgggtgatgctgggccatccggtgttccgcgagaagctgcgcgaatggctcaaagagctgcgtaagaaaaactgcctcgtcatcatggctacgcaaagcctctcggatgcggtcaagtccgggctgctcgatgtactgctggaacagtgcccgacgaagatccttttgccgaacaaggaagccgaccttcatggcaccaaagagacacccggcccggccgacctctacgccatgttcggcctgaacagcaaggaaatcggcatcctgaaaaacgggcagtacaagcggcagtattactacaagtcgccgctcggccgtcgcgtgttcgagctgggcttggggcctcttaccaaggcctttgtagcggtatccgacaaggaagacttggcggaggtgcggaacctgatcgccgatcatggcgatgactggccgcttttttggttgcaacacaaaggagttgattatgaacagtatctttcgcgcaaagctgcgtaa

SEQ ID NO: 283275 - DNA, 789 bp, Morganella morganii
atgaacagtatctttcgcgcaaagctgcgtaatggcgttctttcggcggccgtgacggccagcgttgcccttggtgccgggttctttgcagctccgacaccggcttacgctatctactgctccaactgctcgacgttctatcagcagatgttcgagtacgcagaagcggtgaataccaccctgaacactgcgcaacagctacagacgcagattcagcagtatcaaaacatggttacgcagggcctgagcctgcccaattccatgttcggcagcatcgcggccgacctgcaaagcgttgccagcatctacacgaagtcgcaggccttgggccgccaaatccagaacatggattcgcagttcaacatgcagtttcccggctttcagtcgtatctgaattcggccgcggcctcggccaaggctccggcatcgagcacgatgccagaccgttacgaaaagtggtcggaacagggccgcgacaacgtgaaagcggcgatggaggcggcgaacctcaataccagcactttcgagtctgaggacgcccagctttcccggatggtggcacgctcgcagtcggccgctggccggatgcaggcgattcaggcgggcaatgaaattgcctcgcagaacgtgcagcaactgcaaaagctgcgcgacctgatcgccacgcaaatcaacatgcagggcaactacatggcgcaagaacaggatcgcatccagctcgatgacgctctgcgtcagcagcgccgtagcggcaccatcacacaaaccggcagcaacaaggggtattaa

SEQ ID NO: 283276 - DNA, 204 bp, Morganella morganii; identical to SEQ ID NO: 18022

SEQ ID NO: 283277 - DNA, 1719 bp, Morganella morganii
atggcacggcgcgagcaacatcagttcttgttgtgggtcgtgctgctgctgctcgcgtcgttcgcctttgcgagtaatgcgtcagcggcagacctgcacgaccccagcggctcatttaccggccttctcgatctggtgaaaaacagtgcggcgcagtgggatggcaagctgcgaggctatgccaaaacgctgttctggctgctggcatccatccagttcgtatggacgttcatgcctttggtgttccgacaggccgatttcggcgagattgtcggcgagctgatccgtttcattttggtgattggcttcttctacgcgctgctgctgttctcggcagattgggccgacaaggtggtggacagcttccgaacggcgggcgcgtcggcggccgggctgggtacgtcccaaatccggccgggcgacattttcggtacgtctatcgagctggccaacactatcggcgacgtggaaacgtggaacccgctaacggccactatggtcgcgctggccgggcttctggtgctgctgtgcttcgccttcattgcggcgttcatgggcctgaccatcatcgaatcctatgtggtcatcaatgcgtcggtgctgtttatgggcttcggtgcctcgcagtggacacgcgaatatgcgttggccatcgtgcgttacgccgtttccgttggtgccaagttgttcgtcctgaccttgatcgtcggcttgattgtggactcggcaaagacgtggcaggcggcctacaaccacgacgacgcgagcatgtggacgatggtggggctggctctggtctgcgcctatctggccaagactatccccgagctggtcgcgggcatgattagtggcacctcgatgggcggcggttcggccatcggtggcatggcagcggccggtgcagccggtgcagcggctgctattgcaaccatcgccacggccggggcggccgctccggcggcggccggtgctcttggcgcggccggtagtggtggtgcagccggtgccggtgcagcgggtgccggtggcattggtggcggcggtctggctgctgcgatcaattccagctttgccggtggcagtgcgcccgcagcggccgcaactggcggcaccggggcagcttccggcctcggtgcaagcactggcggccaagcggcggccaagggcgcgtcatcggcaggtgcccgagtgggcggcagcgccgcgccacaatcgccggggccagcgccgcagcagccgagcagcggtgtgcagcaggccgccaagcaggccgggaaggccgcgcagggtggtgacgacgacaagggccagcaaacggcggcaggggcgcaaacgcctccggccggtaatgcggacgcctcggcgtccagctcggcccctagcgcctctgcgcagtcgccagcggcccaagctggcgaagggcagggcgaagccaagagcggcgtttctggccatcaaatcgcgtcgggcattacccgtggtgcgggcatcctctccgcgattgccgttcccggcatggaaggcgcggcaggcctgtcgctgggtgccggtgcgccgcagccggtgcccggctccggtgctgacgctgatggctcgatggctcccagctcggccccgtccagtgcagaaccgcagaacgtcattcgcccggcagaaccgtcgccagcatcgccaagcgatgcaggcccggccaagccagacaccaaagggggggagtaa

SEQ ID NO: 283278 - DNA, 306 bp, Morganella morganii; identical to SEQ ID NO: 18020

SEQ ID NO: 283279 - DNA, 699 bp, Morganella morganii
atgcaacccaatagcaagaaaaagggtcagcgggcaccgaaagccccgcccggcacgccttacctcgcagcccgccgcgagtggaacgagcgttatggcagtcatatcatcgacgcccgcaactggcggacggccgcgtttgtcgttggtgtcgcgctgattctctcggcggccgggaacgtcattcaggcctccaaagagaaaatcgcggtctactacgtcaacaccgacgccaacggcaaaagccgcgaaatctggcgggccgatcaggccacgccggggccgaagaccgaacaaatccgcgctgcgctgcaagattgggttcttggtgctcgcacggtgtacgcggacaaccgggctaccaagcgcgtcgtcgatgcgacctatgcgatgacgctgcccgacagcgccgcttatcagacgctggccacgtatcaccgggaacacaacccgtatcagcgggccgccaatgaaaccgtcgaggtggccatgcaaacgcctgttcagctctcgaaagacacttggcaagtcgagtggacggaaacggtgaaaaaccgcacttccggcaagctgatcggcacccaaagctatcagctcacggccaacgtcctgatcgctgcgccgaaggatgaagcccagcttatggccaacccggttggcctctacgtccgccaattctcttggcccgttcgcaactaa

SEQ ID NO: 283280 - DNA, 939 bp, Morganella morganii
atgatgactggtgaatatatgaaaaagactcaatggatggcgggccttttcgttgccgcaattgctgcccccacgttcgcgcaagacgttccggcgctcgctgctggccaaggtgaagttctgccgccggtcaatctggtgtcgcccgatcaggtgcggctcgatggtaaggaggcctacggcatccgcttggccaatcagtggaaatcacaccctgaccgcccgcgtcgtggcgcagacggtagcgtgaaatacctttttggtgccactctgccgacgttggtttgcacccccttgcaggtctgcaatatcgaactgcaaccgggcgaaatcgtgaatgacgttcacgcgggcgacaacgcacgttggaaaatcaccccggccacgatgggcagcggggcgaacgctacgacggtgattgtggtcaagcctaccgacgccggactggtcactaacctgagcgtggccaccgaccgccgcctgtactcgatcaagctggccagcacgcaacgcgagtggattccggtgctgtcgttcgactaccccgacgacgtagaacgccagtgggccgcgtaccgcgagcagcacgccaaacaggtctacaacaacaccatgccgaccgggcagaatctggccaacctcgatttcggtttccgcattggcggtgatagcccgagctggaagccggtgcgcgtctacacggatggcaccaagacctacattcagttcccgtcggccagcttcggcggcgaggccccggcactggtggccaagggcaacgacggcggcctgttctcgaaggctaccgagaagctcgtcaattaccgcccgatcggcgatcgctacgtggtcgataaggtgctggatcgggcgtctctgattgtcggcgtcggccgcaaccaaaccgaagtcaccattacgcgcacggggggcaaataa

SEQ ID NO: 283281 - DNA, 459 bp, Morganella morganii; identical to SEQ ID NO: 18017

SEQ ID NO: 283282 - DNA, 1461 bp, Morganella morganii
atgagcacaaacgataaagacaacgaccagaacaccgacctgccgcttgaggatgcggaagtgcataacgaccgcgaacacgacgacgatgccgacatgcacgacgatcctgatatgcgtgcggacggcaacggctcgcccgactatctggcgacaccaaaaagagggaagggggttcgccgcctgaacaacaaaccgttgttcgtggtcggtggcgtgatcctgctcgctgtggctggcgttagctacacgtttttccagcggcaggcggcgcaggttgcccccaaggccgaaggcgacgggccaccagtggcgacggtagcggccccccctgttcggccggacggcaacgactacgtgcccccggcaggtcagccgcagatgcccacggacacggcgcagccggtcgaaaccggcggccagccgaccgaagcccagcagaaggcggccccggccgcgccctctgaggccatgcaacgccggttgcggcagattcagcaggccgaagacaagcgactggccaagtgggacgaagccctgaacggtgacgcttcggtgcagggcttcacgaccaagggcggccagaacggcggcacccagcaggtggccatgcagcaggcgggcgcgaaccgcgtcaatgcggacgagctgatgaaccgctacttggccgcgaacggtcaggccgcaggtatgggcggcatgggcggcggtatgccgggcatgggcggtggcggtatgggtggtaacagcatggcggccgagaaccagcaggatcgcaagcaagcgttcctcgcaggcacgccagaagctgaggtctatttggctcgccagcgcaagggggccgtcgctccgtcgcaggaaatcaaagccggttgggttattcccggcgtgatgatttccggcatcaactccgatctgccgggccaaatcatcgggcaggtgcgcgaagcggtgtacgacagcgcgaccagcacgcaatgcctgatcccgccgggttctcgtttggttggcacctacgacagcggcgtaacgctcggtcagcagcgggcgctcgcggtctggcggcgcatcatctacccggatggttcctcaatctcgattgataacatgccgggcgctgatgtgggcggctatgctgggttcaatgacaaggtgaacaaccactatgctcgaatcttcggcagtggcttgctgctttcggtcttctccgcaggcatccagctttcgcagccgcaggccagcaacggcgagaactacagcagctcgcaaatcatcgccgggtcgctgggtcagcagatggggcagattggtatgcagatggcccaacgcaacatgaacattcagccgacgctcgaaattcgtccgggctacgagttcaacatcatggtgacgaaggacattatcctgccgacgtgggaaggccacccgatggccggaagcaccggcaagggctgcaattga

SEQ ID NO: 283283 - DNA, 471 bp, Morganella morganii; identical to SEQ ID NO: 18015

SEQ ID NO: 283284 - DNA, 249 bp, Morganella morganii
atgaactacaccgccctttactcgaccatctaccgcgtgcggaaccttacccgcaccgtcgccaaaatcctcgcttgggcgctcggtctacagctcgccatcctctacggactggccaccgtcgccgacgcgccgctgatgcagcttgcaggccccggccttcgcttcgcggtcgtgctggccgtggtgatcttcgccccgcgagtcttcgacgccgcgctacgccgcatcgccacccgccgggcctga

SEQ ID NO: 283285 - DNA, 630 bp, Morganella morganii
atgcgtgatcctaacgaccccggcacgatggatatagggataaccaccctaatcggttatgcccgtgtctcgaccgctgaccagtcgcttgatatgcagattgaggccttgaaaaaggccggttgccatcaggtattcaccgacgtggccagcggggccaaggcggcccgaccgggcctagaaaaagccctcgcatacctgcgcgaaggcgatacgcttgtagtgtggaagatcgaccggcttggccgttcgcttccccatttggtgcaaaccgtggacgagctgcgcgagcgcggcgtagcgttccgctcgctgactgacgcgggaattgacaccgcgacccgaaacggcaaactgctgtttaacctgttcgccacgcttgccgagttcgagcgtgacctgatacgggaacgaaccaaggccgggttggccaccgcagcggcccgaggccgccacggcgggcgcaggccggtagtaacaccggccaagctggaaagagcgcgtaagctgatggccgacaaggggctgaccgtccgcgaggcggccgccgctgtcaaagtcggcaagactgccttgtatgaggctttgaaggacgccggcgacggcgaccgcacggagggcgacgaatag

SEQ ID NO: 283286 - DNA, 615 bp, Morganella morganii
atgttgttacaccttgtaccccgcctgttcgcgtgccgtgtcaacgagccggaatgcgccctgatcgactttcattgtcccgcgctcgggctgaagctgcgcaacggtatcgagctggtcgcccggcgaccgtacccgaacaagcactatctggtggcttgccgcaaagttgggcaaaaggccatgaacggctttctggtcgagacgaccgagcgcgtgcgcgagttcacgacgctgacccgctgggctgtcggagctgatcgcatcgtcaaccatcaagtgcagtatttcgtgctcgatgacgagctggacgctatcaccgactgcatggtgctctggtctgcaatgtcgccgagtctcggcggtttttcccggcgctggcccaccgtggccaacgactggacaccggccgccgcacagccgcgcatggaactggtcagccgcgaccgcgctggccattacgccgaccgcctcgatgacgcaggccgcgtgatcgagcgggccgaagtgtttcagttgcataccgtcgagcgtgagcgcgttctgtatcgcagcaattcatccatttatgaccgcatcccgaccgccgatatggcgttccgggccaccatctaa

SEQ ID NO: 283287 - DNA, 624 bp, Morganella morganii; identical to SEQ ID NO: 18011

SEQ ID NO: 283288 - DNA, 408 bp, Morganella morganii; identical to SEQ ID NO: 18010

SEQ ID NO: 283289 - DNA, 339 bp, Morganella morganii; identical to SEQ ID NO: 18009

SEQ ID NO: 283290 - DNA, 675 bp, Morganella morganii
atgagtgactggctgataccggcgctttgcctgatgggcagcgtggtcgggtttgttttcttggtgtcaatgattaggcgggatggcacggcggggcgcggcttatatatcttcatgggcgtggcgctaggcctcgtcgcccttgtgtatttcgttgcggactctcggcaaaaggacgctcctgcggccgaagggcagcaagtcgcgcccggcacgcagtcgccagaactgataggcaaggtcgtccgcgttctcgatggcgacacgttcgatctgctagtagatcaacggccagtccgcatccgcgtgaccggcattgatgccccggaaaaagatcaaccatttggccagcggtcgcggcagtcgttggcgggcatggttgatggcaaccctgtcgcggtgctcgtaaaaggcaaagaccgctacggccgcacactcggcatggtctacgccaagatatgcgccccttctgtcccgtgccacaccgttcatgtcaacgccgaacaggtaaaggcgggcatggcatgggcttaccgtttccacggtcaagccgtcgatccggcaatgctgaaactcgaaacgcaggcccgtagcgagcgcgtcggcctgtggtcagcaccgaacgcagtggagccgtggaagtggcggcaccaaatggagagcgcggccaaatga

SEQ ID NO: 283291 - DNA, 231 bp, Morganella morganii
atgagcggtatttcaatcaacacccggcagctcgccgacctgctgaacatcagcgaaggcgagttagtccatgcgatgcggtcaagcgggaagctgcacggcgtgccgttccccgacctgctcggcaaccataaggccaaggtgcgcaagttcaatctcacggccgctttgcggttcgtggatcaggtcaacaaagcccgctcggaagggggaaatagtgaaagctcttaa

SEQ ID NO: 283292 - DNA, 174 bp, Morganella morganii
atgataatcaaagatctgttacgtgcgtctctcgtgcgtgataactatccccgcatgccggatgatggctgtgaccataccaatagtcacttagaccggctgcatgcagcgcgccgggcccggaaaaaaatcccgtatcagtctgcccctgaaccaaagaaacagggggagtga

SEQ ID NO: 283293 - DNA, 846 bp, Morganella morganii
atgtattatactccgttgcgttaccctggtgggaagggtaagttatcatattatataaagtcattaattactgaaaactcacttaatgacggagtgtatatagaaccatacgctggtggtgctggcgttgcattagaattgctaatgcaagaatatgtccgttatattcatattaatgatatcgactttgccatctacagcttctggaattctataatcaatgacactgataatttttgtaaactagtaaacgacactcccgtaaatattgaaatctgggaaaagcaaagaaacatactgctgaataccgatgagcactcaatgttatctgttggttttgctgcgttttttttaaatagaactaatcgttctggtattttaaaagctggtgtgataggtggaaaaaaacaatcgggagactggaaacttgatgttaggttcaataaacctgacttattgaaaagaatagaaaaaatatcaaactattcatccagaatccatctccataatttagatacgctggatttactagattcacttacaaatataaaacctgataaagcattattatacttagacccaccttattacataaagggtcaaggtttatatagaaacttctataatcatgatgaccatatctctgttatgtctgcactgaagaataccaattttaaattttgggttgtttcttatgacaacacccatgaaataaaaaaaatttataatgattttagaataaaagaatatagcctccaatacactgcaaatgaaaaaaaaactggtggtgaagttatgatttactcagaaaacataaaaatccctaaaataaaactgggaaaataa

SEQ ID NO: 283294 - DNA, 1500 bp, Morganella morganii
atgactatccgtaagaatataaaaattaacaagttattacttgatgtaaataaccctagatttcctgattcggcagacaaccagagagatgccatatcaaaaatgctagatattcaatctgataaaatcataaaccttgctgaagatatagtaaataacggtttagacccatcagagaacattcttgtttatgaaagcgaagatgaacaagggttttatattgtagcagaggggaatcgcaggataactgcattgaagctactatcttctcctgagttggctccaaatgaaaaattaagaaaaatttttgacaaaatgcaacatactttgaaatcagaaataaacagcgtagataattgcgttatatttgatgatgattcttatgagcattgggtcaatatgaaacacactggacaaaatgcaggtattggtcgtgttgactggaccgccccagaaaaagcaaggcacatggctagatctggtaagttatcatttggacatcaattattcgaaagtgtacaaataaattttaatcgtgatgataatatcaaatttagaaaacatctaaagatatccaatatgaatcgtttgcttgatgacccagatgttcgtaaaaaaatgaacattgatgtaaataaaggttatttatattgttatcagcctcacagccggttcttggagcaaataaataaaatattaacagcaatgattgaaattgatgatactggaaaaagaatattcacagttaaccgtatccggagcaaagcagatagagctaattttattgctgaacttgatatagagcctagtattaaaacactattaaagccatggcgaataattgacaactataataaagatgagaatgacattactactagtcacgctaacactaacattaacactcaggaaaaatacaataattctgaaacaatatactcaccagctaaacctacaaaagacacttcgacaataaatcataaattagatgataataatcatcaaaccatcagcactcctaaatcaaaaaacaaaaactcacaccctccaaaatctaatagaaataaccttataccatcgaatataaagttaaattttggttcacaacggaaatgctctcgtatttttactgaattaaaaggtcatctcacatttgatagcagtcctgtatctatctctataatgctaagaatttttgttgatttatcagttacaattttctcggaagagaacaaattaatacacaaatataaacagaaccacaatggccgagagcctggtctgcatgataaaattgttctctgtgctgattttttacaccaaaataacaaattaacaggctatgagtccaaagcagtaatggccgcatcaagccaaataaccaaatctaatggttcattacagcaatatgtccacaaccccagttttttacccaccaaagaagcagtcaatactgaatgggataattttgagcgtttacttcaagaaatctggaaataa

SEQ ID NO: 283295 - DNA, 4578 bp, Morganella morganii
atgcctcgtaatgtaaaacagattttgaatcatctcgcagagaagaaacgggatgcatatgttgattactttactaattatgtagtgggtaaagatgaaaatacagcaatgctgggaattaccgatgcggatgatctgtatgattactttttaacggatgtaaaaacaagtgctgattttgaaaccagctatgtttcggatgcactggccagtattcagcaatatattagtaacattcttaatcaaaaagaaccgggttactcaggtgagtttagtgaggaacttcagcagtggtggtcaggttatctcgggcatatttcactgtggaaagcgtatcagaaaatggaggattatccggaagattataacttaccggatcatgttactgaaaaaacaaatctgtacactgactttgcatcagaccttggcagtgacagtcttaatgatgccgctatacaaacggctttccttaaatatctgcggggttatgaagcagttaatgcgatcagtgtcatttccggatatgttgattatccgggagagcgaaatgatcaggatacattcaaagggcatggttttctgaattctgactattttttcatcggtaaaaataattcatcaccagccggattttactggcgtgaagcaaatataagagcagataaatccaccgaatatatttctccccgggcgtggcaggagtggcaacctctggtcatcactgaagatgcaaaagatattttacaaatgcggattgtcaaagtgagtggttgccttttcattgtgtatctggcctgtaaggaagaaataattgcggatgaagcaaaaccagagaaaggaagcagggttaaaaataagaaacaatataaggtcacacttaagttaagccgtatggggctggacgggaagtgggatattcctgagcagttatatgaaaaaatctatgatagtaagcctgtgaaaaaaccggaagataatgcggatccgttccggttaatatccgttgtattcactcaggatgaacagcgggatgattatctggttattgcatggctggataatcagaaaaatattattttttccaatgttttaaatgtactgagacaacagttagctatcgacagcaagggtattctcggcaatggatggcaggcgaaattagcatcacgattttttaccggaaaaaatatctgtcagcaccgtatctttggtattgaaaaggatataagcagtatccggagaatagacagtgatccgaatttatcgctggaggcattctatagtctcaaaggtaactatcatcagttacgggtcagggggacttgccatcgttcagctaaaatacctgatcttatttcacttaactttcaggcaacggtcagtcagtggagtaatggccgcattattgtcagcggaaatcgggacaatattactgtcagagcagaggcaactaaaggagcagaatatttagcattattactgtccggtgaaaaattgattgagttcaataagggagactttaaggaacacaatggctggttttcagcagaaaaaatattctcactttctcaggaacaatgtgacctgatagccgtaaaagattataaaaaaatacgcagtggtgccggtttttcctatcagatagcatccgggggggcggaaagttcactggcgcatgttaaaaaccgcatcagtacggtgatgcaaccggttgttgttcctgctgagttatctatttttgctgacgaactagccggactgaaaaaagaagactggaaaggtgagttgatttatcagaaggatagtcacacaccttggtgtaccttcacctggagtaatgacgaaaatgataaaaacaatgaggatattaatgttcgttttaaatttggattaacgaagaaagatgtaagcggtgagttcagcgttaaaatcagcaaattatcaaattcgattccatatattgagacctttccggaacatcagcaatttttaacgcttaatcagtcagatgatgttaagctaaaaaatattcgtcttaattctgttcaggttcgtgatcttatctatcgcgctcaaatcgcagtcagacatatttttgactgggaagcgcaaatcacggaagaaccgaaatatgaagaagataaagaagataaagaagataaaaaagaaatactcgacttacatggggctaacagccggtatctgtgggagttatttttctatttaccctatctggtggcaagtcgtttttcacaaaatcgtctttattatcaggctcgtcagtggctgcattatatattttcaccttatgacggacaccgtttatccataaaagatggtaacgaattattacctccgccatattggaactgccgtgtattaacgcaggaagatttacaatataaaagtaatgactatgcattacctgacccttatgcgatatctgaagatgtgccttctcattatcgtaagtcggtctatttaatgtatatcgataccctgatttccgaagcggatttaaattaccgtcagctcagccgtgacagtattacccgtgcctggggattttatcatcaggctcagggaatgctgggttatataccaaaggagcacagcttaccgaaatggcagccatgtactgttaatgaactgcttgataataaaacctattctgtacaggaaagtaccaggcctgaattattttcaggaatatatccggaaaatatgcccaaaaagctcagaggatttttctggtacggcagtctgggcaatgaacgattccgtttgcccgttcagacaagtttactgagcaggcagtcagttctggagcaacgcttatttaatttacgtcattatctggatattgaagggaatatgatgaacctcccgttatatgcagctgcgtttgatccgttcgatctgctgcgttcgcggctgggaggaacctctgaactggcatatttacagtccgggtcattaagtattccgtcatattgtttccggaccatgctggaaaaagcaaaagaacaggcagcggcactgattactttaggggataaacggctcagttattatgagcaaaaagaacgctatcacactgaaaatatgcaattaaaggatgcggttgcgcttgcggatgccagtgctgcgattcagtcatcgctgcgtgaccagcaaaaatctgctctggactctctgaatgaagccaggacgatggctgagagcaaaaagacatattacggaagcctgagtacgagtacaaaagaatgtcaggccagaaatttattagtgagttcatccgtgtttcatggggttatttcaggtgctgctgttgcggcaggtattgcggctgcgattccgcgtgtatttggtctggcgcaggataccggcgaccatggtaaaacagcactgctctctgctgtgggggggactgctgcattaggtgcggaacttatgcgcggtactgcggagtatgttcagatagatgaacaataccgtcgccgccaggaagagtgggcatttttggcgtctcaggcagaaagtgaaataaaggtactggataaacaaattgatgctcagaacgtggctattaccgcagcagaaaacagtgttaaatatacaaagcttcttcaggcgcaggctaaaaacctgtatgactatttcagtcagacccgtcaggttaatgaaagtttgtacgaaaaaatggccaatattattggcttattgcatgaccagttgtgttcactggtcagaacattttgtgcattaacagaagcatcctggcgttatgaaacggatgattataaacggcagacatttattccggccgatctgtggagtggcgataatttaggtattctggtcggcgttaaattacagaaagcgttgctggaaatggaaatggcgtatacacagcaaaatacacgccgcctgaatatcacaaaaacgatttcactgaaatcacttgtcagtaatcatctggttaaaacagatgaaacagcgctgacaacatgggatgaagtaaaagaagcattaaaaggagcgaaaaaactgtccttcgggttatcccatcaattttttgatacagattttcccggacattatgcccgaaaaattcactctttatccgtgacatttccgacattattaccgccatatcagaatatgcgggttcttctggagcagacatcgaatacgttattagtttcaccggatattgatgcggttaaatccctgtatacatcagcagaacaaaaaaacagtgaatcaattatccgtaatttgcgggtgaaccagaaaatcatactctcccgtggctgcgatgacagcggagagtttccggaagatgcctttaccggcggacaataccatagttttgaacacagcggagctatttcacactggctgctgtccgttccccgtccgcagaatagcacagagctcattgataatcttaatgacattatcattaaacttaattatacggcgaaaagtggtaatgatttctttgaagcggcggtcaatgaattactggaaaatacggaatcaataataaaagagtgcagcgacaatgattaa

SEQ ID NO: 283296 - DNA, 336 bp, Morganella morganii
atgattgaaattttcacctggtgtccccgtgttaatcccacggaagacatcacctataaaacccgcagggctaagttcggtgatggttatgagcaggtgtccggtgacggtcttaatccccgcagccagaagtggtcactggaatttatcggtcgcggggagtatatcgcggctatccgtcagtttatcgaccgtcacggcggtataaaggcttttcagtggaaacccccgcttgagccggtcggtttgtaccggtgcgacgaacataagctcaccccgctcggcggtgacaactattcactttctctcacttttacccaggcatttaaaccatga

SEQ ID NO: 283297 - DNA, 195 bp, Morganella morganii
atgagcctgttgtattccaatgctcttattgttgctaatggtaaaaagccgcacacagctcttgtgttaaatgataatgaggtgattgatactgtggcggcgtatatgaaaaaaggccgcacatgtcggcctttgggaaaactcttattttcaacctgtggaataattaaccagctatactatttactgacgtaa

SEQ ID NO: 283298 - DNA, 342 bp, Morganella morganii
atgccgataaacctctgctgtattttttttgcgcaaacagacgttgatgaggatgctgaaccggaactgagtgatgcccgtgatatcgcattctttcccctgctggccgcctatgcgctgggggaaatcaaatctgcttttctgatcagcttctatctctatctgccgtttatcgtgattgatctcgtggtgtccagcgttttgctggcgctggggatgatgatgatgagcccggtcacactctcggtaccgatcaaactgatcttatttattgcccttgatggctggtcgctgttatccaccagtctggtgtctcagtatctcgaacttatggacatataa

SEQ ID NO: 283299 - DNA, 474 bp, Morganella morganii; identical to SEQ ID NO: 277672

SEQ ID NO: 283300 - DNA, 1473 bp, Morganella morganii
atgcaactacatgattttggtttcgttaattatgcagtgctgtttggttatttagcagcaatgctactcgttggtgtttatttctctaaacgccagaaaacagcagatgattattttcgtgccgggggacgggttcccggttgggctgccggcgtttctgtctttgcaactacattaagctcaattacctttatgtctattccggcgaaagcttatacctctgattggacttttattattggccaatatttagcgatcgccattttgccattagtattttatttctacatccctttctttagaaaattaaaaatcacctctgcttatgaatatatacgaagtcgtttattcgccagcctgtcatttatgttatttcatattggtcgaattgcaattatcacttatttgaccgtactcgcattacgtcctttcatagggatagatccgattatattagttgtactgattagcctgttatgtattatttatacatggatgggagggattgaaggtgttatttggactgatgtcattcagggattattactttcaggtggtgctgttttaatctttatcatgatctgttttaaagttgatggaggaattagtgagatttttaccacaacagcacaagctgataaatttttcccagaagcacagttacgctggagctggactgacagtactattcctgtattaatgattggttttttatttgccaatattcaacaatttactgcaagccaagatgttgtccagcgctacattgtgactgattctatcgaacagactaaacgtactttaatcacaaatgctaaattagttgctgttattcctgttttcttttttgccattggttcagccctgtttgtgtattacaaacaaaatccaggtttgttacctgaaggttttaataccgggggtatcttacccttatttattgttacagaaatgccagtgggtatttccgggctaatcattgcagctatctttgccgctgctcaatcgagcatttccagtagcttaaacagtatttcaagttgctttaattctgatatctatattcgcttaagtaaagttgaacgacgttcagaacaaaaaatgaaagtcgccagattagttataattattgctggagtattcagtagcttagcaacaatttggttggttttatctgacgaatctgaaatatgggatgcttttaacagcttaatcggtttaatgggtggtcctatgaccggactatttatgttaggtatttttgttaaacgtgctaatgcaggtagtgcggtcgcaggcattatagtaagtatcattgctgtattagcagcccgttatggcagtgaccttaactttttcttctatggtgtaattggtgctatgtcagtagttattgttggtacaattactgcgccatttttctccgcagcaaaacaaatttcattggatgatagtgaaatatccgggaactaa

SEQ ID NO: 283301 - DNA, 192 bp, Morganella morganii; identical to SEQ ID NO: 278789

SEQ ID NO: 283302 - DNA, 1083 bp, Morganella morganii
  misc_feature (1003)..(1012): n is a, c, g, or t
atgacggaattgttagttaaaggagtagataaatggactgtcaaaggtgtcagggataaaggctctgtatacgattattctaacttaatccagcatgctgtggttggtcataaccaataccgggaaattcgtattgagtcacagttaggtgatggcgatgataaaatatttttatctgccggttctgccaatatttacgcaggtaaggggcatgatgttgtttattacgataaaacagatactggttatttaactattgatggaactaaagcaaccgaagccggtcgttatactgttacccgtgaactggggggcgatgttcaaattctgcaggaagttgtgaaggaacaagagactaaagtcgggaaaagaactgagaaaactcagtatcgccattatgagcttaaacatatcaacggaaattctctgacatcagtagataatttgcattctgtggaagaaattatcggtagtagccgtggagatacgtttttaggcagccggttcggtgatattttccatggtgcagatggtgatgataaaattgagggaaatgacggtaatgatcgcttatatggtgacaaaggtaatgataccttaagaggtgataatggagatgatcaattatatggcggtgatggtaacgataaattaattggcggtaccggtaataattaccttcacggtggtgatggtgatgatgaactgcaggtacacggtagtaatacccggaatgttttattgggaggtaaaggcaacgataagctatatggcagtgaggggtctgatctgcttgatggtggggaaggaaatgatgtactgaagggtgggtatggtgatgatatctatcgctatctttcaggttatgggcatcatattattgaagatgaaggtggtaaaaatgataagctaagtttagctgacattgatttccgcgatgttaccttcagacaggaaggtgatgaccttgtcatgtataaagcagagaataatgtagtttcgnnnnnnnnnntcataaaaatggtattacttttaaaaactggtttaaacaaacatcaaatgaaatttcaaatcataaaatag

SEQ ID NO: 283303 - DNA, 450 bp, Morganella morganii
atgacgaatataactactttaattaaattaacatttatctccatttgttcaatgctattaagtgcctgtaatggtctttcgcatcagtactcaacatatgatactttagcggggatcatcgccccaacaggacaatatagcgaatggcacacgaatagtgataattattcctccggaaatagtgatacccagacaagcagggattgtatagaaagtgaggcaagagaacaccatgctaatggtataaccactgttcgtcagagcaactgcaatggcagaagtcaaactcagagtaacagtcgtagccatagccgctccagtagtgtcggttttagtgttaaaggacctgtaggggctagtttggggttgattgatcaaataaaagatatgaacaaatctcacaataatgatgttattggtaaagatatgtttaatgagttcggtttttga

SEQ ID NO: 283304 - DNA, 354 bp, Morganella morganii
atgacattaaaaaacatggggattgccaatattacacaatgcatagagtccttcatggagaagcgcagacctcctgaatataccgatgatgaatcagatttaatgtataacattaacggatggaacatattgatctcagaatttaaacatcttccgtggtttttaggaaaaatcaaaaaagatgtggtgaaaatcacatacgactccagacacaaacactggaatctgtattatcaggcggaaaaaagatggataccgcaccctgatagtccggcaactacctttccagacgccattagtataattgaggatgatataaacgggctcttctttgacaaatggcatactccgtaa

SEQ ID NO: 283305 - DNA, 1401 bp, Morganella morganii
gtgttgtcattcaattccccggtaacactcagcggcgcgaaatactctatcgccaccacggtaccggacacaatttcagatgcagcccgcaccatgtcagccaatcagggctatatcgtttactttctccaggccatgcagcagtggatgacagataccggtcaggtgaaaattgagctgccgaacggccaaaaagtgacgttggaggatgtaaaagggctggcttcgcgggaatgggtcaatggtatgttatcaaataaccccggcaatcaaaccacagtggttaaagctgtatctgattcgtatctgtgggtcagcggtggaggtcaattcggatatacatataaaaaacaaaacccgtttgttgttaatgcatccggcagctatgcgtctttgaacggaacgggagagtataccggcttcagactgacaaaatcagatggtcgttatgtgttattggagacaaatcctcatgcgggtacagcatcaatgcttagcattgcgtatcggcaagctaacggcgaaaaccagcacgttattactgtgccgtatgattccggtgtgctggccactcaggtgtatgtgaaatacagtacagggtttggtatcggttctgaggcgggtggtaaaggaattacagattttaatagtttcgtcacgccaaccggtcagtactggtacggaaattcctcctcaaatattccccggactgttgtgggatttggtaccgcactggttacacggtattccaataatatttcgcatcatctgattattccgaactatggcggagggagttatctcgctatcagacgtaacaatggcggggcgatagaggatgtcgttgccctgacatccaatatgtatatcgtagacggcagcggatattataaaaaatcgtcgccaatcgtccagatttaccctgatggccattatgaaaccaacgacgaatccgaaggcgcggaagtccgccgtaccggcaccggccaatatcatattaccggcattcttggttataactcagatggcgcatggggtgtaaacggcggtatttcggtaccgaaagataataacggccttgagctggtttatgtcgatgatagggtgcagagtgacggcagtctgattattgaaacctgtcaccgtcagcatacgcatttgccggaacgtttccagaactggcggctgaaagaggtcaccccggaaggtgagcgcattttctatcaggacggtgagctgtgtgatttgccggaatcaacccgtcttgatgtgcgtgtcgaaatgccgcaggactctgtgtggaatgtgaaacagcgtgaactggctgaacagatggaacgtgagcaggcagagcgtgaggcgaaggaagcagcagagcaggccggagacacagaggaataa

SEQ ID NO: 283306 - DNA, 1818 bp, Morganella morganii
atgttacgggggcaattgacgcttggcgatttcaccaccagcggacaacttacagatagtatcagtttacggggtatgcagttagcttctgacgacagaatgctaccaagctcacagcggggttatgcacctgtagttcagggcattgcaaataataatgccagagttactgtctggcaaaatggtaatattatctatgaaacaactgtacccggcggccctttcactattaatgacctctaccccagcggatatggcggggatttgaccgtccaggtaacagagtcgaatgggcaagtacgctccttcaccgtaccatttgcgtctgtcgcacagctggtgcgccccggttatgcacgctaccaattagcaataggtcgctatcgttacagtaatgaaactatcgatgatgttattttccagggaacacttcaatatgggttatttaatgacattacattaaatagcggtttaactacggcgccgcactatactgccggattaatcggacttgcattcaacaccccctatggtgcgattgcatctgatattaccctttcagatgcaaaattgactaactcagataccacacataaaggatatagtctgcataccagttataatattagtgttccggaaaccagtacaaatataactttagctgcttaccgttattcctcaaaagattattacagtcttcctactattaaatatactagttatcgtcccagaaatcagtttcagctatccataaatcaaaatatgggggaaaacaacgggaacatttatcttgccggaacaacatacagttactggaaccaactgaagaacagtaatgagtaccaaattggatatagtaatttctttcgtcaggtaaattatcaactcggttactcaaaatcccaaaacaataatacaggtcgtagtgatgagagggtttattttaattttgctataccacttggtgatggtccgcaaacaccattattgtcaacaacattaaactataatcaaaatggaaataacagcgcccagacagccattagcggtacattgggcagtaacaatcaatattcatacggaatatctgctaatacacaaaaaaatcactcatcaggttattctgtaaacggacgttatcgttccccgtttgcagtcttgtcatcatccgcaggcaatgatagtaatcataaccggcaattttcatttggtgcctcaggtgcaattgttatgcacccatatggcctgactctaagtaacgacctgagtgatactttcaccattattcatgctaatggtgctaatggagcagccattaacaatgcccccggcaatcgattagattattggggaaacggaattatgccttatgtcactccttatgcaatcaaccgaattagcattgaccccagcgatttacctttgaacgttgagttatctgcgaccgaacgtgaagtcattccaagagcaaacagtattaccttagtaaattttactactaacacaggaacaacgatgctgtttgatatcactactaatgatggttcatttccgccaatggcatcagaagcatttaacgaaaaaggtcaatctgtcggatatgttgtacagggtggacgattattcactaaaggattggcagaaaaaggaagactggaaatcgtgtggggcacaaataatactgaaaaatgtacattcgattataaaacacagataaaaccatcaagttatatacctgacatccaacccgtcacatgcataaaaaatgatgacaccactatttccaccaataaaaaacaaccgggccttatgtattga

SEQ ID NO: 283307 - DNA, 1374 bp, Morganella morganii
gtgttgtcattcaattccccggtaacgctcagcggcgcgaaatactccattgccaccacagtcccggataccatttcggatgcagcccgcaccatgtcagccaatcagggctatatcgtttactttctccgggcaatgcaacagtggatgacagacaccggccaggtggaaattgagttgccgaacgggcagaaggtgacactggaggatgtaaaagggctggcttcgcgggaatgggttaacaatatgctcctgacaagcggggagctaacacagattcagtcaccggccaaaacgagagggatttatgttaatgataacggggatatcggcggaaaccttggtcctcatcagaactggaaggtggacgggaatgcaaaagcctatttccgggaattagaagtaaaaagtccgggggattacaccggtattaatctggtaaaaggtgatggccgatatgtactgatagaaaccaatcctcatgccggtagtgtatcgatgctgacgtttgcatacagaaatgcatcaggagaaaaccagcacgttatcaccataccgtatgactcaggtgcgctggccactcagacatatgtgaaatacagtacagggtttggtatcggttctgaggcgggtggtaaaggaattacagattttaatagtttcgttacgccaaccggtcagtactggtacggaaattcctcctcaaatattccccggactgttgtgggatttggtaccgcactggttacacggtattccaataatatttcacatcatctgattattccgaactatggcggagggagttatctcgctatcagacgtaacaatggcggggcgatagaggatgtcgttgccctgacatctaatatgtatatcgtagacggtagcggatattataaaaaatcgtcgccaatcgttcagatttaccctgatggccattacgagaccaatgatgaatctgaaggggcagaagttttccgtaccggcaccggccagtatcacatcaccggtatactcggttataactcagatggcgcatggggtgtaaacggtggtatctcagtaccgaaagacaataacggccttgagttggtttatatagatgacagggtgcagagtgacggcagcctgattattgaaacctgtcaccgtcagcatgcgcatttgccggaacgtttccagaactggcggctgaaagaagtcaccccggaaggtgagcgcatcttctaccaggacggtgagtcgtgtgacctgccggaatcaacccatctcgatgttcgtgtcgaaatgccgcagggctccgtctggaatatgaaacagcgtgaactggccgaacagatggagcgtgagcaggcagaacgggaggcttag

SEQ ID NO: 283308 - DNA, 405 bp, Morganella morganii
atggataactataaatatattgatagattttttgatagcagttttgaactcatggatattcgatacaaagagcaaagaaacagtcgtacactttattcatttctaaatggcttacattctctaaatgatagacttaagaaagatttcgatgtgagtctattaaaatatccggaattcatgcttcttaaacatctaagaaattactaccaccatgaaggtgacataaacgagattcgggtattttttaatcataagaatataatgcttagtcatactgaaatgattataattccaatttgtactgttgctaaagcattaagactatttctttctggtaaaatgataaaatggaaggcagaggagaaagagaatcttatcaattaccgtatgtttttgataatttag

SEQ ID NO: 283309 - DNA, 1038 bp, Morganella morganii
atgatttatacagccatgattaaagcaccctatgtcaaatatattgtttttgttacagggttgatttcgtctattcaggcatttccgatcgaatttaatacacaggatgttgttcttggtctggacggaggaagttatactcgtcaatattcaatggataatgttcctttcgtttatgataccggaacaacaataggattaagggatgcatataaatttccttataaatcatcttgggcatgtggaggtcttgatgcaaaaatagacttgcctgttgtgggtaacattaacagtcaaagtatctataaactgacagataatgttggcctgataatctgggcaggagataccaatttcggttcagcaaaacctatgagcgggaataactggagtgatgtttttcatcaattttgttccggcagcagtcagggttactcagtatatgttaaaccagtgattctgaagcgcagtaccaccggacaattcaatattccctttacgccaatcggcagcattcggctacgggcaatgaatggcagtatttttaccggtaagactgagttcagattctctttgaatcatatgcttataaataatgaagcccgttcatgcacacttcagacttcaccaaatatggtagtaacattgccaacgatatcaatggtatcactaccacatactgggaatgagacatttgggggagtagcagatatccggcttaactgtgaacctggtgtaatagcctatgccacattaacggataatacaaaccctgcaaaccggggagatttactgactctgacaaaggcatcaacagcaactggtattggccttaaaatatataaaaataacgatgtgactgcgctaaaatttggcccggactcaccgataaaaaggaatgaaaatcagtggcaattgtcatctgtcccggaaacgtcaccgacagtacagcttaaagtcagatatgtaaatacaggcagaaatataactccgggaacagtcatcggtattgcaacaatcacattctcctatcaataa

SEQ ID NO: 283310 - DNA, 465 bp, Morganella morganii
ttggataaaaatagtgaattgagttgccacttatccttttttaaaacggaagatagtagaattgatctaatctttgtcataagactaactgccctaaggatgaaagacaataatggctttttgctagttttcgtcgatgacagggtgcagagtgacggtagtttaatctgtcatcgtcagcatgcgcatttgccggaacatttccagaactggcgactgaaagacgtcaccccggaagatgagcgtgttttctatcaggacggcaaactgtgtgatctgccggaatccatccacctcgatgttcgtttggaaatgccgcagggctctgtgtggaatgagaagcagagtgaactggctgcctttttattgataggagaatgtgattgttgcaataccgatgactgttcccggagttatatttctgcctgtatttacatatctgactttaagctgtactgtcggtga

SEQ ID NO: 283311 - DNA, 1269 bp, Morganella morganii; identical to SEQ ID NO: 278785

SEQ ID NO: 283312 - DNA, 546 bp, Morganella morganii
atgcaaaagtgttatatcgcttcaggtattatatctatgctgttttcaggttctgtcatggcatatgacggtactattaactttattggtaaagttgttgaccagacatgttcggttaagtcaggaagcgataacctgaccgtaacactaccaaccgtgtcaaaaactgcattagcaacacctgcaaagacggccgccctgacaccatttgtaattgaactttccggatgcaatcctgccgctgcagaaggagcaaaaaaagtcaaagcttatttcgaacctaatgcaaccactgatgcaactactggcaatctgaatattgaacccggagctggtaaagcaacaggtgttcaaattcagttactcaatgctgatggttcaacacctatcaaattaggaaaagatgtcgcagcgcaaggggtaactgcagccaatattagtgccgcagatgttaaattaacttataacacccaatattatgcaacagcagccgcaactccgggagatgttaaagcaacagtaaattacacaatttcctacgaataa

SEQ ID NO: 283313 - DNA, 444 bp, Morganella morganii
ttgttttgggggggggagaaacaacatactgataattttatatcttacctaagcaataaaaatctctctaaaaatgtgacatgcactgatgggtttactcttagacttaatgatatcagcgagttaatcaataaatataattatagcgctgtcattattggcagaggaacaccacaacaagaaactgatttattatatttgtccaaagaacaccctaatgttgatttctttacttgtggtggttttattacacaagttggtctttttggtgatatatatggagagcaatactcaaggctaccaagatggttatgcagaataatgcgtcagccttttgtcttaaaaagagtactatatacttacccaattagttttattcaggtttttaaattgagaaaagtattaaatgaccatatacataaattcaaagagtttaaattataa

SEQ ID NO: 283314 - DNA, 540 bp, Morganella morganii
atgcctttacccgagcgtttaaaacccatcaaagtcagtcgtgctaaaatcaatgaaatgacagatttgttgcagcgaatcactgaaaaaattgatagcggatcaacagaaaatgactctgagcttaactctatgatgatgacatggaatactcaggtggtaactcctcatgaattttctgattttcgtgattataattcatggataagcgcgaaagagtttacccgctcagcctttaaccatgtaaaatatattaatgacctaacctatagtgaattggtttctgtcattgagtttatatgtaacgcggaaggtaaagaatctgagcattcatatgcgtttaatttacttaaagtgaattttaagggtttttcatcagatcttatttattggcctgatgagtattttaaaactgaagatgttgatgatttatcgtcagaagaaatagctgcttatttaatgaaaaaagctaatcgtcttttacccggttcaccaacaatagaattaaaatattcaatacctgaaaacgtatcagattga

SEQ ID NO: 283315 - DNA, 1212 bp, Morganella morganii
atgccgctgacagacgttgaaatacggcgctctaagccaaaagagaagtgctatacacttaatgacggcaatgggctgtcgatgctgattgagccgaacggtgcgaaaggctggcggctgcgatatcgttttgccggtaaagcgaaaatgctgtctctgggtacatatccgtctgtgtcactggctgatgccagagcaaaaagagatgaggctaaaaagctgatcgctggtggcataaacccgagcgatgttcgcaaggctcaaaagcaggaactggcgaaccgtcatgaaaatacatttgaggggattgcccgtgaatggtatgaaaagcggtttgatagatggtctgcgtcctatgctgaggaaatgatagaaacctttgagaaggatgttttcccgctgattggcagtcgtccgatagcggagataaaaccaatggagttaatggcggtgctgtcacgcctgaatgatcggggggctacagaaaagctcagaaaggtacggcaacgctgtggcgaggtatggcggtatgcgatagtcaccggacgggctgaatataatccggctccggatctggtatccgcatttgccccgcataaaaaaacacactatgcctttttgaaagtggacgagataccggagttctgcaaagcactgaacacatataccggcagtttccttgtcaaaatggcaatgcgcttacagatgattactggcgttcgccctggtgaattgcgtaaagcggagtggtcagagattaatttcgataatcgtacatgggaaatacccgtagaaaaaatgaagatgcgccgccctcatattgtgccgctgtctctgcaagccatgaatattctggagcaattacagccaatatcagggcaaggtcagtttgttttccccggacgtattaaatccagtcagccaatgagtgaaatggcactgaatgttctgatccgccggattggatatgcgggacgtgtcaccggtcatggcttccggcacaccatgagtacaatcctgcacgagcagggttataacaccgcgtggattgaaacacagcttgcacatgtcgataaaaactcaatcaggggcacatacaaccacgctcagtacatcgacggacgcagggaaatgctccagtggtacgcggactacatggacgcactggagaacggcaataacgttgtccacggtaatttcaaacgggcataa

SEQ ID NO: 283316 - DNA, 918 bp, Morganella morganii
gtggatatttatacataccgtgaatggcttagctattcagaagcagttatgtttttatctaataagcaagagacgcaagtatctgttagtgatattgcaaggcttgtagcagatgaaacaatcccatcatcgatttattttcaaacgcctacttcagcaaaaaagataaaattaaaaactgttccgttatcagtggcactagatgatcctgacgcattaataaaagataatttaaatatgcttaacagtgatactgttatgccagatacattaattcagcatgcaatacctataaatagcgatattgttagaattgaagggctatgggatgttttattttgtggtgtaataaaacattttaacgaatgtatttatagtcaaggtgtggggcttaatgagccgctgagaagtttatatgatgtaagagggattgtgttaatcaaaggtaatgacctgtatcaggtattatctcccgttgatattggtgattctctaagaatagttgaggctatgaaattagcgcatacaggtcgattgaatcctttagttgataagcatgtagcccaattaacacatcttcttaatttggttaataatggtgattatgctcatcagctcatgccttgtacaagtatgccgagtggcgcattgcctgtaattagaaagtctaatattttaaaactaataaataagaatagttgtaaagtagaaaaaaaagagtcacctaagaccattaatgcgatggctcaatatatatatggattaacttgcgtcaaatatgggagagatattgcagataaccctcgtccgcatcttgataatgccagagggaaaataaaaatggatttggaaagaaatggattgtcaaccccttcaggcaacactgtttcaggctggctgcgaaatattaacccgtaa

SEQ ID NO: 283317 - DNA, 219 bp, Morganella morganii
atgtctgcacaagatactcgtaaagaaaattttatccgcttacccgaagtacagcgtcgtactggttattgccgggcttggctgtacaaacttattgatgccggtcaattcccgaaacaggtaaaaatcggctcccgctctatcgcctttgttgaatcagaggttgatgcgtgggtagcgaataaaatcgcagaatcccgtactggtgaggtggtgtga

SEQ ID NO: 283318 - DNA, 396 bp, Morganella morganii
atgaaaaagaaaaaccacccgtcacaggtggcttctgaggatagctttgcgtcatctatcttatcaaagaacccgccgaaaaaacaccgtgcccgtttatatatgatcggtactggcattaatggctttacggaaaatgaaatcttattccattgccgtttatcgtccggacgcaattacccgaacgaactcgaacgtaagctggatattgaactggaacgccttgatgagcctaaccctgatggtattggctcacattaccgctatcgttttaaaacctctcaggacgtgcagaaggtgattaatttaattaacgattgtgcagagcagggaaagtatcagccggtaagcaaagcactcacagataatattttaagcctgtacccgaccgaataa

SEQ ID NO: 283319 - DNA, 825 bp, Morganella morganii
atgaaaaagaaaaataacagcttaattgctggcggattcgctcaccctgaaatcaaggttgaggatattaacgaaacgacattcgcggatatgctgccggttattcgtggcgatattaacggacagttaattaatggcgtgagtgcgaaagcattacacgaatcgttaggcgttggtaatgacttttcaacgtgggtaaaactccgcattaatgaatatgggtttacctgcgggtgtgactacgctgtttttgattcctcaaatttcaggaatcaaagtgcgaaaaatgagcgatgggtaacaggacgcgggggcgaccgtcgcagtaaagattatttgctgtctcttagcatggctaaagagatggcgatgattgagcgtaacgaacagggtcgcgccgtgcgccgctactttattaagtgcgaagaagcattaagcaaagcagcacccgccattacccggcagtaccgtgcggaactgaaatcacgcctgaaagttgccagctatttccagccgatgtgtacggctctggaaattgcccgtatggaacagggcaaaaacaccctgccgcgccactataccaatgaagccaatatgctgaaccggattgtcctcggcggtctgacggcgaaagcatgggcgcagcagcagggcattatcggcaatccccgtgatgcgatgagcgaaacacaactggagcatctttcgtatctggagcagaccaatacaacgctgattgagctgggtatggactaccacgggcgcaaggacaaactgaccggactgtctcagaagtggttagcgcagcgggtgggggcgaactga

SEQ ID NO: 283320 - DNA, 420 bp, Morganella morganii
atgaacaacacatcggaaaaaccgaaaagatactgcgttacttccggacggccgtcgctggttgtgccaggcgaccacctgaattattgcgatgaaaagaaacaacccctgattatcgtgtgggcgagaattaaaaaagcagatgttacatggctgaatgagccataccagagaacataccgatggctttttgcttgtgaggattttcggcaggatattgaggcgcgggcagagagaatttatttacagtacgcaacaaaaagcacagcgagagcaatcactcattcgtttatgactttttatgacttcagtattgaggatgccaaacgcgcggctgatgatttatatgatatgaccgtaaccattatcagtgagtacgaaagtcggaaagcattaattacgggagaagcagataaatga

SEQ ID NO: 283321 - DNA, 2403 bp, Morganella morganii
atggcaacaataattgatgcgctgattgtatcgctcaggcttgataatagtggtttcagcaatgaagccaaaaaatcgacggcagagaataataaattatcggcatctgttgaaaatgtcactaatgcgtccgcagatttaaccatcacgataaaaaacctcggcaacgaaaccaaaaaagcgacgaagaagcaggatgatttcacgaagtctgttaacgaaggagtgaaagctgtcggtgcgcttttctctgctattctggtttcttcggggctggcgaaactcatctctgaagttaaccgggcaaatgaccagctttatttcctgagcaaaaacctcggcatgagtgccactgagattaaaaagtggcagaacatggctgagatgtccggcggttctgcggacggtatggtggcgagtatgtccaacctcagcaaatcgctgtgggatttggtcactatcggtgattcctcggtgctgccgtatttcaatgcgctgaatgtcggcgtggtggactctggcggtaagctgcgcgacctcgatgctatcctgctggatgtggccgacagcctttccggtatgtccagaccgcaggcgtacaacattgcgaaaaacatgggctttgacgagggtacgatcaacaccctgctgcaaggccgtgacgcaatgcgagaaatgctggacacgcagcgcggcctggttatctctggcgaggaagaactggaaatcagccgtcagctcaacaaacagaatgcgaaggttcggcaaggttgggagggtctgaaaaccctgctggcaaactacctgatgccgtcactgctgaaattctctgaggtgatcaccggtgtgctgatgttcctgaacaagaacagagacacggctgtaatggtgtttaagggcatcggaattgtgctgggtgtcctgcttatcccgctggtgataaaagctgctgcggcctttctggggctgtttgcgtcaatcggactggttcccctcgctttgtttgctctcggtgccggtctatggctgctgtatgacgattataaaaaatggaaagaaggcggtgaatcactgctgggtgaatattgggctaaatgggacaaaaccattacctatattctgatgaagctggatcagttcgaaagatggttcaaaggaaccactatcgggcagtggtttaccgaccaggagggaaacctcaataaactggaagcagcgtttgctgcgtttgccgcatacattgctaccaagtgggcggcgaaaatgctgaacgcattcgggcgggtatcaaggggcgcaaccaaagtcggcaaaggcttaggtaaaggatttattggcaaagctggtggagtagcagcagcgacatacgttgcctctgatttggttgattatgcgctgaatgaagcgtttggagagtttgatggataccaacgagcgagaaccgcaccaacgtgggggtatttttggaagtcgttttttggtgaaggtgatgcccgctgggtggatggtgtttgggtcgataaccggggaaaacaaaacggtgcgcgcctgactgaaaatacgctggatataccgacaggagaccctgaaagagatacgcttgccgccaaagtgtcaaaaggcgaattaagcctggacgaggctaatgatatcctgatgaatggttatgatatttcatctgataccgacggtgaggacggcagcgttgccagaaatcataccgagagaggcttgcgctataacagcccgctaaaccttgcttatgctaatcagcagggtgcagataatatcggtggctgggctaaatttgacacggaatacaacggaatacgagccagtgcaaatcagttgaagatgtattatgacggtacatcacgcgccgctggttatcagaaattgcaaacggtgtgggatatcattcataaatgggcgccaaaaggccatggtaaaaatgatccgatcgcatactcaaatacagtggcttccgggatgggggttggcgttcatgataaaattaatctgaatgacccgtcggtgatgtatgacctgatgaaagaaatgtccaaaatggaaaataaggggaaatttccgtattccaaagggctggttatgtctgccattaacggcaccggtgacccggctgtaaatctggcaaataaaatcaatagttttaatgactttatttccaatcctattgcgccgaacgcagccgcaggaacccggcaaattatggctaattcacagatgcttcagcctggcaacaaaaccgttaataaccgtgttgaggctaatttcggagatattaatatcaacacatcatcagcgacagtcagcggtaacgtggcagatgctaccacatccgcccgcgaaaacatgttccagctgatcactccaatgagttaa

SEQ ID NO: 283322 - DNA, 360 bp, Morganella morganii
ttgaaattaaaaattattgcgctggttttatcagtattgcctttagcggccaccgccagagttatgacgcaggtttgtggcactgatttcattcaaatatttttagcagaagatgactatattaatgaagtcagagtaaatgatgtccctaccaatattgccatcattggccataaagttaataaaaatggcaacgtagattcatatctggtttatgggtttaaagggaataaaaaagtatctcaacttcataattcaggagataccggaataaccacgcaccggtattttttattacagcaagacggctcaccggaacatcccggtaaaccgatatcttcccctgtcgtttgcaaataa

SEQ ID NO: 283323 - DNA, 267 bp, Morganella morganii
atgaccacaccatatgatgacccgctttaccgcgaccctgagctggcgcaattttatgatatggataatgaatggcgggccgattttgatatgtatcttacccgggcggccactgccgggcggattttggatctgggctgcggtaccggcacgctgatggccgctattgcggaaaaatacccggataaaattctgaccggcgcagcgtattgctgcattgcagaatatgcagcgtcatttaagcccggacggtattgtgttgtttga

SEQ ID NO: 283324 - DNA, 582 bp, Morganella morganii
atgatgaacaaaacactgactgtatttacccaaaaccggaaaattgccgctggcagcctggcagacgttatccggatcataaaagcgctgccagtcacaccggaagctttatttatttttgatgaccagaccggcacgcgactggaaattgatttctccggtgaggctaatgccgtttatgcttcagcagtgcaaacgtatccggagtttcatgacaatgccgcctcagaaaatactcctgaaataaaacagcgcgggcgaccaaaattaggtgtgatatccaaagaggtcaccttattaccgcgtcagtgggaatggctggcgtcacaacggggcggggcatcggcaactctccggcggttggtagatgaggcgaaaaaagcaaccgccgccgttgaacaacagcgaaaaattattgaatccgcatataagtttttatcagaaatggccggtaatttaccggactatgacgaatgcttaagggcgcttttcgccaatgatgccgccacatttgaaaaactgacccgttcctggccgcaggatatccgtgaacacgccattaaaatggcatttaatcagtaa

SEQ ID NO: 283325 - DNA, 345 bp, Morganella morganii
atgataaccgaacttaataagaaaaatgcaaagcaggaatttaaggattcaccctcagccgccggtgtttaccttatcaggaatacaataaccaatatgcggttgctgctgtcagctcaaaatgcccggggcgcattaaaccggcatcagtttgaactcagatatcatcagcaccgtaaccgccggatgcaggcagaatggaatgaatatggcgaagcagcatttgagtttatattactgaaaaatgttaaaccggatgaaaaaaacatcaaagaggctctgagtaatatgctggatgagtataaacagcaatacgggagcagtgacagtaatacctggtattga

SEQ ID NO: 283326 - DNA, 801 bp, Morganella morganii
atgaaagatttcagcaaatataaaaaaactctcaatcaattagattattatgtctatgctttgtgtgaaataaaagaaaatctccgaattccattttacatcggcaaaggaaaaaacagccgctgtctgacacacatcagcgacgctatgtcagaagtggctgataatgctgaagatatatcaaatgagaaactgaagcggattaaagagctctacgaagaagaccgtctcggtatcgatatattgtgtcacggacttaactctgaaactgcatttatggtcgaaaccacatgtatagacctcatcgggattaaagggttaaccaataaaattaacgggaaaaagagtcccggtaatgatatttataagacacagggaaggttaaccatcgaagaagccgcttcatggtattccggtgaaccaactgaggtttcaaaagaagataaagggcttgtctttattttaaacaaactctaccggtttgatatgactgagcaggaattgttcgaagcaacccggggtgtctggcacaatccgccacgcaatgatgaatctctgaaatatgcctatgctgtttacaacaacattgtaaaagaagtttatgaaattcatggttggattaaagccggtactcaggagtactttacaaggaaaatcggccgtgacagtgatcgctgggaatttatcggcagaaaagcagagcagtctatacgcgataaatatgtcggaaagataatcaactatgaccggagttatggcacaccgttcgttaaagtgggaaacacactgggcagtaaatga

SEQ ID NO: 283327 - DNA, 171 bp, Morganella morganii
atgattagcctggcggaataccagatttcgttatttcatgctttagttcgcataatgtatattatgttaaatgatatatgggaggtgctggtgctgattagatacaataatatcaatgtgttatatcattcattggttttccctgctctcctgtccggtaacgtgaactga

SEQ ID NO: 283328 - DNA, 351 bp, Morganella morganii
atgaacgattatcctgatttaaaaattatacgaaatgaaaacaaagaagcgtgtaccaaagttggtgtgttgttctcatcaggcattgatgaattttctgttttggtagagaaagaaattaatagtatctattatggtgtcagcagacattttacaaacgcagaaaattactctgataatatcaaggaaataagtaaaaaaataacagatagtggatttaaagaatcagaatcctggtggtatgcctggcgttataccagctatgaatcggcgtatacagaactttgctgtcttatcgataaggctgttttttatattagctctgaaaaaacagaagataacattaagtaa

SEQ ID NO: 283329 - DNA, 354 bp, Morganella morganii
atggttcaatctttttttgagaaaaaatatatcagatatcatgaattagaaaaacaaatatacactggtatggcgaaaggtttttctgaagaaagaagacgaataaaccatatacacaataaaattagttttttaaattctaatgaaaaaagatataacctggttgatattttcaagccaaatgaaaacgatcataatcaggttgtggctgatatattaaattacaaggttaacggtgaaaatatattcctgtcttcatttttactgcagtgttttaaatgtgatatatcatttgactgtaaaaaaagatattacatcagagaaatatcggatagatattctggtaaaaaataa

SEQ ID NO: 283330 - DNA, 588 bp, Morganella morganii
atgctgcgccttcgccgccataatcagattaccggtgtccaggtaccggaaattattctgttaaacagccacgacggcaccagcagttatcagatgctgccgggattatttcgtggggtttgtcataacggactggtctgtggtgatacctttggtgaggtcagagtgccgcacaaaggtaatgtcgtcgataaagtgattgaaggggcatatgaagtactggaaacgtttgatacggtggctgaaaaacgggaacagatgcaatcgctgttgttaccaccaccggcacagcaggcgctggcgcatgccgctatcacgtaccggttcggggatgaccaccagccggtcacagaagaacaggtgctgcaaccccgccggtgggaagataagaaggatgatctgtggacagtgtaccagcgtttgcaggagaacctgattaaaggggggttgtccggacgtacagccaaagggaagcgctcacacacccgtgccgtgactggtatcgatggtgatatccggctgaacaaagcactgtgggtgatgacagaaagaatgtatgagcattgtaacctgcgtcactccctgtga

SEQ ID NO: 283331 - DNA, 177 bp, Morganella morganii
atgtcattgcaggaaaacttaattaaaggcggacagtccggacgtacagctaaagggaagcgctcccccccccgtgccgagactggtatcgatggtgatagccggctgaacaaagcgctgtgggtgatgacagaaaaatgtatgagcatttcgataatcgccagcaaatttgagtaa

SEQ ID NO: 283332 - DNA, 912 bp, Morganella morganii
atgattaactttactgaaattgatagcgacggtgaagtctgggaatcgtttgcccgtgattttctagaagaacttggcttttatattgaatccacaccagatagaggtgcagacggaggtaaagatcttttaatcacagagcaattgcaaggtcagttaaataaatataaatttcgttggcttgttagctgtaaacattatgcaacaagtaaaagatcagtttcagaaaaggatgagattaacatacaagaacgtattgatggattcaatgccgatggatttattggattttactcaacactaccaagtagtggtctaaattcaagactgacgcaattaaaagaaaatggaaaaataaaggattttagattctttgatggtaaattaattgaaaatcatttagtaagaattggttattcaaaattacttcttaggtatcttcctgagagttataaaaaaataaagcccaagcacttgatttttaataaatacgtacctataaaatgtgacctttgtggaaaggatctaatagaaaaccatcatgaagaaaattacgatggtattgtgtgtaatgtagagatcatacataatgacaaaccaaacgaggtgatagcagtttattatgcgtgtaaaggtgattgtgataaacatttggaggattattactggaataaatatgaagcgattacgaaatggcaggatatcagtgatttatctatcccattgttctatctaaaatggattatggggacatttaatgagcttgagtctggaagaaaaatatatactaaagaagccttcaataaaacaaaggagataacgttagcgctatctcaaattgttatgagagaaatgacagaaaaagaaaaagaaagggttatggctttgaatttcttacctgattacatataa

SEQ ID NO: 283333 - DNA, 258 bp, Morganella morganii
atgctggttgtccgcaatgataaaagtgccccgccggagcagataacggatagcggctcctggtacgaagagggggaaataggcgttgtgctcaaaggcagtcagaacggggattgccaaagcacggaacaatatgtctggaacggcagcacgtttgtgctgcgtgaccgtaatgaaagcggcagatgcctgaatatccgccctgaagggccgtggaatctgccttactacgaggcggaggttattgagccgcactga

SEQ ID NO: 283334 - DNA, 783 bp, Morganella morganii
atgctgaagcaacggatgctgaaagaatggattatcaccggcctgatggcactgagtgtcacgcagtacgccggtgcggcaaaggtaaacatgccggataaatattcagaccatgactgggatctgatttgcgataataccctgacctgccgcgcggcagggtattccgcagaggatgtcagcccggcggcctctgtactgctgacccgcccggccgggcccggtacaccggtcacaaaccgggtgattctggaagaggaaaacgccaaaccgttgccggtgaagccggtgctgatgatagactcgcatacactgggggaattgcaggtttctctccgtgatgacggagctgttgaaagtatctggcagatggatacagagcagttttctgcatttacagatgccctgcgtcaccataaatctgtcgtgtttcatacaagggagcaggattatccgttttctccgctgggtgcggtagcggtattacagaaaatggatgagattcagggacggaacgggacaccgtctgcgctgatcctcagaggcacagagagtgagtcgggggtaaaagccgcgcttccgcttccggtggtgacccgggtgacagcccgggaaaatgcccagcgggacatgaccgcagaggaagcagcacgttaccgggaggaatttctgccttatatcagcgggaacagccgttgtcagactgaagaagtatcaaaacagtggcgctggcgtatggcgcagctcggtgataaccatacgctgatcagtgctgactgctga

SEQ ID NO: 283335 - DNA, 507 bp, Morganella morganii
atgaatcaaagtactgaacaggggttgaatgccagaataggttttaatggcgatttttatcacgttgataccatgtccgggcatggtattttaattgtggataacctgtttgagtcttgtctgttatcaaaagataccacagcggaaatgctcggtttgtctttaaagaaatgcctgaaacaaagccggatagtcgatccggaagattatgatttttttggctatgaaaaggtaaagggcagatatgaaggatggataaaaaatatcatcaaattacgtggatataaaaataaaaaatcactttttaaacaaatgaataaatgcaatgcaagacaggttggtgatcttattacaataagacctctaaatcacgttaagcttgaagcctggagcggtgatggtatatcagaaactgattatgtcattattccggtatcggcttcagatgaagagttggggaatgccgttatcgaggcgttttcccgctgtaagggaaggcaattctga

SEQ ID NO: 283336 - DNA, 546 bp, Morganella morganii
atgaccatcaatgccaaaaatgcaatgttaaaaaatgacggtaatattatatcatcggaggttaacttaaacttactgcattctgaacgtatttctaattatcaaaagattagtacaaaaaatctgactgctgattataatggtgacttctccatttacaatactacagcagaggaaaaaccaaataatttttatgcccaaaatatgtccattaacagtcataacatcaaccatatgattgacctgaaaaataatgcatatcagggttatctgcgagataataccttatctgtcagtaatgataccggtgccacatttgcaaccggacaattcaatattgcaggaaagcatgacgccgtgcacattaaaaacgatggcataatgtttaccggaaaaatgaatgtcactgccggttcagtacaattctataatgaccattatctgagaacagatgctgactctgcaatacatggtattgttggtgtttatggcaatggttcccggaatgagaacgtgtcagttaccacccataattttgatatctga

SEQ ID NO: 283337 - DNA, 399 bp, Morganella morganii
atgactaataaatttgaagcaatcgaaaaagcatcaaagggtgagatcactatcgaaatgcgccctgtgtatattgtctcaggtgccgttcgtggccgccttacagaacgcgcggcgctgaataaactggcgtcacttattacacagcgtgaattccacaaggatggccgccccacaaatgagcctgacatattagttaaaaatgaaaatggtgacgaggttgtcagacgtggtgaacctaccgcctcattcatggactttaaagaaggcgtacttatttctcttcttgatagcctgagacaggagaaagaaatcgccaagttggaaaagaaatatcaggctgcaaatgaaaaattacagctgctgttaaaagaactcattgtcgcccagaataaataa

SEQ ID NO: 283338 - DNA, 354 bp, Morganella morganii
atgaagagatataaaacagcagtgacaagcgtgataatgctgaccggtttttatttccgggtgtggttgtatacagcaatcgtgatttcactggtaaaagggataaataataacctgcgggaaccgccggtttctgctgaattctgggattcgttatatctggccggtaaattcctggtggccattctgctgctggtattgtcgggtgatctgattcgtttttaccgtaatatccggcggcacccggtaataacagtatcatggcatcgtttttgtctgtcggttgccgcgctgacgggcggaataatgattatcctgctgaccgtcagctattggcagccgttcaccgtatag

SEQ ID NO: 283339 - DNA, 894 bp, Morganella morganii
atgttttctgacttatggggttggttgctaagtgttgctgtatctactggcttgattggtactattgtatattttttccgtaacactctaagtgctttttttacgaaatcaattgaacataagtttgataaaaaactggaaaaatttaagactgaagctcgtaataatgaaaaagaactagagcaaattaggtcatttctcgtatcagttcgtaaagagcgtgattcagtaatccaaattaaaagattggaagccgcagaaatattgctacgtgcacgtcacgaattttctcagttatcgatgcttgttgaatatatgaaaatgctcaatactgaacggatgctcgatgataaaggagatccacgaatttcagaatttattaatcttcttttgaaaccatttgatttagatgaaaaaattaagaatcttggctgtgttgataaaacttatccacgattatacctcaatgaaaaatcattaaaattgtttgatgcatatgaaagtattattcttaatgcagcgattatgatgaaacttttttctttaaatctatctagtagagaaaatcttataaaagaaagtaacttaagtaaaaaaataattgaattaataccacattcaaaggatggatttgacaaatttggtgaaagttatgcatatcattgggcaacttatttctatgatgaaatattgagatcgcttcgtcatgaaatatcgggtgctgatgaactggtgagagatactgaatctgcagagcgtttagcgatagattctcgtcgggcacagatgaatattgttgctttgcttgaacaagtgggcctacctgatactttaataaagtctgatgagaaagctatgcgaagcgcaatcgttgttgaaaaaacattaaaatga

SEQ ID NO: 283340 - DNA, 3339 bp, Morganella morganii
atggttactacactagatgacctactaggcgacggacgactggctcgccttttctctaacgaaaatcgcgcttgtgcgcttcagctatgggtcttgcagattaaatctgaacagtcgactgaactgcgtgtagtctacggtcgcttactcccatacagtcattcaagcaacagttggtccttcagcgataacgataattatcttgtgttcggaaacatcaaagcaaagcttactcgtcttaacctatatatagatagtatcaattgtgtagaacttttaagacaattgtgtgcaggccaatcaatctcagaaataaatgagctactgaggattgagtgcccaagacgattgacgaaacagttcggtgctactgttttgatacccaataatctggtttatcgccctgcctcttatctactcaatcgagatgcgcatgacaaccggtcactttctagtccacatggtgcagctggttccattagtgcttcaattacccaactgagtaaggaagcattatttctgttgaacgaagaatacagtgctgccttaattatagcgttagttaaacagcttaatgccgaaactggtttagattttggcacagtagataccacacgatttggagatcttgagctattagtctttccgacattgaatgaccttgagcaaaacttgttaagtatagaatggattgattcaccgcgtgctctgtccgttcgatttgatccggtacaagtgttgttctttaacaaatttcagttccacttgagcatcgaaaacgatgaccaaattatctcctcgacaattgcttcagcaaatcgagaagagagcggggtgtttgaatatgcgtttcaagtaagtaaggaattatgggaaaggacggatagtacagaactggagatttttggctttacaaatgatagtcctcatgagggggtactctgttgtcggtggcggattggatatgtccgagagattagttttcagggccacatgattagacaaaaagctagtcccgttaaatttgattggcttgaaaaagcaaccaggccagctatgtcaaatcgtgtaaaagctgcccttacggttaacaggaacaacttgggatttggtaatcacattggtggacgagaatctgatccttgggttccgccgaatcgtgaacttcgttctcttttcacacggtttcatcctaccaaatccgaaggccagtttttccagaggtggagtatgggggatggtgaagggcgactgcagttcgtagagtggtttaaatctctactggccaagtatcagcagaatcaagtcgtgattttcgatccttacttcgagactgctggattggggctaatgttgatttgtgccgcagcagattcagattatatagtctttacatcactaccaaagtcaccaaaagtggatgaagatgcgcaggatgaacgtgaacaggttacctcggggcgagtcaataatctgatagccagctgtgagtacaatcgtaacttactaaatcgtattaaatttcgtatctatggactaaaagaaggacgactacatgatcgttacattttgattatggggtcagatgaacttccgattgcaggatttcatttatctaattcgtttcaaaaggcggctgaaaattatcccttgctggtaacgccaattcctgcggatgttctgcttcaagtagaacaatataaatctgcgatggtgaaagaggctatgactacaaagcttgatacgaaggctgagagcccagtcatgcggcttatctttgactcaacagaatcgacttcgccttcgacacatcggcgttacgagcctctcagctttttagataagcttgatgctggccgtgtactcagcttgtggtctggagaaaattcactaaaggacttgagtggtgagcagctaagaactcagctgacggcgttaggcctactaagaaataattccctcgtattgactgatggattgaaaaattgcatcaacaagcaagaaataaatactagggagtttatttcagcttgggaaatattgggtgagatactcgcacattcttccataggaggtactaaagtcagatatcttgagttcaagcgagactttctcgaattcttgatacaatttctgaatggttcgttcaagcgcgtacataataatatggacaaggaattaaccacgttggacgcacgattttttcataagccagtcgaaatattattgcatagttcttatcgcatagaacaactatatcacgcaataaaatacaacactcttacttggtcagaatactttgccataaaatttctatggctgtatgcgccggattcattgctaaatattactgaaacacagattttaactctgccaattgaacctagtgaaaccgaagctgtgaggttgtctctattgagccagattgtcagcgaaatttcattatcgatagagcttgatatcagcaaaattcaacttgaaagtcttatttatagcgagcaagggttacttcgctggatgggacttaatgcgcttgaacggcagttagacacaccggacgaattcgcatcggtactatcattattagaaacctttccttaccaagaacgagtacgagcactagggtggatgattcaccatgcagcaatgaattcgaataaaaaggaaacttttaaaaacttagtagcagcgctatataaaatgttgccagatatagtcatagcagaggatctgcggctcttggttaactctatgcgagggcatatgaaacaattatcatgggctgaaccatggttgtttcaagacgtagtgcttccgttactacagagtgggcgtgtctcgactgagaatgccaataccatatggatgcaggagttggcaagtatgttggaacctaattcaaacaatcagtcccgtttgtttgagctagcccgtgaagggcagactactaacattgcttcgtaccttttcgcctcaagttcccctgaacagagaagggtcagtctgaaaacaataaatgatatattgaggaggcaacgacggataattcaacagccacttgctagcacatcggattggacccgatgggataatgcgcttagagtatcattgtggatacttgcttttggtaaatggagtgagttctatctaagtgcacaaggtacgaccgatcaaaacttagaatatttattaagtgaggcacatagtcttgccatggttagaactatagaggaatggcaatcggaaggtgttggtgtacgtagtgaacttattgcattcctagagcaggtagagaggcttttgagcgaaggttgtgagttgaaaaacgatattaaataa

SEQ ID NO: 283341 - DNA, 582 bp, Morganella morganii
atgaaatctattgatggcgttcattattcaatgaacggaggctatcatgctgaagttggtatttattactggattaagaaattactagataaagtaaaatcaaagaagaaaaacatcattaaaatagaaactctcaacgaattaccaaccgataagctcgtcaccattcaatatatggtaaaaggtgaatcagatgtctatcgttactctagaggattaagaatgacggatgaaaaaggaattctttgtctaggtaattcaggattgtattatatggattttgaaaatgaattcaaatgctcaaaagggaaaaccctgtttaatatattaattgaaaagatatctcctgaaaatattgatctaataaacagggagaaagttacaatcggtgaaaacccattatcatatgcttatttagaggtagctattaatctagaattaattaaaaaagaagattataccttttattttttatcgacagacaactgtaaaaaacttacaaaattacgcaaccatagtacatgtttatctattgataacagcacttttctaaacgatcctaaaaaaaacatcataacttaa

SEQ ID NO: 283342 - DNA, 540 bp, Morganella morganii
atgcaaaaacaactgccggttgcgcagtgttttgtctatgccgcagacagctggatgcgcagcggtaccgataaactgccgccgcatgtgctgaccctgacaactgatcgctatgatgatgaaccggcggataaaagcacacagcaaatccgtcagcaggtcaccttcagtgacggtttcgggcggattttacagcagtcagcccgttttgaggacggtgacgcattccaccgcaataaaaacggttcactggcagccggaagccggaaaagtgagaaagaaacagcccgctgggcagtgtcgggccgtactgagtatgataacaaagggcatgctgtgcggacgtatcagccatactttgtcaatgactggcggtatgtcagtgatgacagtgcgcggcaggatctgcacgccgacacgcactactatgatccgctcggccgtgaacatcaggttatcaccgcgaaaggttatcagcggcgcacactgtacacaccgtggtttgtggtcagtgaagatgaaaacgatacagcggagtaa

SEQ ID NO: 283343 - DNA, 1035 bp, Morganella morganii
atgtcatacggattatacgtgaatccgcagaacggcggaaaacccttccggctggatgattctgattgccagatgctgacaaaactgaaacacgtcctttttaaagattatggaggtagggcttatccggcgagtgagtggacatttaacaaagacaaaaaagcctggtttactccggttccaggtatagagcgttacgacgcttttctggtggtaaaaaaaggcacacaaagtggtggtgtcggagggctgacgggcgcgtggcccgagtggatagatagagcatggcttgctgacggaggattatatgtctggtctcttgggagtcctgtttatcatgtctgggatgacccatatcaggaaaactttgcgtttgatgtatttggcacccctaagcgtacagccgcggataatgtctacggcatacaactgatgggaatgaatggggtaaccacactgtcggatttttccaaaaccggatactgcgtgtgggctggcgaggtatatgcgccaagacacgcaggtatatcggtaccagggatcaacattggtgatgaatatcgttactcaacatacgccagaccaaaatacggagaggccattttaacaagaatgggtgggtcaataagagccgaccgagaaagcacattacaggttgcagtctttgatcatcagccgaatctgtcaaggatgagtgggtggggggttgaaatttataacagcagggggcaggtcacctataacacaaggtacgcaccaatgctcggcggtcaggttcttgacggcaataaaggcgggtactctaaatatgcccgtccgatatacaacataggaacttatggcagttatatccgggaaatcatcaaagagtcgtattttcttaatgcctgcgggttgaaaatatcagacaacaggtacgatgttgtatctttcggtgaagtatcgatgggtcaccagggtattgcgaacggtggctacggcgtcattaatggtgtcttcaatatgcactgccttgatggtgaccgatatttttaa

SEQ ID NO: 283344 - DNA, 294 bp, Morganella morganii
atgaaagatattaattttattgtggggcaaaatatccgtgacttaaggcacagtaatggtttgacaacacagatgttagcccaaatgctgggggtatcacagcagcagatgtcaaggtatgaacgaggtgttaataaaatagatgtcagtattgtatttaagataataaatatatttcatgtttcatatgattctttatttcctcagccagataccggtgattttttacagacaaaacaatcactgctttatatagacccgatgacataccatgatgaatattcgtcaaattaa

SEQ ID NO: 283345 - DNA, 159 bp, Morganella morganii
atgtcacggcaccctttaacgctgatcatcgccgcggtcattctgctgacggcttgcctgctggctggttgttatctgtattcactcgagagtcactgtaaaccgctgccgggtaaccagttggacggtgtgatccactatgagtgtgaagcgccatga

SEQ ID NO: 283346 - DNA, 192 bp, Morganella morganii; identical to SEQ ID NO: 279001

SEQ ID NO: 283347 - DNA, 207 bp, Morganella morganii
atgaattactatgttcacacacttaaagatgcacaaggcgattatgaagtccatcgtgacggatgtgctcatatgccttctgcaccgaacaggaaatcactgggaagctttttcacttgcactgcagctgttcagtcagccaaaaatttaggttttaccccaacgaatggctgctactggtgctgccgggaatgtcatacgtcataa

SEQ ID NO: 283348 - DNA, 420 bp, Morganella morganii
atgaaacgtaagtcagttctcccgccagtggctaaaatgatcactgttgtttttctgatggccatttcgtttattcttggtgctgcgcttactaagacgacagactttgatcctatagagcaaacgaaagtaaatgtttccaatttcctctcatatcccagcgcagcagaatttaaaaatatggcctatttctttaataaaaagaccggggcaggcggggatttgggttacatttgcggtgaggttttcacattcaataaggaagaactgcccgcagggtttaaacgatttgtagtaaaagtatatgaaccacccaaggggctgacacttctctctttccctgttattgaagatgggaatgatatgtttttatctgatcggatagacgaaatttgggatatgttctgccataataactaa

SEQ ID NO: 283349 - DNA, 1179 bp, Morganella morganii
atgggccgctttgattctgatgattcattatttgatgtagatgatgttgctggtaaagtttcacacttggcccctaatcattttatgccttggcataagccacgtaagcaatatattcgagaccggcaatgggtagaacacctagtccgccttattagacaaagtaaatttaagcatgtagatacaattaattacttcggcttgcctggtggagatttgctcgatataaattatatacataagggcctcagtcgcacctcaaaatataatggaaaaaaacttggttttcatggacttatcgataatgttgatgactataataaagctcagggtgagtttacgaagctcctagatatggaggatatatctaaccagtctcgattagataattttaattttgaagaccttattaaacacgactctgcagtatgggcaagaataaaaaattttggaacttatcattttattaacttggatttctgtaataacattttaactgataaaactctgccatctttgcactatcttctgcaataccaaatgcagaaagcagtgggtatgccatggttgctttgtataactacaagattgaataaagatagcgctaacaaaaatatcatggagaaatttcagattgttattaatgaagtcgttcaggggggagctctcggagataaaattaaatcttgttttaacgaagcatatgaatgcatgcgaactttggataatttgaatagcgcagataataagatattagtaaaccagatactacaaatatgtctagtcttatggattttaaaatcagcgattgccttgaaaaataaaattgaattaaaaagcagctttaagtattcagtagatctcttcaagagagagtcagatatgcattcgtttgttttttcatttgagaaaccagaagaagcaatccctgattgcattggtattgtttcggttaaagaaactgaagccgtcaatgttaattacgaagtgctggcttcatctgcgatagataagcttagcaaaactcttgatgttgacgaatatttagatgaaagaccagaggaacttgataaatatgcaaatgaaatgatggagctattaaggaactgtggttatgatgtttctgggtataaaaaattcatgaatgatgaatatggatataaatgtagtctaacttga

SEQ ID NO: 283350 - DNA, 342 bp, Morganella morganii
atgaacaaatatagtgacaaatcagactttgagattaataaggctgtggctgaatgtaaatatggcattggctgtacagggaaaactcaagggggcgatgtcatagtattcactgacagttttactgctgtttttgacccatgcaacaaccctgctgacgcaatgccgattattaaagacaatctcatatcactggagcatgacgggatagcctggatggttagctgcgtacggcatcctgaaataagcgtctgggacggatgtgaaaactacaacgataatttttatcgcaaggctatggaattatttttgctgatgaaggatgcggagaatgaaaaatga

SEQ ID NO: 283351 - DNA, 192 bp, Morganella morganii
atgaaatttaaggctggagataaggttaaggttctttctgatgacgattgctttatatcaaaagacagcatttgcgaagtaattaattacgacatatttagttccgaatgcgtgaaatatgtagttaataaaaacggcaacgcaagcgcatttaaatttcacgaactggagttagtcaatgaacaaatatag

SEQ ID NO: 283352 - DNA, 183 bp, Morganella morganii
atgactatcgaacagttacaaaaagaaaacgaaaagctgaaagaggttttatttgcaggcgctttcgttatgaaaaaagcagttcacaaatatgactttggtattggtatggaagaacaagccaacgactttattaaacatgccgaacggttgaccaaaaagaaaatgccgaagttcgtgtag

SEQ ID NO: 283353 - DNA, 630 bp, Morganella morganii
atgaatccgatatttcatgatgttgagcaaaattccgatgactgggacaggttgcgcacagggaaagtgacatcatcaaacgccccgctattcatggctaatctaggaaagtcgtttggtgacccggcaaaaaaatatgctctgcaaatcgcgctggaaagaataacagggatgaaatctgaatacggatattcaaataagcacatggagcgtggtcacgggcaggagccaatagcacggatgctttatgaggacacgacgttttcatatgtaacaaatggcgggttctatgattgtggagagtacggggacagcccggacggcagggtaagcaatacgaaaggactcattgaaataaaatctgttatttcatcagtacactacgcgacattaacacggaatagttttgaccccgcctataagtggcaattaataagccaccttgattgctccggaatggattgggtggactttgttagttactgctctgaatttccggaaaacaaacaactgataatccatcgtgttcacagggatgattacacgaatgaaattattcaattgcgagaccggcgctcagagtttctgaatttaataagcgatatacagcaaaaaatactctcaggataa

SEQ ID NO: 283354 - DNA, 525 bp, Morganella morganii
atggaacaacaaaaaactcattacaggaaagcgtttgattccccatatctgagtagtgcagatgttgtggacagcgttgacctcactgttaagagagtcacgctggagaaggacaaaacaaaaaagaccaaggacatgtttaacacggcctactttgctgaaaaggaaatcagaccaggtgagcctttaaagccaatgatattaaatgccacgaactcaaaaatgatgcggaaacttaccgggtcaccatttattgaggactgggtagatttccgggtaacaatatacgttgactcagcggtcagatttggaaaccagacgatggaaggtctgagaatatcccctaacgccccgcgtaacagtcttcgtgagcttactccgtcgatgggggctgcatggaataacgccaaagatgcctatcgccgggacggaaatctcaatgcagttattgccaggatggcgatttcacaggagaacatggacaggctgatatcggagtgccgcaatgaatccgatatttcatga

SEQ ID NO: 283355 - DNA, 237 bp, Morganella morganii
atgaacgcatacgcagcacaggatgctcaggaagagcgacggctggagcatgcagcatggcaggatgccgtggacacggaaattagcgaactggcaacggatgcttttaataaactccctcagtgccttctggatgaagtcagcgaggaactacagaacgagatatggaattctctttacggggtaacggcggaaatcagggatcattatgccgccatttatcagcgaaatttgtaa

SEQ ID NO: 283356 - DNA, 303 bp, Morganella morganii
atggaatttaagggtacaccggggacgtggaagtacaccgtaagaaacgccaatgaaataatgacaacttttcacggtgtggtaattggagatatttatttagatataacaacagacagtcagaaggaagacgcccgtttaatcgcagcggcaccggacttgctgtattcgctgcaaaaattactcgccgaatacaaattcacacgctcacagcttaatggtgacactgaagaagaccttgtggatgtcttatgcgttcgcaatgcaatgatagcaatcaacaaagcacttggccgcgaatag

SEQ ID NO: 283357 - DNA, 228 bp, Morganella morganii
atgacagataaaacaggtggttcagcgtttccaatgcttggcagtgtagcctacaactcagattggagtatcgacccaggaatgacgctgcgggattattttgcagcaaaggctatgcagggcttattgtcagaccctaacgccggaatgcttgatgatgacatgaatcattgggctgcgctttcctacaagatggcagacgcaatgctcagagcaagggagaaataa

SEQ ID NO: 283358 - DNA, 201 bp, Morganella morganii
atgaccgaagcagaacagcgagagcactatgaaaaggtaatgggatggattggcaaggtgctgatgtacacactgcatagtcgcggtgatgtcatttgccgggatgatttgatagacgaactcagacagcacaagaaagaagcgccgactaaggaaatcaaggcgttactgaatgatgcgataaaggtggtagagagatag

SEQ ID NO: 283359 - DNA, 132 bp, Morganella morganii
atgaacatgaacaatgacttcaagaaactttttgaaatgcttgatcaaatggaagcttgcgttaacaagatcaaaaatctcaataaaaagctacatgaagcagcggcggcttatcaaagcaaggctgcttaa

SEQ ID NO: 283360 - DNA, 300 bp, Morganella morganii
ttgcaggccattatttttggcgaaattagtgcaatgcttaaaatatctaaactcttgccactatacgaattacaaaaccaaaacccaacatttaaagatattgttgccgctcttacgacatacagagatatcgctacgcaggttgcactcgtagttggctcagtaatcaaggagtctgaactcaacgatgtaaatgagtacttgggattagcatctgctttagctgaagctattgacgcggatgattacgattccttgtgtgcagccatatccgcattggatgagaaaccatatatctaa

SEQ ID NO: 283361 - DNA, 207 bp, Morganella morganii
atggaaccaacgtattttgaaaagtggtgtgcgggtaagtttctgcgctcggtcgaatacatcgttaccttcaggatagagcgacccgacggtattttggggtattcccacaatgaaatagaaacgctgtaccgcgcctacatggccggagttcgcagcagactgccgtaccagacaccaccaaaaggagatgaagatgaagggtaa

SEQ ID NO: 283362 - DNA, 225 bp, Morganella morganii
atgaagggtaaggagacagacttcaaagctctgatgtgggtgtacgcaacagaaaggatggcgcagcgtaagcgttacatcaaatccggtggcggcagagtggactataaccgcaaattgcataagccgtaccggtgcgagcgggtgctggataggttgcttaaaatcgacatgcagagattttgcatggttataaaacagggaggcaataatgaaatggattaa

SEQ ID NO: 283363 - DNA, 183 bp, Morganella morganii
atgaagcaggagcagataaagcgctgcaaacactgcggccacgataatgtaaaaatcggccgtgacatcaaggataaattcgccgcagcacatgtgtgtgttgatgaatacaaactgtgcgtagagcgcggagacacatacaacgatgcaatcaggaactggaacgagaggttcgggaaatga

SEQ ID NO: 283364 - DNA, 180 bp, Morganella morganii
atgacagagaaaacacagaagcttaaaccgtgtccgttttgcggaggtaaggccaaaattacaggctacctgctttatgaaattaaatgtgccaggtgccgtgtgactctgcctcagcgatacgaaagtgacgcaatcgccgcctggaaccgcagaacaccacaatgtgggaaggagtag

SEQ ID NO: 283365 - DNA, 381 bp, Morganella morganii
gtgacaagggagaagaaaacttatatcaaaactgccgaacagaaacaggatgtgtgcctacggatagtccggaatcttcgccagttggacagtttcactgtgaaggcggtttcactggccgctgagttaaaaatcatgatggcgaccacgtttgtcaaaatgatggaagacatcggcagtgtccacgtcagccacaaacacggaaagcaggtctattacgtttttgatgattatgccgtatcaaaaattaaggctcacttcagcagctttcccgataaaaaacgtaccggaacgaaggtgaaagcgtcagtggctgatcgggaggtgcgccgtggaatgtccgcatctggaagtagtcgagaagacaaagggagatggtga

SEQ ID NO: 283366 - DNA, 204 bp, Morganella morganii
atgggtgttgaatatctttattttgttcttgttccggtcgctgaggaatttagaaaacaggcgctatcaaagaacagttcgtttgtcgcgattaatggcggccgcaaatgcagaattaagttttcagataaaacattagataaaaactggcaggcattctgcgctcagcatgaacttaaaaacgacagtcgattggagtattga

SEQ ID NO: 283367 - DNA, 630 bp, Morganella morganii
gtggcaaaacaaccgcgaagaaaatgcctgatatgccgggcatggtttcacccgaagtatgacaatattgagtggtgttgtcctgagcatgggctggagctatcacagcgacgaaggcaaaaggcagcagaaaaagcactggcaacattgaagaaggagcgaaggcagcaggaacgtgaagaaaaagacaagttaaaaatccgcaagttagcagtaaagcccacctcatatttccggcaacaagcccaaacagcgtttaaccaatttatccgactcagagaccgcgatgagccatgcatcagttgcggtgaaaccaatccacctgatttacatggtgggcagtgggattgtggtcatttcctgtctgttggttcgcatcctgagctcagattcgatgagcgcaacgcatataagcaatgcaaatcatgtaatgccggggccggtaaattctcacgcaaaaatgccaccgtcacgcagcagtacgagtttcggttggttgagaggtttggacaggagttggttgactggttacgcggtccgcatgagatgccgcactggaagcgagaggattatatccgaattcgcgatgagtacagagccaaggtgaaggagctgaagaatgcgacctga

SEQ ID NO: 283368 - DNA, 819 bp, Morganella morganii
atgagactcgcagatttaccaaaatacttttcaccgaagagtcctatgtttagcgactctccagccgcaacagctactgattcactttcaattaccgatgttatggcctcgcttggtttggcgaccgcaaaagcgtggatgggtattgaattgtttttggcgaaacacggaatcaatcagccggatgaagcggtggagagcctctatcaatatgcattaactcaggctcataaatacagcgttatccaaaagcttgatgaggatgttagagcatcagttctgcaaatactcgcaaattatgcatttcaggattacgccaggagcgcggccagcaaaaaggcatgccctgattgtgatggcggattcatcgaagcggaggtgttcactactaagtatgcaaccaaggtcagtcatttcgcgtcactgtcgccactgataccaaagcggtttgttggttcagcgcgtgaggtgagagaggtggtgaaagtgacatgtccgacctgcaagggtaaggcagttatcagccattcgtgccggtgcaatggccgtggtgaagtgctggataaagtcgaaagtgaaaaacaaggtgtgccggtatataaaacatgcccgaagtgttcagggcgtgggtattcacgcctgaaatttaccgatgtgctggagcagataaacaaggtggtggcagtcccgaaaacatcgggctatgacaacatcaagccgatatttgaacatttagttgaagaatgctttagagaggaatcgcaggctgatagaatacttcaaaaagtgacaaatggagattcaatttctattaattag

SEQ ID NO: 283369 - DNA, 225 bp, Morganella morganii
atggcgatatttaaccggctgacaaaagaacagataaagcaggattacgaccactacggcctgtttatggggattgtgccaatttatgttggcgaccctaagggggagtgtcgtgtagctgtccggaactggtggcctgactggttacttgatttggcggatgccatacacagcctgaccccatatgactattgggcgataaagctcacaggtcagataaagtaa

SEQ ID NO: 283370 - DNA, 4677 bp, Morganella morganii
atgggcaatgagtttcacgcagccaaaaaggaggataagctgtttcatgagtccatgatagctgatttcgtcaatggcgttgttaaaggtgcagcttatgcagggttattttttgcagcgggcgcgttaactgtcggtaccggggggctggccggacctttagcttttgggatcgctgccgctggtagctttgttttaggtgaagttattgatgaagctgcggattgcgcttccgaatttgttaatgatgcattgaactttattgggtttgggcggggggaagacggaacaattgtttctggttctcctgacgtcaatacaaagagcaaacctgctgcacgtgctgccggtattattccgcatgaaaaattgactgaatccattatggctgatgtgcaaaacccaccaaaaggtaaagcgcggcatctcgcggagggtgtattgcagcgggcttatttgttgactcctcttggtatgggaacagcagcttataattatgcagcagaaaaatttaacccggcagaacccgttaaaaatgatcctttcaaaaaatatccttcaccagaacgtggttttttcgaaggatttttttcaccgactgtggcaaataaaaatatttatgctgaacctgttgatgaggacaaaattacctgcaaaaaatggcatattgcctcgaagccctattatctcgctgagggatcgaaaaaggttcagataaacagtcagccagcctgccgaaatggcgatcgaagcacctgtgaagctaaaattgatcatactcaggaatccccgattgtccgcattggtggtaataaagaagtcgtgcgggatattattagtggacgtaatccactttgtacttttgctggtgaggctcttggtgctgtatttggcgggtgggccggattgatccgcaaagggggaatgccggcattacgtaaatgtttgagtaaagcggggtgttcattagcttcagaattcattagcaatgttgctggtggtttagctattgcagcgcttggtcgtgcctttaatgcaattacccgccccgtccatgccgccaccggcagtaaagtcctcagtggtgatgaggaactcgattttgtgctggaaggccgttacccgctggtctggcaccgtatctatcaaagccgcaatacccgtgaaagccgtctgggaacaggctgggcgctgccgtttgatgtcagtattgaaatcgattataccggcggctctattgaggatgcaccgctgtattatcatgataagtccggccgccgtctgtcgctgggggaactggcgctggggcaggatgcattctatgtggatgaaggcttccgggtttatcgcagcctgcagaatatctttttgctggagtcagataccggtgattatcagctgtttgaaactgatccgcagcgcaacggctggttacgccttgcgcagtcacacgatcgtcacggcaacaccctgttttaccgatacagtccggaagggcaactctgcactattcaggataacagcgggctgattaacgttcagctgcattatacagatgatgggcagcgcctgctctcggtatcacaaccggattcagatagtgagcggacactggtcagttatcagtatgatgaacatcagtttcttgttgccgtcaccggtgctgacgggaaagtgacccgccgtttttcccgggatgatgacaccgggctgatgaacatgcatatcaatgccgccgggttacaaagccattaccgctgggcacagtttgataatgaaacagatgataacgggcagccggtataccgtgtggcagagcactggctgcagaccccggacggcggacggcctgagcacacattactgcactattctccgcaagagagaactctgcgtacagagttgatcggactgggtgaaaccttccgccgctggaatgaacagcatcagatcacggaatttacagatgaaagcggtgccacctggctttttgactgggatcagagccgtaaactgaaaaaagccaccgatcctctcggccatatctggcaatacacctacgatgaacgcggtaatctgaccgctgaaacagatccgaacggcgacagcaccaccacggagtgggataaagattttgcgtttccgctgattcaggtgatgccgaatggtgcggcgcatcactggttttataatgccaaaggggatatccacctgtatatggatccgctggggcatgccacccggctggtatgggacgagcagggggactgtcttcagcagactgacccgggcggcagtatcacccgttaccgctacaatacccgggggcaactgacccgctataccgactgctccggttatcacactacactggcctatgatgatcgcgggcaactggttacgatcaccgatgcactgagccagaccacccgctatcactggtcggagggcgggcagctgctgcgggaggaattaccggacggcagggataaccgctattcctatgacgatgccgggcgtgtcaccgggtttactgacagcggcgacaagaaaatcaccttcggccgtaatatcttcgggcaaatcacagagcgtaccgatccggcgggacaccgtctcggcttccgttacgaccgcttcgggcggctgaaagcgctggtcaatgaaaaagaagaatcataccggtttgaatatgatgtactgcaccgcctgacccgtgagcaggatctgatcggccagcaaaaacagtatcagtatgatgcggggggtaatcttatccgccgtgaggagatccccgcgcaggcgggagaagagccggttatcacacagtatggctatgatgcggcaggccgcctgaccacacgggaaaaccgtgattaccgcacggagtatcagtacggcaaaacggcactgacactgcggcgggcaccgctgacggtctggtcagcggcgcagctcagcggggaggatgtgccgtggcaggatatcctgaaatttgagtatgacctgaacggacagatgttgtccgagcagaacagcgccggggtataccgtcactgctatgatgacaacggtaacctcagcagcacagagctgccggacgggcaggcgctgagttatctgtattacggctccggtcaccttcagcagatgaactggcgggagcgcggaaaacagacggtactggcggaatacagccgtgaccggctgcaccgggaaaccaaccggctctccggcgggcttgaccagaggacggagtatgacagcagcggacgcatcaccgcgcagatagcacggctggcaaacagtacgcgggtcacggcggcaaccattgataagcgttatacgtgggacaaacacaataacctgacggagcgcagcgtcagttacggacagaccgattccccggccactaagggtcactggcattatgaaacctaccgttatgatccgctggggcagctgacccggcgtctgaacgggttcagtgaagagctgtttctgtatgatgaggcagcgaacctgctggggcatcagcggcaggtggcgtttaataaccaggtcaccaccagtgaggaatacgactacacgtatgacggtttcggccgtatggcgcagcgccgggtccgtgacagtgcggtttgccagcattatcactatgatgcggagcaccgtatcactgtcgtgacctttgagcatgacccgcagggaaaccagcgggcagaatatgattacgacatcctcgggcgcagaaccggcaaacgggtctggcagtcagcacaggcacagcggctgaagcagtccccggaaaaccgggcgccggaagagacggtacagttctgctggaacggtctgcggctggcgggggagaagagcagtaaatccgcgcatctgaccctgcattacgtctataacagcggcagttataacccgctggcacggatagaaagctttgatcatccggaaaaacagtcaacggatatcagctattaccacatcgcccttaacggcctgccggaagaagtgacggacagccagggacgtattatctggcacggtgactacagcctgtggggaaaattaaaacgggaacagcacccggcaccgggattccggggtcagcagaatttacgttttcaggggcaatatttcgacagggaaaccggactgcactataataccttccggtactacgctccggatacaggacgctttacccagcaggacccgatagggctgctgggtgggttaaatctgtatcagtatgcgccgaatccggtgggttgggttgatccgtggggttggactacaggacaaacaacaggaggtatgtctagaactacttcaacatggagagatcgttacggtccagcatctatgcgggatcaccatttgattcctcaagcgatgatgaacgatgaagcatttattaaacaaatgaaaaatgcggggattaaagatcccgccaattatattcatcgtcaaatatcacgtataccaaatgcattgcataataatgtacatgcagaaggttggaataaccagtggaaagaatggtttaagaaaaacccagagtttactaaagcagaccttcaaagtaatattaaaaacatgatgactgaacataatataccaaaatcatcgagaaatttcgctaaaaaatatgggtgtaagtga

SEQ ID NO: 283371 - DNA, 210 bp, Morganella morganii
atgggcaaagcacgatttactgaatatcagactatcgccgttcttaagtccgttgaagccggacgtacaatcaaagatgtctgccgtgaagccggtatatccaaagccagctaccataaccagaaagccaaatacggcggaatagaagcgtctgatattaaaaagttaaaagatcttgaggaagaaaaccgacgtttaaaacagcggtaa

SEQ ID NO: 283372 - DNA, 1134 bp, Morganella morganii
gtgaagaaaattttagcagtattaattggtattaccttattgtccggctgcgggccgaaagaattattaccggaacaaaaaatgcagattgaggcattgaaatctgagttagcacagacagaaaaagaaattacagcagcaaatgaaatggataataaatacagtggcggactcatcaaatcactaatcgctaccagaacggaagtgcttggtactaataaggcgttgctgcagcaaagaattaatgctattgagtccggtgctaaaattgagatcgtggttaatggtcagaaggaagatcccgaaaaagcaaaagagattgaaagtgaaattaattctctccgggcagaaatcggcatccttcagaaggatgctgaccggtataccggcggtctgataagagatttgaagctttcagctattgctactcaggaacagacgatagctttattgcagcaaagatacctgatggcaaagtatggcatcaatattacccgtaataaaaagccagcagatataaaagaaaataacaatgttcagacagcgaatgaaataaaacaagaatctcagacattacttccgcctgcggatggcccgcttggtttaagaatggggctgtctgcggaagatattttccgcatgacgggcagagaattatcagaaatcgagggaaaaacaaatctctacgaaacagataaaacacccaaatcaaatagtgaatttgaaagttatatttttgttatatcaccaaaatatggattgtgccaaatcagagctattggtaaggtcattaatacagacggatatggtttacagctaagaagtaaatttgatgatatgagatcgtctctggattctatatacggaaaaggaaagcttacagataagctgtttcccggttctatctgggatgaaccaaggtattggatgatgtctttgcttaaagatgaaagatttcttatttcagaatggaataaaaaaaatgaggtatccgaaaaaaataatttaaatgacattgcgcttgaagccagagctatcagctctgagtccggaattttattcctgcagtatgattttcaaaatagtgaaaaatgtcagtcagaaattaaagaggcaaagaaaagctctctttaa

SEQ ID NO: 283373 - DNA, 633 bp, Morganella morganii
atgacatattcaactgctgctgtcgccaatgcctttatagaaaaggggattgacggacagataccaaacctatccccaatgaagcttcaaaagcttattttctttgcccagtcatggagtttaaggatctttgatcggccattagttgatgagtttttcgctaagtgggactacggcccggtgatcccttcgctatatcattcagtaagagaatacggcagttctaatgtgaacgcccacatttttactcttgagtattcagataatggtcatattgatcgggtaaaccctacggttcctgctgatgatgtatgggctcataggttgatagatagtgtggttaaggtttatggatgcatgccagcaacaacattatcaagaataacccatttgcctggctctgcatggtctaagacaagcaaagaaaaatcagccatcgataacgagttattgaaagagtgcattatcatagaagaaggccgtttttttggagccagagaattcggtgcacactttgatttagatcgcctgcaatgcagggttaatgaccattttgttactgtcccaaacacactccaaaatgttgatgacatggacagatggcttgatggggtcatctctgatggtaattaa

SEQ ID NO: 283374 - DNA, 390 bp, Morganella morganii
atggggtcatctctgatggtaattaagttgggcgtggcatttgcaagagaattaaaaaactacccaaagaaagacaaagaaaaaattctggctttcattaagcatgtgcaagtctatggccttgatgacttggaaggtcgtaacaaaccatctgacgatgttgatagggatgacccactttttcttgagaaagtgagatttgctgttgcgaataagctgtggcattaccatatcggggttgaggaatatgattattcaagggaatatggtgacagaacgtcagaatatatccttcactacataaaccaaatggtagaaagggaaataaagctagttgatttttccggtcacccaccattcagattgccatcgtcatcatacttaaactaa

SEQ ID NO: 283375 - DNA, 390 bp, Morganella morganii
ttgttaacataccgttctgtcgtccctctttttaccaaaagccattttcagttacccgggatcaccgcatttctgctcggtatctcactgccggtttccaatgcaatgatgaataccgcactgggactggttattatctgcctgctgcaacgccgggatttccgtttcacggtgccattgctccggcagccgctgatatggctgcccgccctgatgtttactttgctggcgatctctctgctgacctacagccatgactatggcccggtgatgacccgcaaatatatgaaactgttgtatgtgctgccgctggctctgttctttctgacagacaaacagcgtgttgtgctgtttatccgcggttttttactggcgaatggggggtattag

SEQ ID NO: 283376 - DNA, 471 bp, Morganella morganii
atgaatttatctgctgacctttcatcaccgttactgagtattgtcgttgcggtgtataacggggagaaatttctcccccggttttttgactgtctgctgaaacagactcttcctgtatgggagctgatcatcgttaatgacggctcatcagataataccgcggacgtgttatgcgcatggaaggataaatttccgtcagtcacgattctgacccaaaaaaatcagggcgtgtcagtggcccgaaataccggatttgcgctggcaaaaggaaaatacaccgcctttcctgatattgacgatgttattcatccgcagatgtacagtcgcctgctgcaaattgcccttgccggacagccggatgtggcaacctgtaacggctcttatatttatgaggacggagggaaccccgctcggtcgcctgcgtttcacggggggtatctccggtccggactggctgaaacgcgcacttaa

SEQ ID NO: 283377 - DNA, 609 bp, Morganella morganii
gtgagctgtcagcagccagttcatcggtataaacgtggcggtcatgaacacattgctatcccgaaccaccttgagcgacagttcgcagtgacagagcccaatcaggtatggtgcggcgacgtaacatatatctggacaggtaaacgctgggcatacctggccattgtattcgacctgttcgcaaggaaacctgtgggctgggctatgtcattttctccggatagcaaactgaccaccaaagcgctggaaatggcatgggaaagacgcgataagccatccgggctcatgttccacagtgatcagggtagccactatacaagcaggcagttccgacagttactgtggcgataccggatcaggcaaagtatgagcaggcgtggcaactgctgggataacagccctatggagcgcttcttcagaagcctgaaaaatgagtgggtgccggtgaccggctacatcagcttcagtgaagcagctcattcaataacggattatatcgtcgggtattacagtgaactcaggccacatgaatataacagtggattaccaccaaacaaatcagaaaaccgatatcagaaaaactctaaaaccgtggccagttttagttga

SEQ ID NO: 283378 - DNA, 450 bp, Morganella morganii
gtgccgggctctgaaggatgttatcgaaaaaaagctttaaaaacagtggtaaagcgggagcttgtcagttaccttatcgaacagtattcgatgagtatccgtcacgcctgccgggccttatcgctgagcaaaacggtatatttttacaaaccgaatacccggcgggatgaaccggtgatacaggcgctgacagaggcggcagaacattatccccgttacgggtttaaaaagctgtttcagatcctgcgcaggcagggcaacgggtggaatcataagcgcgttcaccggatctattgtctgctgaagctgaactttcgccgtaaaggtaaacaacgtctgcctgtgcgtaatccggcaccactggcaacgccggaggcactgaatcagagctggtcggttgattttatgcatgatgcgttgatctgcggcaggcgtttcgttgtggtttaa

SEQ ID NO: 283379 - DNA, 621 bp, Morganella morganii
atgaatgttatctatctcggtattgatctggctaaaaatgtttttcagctttgtggattaaatcaggcgggtaaaccggtttataaaaaacgcactgatcgtaaaacgttactacagaccgtcgcgaatattccggcctgcctgattggagtggaagcctccacgggcgcattttactggcagcgtgagttcgaaaaactggggcataaggtaaaagtgatcagtccccagtatgtaaaaccctttgtccgcgggcaaaaaaatgacggtaatgatgcacaggctatcgcaattactctgatgcagccaacaatgcagttcgtaccacccaaaagtccggaacagcaggatattcaggctctgcaccgggcaagacagcgtattgttaatcaccgaactgcgacagtctgtcaaatccggggactgctgcttgatcagggaataacaatcggcgcggcagtctcaagagtccgtcgtgctgttccgcttattcttgaagatgctgaaaatggtctcagcgttagaatgcgcaggacgattgcagaactttatgatctctttaacgatcttggtcgtcgtataagcttttttgataaagaaattgatgctgtgttcaggtaa

SEQ ID NO: 283380 - DNA, 198 bp, Morganella morganii
atgcttgtcgccttttttcgtcatattcatcagtacctgcctgtcaccactcgagtgctgtcgtggaaccagaccaagccatgcggcaaagtgacgaccatttttaaattcagttcctttgccgatcgcggcaacaacagctgttgctgttttagggccaatgcctttaactttggcaatgcgctggcaggcttctga

SEQ ID NO: 283381 - DNA, 1038 bp, Morganella morganii
atgattacaaaaaatgacagcctgacattaaaagccatcgcaataatttgtatcacaatacataattttgttcactggacaaatcctatcggggagaatgaattaaatctcaatgaagacagaataattctactactacaaagtgtatataataaaccatcaggagctttcaattatatattttcatattttggatggtattttattgttatctttatatttatcagtgcttatggaatggtactaaagatacaaaacaaaggaaatgctggtgtcgtttgtttagaacaattaataaaaacagccatattactttgtgctggtggtgtttttatatatcttttcactgggttgtcttcacaagaagtaatggggtttatcgtaagaaaattagccacaatagataacttttcatataaaacggttttttctactatagggccatggtggtattttagtttagcgattcaattatatcttgttattcctgtcatactgtatctgactaaatatatcaatgagtatgttttattgattttatcctattcatctatatatgcaatatatttaaacattataagtgtaagtgtatttgcaactgctattggtcatctgcctgaagttttgatagcctgtattttaattaagaataataaaaaaatatcgcctatcttattcttgatatcgttatgtgtttttatactttctaatattaataattatttctttccatttacatatgcttccttcttgataataacattattcatatataattcagtaaagaaagatgtacataactactatattgctttagttggtgtgatctctccatttatatttgttcttaatggaccaatgagggaatggactatgaataatctttcattgtatgcggactccggatataaagaactggtaattacagtatcatcacttctgcatttactatctgtaatagttatatcatgccttttttattctttatgtaataaggggatggagtggttaaaggggcagactacaaaaatagtgtag

SEQ ID NO: 283382 - DNA, 276 bp, Morganella morganii
atgtatcataaaattcgatttaataacaaaaaccaagtagaaattggtagtgttaaattttctcttcctttatgtgtctacttcaaagatgacaagctcattgaatttggctatgaggatggtttttatcaacgatgcctcgatgatattagccataaatcggataaaaatatcttcgttgcaaaaaaatgcggtgataaaatatgttctattgtatataaaaacttcatttcaaccgagtcagataaaagtgatatcagtaatttatttcactag

SEQ ID NO: 283383 - DNA, 1272 bp, Morganella morganii
atgaaactcaccgtccgtcagatcgatactgctaaacctaaagaaaaaaattacaaactgtcagatggtggtggcttgtatctggaggttaccgacaaaggctcaaaatactggcggatgaaataccggcgaccaacagataaaaaagaggaccggttagcttttggtgtctatccgctggtatctttggctgaggccagggtaaagcgtgatgatgcgaagaagttgatagcacagggaacagaccctaaagccgaacgaaaagacagccaggcaaagaaggtattctcgtttgagcaggtggcccgtaattggcattccagtaataagcgttggagtgatgatcatagtgaacgggttatccggagtctggagcaatatatttttcctgaaattggcgatgcggatatcagttcgctcaagaccagtcaattactggttccggtgaaagctgtcgatgcggaaggaaagcatgacatagcacgtcggttacaacagcggatcaccgccatcatgcggtatgccgtacaaaatgacataattgaatttagtccggctaatgacatggccggcgcactcactgctgtaaaatctactcaccatccggcactgcctcctgagcggttaaatgaatttttaacccgcatttcccgctatcgtggccgcctgatcacacgtatagctctcgaattaaccctgctgacttttgttcgttccagtgagctgaggtttgcgcgttgggatgaagttgatctggtcaacgcggtctggaagattccgggggaaaggaagccgatagagggagtaaagttctctggccgtgggatgaaaatgaaaacagaccatatagttccgttgagtgatcaggcagtttcactatttaaaaaattacaggaattaagcggctcttgcgaagtgatgttcccgaatgaccacgatcccaaaaaagtaatgagtgaaagtacagtgaataatgctttacgggtaatgggatataacacgaaaacagaggtgtgtggccacgggttcaggacaatggcacgtggtgctttgggggaatctggtctgtggaatgatgatgctatagagcgtcaattgagccatatcgagcgcaaaaatgtcagagcggcgtatatccatacatctaagcacctggaagaacgccggttgatggtccaatggtgggctgatttcttggatgccaacaaaataaaattagtttcaccttatgatttcgcgaaacgaaaacgccaaaagacaaaaaataattag

SEQ ID NO: 283384 - DNA, 303 bp, Morganella morganii
gtgttggacattgtttctgatttaaatgaaaagaaaagtgaattaatttctttacatgaagttattgttagcttgagggagcagtcacctgaggttaccctgccacaaatagcggaatggttattaattcatttagctaatgatcctgaatctccggatatgggattcttagcggtaggtggtgagtttgagaaaatatcttttgcatggggaaataaacctaatgagcattattctttgaaagagttattacttgaactatatcgtaactatggatcttggccgggggatataccattttga

SEQ ID NO: 283385 - DNA, 399 bp, Morganella morganii
atggcttatggttttaaacgccaagacataactgatttttttcattcaaagggtaaagctgtaaattttggtttaccaccgatgaattttgaagaagtaaaggaggaagttaatttaatttctttagacgatgccttaagtgaaattcaacgtttaaaggcaaaaattgaggaacttgaaaataaacaacctattttgttaggagtatatagagataatgatccacttttattagctattgaaataagaaatagtgagtgggcaaaatatgatccagaaaacgatcggatgacaagaggaaaccaagaggcgattattaaagaattagaagataataaaaatttctcaaacgcccaagctaaagctattgaacaggtggcttgccctatcaaacgttaa

SEQ ID NO: 283386 - DNA, 1575 bp, Morganella morganii
gtgaataaatacaaaatcagtaccaggctgacggccggattcggggtactcattatttgctcattactgatgatgatcagcgggatctggcaattatggcagacggacaaaaatgtacacaggatgacggcgtttccggtattgaaagagcggattgtggctgactggtatgcggctgtcagtgccagtactcagcgtgtttctgcacttgcgcagagtaccgatagttctctgggggagacctttgcagtcgagaacattaaatcaggtaaagcggtctctgaattactgagcagattcagcgaactggtaaatacgccggaggaggaacattttcttaccacactgactgatatccgggctgcctatgtccgggcccgggacgaagtcacgtcggcaaacaggagaggtgagtatgatgttgccgggcaacggtattccgcagatttcataacagccgctcatgattatctggggatactgaatgagattcgggattatcagcgggacactatcagtctgatgaaatctgatatcgataaaaaaacgacagatggttatatttttctcggattactgggcttcatcattaccgtcgctggttccctgatggcatggcggctgagcctcagtatagtcacgccgcttaacagcgcgacgcggctgaccaaatcggttactgagggtgacctgactgcagaggtctgtatccgtggcagggatgaaactgccggtctgctgcattcagttcaggagatgacagttcggctgcgggatatagccgggaatgttcggcagggcgccgcagcagtctccggagcggcaactctgatgacggaggcaaatacggaactgtcaggaagaaccgaagaacagtctgctgcactgcaggaatctgccgcggctattgagcagttggcctcaacggtcaggcgcaatgcagataatgccggtcatgcggagttgctggttaaaacaacggcagagcaggcccgctccggtgctcagctgatggaaaacgtgattaaaacgatgcgggatattgagtctgcatcggacaaaatcgtggatattatcgctgttattgacggcattgcttttcagacgaatatactggctcttaatgccgcagtagaagcagccagagctggtgagcaggggcgcggatttgcggtggtggccggagaagtgcgtaatctggcacagaaaagctctgattctgcaaaagaaattaaaatgctgatcggtacttcagtacaaacggtggaagcaggacatattctggtggataaagccggagaagcgatgacagaaatagtcagcaatatcctgcaggtaagcgatttggtgactgaaattacagatgcgggacgagagcaggcacagggaatcgaccagataagtgtggcagtgagccagatggaacagtcaactcagcagaatgtgtcgctggtcagtgaagcatcttcagccatgttgtcacttcagcagcaggcagaacaactggagcaggtggtcagtatattccggttaccggatgattccggaatggctggtgaaaaaaatgacggatga

SEQ ID NO: 283387 - DNA, 171 bp, Morganella morganii
atggtaggtgttattaacgtgatttttaaaaaagctgaggatttatgtgggaagatagatttgaaagtgcaactgatagtgggtttaaacgagatgaatatggacgggatcgtgccagaattattcactctgctttttttcgaagattacaaggtaaaacacaagtattag

SEQ ID NO: 283388 - DNA, 330 bp, Morganella morganii
atgtgcaatcaacaagatagcaataccaatcaaacagaagctacctacagaatttattcaacattcgaaaaaaaagaagatgccttacgccaagtcgtcgattttttttgtaaacaatatgaatatgaatatttcgcgataaaagacaacagcagcaaacgtacctacatcacaggttcatggcctttgtctttctatgagtccactaagaatttcgataacaagaaagatacccaattaaaataccatcacgatctcgatgctgatcaatcttatcagatcgacacagtctgtttgtttcccatgaataacatcattttatatctctaa

SEQ ID NO: 283389 - DNA, 1035 bp, Morganella morganii
atgtgtagaattaattcaggaagtgttagtttactcaatgatgactctcttagatatattaaaacgctccccgataactgtattgacttaattgccactgatccaccatattttcaggtgaaatcatgttcctgggataatcaatggccggacatcccttcttatttatcatggctggatgaaatgatggctgaattctggcgggttctgaagcccaatggcagcctgtacttattttgtggttctcggttggcagtggatacagaattgttgttacgcgagaggtttaatgtattaaatcatattatatgggctaaaccttccggtaggtggcagagacaaagtaaggataagctgcgtagttattttccttcaacagaacgaattttatttgcagaacattatctcggaccaactaaagggaaatgcagtgaatttcatcagcgacagaatgaactgaagaaatgtgtttttgcaccactgattaattatttccggcgggcaagggatgctttggatatcacaataaaagacatacaccaggcaaccggaaaacagatgtcatcacactggtttggttatagccagtggcatttaccgggagcagatgattatcaaaaactacagttactttttcagcgggtagcggatgaatgccgacaggctaatctgctgaatcgggattatgctgacttagttagtgaacagaatagattgcggaataaattttatgttcaatctgaacagaaccagttactccgccgtcatttcactgtttcagcacatgtaccttataccgatgtctggacatttccgccggtggctttttacccgggtaagcatccctgtgaaaaaccggcggatatgatggagcatattattaaaaccagcagccgagagggtgatctggttgccgatttctttatgggatccggcgctacggtaaaagccgcactaaaacataatcgccgggtgattggcgttgaattagaaactaaccggtttgtacaaactcaaaatgaaatcattggttga

SEQ ID NO: 283390 - DNA, 1251 bp, Morganella morganii
atgaaaacaaaaaagaaaatattacacctcgctattctgtctgttattttcaccgcagcgccttcattggttatggcagaaacattctgtggtgacagaagcgatatcacgtacggcggaggcacaacactgaccggagaactcaccgcgaaccagtgctatgaggttggcgcgtgggttgtcggtgatccctcagactatgtcgggatcgccaaagacctgactctgctgagcggcagtaaactcagcgtactcggcctgtttgaggattctcaggttcagggcggcgctgaagtctggattgataaaacaacccatattgcctgggacggctatgacaccggtttcccggccaccggcagccgtattgatattcagagcggcggattaatcagggttctggacggcggaacattaaaagattccgtactcaacggcggaaccgtttatgtcagtaataccggtaaagcagatgatccgggccagtctgtaaataatatcgtcaacagcggcgggaaattatttatttacctgggcggggagtcaaccggtacacaggtcaatgacggcggttatgaatatgtccagcaggatggtaagtccctgaatacggttgtgaataacggcggtgcccagatgctgaaatccggcgggtttgcggacagcaccattattaatgacggcggattacagcaactgcacggtaaaggttttgccgataataccctcgtgaacaccggggcacggcaatatgtggtcgatgattctaaagcaacgaatacaactgttgacggcggccagcaatatattttccgtcaggatgcagcagccactgccggtattgcggaatttaaccggataaaaaatggcggcgcccagattattaaaggcggcggacaagccattaataacgaattatatgacaccgccgtacaaagtatttacggcggctcctccgcgacagataccacgctgaatgatcgtgcccaaagctggctggcggccggcgcacaactcctcggcgtcactacggttaatcagcagtcgcaggtacagctgactaccggttcagaagacaaactggcagcggatgccggggcttatgcggaaaatatcattttatccggcccggacagcaccctgatggtgatcaccggtgataccgggaatgcggcctttgccggttcgctcagcggacagggtccggtttgttgcgccggtcaacgccgggtacagccatctgaccattga

SEQ ID NO: 283391 - DNA, 210 bp, Morganella morganii
atgaaaacggaagaaaaaaatagtcaattacttacaccatcagaggtttgtactttgctgggtggtatctcattaaaaacattggcagactggaataacagacacagacataaaaaactgttatcccctattcgcttttccaataaacatgtacgctatgagtacaaaaatgtcattgcttttaaagagaagtgccgggctatttactga

SEQ ID NO: 283392 - DNA, 180 bp, Morganella morganii
atgatatgtgaagaatttgatgagattaacgactcgatgaagggttcatcgagtcttatgaaaaacaaggtgggggcacaaaaggaaaagggggcatttataaagatgaaacaggaaaatatgtatatttattctgtctcttatacacatctgacgctgccgacgatatgcagtgtgtag

SEQ ID NO: 283393 - DNA, 207 bp, Morganella morganii
atgtggacgcttccggttatattccctcagccagtgttttgtgatctcccgtacttcagtcagtgtccggaacagataaaaatccagtatttcggtccggtatgtccggttaaaacgttcgataaaggcattctgagtcggtttacccggtttaataaattccagagttactccatgctcttccgcccggtgtgccagtgtcagtaa

SEQ ID NO: 283394 - DNA, 924 bp, Morganella morganii
atggctaattcaggaaaaagtcgcttagcggagcgacttgtcgatattctgatcgcccttcatctgcatggcgtgattgatcgccagacgctgatgaagaaattcaacattactgagcgtaccgtctaccgggaccttaacacgcttacccccatcgtcgaacattgtggtgacggtcaatatcgcttgattgaaggcatgtcgaaccgcgcgagacgtggccttcatcacactctggcaaccctgctcgatgccgatagcgttttcccggatcgcggcatcgatttctggcaaaaactcgaaggcaggttggctgagaagaacattattattggtggtaacagtgctgaacacactgttgccacggataccaaacggtatctgggagtcatcgaaagagccattcagaatcgtagcgtctgccagctcacttataaaggaaagaatcgcacgattcaaccatataaactgctgaataaaaagaatatctggtatttacaggcgactgaaggcagtaagttaaaatcattcacgctgagccaaattagctggttcgaaacaaaatcacaaacctttagcgccaatgaaaagacgctggcacttctcgataaatcccccgatccctggcttagtgaagttaactttatggtcacattgttcgtgaaccatagagtgtcgaaatacctcaaacgccgggatttattgccatcgcagcatatcattcatgaggataaaaatggtatcaccctcacctgccaggcttctcatgaaaaccaaattatgccgctgattttttactggttacccaacatcgacgtacttgaaccagcatggctgagatccaaagtggttcacactctgcaaaactacattaccacggtgactgcatcgcaaaacgcacaggaaccgaaatcttctttctaa

SEQ ID NO: 283395 - DNA, 1086 bp, Morganella morganii
atggcattaccattgatcattattggcggcgcagccatcgctagcgcatggggcggcaagaaagcctatgacggctatcagaaaaagtccgaagcggaagatattcataaccgagccgaacgccgctacaaagaccgtaaagatagctttgatgaggctaataatgtctcctcgaccaaactagagggacttggcgcgaaagagctgcaaattggtagcgagtttaaagagttccacaccctcgcacaagaacttctcaaagccatctcgcacgcgaaccaccaagaaattgagctaaagatcccggaacacaaacttaacagcattgagcggctggccatctccgctaccgaatacctcggtaccgttgtaggcgcaggcgtatccggcgcagcagcaggttttgcagtgtacagcggcgtaatggcttttgcggccgcatcaacgggcacatctattgcgaccctctccggggctgcggcctacaatgccaccatggcagccatcggcggcggttcgctggccgcaggcggttggggtatggcgggcggcgcaatggttctcggtggcgcagtagtggcaccgcttatccttattgcgggctgggcctacgattctcatgccacaaaggccctggaaaacgctaaagaagcctcacgccagattaatgaagccatcgataagatggatcagtcagaagcgcatctgactcgcgtcaaccgatacgtggactcaatttatcagtcgctggagcggatgcacggaaccttcactacgaactatctggcccctctgaaagagatgcacgccaaaattatggagcgtcatgtcgggcacatcagtgagaaagagagcgatgagtgtgtggccctcatccagaacggctacatgctggcagctatcatgacaagcatcatcactactccgctttttgaaccggtcaccgatgctagtgacaaagcggtcatcaacaacggcgtgattcagcttaaaactgatgaaaacggcattaacgtgctgaactcggcggcgctggataatgtcctgagcaatgcggacgccgagtacttcggcaagtttgcctga

SEQ ID NO: 283396 - DNA, 1578 bp, Morganella morganii
atgacaactgcgaccaagacgttcgactggggggaggagctgcatcagacggtggtgaaaagcctcaccacctcctttgggctcgattttctgctttttgaagacaaaatcggcggcgacgtcgataccattcataacgcccgtaaaaatatttacgccactgacgctgaacgggaaaagtacgatcagcgcggcgaatacaactcgacggagtaccatcatcacaaggactacattgctactaaccgcgaaggcaaagcgaagcgagaagctggtaccctgacagatacctacaccggcgagacctttgcggctgacgcgaagaccaacctcgaccatatcaaatcagccaaagagattcacgacgatgcaggacgcgtgctggcggaggtgaacgggccagatgtagcaaaccatcgtagcaatctgacccacaccaatgaaacgcttaacaaatccaaaaacgctaaaactatggacgcgtttgtggaaaagctgagtaaagactaccaggcgactcaactggaaattgcatctctgcgcagccagtcgtcactcacggtgaaggaagaaaaacgcctcgcatcccttgagaacaaagccaaagccgatttcgatcgtatgcgcgaagccgacgagaaagcacgcgaacagtacgaatccaccgtcaatcaggcttactacggtagcagtaaatttgccaacagcgtggcacgagcctccgctttaaacggcatgaagatgggcacccgtcagatgatcggactggtactcgccgaactatggtttgaatttcgcgatcgtctgccggagatggtgacacgccatcgggcgcattttgttgccagcgacctattaagtgatataggcgatggactaaaggctatctgggcccgtatacgagcgaagttcagaacctttcttgaggcattcagagacggtgcgataggcggcattctttccagcgtcaccaccacgctgttcaacatcatgttcaccacccagaagatgatggtgcgcctgatccgtgagatgtataacaacctcatccaggcgttcaaaatcatgattttcaaccctcagaacctcacgacgggtgagcttgcaaaagcggtaagcaagctgctggcagcaggcgttgcggtggcggcaggtgtgatcatcaacgaagcgctggtaaaaataatgatctttcccttcggccctgaactggcggcattctgcggcgcactagttaccggtctgctaactgttgtgatgaactacttcctcgaatacagtcccatgatgcaaaaaatgtgggcgtttctggataagttcaaagacaagtatcaacatgccgtggattactaccgcaaagttaacgtcgagcttgaccgctttattcttgagttggcctcacttgaattcgcgatgaatgccagcgaattaacgtccttctcgcagcaacttgctgcagtaaacagcgaagtagagcgcggactgctactgcgtgatgaggcggaatgtcgcaacattgcactgccgttcgaggcgggcaatatggattcggtcagaagctggcttaattcgctatga

SEQ ID NO: 283397 - DNA, 396 bp, Morganella morganii
ttgcgcgcccactatccccgatccttcatcgatatcttctgggtacgggagcatggcttagcagcggcgcagcactaccactgtgtcgtgataatgaatggcaactacatccagcaaatcttatttggcaggatgattgtttatcttctccagcgtctggcaggcgatgcgatttatttcgatgaactcctgccagctgtactgctgctggtaattgaccaaatattgcttgtcgacttggcagacgagagggcggctatcgtatatggtgcacagtctggtctggtcatcgtagtgacggcaagcgccgtcaccccggtcgagaaattgcgtttctggcgcgagcgaaaccaggcggcagcaggcgccgcactggttacagggaaatgcgggtga

SEQ ID NO: 283398 - DNA, 150 bp, Morganella morganii
atgaaagaggaagtgaaacggttaatccgggccagtctggggaaccgggccaaagagggactggtggtcggttttattgaacacaccgatttcagtgacctgccggataaagaaagtatcattgaggccttctacgcctttgctcagtag

SEQ ID NO: 283399 - DNA, 384 bp, Morganella morganii
atgaaaaagattatcgtattaattgctttgttgatcttcggtagtttctcagtacaggcggctggacaatacccagactgtaaaaaggattacgacaagcagctggttctcaacaccattaagaaaaaccacaacatcaaataccaaatgcaacaaggctgggaagtcaagaagctttggaaagaacgttctgcgggtttagtgaacccaaccgctggtacaaaggaatgtacggcctacagtaaattagttaaacctggacaccgtatcgaaagactcatggatgtgagttattcagtccgttatcgtaatgatggtactgtagaaactcacgttcacggtttcactatcgttaaaaactttattcctaaaaacaaacgttaa

SEQ ID NO: 283400 - DNA, 237 bp, Morganella morganii
  misc_feature (84)..(93): n is a, c, g, or t
atgaataccactgataccaccaatgccccttctccgcttgacgaaccacttgttgatatgaaattcatcaccaaatttaccggnnnnnnnnnnaccggattaacggacaagtggttttacaagctgatccaggaaggcctgttcccgaaaccgattaaactgggacgtagttcccggtggcagaaaagtcaggttgaaacctggttacaggcccgtattgcgaagtcccttgagtaa

SEQ ID NO: 283401 - DNA, 579 bp, Morganella morganii
atgaaaacgtataacctgtattaccagcaaagaacagagagtgtgattaataatgctctcagtgaattaacccgcattatggcactacgtgttgatctgcgtttaccacccgattatccggacagcccggatgactctaaagtaataacccgtttctttgattctctgaaagctaaactacgttatgacacagtccgtaaagcgtttctctgggggcgtaatctcaataatccgctttattatatctgggtacgtgaatacggtgaaattaataaccgcaggcattaccacctggtcttattcgttaataaagacatttatcattcaccaggagtttataacgggggaaataatctggcctcttttattcagcaggcctggtgcagtgccaccggtttagcctggccggtgcattcccgtctggttcatttccctgagcacggtgtcgtttatctcgacagaaacagccctgagttacctgcacagctcgcagccttaaaacaacggacggattacttagccaaagatcataccaagccttaccacgatggtttccggtcattcggaaccagccggtaa

SEQ ID NO: 283402 - DNA, 387 bp, Morganella morganii
atgaaaaagatgataactttagcaatactggcattaggtatggctacagcacaagcagcgacgaagattaaccctggggtgttgtgtagtattcctcaggttaaccgtatcttggtagaagacgtaccggctaacgtagcttgggtagggcaacacggggaaggttacaaaggagaaatcgtcgcgaagggtaaagctatcctgagtaaccataaagaaggtaccgagttatgtatgactgaactcgtttaccatcgcgaaagaagcgaagaactgaagatgaacctgctttacgagattacgtggaaagtgggtgagaaaccgttcagtggtttcaacatagttatcggacctgacatggcatatcgttttaacaacaaagggtaa

SEQ ID NO: 283403 - DNA, 378 bp, Morganella morganii
atgaaaaaggttatcttaagcttagtgttagcattggtcgggtttaacagttatgctgagaaacccaaagacccttgtcgttctctggccgtgcttcaggaagtacgaacagtcgtacctaaaaccaaaccttggtatgaccgtgaaatgattggttataccaaaggtaccgtggtctctggtaaaacgttaatgacgtttagcgaccatcctggagtattgtgtgaattcactattatctacaaaggcaacgaccgctttaaacgtatgacctttggtgggtctcttcgttataccacgaagcctgatggtcgtgttgaccaattccaagttgttatcgccgacagtgttgaactgtatcaaggaaacaagaaatga

SEQ ID NO: 283404 - DNA, 741 bp, Morganella morganii
atgaacagaaaacaatttatcatgagccatggggcgagttgtaataattggacatggagttggtcatttatcaatcatgataaaaaaatggttatatttggagcctgggatgtagagcgcgaacaagaacgagctgtgatactgcgtgaatcctggaaatataacactaataacaagaagcaacccggctatactcaagcaattgagcatatacgatttttaaatgaaggttacgagctttacacatttaatatggtatttgcagagcatcctgaaaatccgaatattgctgtgatagatgattttgaacggaaactgaacaagcgctaccttagaaaggaaggtagtatttggtatgcggattttttaccaaactcatatccggatgaaattccatcttcagacagttatattgaaggtgcgaaaaaacaagttactataaatgcgtatgaaagagatcctaaagcaagacaggcgtgtattgcttatcatggaactgcatgcaagtgctgtggtttcgattttgagttagtatatggcgaacatggtaagggatttattcatattcaccatatcagacctctttacatgataggtgaggactataaagtagatccggtcactgaccttattccattatgtccgaactgccatgcaatgattcatcgcggtagtaacgttttgttggttgacgaattaaaaagtatactgatcagtaatgaaataaaaatcaacttatga

SEQ ID NO: 283405 - DNA, 330 bp, Morganella morganii
atggaaacattcacctggaaagtaaaaccgggcatgaacatagagagtgagccccgtgttcgctctgttcgttttggtgatggttatgagcaacggcgacctgatagcctgaattcggggcaggaaaaatacagtattacattatctgcaaaaaatacagatgcatatcaaataagaaattttctggaaaaacatgaaggtgttgctgcatttttttggacaccaccatatcagagtcaggaaataacggtgttatgccgtaaatggtcagttgtggtggacctggtgcgtacggaaataacggtggaatttgagcgggttcttgtttga

SEQ ID NO: 283406 - DNA, 348 bp, Morganella morganii
atggctaaaaattatcagcaatcaggaggaacgattgaagtctctaacaaagggactgacgttataaaaagtgggtctgttgtgatggtaggaacattagctgctgttgttattgccgatatttccgcaggcgaaacgggtgacggatttgcagagggtgtttttcggttaccgaagaaaggcggattttcacttaaagcgggaacagtcgcaatggttaaagatggggttctgactgataccggaggtacgactatcggggttgtatggggcgatgcggcagatagtgccccgactgctgccgtcaaaataaatatgttccttcctggtgcattgaagggtgggtaa

SEQ ID NO: 283407 - DNA, 357 bp, Morganella morganii
atgaacacggaatatgttcccaggaggaacgacattgtctggctggattttgagcccaccaaaggaaaggagattggtaagtaccggcctgctctggtactttccggtgaggaatacagcagaaaaacggggttggtaatttgctgtccaatcagtaccagcatcagagggggtattactgaagttccggttaataaccttgatactccgtgtgttgtcgcagccagtctgatccagacgttatcctggaaagaccggaaggtgaaatttgaatctgaggcggaagaaggtgtgtttgatgatgttctggccagaataatcccgctgattggtgccggatacctttttgatagttaa

SEQ ID NO: 283408 - DNA, 246 bp, Morganella morganii
atgagtataaccataaaaaaatggggaaatagtcagggagttattataccgacatctatccttaagcaacttggtatagaggcagggcataaattggacatgtatattgaaaacggaaacttagttttgtcccctgtaagaaaaagagttattttttcagaggattatcttattaaaaatatgtctgagtataattcacacgctgatgaattagctcagcccggcggaacggaacttggcgaatga

SEQ ID NO: 283409 - DNA, 261 bp, Morganella morganii
atgtcatttaataaaaaacaaacatcaaagaaactggcatctcaggctgcacgaattcttaaagataaaacggcatctccgctaataaagagattagcggcctcagtactttctcaatcgaatacgacaaaacagacaggtgcagatatggaaacactcgcatctgaggttttaaaaaatgaacaatatgattcagtcataaaatcatttgctgcttctgcgttgtctcaggctaataaggaaagaaccagtagaaaataa

SEQ ID NO: 283410 - DNA, 321 bp, Morganella morganii
atgaccagtaaaattaatgagatgcttaagttctcaagggaactggaggccgccggtgttactgatggtgagtctgcgcgtcgtattgaagctcgggtaaaggcccgtgaacttgaagcccggtatggtcaaccggcacctatgacaggtgatgatattcgccgcattcgttctcagcataatatttcccagtcttcacttgctttgattcttaatatgaccaaagaaagtgtatcaaagtgggagcggggagaaattaaaccgaacggtgctgcattaaggctcttgcatttgattaataataatcagttaaaaatataa

SEQ ID NO: 283411 - DNA, 402 bp, Morganella morganii
atgatgtcagtgaaggtatacaaaacgaatatatttagtaagaaaaatatcaaaaacatggggttgtcggattcaactctgatgaaaattgctttagatgtgatgtctggcgtgtatgaggccaatctgggaggtggtgtgataaaaaaacgcctcgcacttcccggaagaggtaaacgcagcggagcaagaacgataattttttttaaggctggccagaaccttttttttgcagatggttggacgaaagcaggtttgtgtgcaaaaggtacttctgcaatcagggatgatgaacttgagtcttataaagatttggcaaaagacctgttgtcactgacaaaagctgatatagaaaaattactcaaactcactctattggtagaggttaaaaatgaccagtaa

SEQ ID NO: 283412 - DNA, 1011 bp, Morganella morganii
atgaacagtgaaagctatgagcttgatgaattactgaaagtgaaagacctgaggaaagccggtgtttttgtgttttttatgtcaaccatgaacaagttcaaatgggctgaagataaatatttttccggtgacagaaatgacaagtcacgaataaaaggtttaattaatgacattattggcatgactgacaacaattacagtaactacctcaccaacacggctttgctggatgttaataataaccttgtcagcacagataaactcgaatggataagagagggtgatattgccacagcatattgctgggccatgttaaataacataagaaccataaccagcaccaccaatatatatactgataccatccgtaaagtcagggcaatgaatccagccgccggcagatggtcagataatactgaattcaggtcattacctgcatcacagcaaataagccacattaaagataaattaaaaatcaaagaaaatcatgtcagcactgacgaaatgtatcgtgatttccaggccatctttgaccatatgtacctgatgcctggtgaaaaagaaaatattataaatatgtttaaggataaatggataaagtcattcactgcagtaaaggatataaagtggctgagtaaggatgatgatgatgcctgtaactgggcatggagttacatttgtaactattccgttgataatataaaaataaccatccggcccctccggttctttaatcctgaaagtacgcaggataaatatatttgtttttatgctgccctgagagcctggagtgataaccccggagaaaaacggtatttcctgtattctcttaagaaggcatggcagcagcgtgctttccggaaaaaacaaaaaaataagaaaacactgagctgcagtctggatggcgaagtaaaaaaacatctggaacaattggctgaggcttatgaaatgacgattactgatttggtgacccggttaattgagaatgagtacagagcaccgaaaaaataa

SEQ ID NO: 283413 - DNA, 1020 bp, Morganella morganii
atgaatgataatataacctgtgaaatactggcgctttcacaaatctacaataacggtacagagattacctatgatacaacagaccgagagttattccggttgatagcgtcacatactactgcattaattaaaagaaagagtcagcctgcacctttcaaagggtactgctttggtgatcaattacatatcaaggccactaaaaccggtcagttattttatgaattaatacaaaacattctttctatttcccgggtaaccggtaacaggcataagttacatccggttattccgctgattgtttctcttgctgagaaatatcatattcgttatgttccgatgctgtcggaatactatcctgactctgaggaggatattaaacagctaaatgacgcctattgtgagtttattcagtcagtggacagcaaggagtataaaaacgctgtcagtacctttaagaacagtgcccgcaagaattaccggttctgttgccgctatattgaaaacctgtttgagcgccatgcaaagctgttggtggtacggacagacctgtcctacggaaaacgggtaagtcataaagttacagcccaggatttaacccgtcaccggattgccctgtaccaggcaatacagcggttacccctgtttaaacactgtgtcggttatatcctgaaactggaatacggccgtgagaaaggctttcactaccactgtctgtttttcttcaacggccagcacgtcaggcaggatatcacggtagccagactcatcggtgagttttggcaggaaactatcaccgacggacaggggatctactttaactgcaaccgctataaatcagactacccagtctgcggtatcggcatgctgcaccgcagtgagagcagccggcgggaagggctgatgactgccgtgaactatatctgcaaaacagaccagtgggtgaaactgcaggtgccggggatcgaccggacattctggcggggaactatcagaaacaaacgtcgtaaaatacgccggtaa

SEQ ID NO: 283414 - DNA, 279 bp, Morganella morganii
atggataaattcattccaccgactgctgaagagcgtctcgcgttattaaatggatatagtgagccgtatgatcgtctcattcgtgaaaaagagcgtcagcacattacctcaatttcccgagccacagcatatacactcgaaaaagaggaacgctttccagctcgtaaaatgttgggccgtaattcctgtgcctggctgctgagtgatttgcttttctggattcataatccaccgaaagtagacaacgttaataacccgcatagccgtaaaactgcgtaa

SEQ ID NO: 283415 - DNA, 795 bp, Morganella morganii
atgaaaaaaataaatgccttaactggcagcggccaaactcaccctgaaaacggacttactaatacctttgataatttaattcctgttgttaataacaatattgacgggaaagaaattcagactgtaagcagccgtaaattacactcattcctgaaagttgggcgtgattatacgagttggattaaaggacgaattaaacaatatggttttgttgagaatgtcgattatatcattgtggaaaatttgagcgccccaaaacgggggagcgcaaaatttaggcagcagattgagcatgattacattgtcagcctcaacatgggtaaagaattgtctatggttgagcgtaacgatcagggaaagctcgcccgtcaatatttcattgagtgtgaggaacgattacgcaggattgcaccggaagagcatgaggcagctatacagaactggcgtaaaaatcgggttgctgcctgcgaagatcataagaacatggccgatgctatgaaaggctatattgagcgcacaggcgacaatcagcatggttttgcctacagcaatgaatgcacatacctcaacagtcttgtgttgggaatacacccgcgagtttgggcaaaacagaaaggtattcacgtaaaacaggtacgtgaccacatgagtatcgaccaactggctctgctggcctatctggaaagccgtaattgtgcattgttggatctggatactctgacggcgacccgcaaaataaaactcactgaactggctcaacgctggctggttcagcgcatggaggcgaaacagtga

SEQ ID NO: 283416 - DNA, 174 bp, Morganella morganii
atgtcaacaaaagaaaccaaagaacgccacgtcgtgcaattgcgccttgataaagaattgtctgagcgcctagctatagccatgaaagaggatggcgacgataacaaatcgggatggatcaagcggcttcttcgtcgtgaacttgataagagaggcattgaatccaaaggctga

SEQ ID NO: 283417 - DNA, 327 bp, Morganella morganii
atggctgatatctataaccatttaatccgccgtgatatggattcaatgagcacggacgaattacgggatttacgtaatgcctcatcggacacgcttgatggtctgatggctaccttaaaagtcatgggggaatgtgcattttgggcatgtgacagtgaaaattacagtgatagccaggcaaaagaagatttgcaccgtatcagtgaatccctgatgtatttaccacggatcgcagaggctttagctttcaatgctgacgaggcgcagttcaaaatttaccagcgtgaaggcttcccgtacacagaggtagacaatggcaaacattga

SEQ ID NO: 283418 - DNA, 1065 bp, Morganella morganii
atggttgagcaagaaccggtaacaacttatcggcgaagaaccgttcattataaaagagccgttattggaggatgcaagcgtcatttacaaggcatccttgaagaagttttaggtaaaggtggtgtttttgagctggcggccagtagaaaagaacaaattgatatcaagaatccaacggcaggctttcattttattaataaaagtcagcattatgaaagtatactttttggacagtttcttttatttgagcctggaaaaacgcaagcaactatcacgatggatgatgatgcctcttcctatgaaataaaccctattacaacagcatctctgaaaaaaaagaaaggtgataaagatttagataaagaatttgttgaatcaattttatattttggtgtttataaaaatcatgttttgattgtgcaatcagcagcattaagagtaaaagaattcgaatctcacctaaatcatcttttggctaataatagcggaacaacaacaggcataacgtcaattatattgcaggataaacctgcaaatacaatagtgaaaaaattgaaagaatcaccagtgaaaagtgtggttctcggtaggtcgcctattgaatccgaaactatgaagcttaaccctaagaagagtccggaaaaagttgaaaaagaatttaaaagattagaatcaaaaactgttcagtttaaaccggctggaattggtactaaaatacttaatacggtcttaggtgagggctgggcaagtgaactaaatttagatgattcacttgatgaagctaatttgaatgttaagcttgaaataagctacaatcgaaccaccacaggtagtgggcagtttgtgttggatagtatagcaacgtctttacgtgatcttgataatgacagtgttagggttgaactcaagaatggcggtgtgataactgggaaagaactcaaattgtcagatgcactaagtgttcaattctacgatggttttttatcagaggatgatctgtatttaaaaatgtttagttggctgaataataacatattgagtggagaaatagataatagggggtaa

SEQ ID NO: 283419 - DNA, 486 bp, Morganella morganii
atgaaaataataagtgcatttatttatatgttcttatcttgtttggtaggagcattgtgcttatatggactaataatccactttggagtggataaaatgtctataccctctccggtgcttactgtattaatattgcctttagcctattgctgtcaagcaatatataaattgagtgatcttaaagaaagtaaacagctatcaaattcagaattaaatagactttcttatattgttgacataaaaagaagaaggctgttttcatgtatagttttttatatggtatctggtctatttattgctatttccatgatggttagtgatggaggtgttgtatttaagactataacgttaataatttctggtgggttgctgggaatagctgtttatactgtttttgttatttattctcttatgaatgaagtgactaattttaaagctaaactaattcaagaagaagagaatatacgacacagaaaaatggattaa

SEQ ID NO: 283420 - DNA, 165 bp, Morganella morganii
atgaaaatagacagcaaagccattctgctgacacagacgcagatggacgcattacggaagatccagcaggaagaacacaaccggtcaggactcgggattaagccgactctgcatgaagtggcccggaagctggtggacaaagcactgaagcaggtagaggggtaa

SEQ ID NO: 283421 - DNA, 702 bp, Morganella morganii
atgaagcctgtaatatcagtaaatggtaacgaacttggtttgttatcatcagttacctatgtccttgaaaaaataattgatatgagtactctcccggaggatgaaaataacagtacatactggcacaaaacacattattcagtagagcatcctaaaatatgggataaatatattgtttttcaccgtgatgcttatatcgatggtataggagcatcaatgctgagatatggttggataaatcagcagatgaatttcctgggcttaaaaacattaaaaatatacatttaccggccaattttggagactgattcctgtaaaaaatcaggggtaaatatctataatgaagatggcgcattgttttactcttcagacaaattccctctgaggataaaggatatcatcacagatctcagctgggaaggcaccatactttcgtatgataaaccattagatcaccgctcggggtatcagggatgcatggtactgacgtatctcacagcatctgtggaaggggattttttcagtttgctattcgggtatggcataaacaactccggcaatgtcagcagaacctcagacttggcaggactgggcggcggtggcgtatatggcaatgatatcgggtgtgtcgttgcgtatgcgccggattgttatccgcaatgggtcaataataatactatgcagagatcggttttgccctga

SEQ ID NO: 283422 - DNA, 324 bp, Morganella morganii
atgacaaagaaagcggtatttaatgtttatcataaaacaggggaagtcgataatattattgattcactggcttttgttatccactcagaacaagttgattttaaaaggaactatatcgaaatcgatgagcgctatcttaaaggcggaggaaaaattattgctattcctgttgtaactcatcgctctgaagccagagagaaatatccgactatagaagagattaaggtaaccggtaaccgggtagaatggaaatatgcgcgcagtaatggggtaagcagctcgactattccggttattcatgtttttaaagcaaccggagtatag

SEQ ID NO: 283423 - DNA, 3636 bp, Morganella morganii
atgggaaaaggtggtggtggacagcgcacaccgtatgaagcgccgaatgacttaagttcacgacaaaaaatctcactgatcgacctgatcagtgaggggccggtcgaagggccggaggatgtgaataatgagattaatgatttgtcctgtgtgtatcttgatgatacgccggtgatcgataagtccggcaacagtacagttaacgggatgacgcttcagtggcgggcaggaacactggagcagcctgctcttggtggttttacagatacggcaagtgaagtatctgtcggaattgaagtgaaatatgagaagccggtgacccggacaattacatcaccctatgtcgatcgcctgcggttgacgttcggtacattggcgctggtgaaagtagaggataacggtgacagcctgccgtcatcggtgcggctggcagttgatgtgcagcggaacgggacatgggtgacggaaaagcaggttaccatcgcagggaaacggagcaattcaccttatctgatggcggtgatcctggataacttaccgaaagctccgttcagtgtgcggatgcggcgtcttacaccggacagtaccactgacaggctgcgtaataatacggcctggtccggttattcagaactgacggatgtcagtcagacataccccggatctgcggttgcgggtctgacatttgaaagtgaacagttcggtaatcgaattccgcggcgtaattatcttatcagagggcggattattcaggtgccgtccaactatgatccggaaacccgtaaatataccggtttgtgggacggtacatttaaaccggcctggacggataacccagcctggattttatgggatttactgactcattcgcgttacggcatggggcaacggcttaaaattcaggaggtggataagttcgcgctgtatatgattggccgttattgtgatcaaccggtcgatgatggctttggtggccgggagccacgagttcgctgtaacgcctatattacggatgtgcgtaaagcgtacgatgtgatcagtgacttatgtgcttcgatgcggattatgccggtctggaacgggcagatgatgacgtttgtacaggatagtccgggagatgtggtctggccgtatacgaatgccaatgttgttgatggtgtgtttgattatagtttcagtccggcgaaagcgcgtcacaatgtggttgaagtgcggtttgtcgatccggataacggctggaaaaccagtattgaacaggtgtcggacgatacggatattgcacttcgcggcagaaatgttttgcgggtggatgcgttcggctgtacagccagaggtcaggcacaccgccacggattgtggctgctgatgactgaaaagctggaaattcagactgttgaatttaaggtcggggcagaaggattacggcatacacccggagacattgttgagatttcggataacgactgggcggcagcgcagacaggcgggcgtattaaggaagtcgatacagaaaggaaaacactgcaactcgaccgtgaaattaccgcaccggataaaggtagtgtgatgatcactattaccggaagcagtgggttaccacaaccggtgcgggtcaccgggtatcccgccgctgatcgtgtcacgctggaaacactccccgccggggttgtattacattctgtctggacactgcactcatccgttgaacagcggcgattattccgggcggtatctgttgctgataatggtgacgggacgtttaatgtgctggctgttcagcatgcgcctgaaaagcaggatattgtggataagggtgctgtgtttgatcccggtatcacagcgcgttctgcttaccaccatattccgccggtggagaatctcagtgtggagattttccaggataatgatgctttgcaggctgaagcaacgtggcattccccattttctcagcggggaatagaatatcatctgaaattgatgaccggtgaccgggtcgccggtacggcggttaccacatcctccttttaccgtttcggcggaatgccggaaggtcattattatctgatagtggtacctcagaatgataaaggccagaagggcgcagccgcagaaacagagttttcagttaatgcaccaaacgctccgtcacatatcacggtggaaccgggatatttcagcctgggcattataccgcgcagtggcggacgaaatagtttgcacgtccggtatgaattttggttctcaggcgttcagattaaaaatatcggttctgttgaatcatcggcagagtatctgggaaccggatccatgtgggtggtacagggacgcagactaaaagccggtgaacgctactatatctatgtccgcagtattaatcatattggtaaatctgaatttattgaatgcagcggtgttccgatcagtaatgcggaagaggttattgaagctgtcagtgaaagtttgtctgaatctccggtgattcagcagctcagtaaaaacgtgacacagtttgggagttcacttgagaatacccgctatacaatgaatgcaaatttccggagtaatgcatcagctattaaacaggcagaacgtgctcaggcagaatctgaacgcaatctgaaaaaaaagattgaacaggttactgtttctgtcggaaatacgcaggccgatatacaaaaacacagccgcagtattacatctctgagtaactcagttgcagaatctgaaaaacgtattcaggccaaatacaatggtcatgaatccgcgatcagccggattgaacgtagttatgcagcatctgaacgcagtatgtcacaaaagattgagaatatgacggcatcattcagtgaagcccaggtcgatatctggaagcataattacagcattacgtcgttgaatagctcggttgcggcatttgaaaagaatattcaagccaaataccgtagccatgaatctactatcaaccggattgaacgtagttatgctgaatctgagcgtgcacagaccaggcagttaaaccttgtgacatcctctgtggggagcataagatcagaaatccagcaaaatagccgaagtatcacaacgttgagtggtacaactgctgagtatgaaaaacggatacaagctaaattaaatacgcaggaagccgtgattcagactaaaacaacggcgatgtttgagcagaataataatggctatgccatgcactcagttaacgttggtgtgaaagtgaacggcgttgagcataaagccggaatggtaataggtgctgatgttaagtggcgaaaagtaaaaacaaccattggttttaatgctgataattttgctttttataatccggcaacaggcagtatggatttatttatgtacatcaaaaatggccaggtgtttatgagggagtcattcattaataaagcttggctaaatagtgtggttatcagcaacaaaatggaatctgacaattatgttgccggagaaaaaggatttttgctggatgcaaaaaagaatgtatttgagatgaattcaaatgaaggcggaagcagcttaagttttgatggcacaggcctgcgtctgcgtgatgagaatggcaatattcgtatcgaaataggtctcagggatgaagaggatgacgaatga

SEQ ID NO: 283424 - DNA, 606 bp, Morganella morganii
atggcaaccatctgcctttacggggatttgcaacgatttggccgccggtttgcgctgaatatcagcacagcagccgaaggaattcatgcgctgctattacagctgcctgaactgcgccggagtatccgggatggctggtatcaggtacgtattgccggaagtgatgtggagccggatgattttcattcgcgctgccatgagccgctgccgtcggatgcggtgatccacattgttccgcgtctcgggggggcaaagaacggcggattacttcagtttattgccggagcggcgatcctggctatcggctggtggaatccgggcgggtgggcagttggtggtgccatgatgtcagccggagccgcaatgatgctgggcggtgtggtacagatgctgacaccggtggtgaagccgccggatatgtcgcgcagtgaagagcgggaggggaatacttatttcagtaatccggagaatgcagtggcgcagggcatggcggttccggttgcctacggcaggattatgtgtggttcgagggggatttcccagtcagcggagatcatggatgacagtgagcataaacatattgcagccggtaaacacggcggctga

SEQ ID NO: 283425 - DNA, 729 bp, Morganella morganii
atgacaacagatgcaattttggcgcacgcggcggcagagtcgcccggtgagtcgtgtggtctggtgataaaaaattcagcaggtgagcattatatgccgtgccgtaatctggccgccgatccgttgtaccactttgaaataagtcctgatgcatttctgatggccggtcagcagggagaagttgtggcggtggtacacagtcatccgggcggtgagccatttctcagtaccgctgaccggattatgcaggtgaacagcggtctgccgtggctgcttgtctgccatggtgcgatccggcggtttgagccggttccgcttttgctgggacggacgtttgagcacggagtgacggattgttacagcctgttcagggatgcatatcacctcgccgggatcatgctgccggattttgtccgtcaggatgactggtggcggcggggagaggaactctatctcgataatatggctgaaaacggttttttccgggtgaagaaagatatctgtccgggggatgtgatcctgttctgttatgccagctcacgagccaatcatgcagcggtgtatctcggtgatcaaacgctccttcatcatattcccaatcaactcagtaaacgcgaggttttgaacgaacgatggcaacgaatgatgcattcagtatggcgcagccgggtatggcaaccatctgcctttacggggatttgcaacgatttggccgccggtttgcgctga

SEQ ID NO: 283426 - DNA, 696 bp, Morganella morganii
atgcagaacatctctcccgaaatgcgggccgcagtgactgaattggtttctgatcccgatattgaattgtttgaaattgatttaaggcatcttggtggtatccgctaccgcttttataacggtgccaatgagcagagtcagccgcttatctggcaaaaaaatacctatgagccttaccccgtcagcggggagggttttgtttacagtggtaaaggtccgtcctccagaccggtgctgacattgtctaatttgttcgggatcgtgacgggtattgcggagcagtcagacggcgcggttggcggatatgttgtccggcggataatcaaacggcgttttctggatgcggaaaattttgctcagggaaatccgtctgctgatccgtcacaagagatagtcagccggtgggtgattgagcagatcagcaggctgaataataccattgcgtcatttgttctggccgcgccgggagaaacggacggagcacagttacctaaccgtgtcattttatcggatgtctgcccctggcgttaccgctcacctgagtgtggatacaaaggaccgccggtggctgattgccgtggtaataaaacagccgatccggataaagatcagtgtggaaaacgactgcctgattgccgtctgcgtggcaatgaatcccgcatcggctgttttatctcaacatcacgtctcgggtaa

SEQ ID NO: 283427 - DNA, 897 bp, Morganella morganii
atgcttaaggctgactcacaaaggaaaagagaattttacactgattatgtttaccgtaatttaaatgaagcgctgtcaccaacgttcaggtcaggaagaatattgggtgagaatgaattaaatgatttaatcagaaagaacattactgataaaaaagaaagaagctattttatcaggagggccaatacagcctataaagaatccctgacagaggatcggttttttgactggattaataatgagcgcattgcgctatatgttattcagtttatacataactatatatatgacgactatcttcagagcctggcagtaaaaacaagaccgggatacagaaatcattatccatcttttggtgaaacacctcacatccggaatatggggctaccggaaacaccatgcggattaaggcaactaaaagacacaataaaatcatactttgacagactggatataccacagggtgttaaagaattacttattgatcatatcaggactgactggttcaatcagaatacagactggctgttctggattgaaaacaaaaacaaggcacaagttgactgggccgtgaagtatatgcgtggtcatttcaaatcagatgataacaatatgttgtattactactatccatcatccgctttaaacagaatatacggtttctttgatatcattctgacatcaaatgagtcacgagagctttttattattaaaatgaaaaaagcatgggcacagagtcgctacagagaaagcattaaagataagaaagttataaatacgtatgtcagtaatgacgtaaaggaaaagctgaaagaaatcgtcagaatcagcaataaaaaaacaactgaagtcatctctgatttaatccggagagagtatgacaggttgaaaaaatga

SEQ ID NO: 283428 - DNA, 444 bp, Morganella morganii
atgaatgaatttatggagaacgtaaggttagcactggatgattccattaattatctgacatgggccttcttttcgctggtggctgcatttgtgtttgatcgggctattgatattaaaaaatttgaaaataaagtggggaaccgtattttcatagtgatgttccggttttattttttcgtgtttatgattattgcggccattaatattgaatttatacgcgaagcgttttcccacaggctggatgcttttatactttccaatatcttttgggtattgattatgatgatgatagccgttaatgccagcctgatcgtcataggaatcgaaggcaaaaagaagaaatcggtcaccggggattttacgcaggacactctcattcccgggatccgctacacggccggggggattcgtaatcagggtgaggaaactacaaaaatcgtgtag

SEQ ID NO: 283429 - DNA, 264 bp, Morganella morganii
atgccggttacaccagaagatatccgtgaatttaatattgaacatggtatccccgataacattgagttactgaatacacaggaataccgggagattgttaacagtgagggctatttttatgaagatccgcacggatttttgatgcacacattgtcaaatcaggttattgccaaaaatacggaacaactcgatgtggttattgagcagttgcaggcaatcagactgaaaatgagccgcccgcctaaacgactgagtgaaaaataa

SEQ ID NO: 283430 - DNA, 1674 bp, Morganella morganii
atgagtttagccggaaaaaagaaactccctgaatggtctgattctctgtttgcatccgtgtatttatggataaaacgcggtactccgccacagaaagccgattctgatgcgtcaattctgcggtacccggcagatcaccggctgaatgccctggctatccgtatgcggtcgctggtgatggaaaatgagataaccccggactggtttacagagcagggataccactcagcctcaaatccggataaagcagaaggcaagcggaaagctgtggttctggaatacatcagtgaagatgaactcaatgttgtgttgtcagattcagcccgagccgattacttatggccgcaggaacctgagcagggaaaaccggttacggatgttaaccggctgggggacggcagccggataaatacggatgatatcagcctgcttgatgaggtaaatgcaacatacactcacgtttatgcgttcggtgatcaccatgtggtcagtatgcgccccaacccggtaacgggggaaacgcactgcttccagacgctgaactcattccggaacaactttctcgatcagggccgcattgccggccgccggttgggtgaggcgtggttaagctggccggggcattccaaacagatcggcggtgtcggtttttatcctaatcccgaaaactgtccccgtgatgtgtataacctgtttaccgggctgagtgttaagccggtggccggtgatgtcacaccatatcttgaacacctggagaaagtgatttgtgccggtgacagtgaaacctatctgtatctcatcggctggctggcgcatctgtttcagaggccggaagaaaagccgtcagtggctattgtgatgaaatccattgagggaaccggtaaaggttcaatggttcgtccgctgctggaaatactgggcatgtacgcgattcaggtaaacggctcagggcagattgcagggcggtttaacagcacaatagccaataagctgtttgtcttcgtcgatgaggctgatttgaccgatgggcggagtgcggatcgcctgaaagcgataatcagtgaggataccgttaaccttgagcgtaaggggaaggatccggaaattatgccgaactatgcacggtttatttttgccagtaaccgggatcgggtgattaatgccgggttacgggaacgccggtatctggttttagagcctgatgccatatacgcgcagaacaaaggatattttgaccggttacatcactggatcagtgataacggcgcacagaaactgctggcgtggctgctgtcgtatgatctgagccactttgacccgagacgggcaccggtaacagcggcgctggtggaggagaaattagccagtatgccggcagtctaccagtttatttacagtgagttgtggagccgtcagccgtttaagctgcaatcccgcgttaatgccacagagctggtggagatgctaattaactggagtgagtcgaacggagagacaataaagcccccggcggcgcgttctgcagtcggccgtattatgaaagcaatgggtattcaggttatgggccgttcagacagaggggacgggcgttattatgatttacctgatatcagcgaaatgaagcaggcttttgccgctatactgggggagaaaacggaaaaactgtttacataa

SEQ ID NO: 283431 - DNA, 234 bp, Morganella morganii
atgcataatcagcagatgaactattaccagacaccgagcgatttactggagctggccacagtcactggtgacttgctgaaactgatgaaagaaatcacctgtaacggctctccggaactaatccggttcattcctacactgacaatactggcttctgaccattgcgacaaactcatgcgggatattgatttaagggatctggagatggatccgggggtgaagcatgatcagtaa

SEQ ID NO: 283432 - DNA, 594 bp, Morganella morganii
atggaaaacaaaaataagaccgttacaggtcagggtttcgctcaccctgaaatcagtcaaagcgatatttcagttatccgctttgagggcgttcaggttcggatcatcaaagtgaacaatgaaccgtggtttgttgctacggacctttgtggtgcattagagcaaagtaatacagcaaaggctgtaaagaatcttgatgaagacgaaaagatgactgtaactttaagttatagtcataacctctctcgcggaggagccagaaaattaatcattatttcagaatcaggtttctacaaacttattacccgcagccgtaaagctgctaccagtgggacattagcgcaccgtttcagtaactgggtattccgtgacgtgatcccgtctatccgtaaaactggtgcttatggcgttccgttcgcgctgctgaatgattttacccggcgcagcaatgaatatctgaaagtttcgtcgcagcgtggccgggatctgcaatcctgcaaagcagagaaaattagtttagagactgaggaaaagcaactctgggatgaatatcagcctcagttgccagctatggcaggggaggaaccacaatga

SEQ ID NO: 283433 - DNA, 714 bp, Morganella morganii
atgcttaattcagaacaattaactgaagatatgacatctttagataatttaatctatgggacgaggttgggtgttaataatattcgaggtaagattgatgattgtatattagaaaatggtgattttgatgggtctgcattaagtgcgttgtggtttcctgttgagaaatatgatgtttttatctctcattctcatcaggatttgaggaaggtatacaaattagcactcaatttaattaaggcagggaaaacagtttttgtagattcatttttatggggatacaatgaagaacttatagagaaaattaaaaataaatctaataatcttactgaggattatgaatataacattgaaaaaagtataaatttattgttggttaatgcattgtctaatgccataaataacagtaagaattttttatttataaatactgaaaactctttaataaaaaacaagcagggatttagggataaaataaagcaagattcaggtagggagttatggaaaagttctaatgaaaaaacatactcgccatggattatgcatgagttaacattaagtcgtattattcatgattgccaattagttaatatgtttgagtcaacggcgggagtggagtcctataaagaaaaagccagcatacaactaccggcagaaataaagcatttacaagaaataacacttttagcactacgtgaaaaatttggtttctaa

SEQ ID NO: 283434 - DNA, 168 bp, Morganella morganii
atggtaatgatcgggatagatgtgatgaaacagaaaagacaacagacggccaaagtgacggtctcagggatcatcacaaaagccccttatcgggtcagaacagcgactgggaaagtgattgcaatattgacaactcagaagagaattgtgcacaggattatgtcttaa

SEQ ID NO: 283435 - DNA, 417 bp, Morganella morganii
atgagcaattctaaccttgtcgcctttcgtctccccacagaactccagaccgtgtttaatgacgctgtaacggcttccggcagcgataaaacatcgtggatagtctcagccattaaagagaagctgaaccgtccagaggagaatcctgatgcccgtatgctgacgctggtggaaagactggaatccgccgccgcttccctgatagcaggcaaagccgatatcccacctcatgcctacaatgaaccggctatcgtcgctgtggtaaatcaagtgctgtctggggggatcgataacgggcgtgtcattgctgaacggattaacgaggctggctatcagacaaaggccggtaaagcgtgggacaaggatatctattcagcgtggaaacggcacaaggatatttcaggaaagctatgctaa

SEQ ID NO: 283436 - DNA, 1125 bp, Morganella morganii
atgaaaattaaatatcacctgcttgttacagcgttcgcatccttatcttcgatatcttcattcgcaacgacttacccggtaacaattacggatacagacgggcaaactatcactctgaatcatgagcctaaacgtgttgttctgcaggatggcagggatattatgactcttgccctgttggacagggctaacccattcatgagagttgtggcatggaataacaacctcaaaaaatcagatccccagacgatttctttactggaggaaaaatggaaggcagatatcagtaaaattcctgacatgggatttaatgacaaaggagaagtggacgctgaacaggtaatagctcaaaatccggacgtactgattgctcaattgcgggcaaagccggcacttgaaggctcaggggttactgcgaaacttaaagaagttggtatcccggttatttatgtcgatacattcctgaatccggtagagaacacaaaaagcagcattaccctgttaggacttgctttgaataaggaatccgaggctaaagagtacactgatttttatcaaaaccatttagacacactgaaaaataaaacagcgtctgttaaaaataagcctcaggtatttattgaagcaaaagccggtgccagtggtgaaagttgttgtttcacacataataatgcaggatggggcggaatggttcaggccgttggcggagacaatattggcagtcgctttttacccggtgcgtcaggtgaaatctctttagaaaaagtcatcagtacagaacctgatgtattcattgtgaccggagctcactggaaaaataaaaacagtatcgctgcgccatttggatacggtgtaacaaaggaagaagtaaacagtggacttgaacggttaaaagaacgtgttggattcagtcaaatcaaggctgtggaaaataaccggttatatggtgtttatcataatttctacaatcacccatataatattgtggggctggaatacttagctacgtttatttatcctgaacaatttccgtctttaaatcctgatgaaacatacaatcagatcattactatgtttacaacaattcctgttcgacaggctacgtggggagccaaggcagaataa

SEQ ID NO: 283437 - DNA, 282 bp, Morganella morganii
atgcgcacataccgaaaagcaaaatatatcacaacaacagtcaccggtgttgtcactaaaccacctcagcgggttaagacggccaccggtaaagtaatggcaacaatgaccattcaggcagagagtgaacgccgcagcccctatccgctgaagctggtggcatttgatatgaacgcattggaactgatgacctgccagaaagggagccggattattgtcactggtcggcatgaatggtttaacgggtatcagcttaccggggcgcagataatcaacagttga

SEQ ID NO: 283438 - DNA, 252 bp, Morganella morganii
gtgctcagttacggcggcgatgtgaaactgccggacggctgtaaagccattgccgtctcccacggtatgaatgacgacggtcagttccggctggatttcaacgacggccactggctgccgtttgaagggatcccggtggataatgacagcagcctgttcctgagcttcccggaagcaacaaaggatgagcagaaagccctgctgctcagtctgagcgatatcatcatccatatccgttacaccatccgttaa

SEQ ID NO: 283439 - DNA, 315 bp, Morganella morganii
atgagctttaaccattggatgtataccaagtatttaaactcattagatgggttgataatatctaattcattactggaaaaacccataagtgaaaggatgtatgaggtaagtcgatttattaatgagaatgttgaattaaaaaaagtagttgaaaataatgttgaaaaaacattcatccttatcaagaatcataggagaaggcaagatgttaaggaaaaaatagctgaaaggtcacagttagagagagttaaaagaatattgccacgtaatacctgtctcttatacacatctccgagcccacgagaccgaggctga

SEQ ID NO: 283440 - DNA, 1878 bp, Morganella morganii
atggccgggaatgtatttgactttgaattaaacgccagtgagaacgtaactgctgcactggcaaacatcgaggatgatctgaaccggctgcgcccgaaagcccgtgaaatggggaataccctgaaactgggcggggacgaaacgctgaccggactgcgttctatcggtgaccagatccgtgatatgtctgattttgccaaaaacggtacgcaacatatcggggatatggtaccaccgctgaaaatggtcggtgagctggcaaagaaaatagcattaccggcttctctcggcggtatggtgtatgccggatatgagaaaataaccgaagaaggcaaacgcggcacggagataaagaatcaggcccgggatatgggatcaacgccggaggaggtgacccggctgtcaggcgtattgcaacagcggggcaaatcggaaggtgattcgaaccgcatcattaaagacctgtatgtcagactgtccaatgctgccgttgaagggcaggacaacgagctgaatgccacctttgccagtctgggcgcaccgattatccggaagaaaaacggagcagtggatgtcgaggccaccctgctggggctggaaaagcaactaccccggattgatgagtcccgtaaccatgcagttctggcaaaactgggtctggatgaggatttactgcggatcatgcgtaacggtgaactgcgggagtacatgttcaaatccgataaactttacggacgctcatccaaagatatcgacaatctgagtaactttgatgacaaacggatagaagccagagcgattatcgacggactgaatactcagttagggaatatgtttgcggcgtattttgtcggtgatccgtatgacatgatggtggagcagcacaaaaaaggcgaagccaaccagaacgccctgtatcacggtaataaaaaagaagatatccggggcatggcactgcgtgacaaaaaattcatgagtaccctgagtgccggagagctgtgggatatgcagttcggtttcccggatgaggatctggagaaaaagctcaacgaacagtttgagaaaaaatgggaagcagagcgggataaagcgctggggcagtacggactgaatcagaaaattgagggtattggtgcaaaagtacctgataactggtcaatgacagccggtaaagatccgaatgtccgcgcttaccgcaacaataacccgggtaatgtccgatgggccagtaatgaagtcgggcgtgaccggcccggggtggatgccaacggtaacaaaaaagggtttgcccagttcagggatgaggcagacggcagagcggcactggcccgtcagttattgctgtatatggatcgcggtaataacaccgtgggcggtattctggagctctttgcgccgaagaaagacagaaacaacacggaagaatatatccggctgctgtcaaagcacatgaacgtgaatccggatacgccgttggatctttatgaccagaatgtgctggctcagatgatgaatggcattatccggcaggagtcagacgcacagccgtacacttatcaggaaatgatggcttctattgacgatgcggtgaacagcccgaggtgggcggggctccggcatccggataaactggaggcgcagcgtgagcggtgggccgctgaaaactcagtcccggatatgccggcaataaatcatcccgcacagccggatactcagcaaattgtggatgctttgtccaaagctatccgggaatcgctggctgccgggcaggagagtatcccgattgaaataacgttcatcaatccggataccggcgcacgtcagaccgtgaacactaaaccgaaagggcgtgtgactacggcaatgaattatccgtga

SEQ ID NO: 283441 - DNA, 291 bp, Morganella morganii
atggaaacaacaaaaactatcaccctgagtaaaccgctggaatccaatgacggcaacacccggtatgacgaaattaacctgcgtgagccttgcctgattgaagtggagcagttttacacggaacagtcgaagcacagcagttcattaccggcgctgcgtttactgactgtactggtcagcggcattccggatcagattatcaaaaagatggcaatttctgactttaaccagtgccgggattatctgaccggttttttggagtcagtgcctggcacaaatggcggcaactga

SEQ ID NO: 283442 - DNA, 591 bp, Morganella morganii
atgaatttgatgagcatcagtcagtacgccagacatgccgggatgagccgtcaggcgttgtacaactgggaagccaagcagggatttcctgccagagtggacgggaagattgaccaggcggcgtgtgatcagtatctggcccgttaccgtgacagccgtgatccccggataaaaaataacaccccgtcagttaaagcagcagtacctgctgacggcgtattggtcccgctgagtgtggcggagattaaacagcacattgcggccggtgcggaccgggtagccggaatggatggccatgaacgggcaacactcgcagcaaaggctgtcgggctgtatctgagtgagggaccggataatccccctgtcacgtttggcggttaccgcctggctattgtgaaaacgcctgagtgggaaaccggacagataattgccggtggagcgttcgggctgtctgcggatgatgtgatctttgaatgcagggattacaccctgaccctgatggacgatgaaactgaggataccgctctgcgtgacgtagtgccctcactgctgtatgtgctggcagacgataccggactgcctgagaaataa

SEQ ID NO: 283443 - DNA, 627 bp, Morganella morganii
  misc_feature (37)..(46): n is a, c, g, or t
atgcttttctggcgaagcatgatgtcagtaaggccgnnnnnnnnnngaatcaaaacgattgacgctctgacgcagtatgcgatcaaaacagcacctaagctggtggctaaagctgccggtagtaaactggcaccctgtatggtcatacttgcaaaaatggcgtttgaagattacgtccgttcagctggcagtaccggggaatgtaccaaatgtcagggaaaagggatggtgtataacagcaagcaggtggtgaaacatcagggaattatcagcaaagagggagttgtaatcacagaaccagatatcaggaatgaaatagtgggtgaaatatgttcttcctgtaaaggtaagaaaaaagtcacgcaccgttgtgcctgtaaaggtcgtggtaaaatcccggatatccggcagactgaattacagagcgtgcctgtattcagagattgcccgcgctgcagtggccggggatataagcgaatgccatcttctgtcgcttataatgcgattaaataccttattccggggttgacgcagccaagctggtcacggaactggaaaccattttatgaaagcttgacagtgtggtgtatctctgtggaagctcaggcagaggatttattaggatag

SEQ ID NO: 283444 - DNA, 405 bp, Morganella morganii
atgtcagcactacaatccggaacttatctggaacatgcggagtcagttgcgattcgattgtatccccgtacggagacattaggtattgcagaaggaattgagaccgcgttgtcatgccaccagctttacgggataaatacctggtcagcaatgaatgccggttttctggcaaaatttattgctccttgtaaggtctgtcatctgatcgtttttactgatacggatcatagcgcagcaggccatgcagccgcatttacttgtgcccgccgtaatcttacggctggtaatgatgtacagactgtcagtgtccgctggccggatgcgggggattttaatgatgtacttcgtaccggtgatgaagtcagacagataacatttactcggaagctgcagggggctgtctga

SEQ ID NO: 283445 - DNA, 1248 bp, Morganella morganii
  misc_feature (1226)..(1235): n is a, c, g, or t
atgttatttaatctcaaaaataagaaaaaaatatacatagatctcttttctggatgtggcgggctttccttgggactaaggcaagctggctgggaaggcttgtttgcggtcgaaaaggatgagatggccttcaaaactttctcgcataacctaattgaaaacgcaaattcgcattttgattggccagaatggttaccaaaaaaagccactacgatacaagacctgatatctaactattcagaagaactttctaaactgaatggaaaagtggatttaattgctggagggccaccatgccaaggattttcattggcaggacgtcgaaatataaaagatcctcgtaataaactttccaatgaatacctcaagatggtcaaaatcatcgaacctaagtatatccttcttgagaacgttcgagggtttagttcgtcttttaagccaagtgaaggtgaaaaaataaaacgaccttactcaatgatagtaagggaaaaacttcagaaactaggatatgttgtttactccgattttgtatgtagtgcaaaatttggagttccacaaaatcgaactcggtttattatggttgggataaggaaaaatattcttaaagaagatacaaccaatccatttgaattactgttaaattttcgtcaggattttttaaaagaaaaaaaacttcccttagaaccaattaaagtctgcgatgcaattgatgaccttatgattagtaagaataaggtagcttatcattcaggaacagaagagaagggatttaaaaaaattgattatgtgatacctaatgagcaaagtttatatttaaaatatattcgaaaaggttatgagaataaaaaaccaaatagtcttagacttgcaaggcataaactacagactatcgaaaaattcaaactcatacaagatatttgtataccagggataagtctgaatgataacatgaggcttttggttgggacaaaaaaacaagcgataactgtcttaaacgcgcatgaaccttcaaaaacattaactactctgccagatgatctattacattataaagaaccaagaatattgacagttagagaaatggctaggatacagtcatttccagatagtttcgatattttagggaaatataccaccggtggagctagacgaactcaggagtgtccaagatatactcaggtgggaaatgctgttcctcctttacttggtgaggctcttggatattnnnnnnnnnnattctataattaa

SEQ ID NO: 283446 - DNA, 504 bp, Morganella morganii
  misc_feature (325)..(334): n is a, c, g, or t
atgtcaggatgtcgatatatctcagagggagaaatatccagggtatccagaagttcggatatcagccattttaatgatgcattttgtttgctgttaactgtttcatatacggggtttttctctgtagcgacgtccgcagagtctcctacaatctcaataccgatactatctgcattgccgggaaatctgtccggaaaagatttggctttttcaatgtcatgcagttcatatggtttccaggcattttctaaccctgccattttttttaattcagcgggttcgcattttttcgtcacaacacaacgtgattgcatcaatccgacannnnnnnnnngtcccatcccggtcaatcagaaaatgagcaccattagatttgggatgggtgtaactgttaaatgtatgacttgcagatggtgtattcgtttgatgtacaacaattccgttgactttatccatccggtcatgttctattttactaaatattttaaccttaatacggtttga

SEQ ID NO: 283447 - DNA, 423 bp, Morganella morganii
atggtaaaaaaatcggttgttattccggcaatgctctgtttaattcccggttttatacaggcaaaaactgtcgctgacattcagattaataaagttggtattgcatactctgacagtaaaaatatcaatgaaataaaagcatgcaaacaatttaaaccaagtcagacacaattgataaactattttaatactgccgaagaatcaactgaaaataagtggatgcatgaatattactctgcctgcatatcaaccggccatatcacgtttagtgacggaatgacaggcagatggacagtccagtcaggcggactgggttatgtcactaccgcagataaaaagactatttattttttccgtaaagataacggatggaatgatccgaatgcctgtacttacggcttaggtgatgaacctgaatgctaa

SEQ ID NO: 283448 - DNA, 1101 bp, Morganella morganii
  misc_feature (171)..(186): n is a, c, g, or t
gtggattatatcggtattaaaagccggatgaacctggcattggcaatgtattcaaaagccgataaagccaattttgaggatattcagcaatccgtcactgaggtgcgtaatcatttgcatctgcttgctcaggtatttcaccattttgacagcagcgcttatttttcaggnnnnnnnnnnnnnnnnccgacgctgcaactggaatgtctgaacaaggctgctgagtttgccatacagactaagaaaacggaattgcgttttatgggcctggcgaaacgcctgaaagccgcttatgacatctgtgtcggcagtgaagaaattactcaggatgaacgcgaacatatccatttttatttagcggtgcgttcaattgtatataagctcactaagggtgaagcaccggatacggctcagatgaaccaaaaagtccgggagatgattgcagaagcgctcagagcggaaggtgttgaggaaattttcacactaggtgatgagaaagcggaaactatcgatatttttgatgatgaatacatggagcgtatcggtaaaatcaaactacctaacaccaaaatgcaattactgcaaaagatgctggctaaagcgatcagtgaatttcaaaaaataaaccagcttcagggaattaacttctccaaacgtttccgggatctggtcgatcactataatcagcgcaaagaaaatgacgtgcttaacggtgaagaatttgatgcttttacacagcagatggctgatatgatttatgacatcaaggcggagatgatgtcatttgctgatatgggcatcgatatggaagaaaaagcatttctcgatattctggcacatatgtgtgagaaatatgattttacttatgatgacgacaagatgctggctttagcccgggagatgaaagtcatcgttgatgacagcactcaatatccggactggagcaaccgcgacgacattaaagccaagctgaaagcggatcttattctgttgttgcaccgttatggttttccgccggtcgccaatgatgaggtgtataaaagtgttctggagcaggcggagaactttaaaaagcataataatcccggttcaggtaactga

SEQ ID NO: 283449 - DNA, 468 bp, Morganella morganii
atgacactcactatggatattagagatgaaccgcctacagatgatgataaccgccttgttgatggctttgctatcttctaccagaaccgggcgcagatgttcgaggcttccaaccatatcttcgacatagagaaggtagtcgaagcagatcttgaagaagcagtaaaagctaatcctaatctaacgcttaattactctttcgctgattccaagcaagacccgctggttcaggtcagtgatgttgtagctggctttatgcagcactatttcgattacctcaatagcaataactatgaacagattaaaaatgatagaagtagccttaacgacaagcaaagattgaacatggagtttttaaggctcctgattaataaatcccatgataacaatccaacactattacattatgttatgtcggctttagaacatgaaaaacacaaagcatttacttatccgaatgaagcttaa

SEQ ID NO: 283450 - DNA, 696 bp, Morganella morganii
  misc_feature (648)..(657): n is a, c, g, or t
atgacctacaaaaaagtgatgtgtatgaacattttcccgcagcaaaatcaaagctatcaattctattacgatgaatctaataatgttcgtaaactatatctatcgaaacaaattgatggttataatattgaccatgatcctgacaaacataacagcgtaaatttcgtgttagccggtgttgctcatactggttcctcatcgagtgccgactttgacgatttacgccagcgcatacagcttcaggcgaacgccaaagagttcaagctcaaacacttagctaagggcgacttcttgactatgctcacgtctaagaagctcacagcgttctttgagtggcttctctatggtgatctatacctacactacttccatctcaacatggagtattggggattcattgacatcattgatgactgtatcctcttcgggcgtgaaaagggcttcatccgagaaaccagtaatgaacaattctatagctacatgatggcaaacaaggacgctctacacacctacgttaaggcaaacaggatcccttttatccagttcctcaagtcctatgacttcccatacattgaggggcgggagaaggatttcatacagggactatcaagccagatctctaatcattgcatagacctctatacagcnnnnnnnnnnatacagcaaccaataaagatgcgctccagctccggttag

SEQ ID NO: 283451 - DNA, 582 bp, Morganella morganii
atgtctgattatatttatatgtttatcggtgcggtcttcgttaacaactttattcttgctcagtttttaggattatgcccctttatgggcacctcaaaaaaaattgataccgcgatagggatggggtttgctacagcatttgtcattactctggtatcagtaggtgcatgggcaatcaacaaccttatattaatccctcttgatttagcatatctgagaatattatcttacatactaatcagtgctgttgttgttcagttggctgagatgataatgcgaaaaacaagtcctcatctgtacagagtattaggcattttccttcctttaataacgactaactgtgctgtattggcggttccgcttctggccgcaaacaaaaattatactatgcttcagtcagcgttttttggcttcagtgcggctgtcggatttaccttagtcatcattttatttgcagcaatgcgtgaacgcctggcaaccgcggatataccaaaaccctttaaaggcacatcgatatcattaattaccgcaggattaatgtctctggcatttatgggatttactggtttaactcaaaactaa

SEQ ID NO: 283452 - DNA, 243 bp, Morganella morganii
atgataacttcaaaaggtattgctggtgttcctggtgtttctttcgttgttttgctggctacattaggtagtgttggtattcccctggaggggttagcgtttatagcagggattgaccgaatattggatatggcaagaactgcattaaacgttgttggtaatgcattagctgcattaattattgcaaaatgggaacatcagttcgatgctaaaaaagctaaggaatatgaatcgggtttatga

SEQ ID NO: 283453 - DNA, 663 bp, Morganella morganii
atgatggatatgaaaacaattgatcagataaggactgagaatgcccggattctccgtgacagcgccggaggaaatacagcctttgccatacggataaacagggaaccgacacaggtaagccgcctgattggcatcaatccgacaaaaaaaatcggcaatacaatggcgcggcatatcgaagaatgttttgagctggtcaccggatggttagaccaggaacatccggagaaaaggcaatcacttgatgaatacatttcatctgccaatcaattgaagataagaatggtgccactgcttacccgtcagcaaatatctgcaacctgtacaaccgggaatagtgatcatatacagaatgccaattctgctacgcgatatgccagccctgtgccatgtaataaaaatacatttgctttatccgttaccggcgatgcaatggcgcctgattatatcagcggagaaatcatctttattgatcctcacattttcccgtcagagggtgatgcggtccttgcatattcccatagcagtgatgaaatcattttccggaaatttacagacgatggttatacaagaacgctcaaaacaattaattcagattggcctcaccaatatattgagctaactggggtgattattgtttcagtcaaaatcagaaaaaaataa

SEQ ID NO: 283454 - DNA, 816 bp, Morganella morganii
atgaatgaacgattttttctctatttggatattttgggttttacggatttagtaaaggaaggaagtgaaaggattgacgatttatatgaggtcattgctagtttaaatgttcataaacacgatacatttaaggttattgttttttctgataccgtagtcgtatacaacgtagatggtggtgatactccagcggatgccagatatttaatcatgtttatgtgtgagtttgtacaagatcttatgcatagacttacaaaaagatctgtttattttcgtgcgattattacgtatggtgattttactcattatgaaataaatggcactccatgcttttatggaaatgctttgattgatgcatataactcagagaaagaactaaaagccataggattattcattgataaaaaaatatcccaccactgccatatattcaaacatagagagtttaatgaacattttgattttgtttacgttactcaaacgctggaggaaattgaagagtatggggcgtgcggatttccaatagattatagattaatcgaagatacaggcaccaagtggtatattttaccagaaatagaacatgtcaataatatacacataggatcaaaaaataaaaattatgtagagtcagttcgagataagtatattgcatcatgggatatgtactgcaagcattatccgcacattacagctcagctattattatctggtaatgatgtaacctcgatatctcctaatgttgaatggacagaggtatttgatagatatccagaggactatggttatgctattgaatcaaaggttattttctga

SEQ ID NO: 283455 - DNA, 315 bp, Morganella morganii
atgcagaatccaggcatagttggcattaccggtcggcggtgtgcggaaaccggcaaaacgcggatctttagtcagttccgcttcattacgccaatctttcaggttaaaaggcgggttggccataataaaatcggctttcagatccggatgctgatcagcaaaaaacgtatctgccggtcgctcccccagatttccggaaagcccacgtaccgccaggttcatcttcgccagtttgtaagtggtgccggtcagttcctgaccgtagatggcgatatcacggcttttaccctgatgactttcaacaaatttcagtga

SEQ ID NO: 283456 - DNA, 177 bp, Morganella morganii
atgaaaaagaacgatctgattgaatatatccggactaattacggctcagtccctgactatccgtggattaaatatccggattatgcggtattcaggcaccgcggaaatgccaaatggtttgctatcataatgtcagtatctgctgataaaataggcgcggaaacgcagagaaagtag

SEQ ID NO: 283457 - DNA, 180 bp, Morganella morganii
gtggatattgttaatgttaaagctgcaccggaaatggttggctctctccgcttaaaggatggcatctatcctgcgtatcacatgaacaaagaacactgggttacgataatgctggatactgaattcagcagtgaagaactgaagtcattaattgatgatagttacagactgacctggtaa

SEQ ID NO: 283458 - DNA, 207 bp, Morganella morganii
gtggacgggcttgaggatattaaagccaatgactttattctgacgccggggcgttatgtgggcgcggcagacattgaagatgatggtattccttttgaaacaaaaatgcaggaactgacccaggctctttatcgtcagatggtagaagccgaaaaactggataaggcgatccgtgcaaatatggaggcgctggggtatggggaatga

SEQ ID NO: 283459 - DNA, 336 bp, Morganella morganii
atggaagataacgatccgacctgggaatttctcgacgatgaggaacgcgtcataaaggcgttacaggtatcgtcacaacacggtgatatcaacggttatatgaccgcccgtcagcaggccgtgcaggcactgaaaaagatggaagagccgatgacggaagatgaagtgcagaaaatgattgagcgcacccgtcaggcaatgaacgcatccaatccggatacaccggacaataccgaagcccggcagaaagccgatgaggaatatcagcgcgatatggcgaaagcggcagagaagctgagagccgcctacaaagaaaccggtgttaatttgccgtaa

SEQ ID NO: 283460 - DNA, 333 bp, Morganella morganii
atgaacaatacagcagtacccgcgtcaccggcgacagtctggcagacactgctgacttatctgctgcaacagcactacggcctcactctgaatgacacggaattcagtgatgagcgcgtgattgaggcctgcctttgtcgcggggtgtcattgtgtgaggcactgaatgcctttgcggagaaatacgccctggtccgcactgaccggcgcaacaacggtatcactgagccgtcacacagtatcactgcgaccgatattctgcgggcacggaaggcaaccggtctgatagctcaccactgcagctatgccaccagcagacccgttaccgtataa

SEQ ID NO: 283461 - DNA, 237 bp, Morganella morganii
atgccgtaccggccggttgataatgcagactatgtccgctcactgatattatcaaaacccgctataaatctgaaagacgatgtggttccgtacagtgaaattggtttccgtacggcactctggcctgaagaaggaatcaggcagataacggatgattgtctgaaaaacggtaatctggtgcagatccagccatttcagccggacccgaaatggaatatcgaaaataagccagaatga

SEQ ID NO: 283462 - DNA, 231 bp, Morganella morganii
atggctatttcagtcagattagacgatgacttcgtcgccgatgcaaaaattcacgctgaagcaaaaagcagaagtgtgccaaaacagattgagcactgggctaaaatcggtcggattgccgaagataaccctgatttaccctatagctttattgaagaattattactggcacaggctgaagttgagaacagtaaggtttcccgttttgtccgtaaaacaaaacgagattga

SEQ ID NO: 283463 - DNA, 759 bp, Morganella morganii
atgcataagaaattaaccggcctgctcagtctcagtatgttaactgtcatgtcagcctctgcctttgcagatgacggaaaatggtctgtcggtgcttccgtactctatcaggagcaggcataccgcggcacaaaaacatctgataaatttatgccggttccgatggttaactatgaaggtaaaaacttttattttcataccttagcgaccggttattatctgtggaatgacaaaaaagatcagctgtctgttgacctgttctactatccgcaggcataccgtgccaaagataataaagattcccgtatgcgcaagctcgataaccgccgcgatactgccatggccgggctgagctaccgccatcatgaagagtggggaacactgcgtaccaacttctccggggatatcctgggtaaaagtgacggtatgcgttttgatgccgcttacctttacgggtttgagggcgacaaatggtctgtccagccgggcgtgggtgtgatctggtccagcgaaaaacagaaccgttatgaatacgggatcactgctgctgaatcccgccgcagcggtctggatgaataccgtccgggcagcagctggacaccgtatgttgaggtgtccggtcattatcagtttgatgaaaactggtctgcattcgcgatgggccgtatcgacctgttaccaagtgaggccaaagacagcccgatggtggataaaaaacacacctctatcctgtggactggtgtgacttatactttctga

SEQ ID NO: 283464 - DNA, 420 bp, Morganella morganii
atgaaacaattagtgagtatcaggcactctatacataatattcttgagcaattgaatgccatatcgaaatttcaaaatttgatggataataatttatacgtggaattttcacacaacgattctactttagatgcagacaacaaaaccaagataaaggagagaattagttttaacttcaaacatcatattgatagacttaattactcacttaaattaaccgaaatgttaattaatgacaaggttattgaaaatcaatttaattacattaatataaaatcattgctcgacttcaccccaagttttgttgaattactatcatccaacatccgtcatttaacaagggactcacatagaataaataattataatgaaaaattaatttcatcgataactttatttaatcgtcaaatatatttttaa

SEQ ID NO: 283465 - DNA, 435 bp, Morganella morganii
gtgaaggaaaaactgcgggaaaaattacgtgaggaagcatcaggtgtttacagtgtcaccgcatggttctggcacaacccgtctgaaatacaggatgagggacggatcatgttcacctgtgcaccggaacgggtggatgaactgattgccctgagtgaacgcgtactgacggaatttgagcacaacgggattgatcggcaggtattcagaaataaaatcgttcagagccgcaatattcttgagcgaacccataattcggtgaccggcatactggaagatattgaacgcagttatatgctgaccggcggcccgttattaatcggcgcttcactgcgggcaaatgaaaaggcatctccggaagagactgaaatggttttacaggactttttacgtcatgccggaaaattccatgcggtattactgcctgcggagtaa

SEQ ID NO: 283466 - DNA, 186 bp, Morganella morganii
gtgatccgtcaggcggctgaggctgcgatggagcaccttgctgacggggagcatattgatttttgtctgttaaatccggatgaaaatgacgggctgacgcacttcctgacacagcacactcaggcattctatcagcgccgtctcggtggctggctgcgtaacgccattccggtaacagaagcgtaa

SEQ ID NO: 283467 - DNA, 1002 bp, Morganella morganii
  misc_feature (880)..(904): n is a, c, g, or t
atgaatttaaccgaaacagccattcgtgctttaaagcctaaaacctcagcctactattcttggcaccaaagttcacagagaggtactgggcgcattggtatcaaagtacaaccctctgggaaaaaagtattctactttcgctattatgtaaacaaaggcaaaaaagaaaagtttatccaaattggcctatggcctgaaatgaagctagcgactgcaaatgaaattgctaaaacatatagtttatggctcagcgagggtaaagatccaaccaatgaattagatatccttaaaaaggaagaacagcaattagcccaatttaataatagccaaggttcttttgagcaattgatacatggctatgttaataaaatgaaacaagataataaacgtacatggcaagatgtcttaaaaaggctggaaaaagaatgctatgagcagatccctagaggcacaaaggcaaaggatgtaacaccaatccaaattaaaaacctgttaagtactattatccaacgtggggcggttgtacattcaaatcggatacgttcatatttaatggctgcttttaactttgggattaaggctgataacgaccctatgaatgcaaataatggtatcacatttggattagagtcaaatcctgtttcaatgatacctaaacaatcagctgccgaaaaagtcggtaatacatggttaaactgggaagaactatcatttatcatgaattcaatagctgaaacctctggtgttggtatcctcatgcaacacttaattaggctatgtatatttacaggcggacagcgaccttatgaactcattgcaagtcagtggggtaatattgactggaaaactaaaacactacttattacatctgatatttccnnnnnnnnnnnnnnnnnnnnnnnnngcttgaagctatccaaaaactcacctctcacctcaatagtaactatatttttccgttatctaaagatggaaaaagaccaacaagaacagatagcctag

SEQ ID NO: 283468 - DNA, 360 bp, Morganella morganii
atgaaacatcgcgcattaaatagccttccttttgtgggaattatcgcagtcgtcacactagggatttattacggcgaacaaactaaaccaacttatcgagattgtgtcgagctcaactcatctcctgccaatacgcttcagatttatgagcaacccgatagaacgtccaagtctatcagttatcagcccacatcagggaaagaacgattctgggtcgctgaacgaacggctgatgaacaatgggcgcaactctactatgctataacactttttgatgatttacctgaatcagctaaactcggatgggttagtaccacgaacataaacacattggggatatttgaatgtgtgaagtattga

SEQ ID NO: 283469 - DNA, 393 bp, Morganella morganii
atgactaaatacgtatttattttcatggtgttttgcctcaattttaccgcgagcgcctttaacacgaatgtatttgataccgccatcgataaaagtggttttacaccaatgtgtaataaccaagcgattgccgataaggattgtcgtgttgatgattacctcgagggacgttatgtcgccacgagcacagtgaatctgggcgctaaatgcgccttcgtgattgccgaagtgattgatagtcaaacaaaccaactattcagtacctcgactggcgattgtgaagacggccctctcgatacctattaccgcttatcccgtattaacaaaaaagtgtggctggatgcttacagccaaggaaaacagattgaccatgtggaggttatctttccatga

SEQ ID NO: 283470 - DNA, 864 bp, Morganella morganii
atgaattcaattaatcatattcgtttaggtgttgaacgaatttttttcatcattagcttagtgctagtattcggttttacagtcatcatcgccaatcactatagtatcgactcatttattggtaagcccttaatgtatctactgtattaccttatcgcgatgttagctccactcttgatttctcaaatattgttgtgggtcatttatgggtttaagggtatccctttccgtttaatgctaacgcgaaaaattttggcattcgtcttcgctttcatcgcctctttatgtgttatctacttattgctcatcgggattattccttttatggtttttgaccatgctttaatttttatactttatgaatacttttttattttcctccttttcgcctgccttatcggactgagcgctggcgttattgtctatatccataccgttaaaaatgtatcccatccatttcaatacccgcatcctattttccgtttaatgacattcttagcgctataccttgtcattatgaatgccttagcgataggcattggcaaccaaatcaatctcaatatcatggtgattctagcgggtactatcgcaggttatgtggggtattgggggtatggcttcctacaacaatacacggcaacgcgttctcggaaactcaggataaccctgtcaacaatcatttcccttgttatcttagcgctactggcactccttaacgttctattgcctaaccgattaaatatgttcggattattcctgctattttttatcgaactggctattgcaatcacattaggtcgactcacctatcagaaaaacaaccatcagaaagacggttcaacaatgaggataaatcatgactaa

SEQ ID NO: 283471 - DNA, 735 bp, Morganella morganii
atgaaaaaagcgtttattattcccgctctaatggggtgcatttcattaccagcattcgctaacacggatgacagtaaaacggggctttatatcacgggtaaaatgggcgcatccattgtgcaaatgtctggccagcagtttgtctacagtggctatgctgatgccggtgataatggtacaaaaaatggagatagccatcgtactggtgtatttggcggtggacttgcgttaggttatgacttttccaatcagtttgatatccctgttcgcgctgaattggagtttatggcgcgtgataaagcgaattcaacctacaatatccgcgaccgtgtgcgtaatggcgtacatcaaactcgtgatattaaaaaccaaatcaaactcaatacgttaatggtcaatgggtactacgacattaaaaatagctcaaatttcacgccgtatatctctgtcgggctaggctatgcggccgtggattttaaaaccacccgtgctgatgcttataccccaggactctctctgcatgatactcacacgcataccgccaataactttgcctggagtgtcggtgctggggtgaactatgccatcaatgacgattgggatatggggctgagttatcgctatttagatgccggaaaagccgacatcacgacagcggtaggtgatggggaaaatacgtcaaaaatcaaagtgaaggccaacgatatcatgcttggtttaacttaccgattctaa

SEQ ID NO: 283472 - DNA, 222 bp, Morganella morganii
atgaatatcatccgtaaatccgcagcaatgaagatccatcagcaacatttaggctctcgccttgctcgttattgtgcaggaaagtataaatgggttggtaatagcgagcattatattggtaaggaggtgccagattgtcgtggcgtgttagctgtttacgttgaacgtcgccaagacagagatggcccttatgcgtgtgtcatgtgtgtgacattgaattga

SEQ ID NO: 283473 - DNA, 483 bp, Morganella morganii
atggagagtatcaatacttatacgaataccttaacactgcttcctaatgaacaacgtactatcaaacgtgcgttgaccatactggataagtatctgcgtgaaccgggtattgcttttacatcaacgcaaaatgtgagggattggttacggctaaaaatgtcagcattagagcgtgaagcgtttattgtgctctacttgaatcaacaaaatcagttgataagcagtgaaaccctgtttgctggctcgattagcagcacacaagtttatcctcgtgaagtcgtcaaacgagcacttcattttaatgctgctgccgttatctttgcacacaaccatccgtcaggcgatatcacgccaagccaagcggataaatctatcacgcaacaattaataaaagcattgcagctaattgaagtacgagtacttgaccatctgatcatcggtggtcagcaaatcttctctttcgctgagcatggcttagtatga

SEQ ID NO: 283474 - DNA, 480 bp, Morganella morganii
atgttaccggggatgttccgattcgtttgtcagaatggcttaatttgcggacaaacctttggtgaggtgcgtgtaccgcataaaggtgatgtggtggaaaaagtgattgaaggggcttatgaagtgttagggctatttgaacgcatggatgagcaacgtgatgccatgcaatccctattattaccgccaccagcccaacacatctttgctcaatctgctctcacatatcgttatggtgaagcgcatcaacctgtgaccgaagcgcaagtattacagccacgccgtgtagaagataagaaggacgatctttggacggtgtaccaacgtttgcaagaaaatttaattaaagggggattatcaggcagaaatgcgaaaggtaaacgcgctcgcacgcgttcagtgaatgggattgatggtgatgtgaagcttaaccgagccttgtgggtgatggctgaaaatatgcttcaactagcctcgtaa

SEQ ID NO: 283475 - DNA, 153 bp, Morganella morganii
atgctgggcttctttgaatacgtcgatcagcaccattctgacaacctgagccattcggttatggccggccgctttaacctgatctgtgatttcagctatttccagtgcggtaatatctttaagtttcagcatgccacagtgttcccggaataa

SEQ ID NO: 283476 - DNA, 789 bp, Morganella morganii
atgagcaatctgattattgtcgatggtattaatgtgcgccgtgatatggccggtcgctattgtctgaatgatttacaccgtgcagctggtggagaggaaaggcataaaccaccttactggctgagaaatgcacagacagagcaacttattgccgagttgcaaatctgcgactcgggtacacagccggtaaatgtgctgcgtggtggcaccgaacagggcacctatgtgtgcaaagaactggtttatgcctatgcgatgtggatcagtccttcattcaatctgaaagtgatccgtacgttcgatgtggtggccggaacacagcaggcgatacagctggctgataaagttcaggccggagctatcctgctggagtctatggcgaaaacattgaacctgtcgaattcctcaaaacttggcgggtatcagaaactgcaaaaaatggctggtcttccggatctggctccctcctatgcaattgatgcaccggcgggcgcggtggatggttccagcaggccgacaacatccctgactacactgctgaaaaatcacaatgccgcattgtctgcgaccagagcatacaaacgccttgctgagctggggattgtggagcagaaagcccggcccggatccagaggtacacagcgcctgttctggtcgataacgacgcgtggactggcatacggtaaaaacatgacatccccggcaaatccgcgggaaacgcagccgcatttctttgagagcaaatcagcggaactgctggcactgatgatgactccggcggtggcctga

SEQ ID NO: 283477 - DNA, 678 bp, Morganella morganii
atgattgagcacgatttgcagtacctgcgggatatggcgactatcgcaatgactgaccacagcagcagaaccaaaggccagcttgaagcatttgagggatttgtattgggaaacacaacgcgctacccacgtaaaaagccccgtgatattaccgtgaacggcagaaaggtaagccgggaaaccgaagcggtatcctgctggtcaacacactattccgtgttaccgatgccacctattgaccgggtggactatcagaactgttcctggcggcgggcaattatggaactggatgaggcagagcagtcctggctgctgtattgctatggtaaagaattgaagttctcacaccagacggctatcaccgcctatgtatggagcgaaatgcaggaacggattaaaggccgtcgggtgtcaaagaaagtaaaagaacgactcagggcgctggtatggctggcagtgcaggattacaccatgaacaaagacgggtattactatcagtctgagctggccgagctggtgggggtagcttctgataactggtgcagaaactacaaaacacactggcaggaactgttgcttatctgtaaaaccctggactgcggggcattacggaaaatgagaaacaacaggctggaaatacggcgcaaaaatgtagttggaacttgcaaaagtcaataa

SEQ ID NO: 283478 - DNA, 660 bp, Morganella morganii
atggtggataaaataccacagattgtcgttgaatcttcattttcatgggatgttgcgttatctggctttttggccggatgcgttcctgcttttatcgcatggatcgcgttgaggaatagcaaaaaagataatgaaaaaaatcgaatggctacactaaatgcaacaaaaaaagcggcgtttgcgcaaactcaatctgaacgcataaggaaaaataccgatactgtagcaacacttgttgcgcactttatggggtactgcacaaaaattttgctatttgttgataataaatatgattcgttaaaatatgcagaaattagattagaattagttcttatccgcaataaattatcaatattactcttaccaagaaaaacaacttacgtgagtgatctcaccgaaaaagacctggaggaataccttagtaagttcaccgcaaaagacctgcaggaaatagcatttgatagccgcgaaaaattactgtctcagatagagcgactactggatataacagaaaaatataaatcaaatggtggtgagtgtagtgataaatctggcgaagtgacaaaagatgagattgaaaaagaaataaatatcttggttcatttatcgacgagttatattgatgaaaaaatgacagaattagagggtgatttactctaa

SEQ ID NO: 283479 - DNA, 192 bp, Morganella morganii
atgcgcatgtctgacaaatattccagccctacagcgtacgcctggggacttataacctctgcttttggcgttttatctctggaccagtgggctattgttgccgggatcatctgtactgtcgggacgttcctggtgaactggtattacaaacggaaagaattccagctgaaagccggagaacatcatgaataa

SEQ ID NO: 283480 - DNA, 273 bp, Morganella morganii
atggctacaattaaattggctgatgtcgtgtcaaccaccactgctagcggtgataaggcagatatttctggaataaacccaacatcaacagactttcttgttggagttgtctttagtggggggagggggtatccagccatgtgggaccagtatggtacgattcgtgacaacagtaactcatggaatattgatatatcatcttcagacgagctaacggatttaagagatacaggattgtccctgttatctgaatcaattaagaaatttttatag

SEQ ID NO: 283481 - DNA, 288 bp, Morganella morganii
atgcgttactcaaagatcaagacctactatcttataaagagcggacatggtcatcatgataatatggtgagatatgacatcattaccatcagcaaagacgaatacttaataagtgtcctttatggtaagcatggggaaccatcccgagttatagagtttaatttcaccagggaagagtatgaaaagcaacacggatgtaatggatgcatgatccattttaatgaccccgtttcatttgaagatgccttagatatgaagtgccaagagcatagagactcgctcgaataa

SEQ ID NO: 283482 - DNA, 645 bp, Morganella morganii
atggcaaatctcacagacctgagcaaccaactccgaactctacgaaagcagataccctttgccaccgctcaggctatgacagctgttgtcagaaagatcgaagacgcacagaaagtggcaatgcagcgcaatctggataatccgacgccatttacggtgaagagcgttaaaagccgtggtgccagaaaaagcgacctgaaagcgaaagtgtttgtgatgaataccgccgctgcataccttgagccgtttgaaactggcggggtgcataaactcaacgggtctgcactgctgaatcctaaagacatcaaattgaacaaatacggcaacctgccacgtaataagcttttcagccttaagagcaaagaaaacaccttcatcggtgatatcgggggggttaatggcgtgtggcaacggaagaaagtgaagaagggcaagaaaggccggaagcgtctgcagcgatcacctaacggaacccgcagagacaggaagaaattaccaataccgaaactgttaatcaggttcggtgatgctctgccagttgaacccgtgctgggatatcaggacagagcaatgaagatgacacaggtactgttactacaggagattcatcgtgcgatagcagaggcgatacggacagaaaaatag

SEQ ID NO: 283483 - DNA, 657 bp, Morganella morganii
atgggacacaaaatcaaaatttcacagctagccgcagaacgcggcgcgcaatgcccgtgtaataaaaaaatgccgagaaggacccaaaaaaaaccaaatatatctgctaaaataatgcaaaaatttgatcgtcaaaaacaaaaaattttacttgaaaaaatgtatgaactatctccagatggagtaaatattaagaatataagtgaatatacagaaatggtgtctatatttaagtctgatgatatacttgtcgatgaagcatgtagaattttcaaatcaaatgttatgtatttagagcagcatggtttgctggagtcatattatgaaaatgagcaaattaatgccgtattccgatggaatcctgaaaaattatctaaagtaagaataacaagtaaggggattgatttcctcgaagctgacggtggattaggagctattctaggtattaaaacagttaaaattcataatgaaactctggaaaaattcgcagaaataattcaaaactcagaccttaaacaagaagaaaaacaaaaaatacttagtattgtcaaagaaaagggaattgagttcacagttggtaaactggttgatgctatagctaataatggtggtcagttggtaagctctgcactcaaattactcattacttctgcatag

SEQ ID NO: 283484 - DNA, 1653 bp, Morganella morganii
atgagtgtacaaatcttaggagcggacgggcgcccgctaccgccggctgccccgaaaatgaaatacggggcactgtccggcagtggtcgggtgccgtatgacgcggcggattcattcagtgatcagatggcgaactggcagcctgcgctgtggtcgccggataatgaaattaacatctaccgtgaccgcattgtgtcacgtatgcgtgacctggcgcgaaatgacggctgggcgtccggctcaataacccgtgtcctggataatgcggtgggtgcctgttaccggccggtattcaaacccgattaccggatgctcaggcaactgaccggcaataaggcatttgatgcggtgtgggctgccgaatacagccggtttattaccgcgcactggcgctcatgggcaaatgacaagggccggtattgtgatgttgaacgtaaacagaccgtatcgcagatgctgcggctggctttccgtcacaagttgctggacggtgacgcgctggcggttctgcagtaccgtcctgaccggcttggtcacggtaaggcccgttatgcgacgacagttcagattgttgaccccgatcgcctgagcaatccgcagcagaattttgatatgccgaatatacgcggcggggtggagattgacagcgacggtgccccgatcgcctatcacatccgcgaagcccatatgggcgactggtgggccggtaagaaaaccatgacctggaatcgcgtaccgcgtgaaacctcatggggtcgtccggtggtggtgcatgattttgatatggagcgcggtgctcagcaccgggggatcggtattctggcccctatcgttcagaagctgaaaatgctgattaagtacgatgaatcagaactggaggcggcaatcctcaacgctattttcggggcgtatatcgaatccccgtatgatgcgcagatggtggcttccgccctgggggataccggcgattttaccggtgatgaactcagtgcctaccagacacagcggacagaatactatcaggacaagcgcctcaatcttcagaacggcgcacgtatcccgcacctgttcccgaatgaaaaaatagtcacactgtccgctgcccggccgaccagtaattttgacggttttgagagtgcggtgctgcggaacatctctgcggcaaccggcctgtcagcccagcaggtcacacaggactggtctgatgttaactattcctcagcccgtgccgccatgctggaagcctggaaaaccctgacccgccgccgtgatgacttctcaaacggcttcgcacaaccgatagcggtggcctttgccgaagaaatccacgatgtggaagatgttccgttaccgaatgatgccccggactttatggacgcatcagcatcctactgccgcgcgcggtggatggggccggggcgcggctgggtggccccggtcgctgagaaaaaaggggccattctcagtatggaagctggtttttcaacactggaaatggaagtggctgaaaacatgggtgaggactgggaagagctggtcgatcagcgcagctatgaacttcagcggtttaaagagctcggattgccgccgcccagctgggcagtggcagaagagtttgcaccaaaccccgataacaaacaggaggcgaagtga

SEQ ID NO: 283485 - DNA, 996 bp, Morganella morganii
atgaaaaaaattggtgatgtcaccagtaccgccgataaaaacggcgagtggacaaacggcaacgtggccgccggtatcgcaccgacaattctggaagcgggctggcttaactccgtccagcgggaaattcttggtgtgctggcaaaagcaggcatccagcaggataaaaataatgatacccagcttgctgaggcgatcagcaaaattatatccggcggggactatgcaacaaaaaaagaagtaaacagtaaactcgccaaagaccagaacggcgcagacatcccgaacaaagatacctttatcaaaaaccttggtttaccggaaaaatttcagccgaaaggaaactattttaatttcagtgcgattactgaaatgccgggaatgggttttagtggtgcatttaccggcgatatcaatgtgaaatatatcaaagggatttctatttcatccggcgccggaaactctgatacagggcagatttatgttgatcacaaagcagttgtcacagcccgttatctgaataacaacggcgatatatatgaaaatcgtattgtgggtgttccgatcggggcaactatcgaatggcagtcaacagcatctatccccgaaaactttttagcgaatgacggacgttcattcagtgcatcagttcatccggagcttgccaaagtcttccccggactgaaacttcccgatgaccgggggctgtttaaacgggcactggacagcggaaaaggttatgactccggacgaacgctgggcagcgtccagagcgatgctatgcggaacctgaccggccgctttggtaatccgacgattgagggcggagatttttctgagggagtcttccggcattccgtcaattccggcggtcgcgctgccggatcaggtgggaactctatagtgtactcctttgatgcatcccgtcaggtaagcacagcaaatgaattcagaccggtaaacaaagcggttatttatattacgagggttatttaa

SEQ ID NO: 283486 - DNA, 354 bp, Morganella morganii
atgaaatactatattgacaaaaaccaggtagtttatgcacttaatcatgacctcaatcctgctgaatggcttccgggtaacgttcaggaaatcagtgaaaaagaagcactgttaatagcaaatccgccgccaacaaaagagcaactgactgaacaggctgagcaacaaaagcaggtattaattactgaggccagtcagaaaactcaggtgtggcagacacaattaatgcttggcatcatcacagatgaagacagagaaaaactcacggaatggatgatatatgttcagaaagttcaggcggcagacgtatctgccgccccggatattatctggccgatgaagccggaggtgtag

SEQ ID NO: 283487 - DNA, 666 bp, Morganella morganii
atgaccgccattgttttccctcatgtttgctgtaatgacgggattattacggatttatccggttatagctgcattcccgaaaaccttggtttatcggaaaagtatcagccgaaaggaaattatcagccaacggggaactacgcggacaagtcatcttctgtattacaggaatttaatggtggtgtcagagcaccttatattgacgcgattaccggtgaagacagaaccggcttcagagtcatcggtcagcaggccattatttattccgttattaacgggaaaatatatcaggtatctattccgacacggacagggaatgcagtcctttcagatgaattgccaaagctaccgttaatcggttctggttcaaggaggggcggtgtcacatctgaacggcagctgggtgtcacttacatcaacgataaaccatattcaattatggtaactgtcatgctgcaatcaacggtaacggagtataacctgataaccagtatgaaaataaataacctgccagcgagtgatttttatgttggtgtcagtggtcagggcaacgggatttttgccaaagccacacattcgcaattggtgttaccccgggagtcttatgtggtgacatcctcaacacagggagcaaagatcatgtcatgggtggagattgccgcatga

SEQ ID NO: 283488 - DNA, 450 bp, Morganella morganii
atgagcggtaaaaccgctgtcaggccgggactgaaacgggcattaaaggccattcagccgggtgatacactggcagtgtggaaactggacaggctcgggcgcagtgtcaaaaatctgatagcactgatatctgatctgcacgaacgcggtgcacacttccggtcactgacggacagtatcgacaccagtaccgctatgggacgttttttctttcacgtcatgtcagcactggcagaaatggaacgtgagttgatagtggagcgtacgctggcaggactggccgcagcgagagcacagggcagagtcggcggacgaccggcggcactgacacagaatgaccgggagcaaatcggccgcttgttggataagggatattcccggcagcagttggcgattatttatggcgtgggggtatcgacggtttaccggtattttccggccacgacgtaa

SEQ ID NO: 283489 - DNA, 774 bp, Morganella morganii
atggatattaatgggtttccaccgggagtaatggaacatcttggctggtatgtataccgactaattgacccaagggatggaagtaccttctatgtggggaaggggaaagagaatcgtgtatttgctcatatgcgtggtgaggtcgccgcggctgatgatgatgaattacttagtaacaaactcaagcaacttcgtgagataagactggctggtcttgaggtcatccatgtaatccaccgacacggtatggctgatgaaaagactgcttacgaagttgaagctgcactcatagatgcctaccccggtttaactaacatcgtgaacggtgctggcagcaacgaatatggtgctgcacacatcaaagagttaattgcaacatatcaacctgaaacaatcgtgttcaaacataaagtcctcatgatatccgtgaacagaagttcaagggatatagacctctatgatgctgtgcgttttagctggcgtgtcagtgttgagcgtgcccgcaaggctgaagttatactggctacagttagaggaattgtgaaaggggtgtatgtggctgatgagtggcttaaatctacccgtgagaactttcctgagatgctttcatgggatgctgatgatgagtttgaatctacccaaaaatctcgcttcgggttccgaggaagagtcgccccccctgatatgttgcagctttacctgggtaaaaaaattccggatgatctgagaaagaaaggagctatgtctcctgtgagatattctcccggcttttga

SEQ ID NO: 283490 - DNA, 990 bp, Morganella morganii
atgagtttccccaaatataaccaaactaattatcaagaaagattaggtgtaaatgctgtcgcagaagctatggcaaaaatggggcagatttggcgtgaaactttaatggctgacgttggaattgatggccagattgagtatgttagtcctgagggggttgctacgggaaggatgatcgctgttcaaataaagtctgggccttccttttttaaggaaagcaacggaaattggtttttccacccagaagagaaacaccgattttactgggaaagattcccgttgcctgtactcataattattcacaatcccgatacaaatttaagttattggcaagatgctcgccaagtgttaagagttgccaagccaacagatgtaaagggtattactatacccaaaacaaatattttacaatctacaagtgctaaaacactatttgaaggatttgcagtcatagatcaagccttcatgtcggtcgaagatgttcttgactatttgattaagactaaaagtaaaaatgcctcatttccggtctcatatttaaatctcttctgcactgggctaactaatatctgtcgctctttatattttagtatggatgtagcagtgactgtagcagaaatagagttgaaaaatcagaactctccttttggagtcggagtaggcgattcagaacataactttttatttgattatataaagttcattgtacaccaacatatagcagatgttgatttttctgactgcatgattgactggtatgatcgtaaaatgcagccatcttttatggcacctctgacgtcaagagggaaaaaattggtacagctcattcatgaattagaatctaggttaaagtcggaaggaaaaatagaagatactggatatttacacgctgcacaggagggttttgtgcaattactatttaccccaagcgagatacaacgaattaaatttacaaacaaaattcaacatgagtacttgaaaaatacctaa

SEQ ID NO: 283491 - DNA, 1326 bp, Morganella morganii
atggaatttaatgaacataccggtgttatggaagacaaatacgttgcaattggcctggaatggttgagtcagatacagggtgataaaaataaattccagtcacgtctgcaacgcgcacagtataattatattagcgtgaccagcgatgctgttttttttggcgataattttgacatcaacctttatggtaaggatattgtcgcgagtttcttcgctcaggcgaagtccttacttgataacagtagggcttacgacatcagtatagcatctcatataatcccttgggttaagcaacttggcagaaactgccatctcattaataacattccgggcgctcgagaacgagctaaacgcatgttagatgaagaaaaggttcatcctgatgcagccttgtttgaattagttattgccggtaactatgctgataaagggtatcaggtggaatttatacctgagcagaaggggatagcaaaaacaccagacctcaagtacctagataataaaggccaagagttttacattgaatgtaaaagactacaaaaaggtaagtatgagattagtgagagaaagtttcataacgaattgataaatcttacaggagcattaagtatccttgggagttttaacttttggttagatattacctacaagtctgagttgaaagacattccagctaactatatttatgagcatctcaaaaaatttaataatcactattatacatggagtgatgcctatgggcggggggtcatgagacctattagtctttacaaactgcatgaaagtattctgaaaaatggttccataatgttcaataccaagtttgcacggctgatgaagggggcggcattgcgtgatgaatatttcaatatatacgcacatgcaaaaccagataagcgtgaccaccgattcattgagtttgtggagcaagcatccttggtgacctggcggtgcataaaccaaaaatcatttgagagtcgttcgaaacatgtcacttcactgctgaaaacaatcgacgatcagcttctaacatatggtccggggattgctcacatcgcaattgatgtcgatatccaaggagatgttgctgacaaacgtcgtcaaaaaaatgatgaagctatcgcccgctttacgccccgttccaatctttgcagaacgatggttcattatatggtgcctagaattgatgaagattctgcttggatggtggatgaaacatttgatgaaaggctgaactaccgtcccgagcttaatttaacgccccagattgctgtttttacggactcccaaattttagacaatgatctgccaggatggcgtcagtag

SEQ ID NO: 283492 - DNA, 192 bp, Morganella morganii
atgcctgaagaaacagctgacaatctgaaccggtattacaccgataagcggggacggaaagttcacgttatccggtacgactgggagaacagccgggtgattttcatgcgtgacggttatgagcacccgtgctttgaaccgctgaaaatctttcaggaacggtatacacgagtggatgaggtgaaaccatga

SEQ ID NO: 283493 - DNA, 465 bp, Morganella morganii
atgaaaaaccaatccctgaaagaagttgtaagagagatgtgcagtctggtccccggcggacgtgatgcaatggccggttcccttggcctgtccctgacgtcattcaataaccggttttatgagaaaaacggctgccggttctttgatcaccatgacctgatggtgatgcaggaagtctccggaactgtgctgtatgccgaatatgttgcggctgagtccggaatgctgctggtggacaacccgaaaaaaagtgaaatcggccgtactgacttatacgaaaagagcgtcagggcatccgttatgcgcggggcggtggacctgtgtatcagtaaggctattgaggacggagaaatcaccacaggagaagcggatgcaatacggactgcacactacagagacatgcaggccagaacagacgaggttgaatccacgattattttatttacccggactcagaaagggtga

SEQ ID NO: 283494 - DNA, 1851 bp, Morganella morganii
atgaacgaggcagttgtcgcagatgctgacaccattatgcaggcttgcctgaatctggcagatccgaagagtttttttctttatgcaggtgcagggtcaggaaaaactcactcactcgtcgaggctatccgcgaactcaaaagtcgcgagcgagaacgcctgacgttcgaagggcggcgcattgcagtgattacctatacaaacgcagcctgcgaggagattctccgaaggctggagtttgatccactcgtggaagtttcaaccattcacgcgttcgcctggcgcctaatccagggattcgacaacgagatcagagagtggctaaggatcaaactagcccaagacattgagaagatcgagggcgagctagcacgctcgaggggtgacaataaaacatctcgagcaaaccgacggaagctacaaagcaaagtacgcagacttgagactctcgacgagattactaagttcatctatagccctacaagtaacaacagagaacgacaagcactcaatcacgatgatgtcatcaaattgaccgcagcattcgctcctaagcgccctttgttggatgttctagtagaccgctacccagttgtattgatcgacgaaagccaagacacccacgcgccagttatggaggctttgctgaaagtccagcaattggcgaagacacgcttctgcttggggctactcggcgacaccatgcaacaaatttacggccatggggtaacgcaccttgataaagcaataccgagtgactggcggaaacctgaaaaggttgttaatcgccgctgtcctcgtagagtggtagactttatcaacgtgattcggagcaccgtagacaatcatcagcagaccccaaagcctgatgccattcaaggtgtagtgcgcatgtactgcattagtcaaaaccaagaacaggcaccaaatcatcttgaggaaaggatcgctcattcgatggctgcaatcaccgacgacggagaatgggctaccggtcctgaaggccggaagaccttgattctcgaacataagatggctggacggcggatgggtttcgagaagcttttcacgcccctctacgcggttgagcaccttcaaacaggcttattggatggaactctgcccgcacttcgcgttttcagcgaaggcgttcttcccatccttaccgcaaagaacgatcacttccttctgcttgaagcagtacgctctcgctcctccttgctcagcaaggactgtatgcaatcaacagtggatcaatcgacccacatacagcgtgtagaggacgcgacgcacgccttactatctcttttcgaaagaaatgacccaacactgagtgaagtagcaacgcttctattgcaaacccaactgcttgatgtaccagaaaatttggttgaggcaatggtgttgggatctcctggtgaggcacccgatcctgaagatacgaatgcgataaccaattacgcctatcagctatttcttgagcgcccattttcggagctggtagcttttgcgacttatacagatggcctttcaccctatggtacgcaccaaggcgtaaagggactcgagtacccccgagttatggttgtcatcaacgatgatgaggcagacggctttttgttcagctacgacaaattgctgggtgtgaaagaaccaacaaaaactgatcgagacaatgagcgtgatggcaaggaccacgcactggctcgtactcgaaggcttctctacgtaacgtgtagtcgtgctgaaaatagcttagcgattgtcgtatacacacctcagccggcactggtcaagcgaaacgttgctgctgctggctggctccaagagagcgagatcgaaatcctatga

SEQ ID NO: 283495 - DNA, 2295 bp, Morganella morganii
atgtacatccagcacatagagatatctaatttccgaaaactactttctgtgcgaattgacttcgctaatgagaccacgctgcttgtaggtgcaaacaacagcggcaaatcctctgccatgctggcactccggagatttttggtttctaaggcttcggcttttcggctccaggatctgactctttgtcacctcgccaagctggatgagatcggtaaagtgtgggagaacgcgccggaagactttgaaatccctacaaccaaggactgggctgattggctccctagtctggatatctgggtgtcggcagatcaaggggaattccactacatccgggatctcatacccaactttgcgtggcgcggggggctagtgggaatgcgttttctgcttgaacctgatgatatgaatacgctgtacacggactatcgtaaggagcgcgcgagggttgcagagcttgaggatgctctagagaaggaagaaccacccggtaggccgctgaagctatggccgcagagcctacatgattacctgaaccgtcggctgggagataaattcaaaatacgttggtaccgcctagatccgcaacaacttaaaaagcctgacaaatcgactagaatggcgcaaatgcagcaattgagccttactgcccagcccttggaaagcaatcctctcagtggattaattcgagtacatgaaatcaatgcgcagcggggattcggcgaccattcggacgacaaacaaggagatcacactagacccggaggcactcaaaaactctcggaacaactcagatcttattactcccgacaccttgacccaggtgatagcccagatgtctcagacctcgaagcgttgcgggcgatagaagcagcccagtcggcattcgatacgaagctaggtagcagcttcgaacctgctattagagaggtcgagggattgggctaccccggtcgtaatgacccacgcatcaaagtcgcaagtcgcctagcaacaactgacggcatgaaccatgaagcggccgtcctttttgagttggattcaatacagagtaccccaggagcccctcctcttcatttaccagagacggctaatgggctgggatatcaaaacctgatatctatgattttcaggctgatgggcttcagggacgagtggctgagaaaaaccagagctgccagcacggaagtaatagacagcgtcgaacccatccacctcgtgctcattgaagaacctgaagcccaccttcatgttcaagtgcagcaagtgttcgtgcggcacgcctaccaagttctatgccgagacgctttgcttgaacgctacccaaatctgaagactcagcttttggtgagcactcactccagccatgtaacacatgaagtggaataccagaaccttaggtatttcaggcgacttccagctgggatgtatggtatcggtgtaccggtgtcgacggtctctaatctctctaacgtgttcggcgagggaacaaagacgaaggagttcgtaactaggtatctacgggcacagcatgcagatatattctttgccgatgccgtcatcttggtagagggttcagcagagcgaatgatgctgccgcattttttgcgaaataagtttccattccttgatcgctgctacataacaaccctcgatatcggtggcagtcacgcacaccgattaaggcctttaattgacgcccttggcatcctcaccttggttattacagacctcgatgcagggcttaataaagctgcaaaaccggtgcaaagaaactcagatcagattacgaacaatccgacattgcggagctggatgaaactgatgcatctgggtagcacagtggatgaactgcttgagttaccagcgaaccaaaaagagcacaaaatcgacgacctgtactcggtacgcatcgcctatcaaactcctatttccacctacctgccagctactggtgaagcaatacaagctcttccaaatacctttgaagacagctttgtgtttagcaacgcgggttactttgcgaaaaagacaaacggtactggtctgatgaaggctttcgtaaaagttttgaatgaggcgcaaacatcagaagccgtcggagcagggtttttcaacgaattacgcgaagggaagaaagcagagtttgtattgctcgttttgggcgacaaaaactttcccagcctcgaaatccctgagtacatcattgaaggcctcaactggcttgagtccaaattgcgaagcaagcaaaaagagcttctggtaattccgcccgagggcgtggaggtgacgtcatga

SEQ ID NO: 283496 - DNA, 132 bp, Morganella morganii
atgaccatagatactgtcgttatgattgctcatgtgcttcatgtttctgtaaacgagttactgagtgattaccttgcctcagagtacagtgacgttatgcttttaatgaaccatcgtaataccgatagatag

SEQ ID NO: 283497 - DNA, 474 bp, Morganella morganii
atgccagtaactattgatgcaggtgatgtgatagctggattagctttccttttatctggctacgcaacatggcaaacggtcagctttaataagaggcagaagtcacttgtcgaaagccaagaaaagctaaacacaattctcttggaaaaagaaaatgaagatgctctgaaaggaaagcaagctgaccttggtgcatcaattataaaacttggcagcagtaagtatcggcttaagatttggaataaaggagctgctactgcaagaaacgtcagaattgagttccccgaaggtaacgatttagttattgaatcagaagtgactgataaatttccgatggaaagcctcgaaaagtatcaagctgttgagctaatagccgctgtacatatgcaaacgaaacgaaagcatgttgttcgactagtttgggaagatgatgcccagtcttacaacgaaaagctgtcttaccccacactgtaa

SEQ ID NO: 283498 - DNA, 282 bp, Morganella morganii
atgaatcctgaaaaatacaatagaagtataagcttgctttgcccgacttgtggctgttcagacttttcctacgaagacggttgcgatgaaacaatacaagtaatgacttgtgcatcttgtggcagagagttcaataaagatgagtttattcaggagaatagcgaaaatattgacgagcacctttctgaaatcaaggaagaagttttaaaagacgttcaagacgaactatgtaaatcattgaaaaaggctttttctggtagcaagaatataaggattaagtaa

SEQ ID NO: 283499 - DNA, 1425 bp, Morganella morganii
atgttaaaacacagcgacaacactatctctcgccgtcaagaagttgggcgtggtttacgtctggccgtcaataaacatggtgacagacaagaccatccggcaactgtgcatgaaattaatgttttgtcggtgattgcaagtgaaagctataaagactttgtcacgaatctgcaaaaagaaattagcgagtctctctcagagagacctagaaaagcagacgaagcctattttacgggtaagacaatcacaactgctgatggatctgtagaaataacatctgttatggctaagcaaatttataaatatttgctaaaaaatgattataccaatgaagcggacgattcaatcgcgccatcattccaccaggctaaggctagtggacagttagcgccaatgcctgctgagttagagccttatcgagagcaaatattgaccctgattgacagtgtttatagtgaagcgcaacttcctagcgttggtgatgatcgtaaacctaaaaacaatccgttgaatgctaattttgataagaaagagtttcaggaactttggcacaaaatcaatcgaaaagcggtctataaggttgattttgactcagctgaattgattaaaaattgtattcgggtattaaacaaagaacttaaagtaactcctcttcaatacaccattcaagatggtgttcaactggatggcattacagatgaacagctaaaagctggacaaagtttcaaagtgaacaataccgagactgaaactcatcaatcgagcattcattctgctgttcgttatgacttggttggtaagttggctgaaaattgcgtactgacacgtaaaacaatcactggaatactgatgggcattgaatctgaggtatttgcacaattcaagcagaatcctgagcactttctagctgaggcttcacgtcttgtgaaagagcagaaggcatctgtgattatcgaaaagctatcatatgatccaacgaacgaatcttatgatgttgatatattcacggcagagcaaaaaatcacagatatgacaaaagccgttagtggcgttaataagcatatctatgattatgttgtcgttgattcacaaggcattgagcgggactttgttaccgagcttgatacaagcaaagaagtcgtggtttatgcaaaactgcctcgtggttttctgataccgacccccgttggtgactacaaccctgattgggctatttctttcaaagaaggaagtgttaaacacatttactttattgctgagactaaaggaactatgtcttcgcttgaattgcgaggcatagaagatcgaaagattgaatgtgcgaggaaattctttgaaaaaattaatgcagagatcacgagtgaaaacgtcaaatatgatgttgttacgagttactcgaaattgatggaagtcgtaagcggctag

SEQ ID NO: 283500 - DNA, 1152 bp, Morganella morganii
atggttacgttttggggaaattatgaggggatctctcaggataaaattattttgtccaccggaacaacattctattttctcggtacgtctgcggcatccgcacagtcttataccggcgatctctattttgatgaattcttttgggtggctaacttcgccaaactgcgcaaagtggcggcggctatggcctcacaggtcggattccgccggacttatttctctaccccctcatctgaagagcacgaggcttatccattctggacaggggacttcttcaatgaatcccggcctgaatctaaaaaaatcagtattgataccacacacaaaaccctgaaaaacggtgcgctgtgcggtgacaatatctggcggcagatggtcactattcacgatgcaattaacagcggatttgacctgatatcactggaggaaatcgaaagcgaaaacacccctgacgatctcgaaaacctctataactgtaagtttgtcaaagccggtgaacgggcattcgactataacgcccttatttaccgtggcgttgacggttataaccgtgatgtctggccggactggaagccttacgcagacaggccgctcggtaataagccggtgcgcattggtgccgacccgaccggcaccggcggcaatggtgacggcctcggccttgctgttcttgccccgcctgccgttcccggcgggaaatggcgggttgtcgaggcgcttcgcttccgtggcatggcctttgaaaaacaggctgaagaaatcagaaaactgacactgcgctacaacgtgcaggggatcaacattgatattaccggcggtaccggcgaggccgtgtatgagctggtgaaaaaattctacccggcagtacagggcatccgttataccccgcaggttaaacggatgatggttcttaaagcacagatgcttatccgcaacggacgcattgaatatgatgccggggcatcacagatcccgtcgtctttcatgactatcaaaaaagtcatcacacagggcggcattgtcacctatgcgtcagaccgcacacgcggtgttgatcacggggatattgcctggtctgttatgaacgttttatacgctgaacctatcggcagcgaatccgcagacagcggatcctgtgtatcggagttttaa

SEQ ID NO: 283501 - DNA, 1047 bp, Morganella morganii
atgagtaaaaaaaatggcacatccaagcttagcgatgctggagttattaatgaagaagttaaagatgtagttgaaaaagaatatgaattttatcgttcaaagggagattatattttaattcaaataaaagagcaaataaataaaattctagaagagaatgaaataacacttggagtgccattggagtcgagggttaaaagtaaatcatcaattttagaaaaaataagaagaaaaaaactgaagtttgaacatattactgaattaaaagacttccttggcttaaggataattcttttattcaaaagagatgtggataaggttgtaaaatgtattgaaaataatttcatgcctattaattttgatgaaaagaaagatgaaatagacgtagagaaatttggataccaatctattcatcgtgtagtgaagacatctgaaggatggcattcaataccaacactatctgatagtaaattatttaatattgaaattcaaattagaacgctatctcagcatatatgggctgctgcttctcataaactacagtataaaatagaagatcagataccaaaaccattacaaagaactattaatagaatgtctgctattttagagttggttgaccttgaatttgaccgcgttctttatgatagagatgcttatctttcagatattgaaaacaagactgaagatgttattggtatagattctgctctcaatattgaaatattaaaatatatttccaaaaaataccttcctcaagaacgtttggcaagtgatgattcatattctgattttcttttggagctgagggaaaatggaataacaacagcaggtgggcttatctctataatagaatccaattgggaaaaaacaagagagctggataaatcagtggctgactcgatgatttctgctgctattaagaataatagagagataaaagatatttggcatggtggtaggtatttcaatgatgttgagctaattaagttatgtgcattagaagatttctctaaaaaaggaaaggaatataatatggatatataa

SEQ ID NO: 283502 - DNA, 156 bp, Morganella morganii
atgaatatccgctgctgtattggtttgcataaatggactgttttagaggcgttctgttgggatatgacaagcgaagtatcttttgccgaacttaaattaggctgcttgtgttgcgggaagacaaaagttgtaagaaggaaagttggcaatgaataa

SEQ ID NO: 283503 - DNA, 408 bp, Morganella morganii
atgaatacagcagctgatttgcaggtaacggaaggtgtcggaagaggaaagccggaaatacatcgtgcaccaagatgggacagagctgtatctatggccatagatgaaaaaattgatgggatgaatattgctgcaaaaatgcgggcaaatttgttccaaattcagggtaagccactgaatgctggcatgggcgactttatgaaagaattacggtcacacagtaataataaagtcagaaataataatcgtgttttgagtatgattttctttttagcagaaatagaaaaagaaaagcatagccttaaatttgaacaattaacacataacgaacaggtgaggtttattgaagcaattaaccagataaaagcagtggcatccatatttccgacagacttagcaattaagtaa

SEQ ID NO: 283504 - DNA, 486 bp, Morganella morganii
atgaccaatcagtgcaacgtttccgacgatacaatatttcaccttcactggtgctactttatggaagatatgacttccacattttattttcggatagataaactgtgcatattcatgcaactgcttcttggttctgccgtcataggtaacatcatgaatacaacactgattggtcttactatcgctataattgccgcataccaattcagttgtaaccccgccaaaatagccaatagtgcaaaaaaacaagctctcaattattctgagcttattcatgatattaataaccatgatgacgtcagtatcagagagaacataaaatctttggaacctaaagatagccctattttgttgtctatccgaaaagcaagttatatccagtcctctgtagcgactggaaatatgaatacagccgatgcaaagctcaaaaaactgaacttgtttaatcgcatgattatttccctggccggcggtattcagcattag

SEQ ID NO: 283505 - DNA, 219 bp, Morganella morganii
atgcaacaggttaattatcagcttattcgttacaagtcgcactgttctatttatcgcggtttcagtgtccacaagctgccacgcaacgctacaagaaaaattacgcagtaccgcgtcacgcttggtgatgactcctttggcaagtttgatgcattggcggaggcgattagattcattgatgggctgtttaaatttaaatcaagattaaacagccgctaa

SEQ ID NO: 283506 - DNA, 300 bp, Morganella morganii
atgtcaactccgaaaaatgaaaagcttaagctgattcgggaatctgaacgtctaaaactaaaggaacttactgatttgataggggttaattaccatacctatcatggatacgaatcaggaaaaatgaatatgtctcttgaatcagctgaaaagctatttgctgttccccgattcagaaaatatatgacctggttcatgtttgatgaagtcaatcccgaggctggtcagatagcaccagccctcgcacacaatgggcaggacgaaacaacatcaccccgctcagacaagaaaactggttaa

SEQ ID NO: 283507 - DNA, 1695 bp, Morganella morganii
atgacgtccattatattcagaggtatagggaataatagtttctcaacgtggaatttccttaaggccagagcgaaacgcattgtcccggcacttaccactgtaatcattatttgtctgttgttcggatatttatgctttgatgttatttcatacaaaatactagggcagcactcagcaggaagcttgacatttatatcaaactatatataccaatatgaatctggttatttcgatgagtcatctcgcaataaggtcttgcttcatacctggtctctatctgttgaatggcaattttacattatatatccaattattttatctatattaagcaaatttatatctatagataaattaaaagcaaccgtgctttttcttatgctggcatctcttttgtggtgtatttatatctcgcaaaaagaccctgtatcatcatattttatgatctattcaagagcatgggaaatgatgctcggaggactggcatttttatacccaataaataccagtgatagaataagaaaaattatagaaataattggactattattaatagctatatcattttttattgtcaacgaaacaatgtcatggcctggctattatgctgtgatccctgtgattggcgcatatttttgtattctttctggaaataaaaaaacaattctttcttggaggttaatccaatatgctggtttgtggtcatattccatttacttagttcattggcctgttttggtttttcttggcagatttgatatacagcctccattcatattgtatttatccggagtttttctgacttcacttgtaatttaccaattggtcgaaaagaagagagattaccattatggcatgcttttaatttacattgctacactagccttctcactggtaatttattttaacggagcagactggcggcttaccaacaaacagtatggtatgaacagaaacgaatttagaaagaactatgaagggcacctatggatgcattcaaaagaaaccatagactatttcaacgctgatgaaaatgattttgattacatagttcttggggatagtcacgcaagacattattatgcttacttcaaagatagcggattaaaggttgcgtcattagcaaccgacgggtgcaaagtaactaaaaacttcatgacacctatcgattattcagaaaacataaaaaacatatgtactaatcgatacaaaaaagcggttgattttattaattcacatccaggtaaaaaaataatatggatgcaagcgtggtactctggtcgcgtcggtgaaccgctgagaaaagatgttgatagcgaaaacaatttcgttagtgagattggttattttcttgatgatataaaatcatcaaactcgaaactatatataattggtgatactcagggcagcaaaaaaataatgtaccaatgcctagcaagcaaagacctgcctatcaacagactattcacaaagtgtgaagaatttcaagaatttaaaccattcaaaataaatgaaaggttttcttcccttgctgattcacgtgatgatgttgtatttattgacccttccccagctctttgtgacgatgagaagtgtaaggtattggacggtgatgaacctgtgtatacagataattcacaccttacaataaaaacatcaaaaatcgttggtgagtatattttcgataaaattaaataa

SEQ ID NO: 283508 - DNA, 393 bp, Morganella morganii
atgacgacagacgaatttacagacaggatgatcgggataccgtgggttaaccgggcgtgttcatttactgcgtgtgactgctggggcctggtaacgctctattaccggtacgttgtcggtgctgaaattcatcacgacagcggttatgaatcagacagtgattttatgacctgttatcaaaatgaggtaaatttctggaaggcggaagatcacccggtaagtggcgggatatttgtggcctatgacggttcggtgcctgttcatgtcggtattgtgctcggcgggatggttttgcacagccggggagataacggacatgtccgcctggacagattactgaccattcagcggatatacagcaaagtggagtttatgacttatgccggtaattga

SEQ ID NO: 283509 - DNA, 624 bp, Morganella morganii
atgtcttcattaatattttacacggacgatgaacaagcggtcatagcaacggatactttggctgtgacgccggatggaaagccttattttttcactaataaagcgacatatgttccaacgctcaatatggttgtttcaggccttggggtagggacgatgagcgcggaatggcaagacaaagtatcccatggccttatatatatggatatggatcatttaaatagtcatgcgtcaaagtatttgctggaaatgtacaaagagcaccagaaaaggtacggattcggcaatgaggaaagtgcaacaatttaccatattggatattctgctaaggaaggtggttacgctgcatatgcatttagatccactaataattttcaatgcgagagagtcccgcatggaacagccgcaaagcctgactgcgatatattagaaggcaacctgtttgatctaataccaacaatgatgcaacaacaacgaagcatccaggaatcaatgccccaagaccagcgcatttatataggtggtgaagtttatgctatccacttgaccagtggtaaagcggtgtattacagacttgctgagtttgaagactacaggcaaatacaaagcgaaatatttggataa

SEQ ID NO: 283510 - DNA, 3549 bp, Morganella morganii
atggcacaagtaggcgaaatcgtatatcaggtgcagatggatgttgctcagttgctgacatcacagcgccagctggatcagcggctgcggagcatggaaggtgggtttaaccgcacaacgaccgcggtcaatggtacagagcggtcaatggcctcgctatctcgggttgctgcgtcactgactgcttacctgtctgtgtctgccgtcgccagctacgccgaagcgtggacggtacttaataacaaactcgtcaactccataaaagccggtgagacgctggcggtggtgaatcagcgtgtatttgatattgctcagaacagccgatcaagccttgatggtatcgcaacgctgtattcacgactggaaagggctatgcgcagtgccgggctcagtggtcaggaattggggcaaataactaccacaatctcaaaggctatgaccgtttccggtgccacggcggcagaatcagaaggtgcgctgattcagttatcgcaggcactggcatcaggcgtactgcgagggcaggaattcaactcaatgagtgaacaggctccggcactgatgaaaggacttgctgattctctcggggtgagtatcggcgaactccgcaagatggcaggagagggtaagctaacaaccgatgtgttattaaaagcattccgtgaaatggggccaactattgagagggagtttgctaacacaacacaaacaatgtcgcagtctcttcagattgccagcaacaatattactaaattctttggcgaaaacaccactgttaaaacatttacgagaatattcaatgattcggttgtaactataagtgaaaaccttgacggattaacggcagtgctgacggtggctgctactgttatcgggagccggtttgctggggcgatggcgttggccgcgaaagaaaaaatacagggagtaattgcagccagagcgttaagcgttgcagaagtcgaggcaacaagatcggcagagttacatgccgctgctgaattaagggttgccaatgttgcgaaacaaagaactcttgatgagctcaggttagcaaaaaacctgagagatgttgcaataaccgagaatcaggttgtcgctgctgaacagcgattgtcacaagcaagacaggctgcggctatagcaacgggaaactataattctgcactggcggctcatactgcggcgcagaatgcagcaggggcggcagcaaacagagcaagtatcggaattggaacagctttgcgtggcgcacttagttttattggtgggcctgccggtcttgctgttgccgcggcatcggcattgttttatttcagccagagagcgaaggaggcgagagacgacgccaataatcttgctgacagcgttaataccctgatcggtaaatttggcgaaatgagccgaattcagatagctgaggaaataggcaaggcaggagaaaaaatacctgaacttaccgaggctgtggctgaggctcagaaaaaatatgatgatcttacatatgccgttaatcgcaaccagcaaacggtggaacgttacggtgaatcaaacagagcaggcaaggaagcggcggcagcgttagcgattaatctggataggcaggccattgcagccggtgagctcgacagggctcaacagcgtttaagccagacacagaatatgatccgtatgggaagggctcaactcaacggagaacttctgaaaggtgctgacttgctcactgcggaggccaggactgcactaccgaatgccggggcggcactccgtgcatatggaattgacttagaaaacgcaacaaaagcaaagcagaagtttaattcacagagcctgatgatggatttcggcggcgcaaaaggcgaccaactcaaaaaagacatggatcgcaggctggagctatccaaattagaaggtgaagcaaaagcaaaattacaggctcgctatgcggcagaggatgccggtgtcgtcagtcctgatgccgtcagtcgtcttgaggatatggctgctcaggaatacaaaaatactgaagcaaaaaaagaaggagtaaaaacagccaaagcagcagccagcgcagcagcaaaagaagccacagaagcggaaaagctcaaacagaagataactgacctggctaatgcgacgaaggttgcagagttggagacaaagggtctatccagagaggcagcaatccttgaggcagtgcagaagcttggggcaaaggctaatgcagcacagatagccgaaataactgaacttgccggcaaggagtacgacctcactcagaagataaaagaccggaaagatgcctttgagcagaatcctagggtgaaagccgatcaggatatgaaactggctcaggagcaacttgagcgacaactgaaaggtaagttggtgaccgaagagcaatatcagcaacgcagggcggcgatacacgcggagtattcgcgcaaaatatcagaagaaacatcaaatggccaggtgaatattgtcgctgagaatcgggcaaaaattgacccaattcaggcactggctaacgaaaatgctcagaagctggcactgatggaatcgtactatcaggcagaacaggcattgttgaagaagtcgcagcaggacggtcaaatcagccatgagcagtacgtagccgcaaaacaagctacggacgcacagtatctggcgctgaaaaccgcacaagataagcagtatcaggaacagcaactcgcggctcagtgggaattgcttagtcagcaggggttaggctacgaaatgctgacatcggcaatagactccttcggtggcaatgcctctaacgtcctgacaggcttaatgaccggaacaatgtcagcagctgatgcaatgcgctctctcggaaataccatcctgaacagcgtagtgaatgcgattgtccaggttggcgttgatatgctgaaaaacttcattctatctcagactcttggcaaggcggcagagacagctaatgcagcatctgctgttgccggtggtctggctgcggctgcggcatggactccagccgcgattgccgcgtctattgccacaggcggtgttgcatcagctaccggtctgaaagcgtatacggcggctcaacttgccggtagcgcactgagtattgccggtgcgcgtaagaacggcggtgatgttcgcggcgggtcagcctatgagatgggtgagggtaatttaccggaactgatgcaaatcgggaataaactcatcgccattccgggtaataacggaagggtattcagctacgatgatgtgaccggagcggcgatgataccaaaagcatcaaccgggccaaaaccatccaaagcgaaagataacagctctgatgcgagcaattatcatggtgggattaataacctcaccgttgttatagaaaatcatggttctccgaccaccattgccgggcaacgcatggaaaaaggactggatgagagtgatgtgcttagaataataatgaaagatgcacatgagaaaggccctggtcttcaggctataatggctaacacaacagcgggaccaagacttagaggatga

SEQ ID NO: 283511 - DNA, 255 bp, Morganella morganii
atggataacacgataacaagttcggacgtgcttcttgcaccaacacatctcaactatactgcattgctcgaaagcttaggggattacctgcaagtaatccttgtatgtaatatagtgattttgaaccctgagtacaacctcggttgtgtaatcttttattgttttttactgttttttattgtcagtgtgagccgtttcagactgttccggttcgttccaagctgttccatcttacagacaacttctgccaactga

SEQ ID NO: 283512 - DNA, 369 bp, Morganella morganii
atgatacacgaagcgtttgagcgttatctgaaccgcgctggtctgctggatgatttcactgttcagaagcatatatggatagaaaaccctgataccagaatgcagcaatacgccgttattcagactgacggcggtagtggcagatttgctgaccttggcgctgatgacaatgtaatgctgatcctggtgtctgcacagcacgatccggagccggtactagccagggcgaaagatatccttgattatgtagcgtctcacccactggactgcgaacttaactcaatctacaacctcggcggattaccgaagccgataccgacagaagaaggccggttcatcatgcagatggctttccgctgcacatcctga

SEQ ID NO: 283513 - DNA, 561 bp, Morganella morganii
atgttcaatactgcgtatcttaaatctctcgaagtaagaaaaccgctaaccacaagactgatgagccgcattgaggtaaatgataaaaccgggtgttgggtatttatgggcgggaaagaccgctgtggttacggaagaataaaggttggtccgcacagcttaggcgcacataaggtggcatatttaatgctggttggagattatgaccaagcaaaccttgagctaatgcacacgtgtgacaatccagcatgcataaacccaaagcatttgattccggcaactcacagagagaatatatatgactgcatttcgaaaggaaggcatacatatcaaaacggcatccttaacaaatttatacattgcaaaaaaactgacgttaattcaggtggtttaataatatataaaagtagccgagctttagctttggataatggggataggaattatgctggctccccatgcaaaaaacatcagtcaacaattcgccgctcctcaaatggtcagtgtatttattgctataacgattacctattaaaaagacgcacaaaacgagaaaattaa

SEQ ID NO: 283514 - DNA, 378 bp, Morganella morganii
atgaactggaaagaagcggtaattgctgcgctgtttattgttgccgcctggtgggtatatgacacctaccgggataaccagcaactgaaggtgaataacataacgttgtccggacagctgtcagcacagcggacgataaataccatcacgctttcagccgttgccatcagacaccgcgccgcactcgacaacatcaaagccaaagaaactgagggcacggagaatgtcaaagttaaaaccgttatcagaacggagtttaaagacagtgagtgtgctgttactcctgtttcccctggtgttgttgggaagttgcagcaatacgaaagagacattcgtgcccgcgccggtggtgcctatcccgccacagctgaccgctga

SEQ ID NO: 283515 - DNA, 477 bp, Morganella morganii; identical to SEQ ID NO: 278012

SEQ ID NO: 283516 - DNA, 201 bp, Morganella morganii
atgaaacctgaaatcacatcgataccggaaatgctggttaagcaccacggaaatatgactgcactggcgagcgagctgggaataaaccggcatacagtcaggaagtttcaccgtgatacccggtgtgaaatgcacgttatctacaacggcgtgctgatgaccaaatccaagatgaagggcaaccaggggaaaagcgaatga

SEQ ID NO: 283517 - DNA, 177 bp, Morganella morganii
atgaaaaaaataatgccacttatgatcacggcggcggctatgggcttgtcgccgaatgactttacctggtcgctgcgtgatagcgcaagagtttatcactatccgctgtcacgcaaccgcattaccggtcacaggaaactgaaccggcaggcgcagaagcggaggaaagcaaagtga

SEQ ID NO: 283518 - DNA, 210 bp, Morganella morganii
atggaaccaacggattttgaaaagtggtgtgcgggtgagcttggctattcgcctgagtgggtcatgagcagacggagaaaagactttttcggtaccactgggtacaagttgagcgagattgaagtcagataccgtgcatggaatgccggagtacgcagcagactgccgtaccagacaccgccaaaaggagatgaagatggaatggattaa

SEQ ID NO: 283519 - DNA, 684 bp, Morganella morganii
atgactcttgatgaactgacattccataaacagataattgaacatgcaaccatgcccgaaagttttcgtttatctggatgggtgtacgttctgagcaatgagtttatgccggggatttacaaggtcggcatgacgactatctcaccagagataagagccaaggaactgtcttctgctactggagttccggcgaaatttaaaatcgaagaaagctattactcaaacgacccacttggcgatgaaagactaattcaccaatacctcgctgattgccgggtgaatgaaggacgggaattctttaagggcgacctagaacgaattttatcggtctgtaatgacgtgactgagttcagaacatccgcaacggttgaggaaatagcagaccactacgacattattagcaccgaaacgctgaacagattaaatatcagtgatctttttgattcattgggaattaacgtctttgggtgccagcttgccgcagcagaaagattaattcgaatagcacataaatgtttcattgaaagtaacagaaagaacagccgttctcttttcttaaatgaaggcggagcctttctcgtcagaagtcaggtcgaccagatgtatgaaaaataccttgaagaaaccaacgggaaaggcaggccagcggagccagctaccgaggacacaggagtaccattttaa

SEQ ID NO: 283520 - DNA, 483 bp, Morganella morganii
gtgagcagaaggctaagtattttaaaatcctcgctggaaaagaaagaagcgaagtttaacgaaaaacttcaagcccactttgacaccgtaaagcaggcgaatggtcagccacttaatgacaagcgcaacggaaaatcaacgcttgataagtggaataaacaaagtgacgcattgaggaatctggaaaaaagcatccaaaaaacaaaggatgcaattgaccgggaagaaaacaaaattgcgctatctgaatcagtcgcactcccgaaatacatcagggatgcagttgaaaagggattaattacgcagtggcgtaaatttccaaggttcttttttgttgtcggtgtgaccggtgggcggatagttctggacgaagaaaccggcatgatttcacaccgatacttaagcaaggtaaccaaagaagaatacccaacttttcgggatgtttttaatagccttaaccagcagtcaaaacaacaaaattaa

SEQ ID NO: 283521 - DNA, 387 bp, Morganella morganii
atgtcaggacatccacatgctgaccttatggctaaggcagcagagatagcgaagacggatcagtattggcagcggaactttgaggaaaaatttcacagcacggataagtggaatcaaatgtcagatgtgttctttcaaacacacaaagaataccggctgaaacccaacttcatcgacattaacgggcataaggttccggagccagtgcgggaaccgcttaaaatcgggcaggtgtattggttggcacgtatacatggtgccgttgatagcttcgagtgggagggtgaccacgaatgcagagcctggcttgagtgcggactcatccacctaaccaaagaagccgcagaagcccacgcagccgccctgttctctttcacacagaagtaa

SEQ ID NO: 283522 - DNA, 360 bp, Morganella morganii
atgaaaaataaagcaacacttggctgtaactatgccggtcacgatttcggcgctcattaccctgacagtcagtgcattgacggcgttctgtgggatatggatgcttgtgacggcagcggtaatctgtatgagccaatgacgtacatcccatgccctaaatgcaatacacaggcatggttagataatttccgctgggaatttatcaatgatggggcatgcgcaggcagtgacggtaagccattcaataaaattcgcaccatccctattccagccgtaatccgaaatacgcccggtgcatttaaaaagattacccgccggctgaaacgcggttactactggggcttgaaaaataaagattaa

SEQ ID NO: 283523 - DNA, 231 bp, Morganella morganii
atgaaacaggtttcggtgcaagcaatgacaactctggtgttaattgacggagttacctatcagatagttctgccgaaaaacatcgtggcgcttatggcaaaacaggcactggtaatgactcaggaatttggtgggaaaataatcccatgtaactttgccagtattaaaccaatggatgctgacgggatgccatttaatataaacgacagtggagcggagaatgagaaatag

SEQ ID NO: 283524 - DNA, 600 bp, Morganella morganii
atgaaaaagtatgacttaattctcgcagacccaccatggcaatataataataaatcctccaacggcgcagcagataaccactacaacaccaccgatttttattccctcacccgcttacccatcgaaaaaatagcctcggaaaactctgtcctctgcatgtggtacacgggtaactttgtccgtgaggctttcgagttggctgaggcgtggggatttaaagttcgcaccggcttcgggttcgtgtgggtgaagctgaacaaaaacgcaggggatcggatagataaacatccgccggaggatttctttgacttcatggagttactgaacgcagagacacggatcaatggcggcaactatacccgcgctaatgcagaggtatgcctgattgctaccagaggccgaggactagaacgccggtcagccagcgtccggcagattatttattcctgtctcggtgagcacagcgagaaaccgaaggaagtacatcaccggctggaagagttatatggcgatgtcccgcgcattgaactatttgctagggagaaatacggcgaatgggatgtgtacggggatcaggtggacggaagcgttaagttatga

SEQ ID NO: 283525 - DNA, 315 bp, Morganella morganii
atgtcagtaaaaacgctgcactatatttatgatccgctctgcggctggtgttatggtatcgcgccgtttattcaggcagcacataagcagggcgtgacgatcgccctgcacggcggcggaatgatcaccggctcacagcgccgcccggcagatgacagcatgcgggagatgatccgcaaccacaatcagcgcatcactcagctgaccggacaaccgtttaccgatgccttttaccctgctgaaaaatcaggagtgggtgatggattccgtgccgccgattgccgctattctcagtgcacaggcgcagtccggtaa

SEQ ID NO: 283526 - DNA, 1443 bp, Morganella morganii
atggatactctgagtctacttgttgctcgtttggggtggccatgtgcgtctactcgttggtggactatgcaagagttgtcatcatatcttggaaatttaacgactaaatcggaaactgagcgtttgctgattgagcgattgtgctcgtgtaagcttgaagcggaagtggtagagattctgtgcattttttggatggctcaacttgaacatgattactcacctattgagaacttgattaaaaatgttcctaaatcttcacttctttcagatatgttgttggaagtcctcgttggacaatgtcctcaagatgactcagatcttaagttgtttccaagtgattttgatgtgcctgatgactttaacggaatacaaggtgttgatgttccgagaatattccgaacaacaatggaaagactggaagagcattatcgttttccttttgttcggcaaatggcgtttgaatggagtatgaatgctacgatatacccggatgctcaatatcaaggggatcttgggtattttgtacgtccactaggtgatggtttcattggttcattctcttcaagatcatatctccgagctatttcctcctaccttcgaacactcgcgatcgcaaaaaaattctggggaatgccgccaaatttgattagaaaaaacctattgatggcactacctatcaatcctactttagcgtttatgaagcctaatcgccctaagtggtttcctgataaaacagactttgacggtgattatgattcaatatcttcttcaatatcagctatgcttgctcgagttgaagaaacatctcctggcaacgaactaattgcatttgcatcaccaataataatgtctatggagcgatgcgtagaagtcactattgtaaggtggtctcaggctgaaggaagtcaagtagacgatgataatttggcggaatatatcagtactcatttatctgacagtgtcctaatttctaccaaaactgaaactccattgagtacaaaaactatcctatcgccaccaatttttcagcaattgattgacccgtacagtaaggtttggccgcttgctggcattctcgattttagtcgtataggctaccttcagcatgatttatacccatcacgactttttattccaacgttgcccaatttattcgaggcagaactcatacccaaaggaaataaattgtatattgagatagattctaaggtcgttgctgagcttatttattggaatggtggttggggaccagcacgacatatgaagtttggcggggggtgtggtacggcgcttatctcacgcgatcaggagtacagcaaaacttccagctctaaagaaaaatcaattaggcagttttacttttggcaggttcgaacattgaaacgggaaagaagttatgaagattttcacgaatcattagagactggtattttgtttgtttag

SEQ ID NO: 283527 - DNA, 1959 bp, Morganella morganii
atggccgtcactaatgtcacagttaattttgagaataaaaaactactgagtgatgcatgtattcgtgcttcagcatttgctggcgtatgcattactgcaagagatgattttcattctctccttcttacaccattggttgcatgtgttgaagatataaccacccgttcttgttcgccactgaatgtatcaattccaatcaaatggcaggatggagattactacgctcaaaaagaagacctagcgacacttatacatcattggttctttagttccgtacatttggaaatgtcgatggcccttgagggacagacaaagtttgaatatgtgccagcacctttatttaacgatagagagaatattactgacttactaaatactcttgccggtattgcttctaaagtcgctcactattggttacgtggggactctgtccaatttcatcaactttacgagatgttcgagcctattgaattacatacttttaggcaaaaccatcaacagaaatctgctactgaagattttagacgttcattacatcgtgtagcttgcgatattcaccttgttagtattttattgaacgatacagatagcgtgcttttatctgaagaaagtattcgaaaagcaatcgagtgcaaatggttcgatgaggtatctttcagagaacagtattcagaaaattctcttgttaaaatgacgaatgaagctgcttctgtatttattcagtcacagtattcattgtggcaggcagaggttcaagaagaaacaagcgttcatcttatgatgccacttcagctttgttctatcgccgtaaagcacaatttaatttcacaagctcgtgaactgtgcatacaaacgtgggaactgacaacaggttatagtcatcgaaaagatcctacattgagcaataccgtaagtgctattggttatttggttgagtcggcaccaaaagaggcgctgcagcttctcagccagatatctcctcagattcataacgtattgaactatacagatggaaaaggcactaggcatattttagaagccactgatgaactgctagccaaattgaaccctgctgctttgattgtcaagtttaatgaacatactgatatgggacagtggtcagaagcagagaatagtttaagagcatatgtagctcaaggagttaaagatgggtggcctttagattcgttgatgcgtacaggtttacatgcagaaatacatcaattattggaggaacaagcactggagggatgtgcttacgctgcagagcttctttctactttagataatcatagtggttgggatatcggtttattatgtcgagaagaatactccagcgggatttcagaaagtggtacttacgagggagatccgactacttttgagccagaacagtttgacagtttattagacagtttttcgggtagttatgaacaacgacagaaatttgtacaagattggtatgattattgggataaaaatggccaaggacgaaggttgttagatgttatcgataagaaacttctacatgagaaagaaagacattcggaactctcgtatctctatgagtcagcttttcatactaggcgtagattaagtggcaaaaaatcggcgtggaaataccttgttcgtgctcaaattatgaacggcggttggttttggttcgaaggagaaaaaaacacgcttaataggctcaacttgattaccaagttttacccagaacacggtgataagtttgtgtctgaaacaacttatgccatgttctcggagcctgaagagaaccggattgctccgaatgatgcgatggtctatttctacgtaaaacaaggccgcatagaggaaggtattaattttgccaaaactatggttgattctgttatcgatgacactcgtacattaccactaaagcagccacgctgggggcttaatctgagtttaaccacgagtttggaggagtaa

SEQ ID NO: 283528 - DNA, 612 bp, Morganella morganii
gtgaagttgtacggcaaaaccaaattccgctttattacccgttcaattattatcgggacaatatttgcggtactgctgtatatcttctggctgggtgtcacgatgggcaatatcagccgtgccaacttctctccgattattgccaaaggcgggaacattgatgtgttcgttgaggctatcggcggggggatgtcagggaaaaccatggatcttatcctgacattcttcggtaactttgcggtggccagttccctgctggcagcaacactcggcctgtttgactatattgccgacctgctgaactttaaaaatgacagcgccggtcgtttcaaaacagcagtagtgacgtatctgccaccagcggtggtgtgtttcttcttcccgaacggattcgtttatgccatcggttatgccggtctggcctttactatctggagtgtgattttaccgccgttcctggtaaaagcctcccgcaaacgctacagcgacagcgataccatttaccgttcgccgtgtaacagcgcggtactgaatctggtgattgtctgcggtgcgattgtgtatctgacggtcattctggatgtgttcggctggctgccggcatttaaataa

SEQ ID NO: 283529 - DNA, 1737 bp, Morganella morganii; identical to SEQ ID NO: 283247

SEQ ID NO: 283530 - DNA, 831 bp, Morganella morganii
atggcaaaatcaaagtacgttttaactgaaaagcaaatcgtcaaacggattaaagaaggtcggggggccggaaggctttctcgttataaaccgtggttgtatgttaatgaggttccttcaacaggtcgttctcagcgaatctactctcacctaactggtcgtattcatcatgtactatcagacctcgaattcgccgtttttcttcttctcgaccatagtgctgccataactgacattcgagagcaatttcctctcaatagggatgacactctaaatatttccaaggaaggtcagctttggcatccttcgcaaggtggagtgaatcttgtcatgtcctcagattttttggtcaactcatcttccaaaattcagcccaagtttgctattcaagctaagtatacaaaagacttaaaagacccaagaacggtagaaaaacttgaaattgaacgacgatattggttgctcaaaaaaatcccatggtttcttgtaacagagaaagagatagatagcgtcatcgtgtcgaatattgagtggctatatggggttaaaggattctttgacgaagtaataacggatgatcttttgctaactttcgagcatatcagtgcttattttgttcaacatccagaaagaaaattagttgatctatgtaaggcgtttgaccgggcataccagcaggaacttggtcagtcactttatgatatacgtttaatgtgtgccgtaagacttgttacgtttgatattcgcttaccattccatagcttaaaagcgatggatattgtgtttagaaaagtatctttgttcggggatcgtcataatgtggcaagttaa

SEQ ID NO: 283531 - DNA, 1890 bp, Morganella morganii
  misc_feature (1869)..(1878): n is a, c, g, or t
atgtggcaagttaacgaaactctagcgtttgatggtaagccctaccgtgtactttttactgaaacaagttacttctattggattggtattgatgaaaataaaggtttacctgaaaaaatatatttcgatgaatgtaacaactgggttgatgagggacgtatagaaaaaatccctgatccctattcttatcttcaaggcgagtcttgggctaaagagtctagtgtttatcaggaaagccaacgtaactatgaattgatcaagcctattgttgaaggcgaaggtgcgtttgacaagagaattcgtgcaagaagattgaatcacgcgattactaattcagacaaaggtaaatcaaccatataccgtttagttagacgctactggcagcgaggacagataaaaaatgcacttttgcctgactacaaaaactcaggagctgctggaaagagaagaaatttcacaactagtaaagctggcagaccgaggatgtacggtattggtagtggggagccagtaacagaaaacatcagaaagcaattccgaatcatctgcgataagtatttgatgaacgataagggatattcaattcgctacgcgtacaacaagtttggtaaagcgtacaaattaaaaaatccgaacgcggaagagcatgagattccaacacttcgtcagtttcaatacttttacaaaactgagtataaccaggctactcagttaactgttcagacacctcaaggcaattacaacaaagatgttcgaccacttcatggaacggcaacagagcaagctttaggtcctggtagtcggtatgaaatcgatgccaccatcgcagatatatacttggtagatgataacgatcccgacaaggttatcggtagaccaacaatctatatggttattgatgtttttagccgcatggttgctgggttctatattggcttcgataacccttcatttcctgtatctatgaaagcactaatatccagctttagtagcaaagtcgaagcttgcaaagggtatggtatcgagattacagatgagcaatggccgtgtatcggtataccagacgtgttactcgcagaccgtggcgaattaatgagccaccaagctaattacttagtggatgctattggcgttagacttgaaagtgcccctcctcgaagaggagatgcgaaaggtattgttgagagatcatttggaacgttgcaggcaaagtttaaaccttatatgcccggcgtagtctctgggaacaaggttaaaaagcacggtgaaaaagattatagagttgaagctgctgtagcaaggactgattttgtcgaaattatgctttattcgatacttgctcataacttgaataaaccgttagaaaaatatgatcgcgctcctgatatgccttcgagtcttccgtctattcctattgagctttggcgatggggtcttcagcaccgtactggacgtttacgaactgtagatactgaaattgcaaaagtattgttgttaccgcgccaaaaggtatctgtatctgagttaggtgtaaagctgtggggagtaacttacaccggaaaagaaattattcagacaggttggatgcaccgttcttcgaaagtttctagacctaagaaactatttgcagcctatgatcttggctctgttaatcatatctatctttttccagaagaaggaaaaaatacgttctggatttgtgatatttctacgagaagtcgagagttccgagatcttacttggtatcaagtgtgggaaaggcaagcagctcaaaagcaaactttagctgaggcaaaataccagttttcaccagtagaaaggaattttgatgatcttcttgaaaagaaactgaaaaaggctaaagagaannnnnnnnnnagagaatcgtaa

SEQ ID NO: 283532 - DNA, 1659 bp, Morganella morganii
atgaagaacattcaaagccatcgtgttgtcgcggcctataaaaaagaaaagttacctgcctatcaaggtaatccactgatagaagccctcccacctcttaatagttttattgaagatttaagtgctctcaaaggctcactacggtgtacgcgtgaagatattcatttaaatggtgttgagagagcgcatagtatatgtcgagtaattgatgatttttttcagccattaagtcagcacattcagctacatgaacgactttcattgatgatacgaggtggttacgtaggaagaaacccagaaaccggtgattgggctaggcatattcaaaatggttacgaacgagtgatatctggtgatttaaaggcgataaaatttacagatgttagctcaactgcgcaaagtatgacgttgataggttgtagcggcaatggaaaaacaactgcaattaaacaacttttatcgttatatccacaagttatttaccaccctgatagaaatcttgagcaagttgtatatctaaaaattgactgctctcatgatggatccttgaaagaaatctgtttgaattttttccgtgctatggaccgcgcgctaggaacatcaaactacgaaaaacaatactcaatgagtaaaagaccgagcattgaaactcttttagcagcaatggcacaagtggcaaatgctcatgctgtcggcgtgcttattattgatgaaatacaacaccttagtcgttctcgctcaggtggttccgaaaaaatgcttaactttttcgttacgttggtaaataccatcggacttcccgtaattttagttggaacaccaagagcgagagagatttttgaagctgatatgagatctgcgagacgaggctctggtcttggtgctattttttgggatccgatggaagaagggagagagtggaaggctttaactgataagttatggtcactgcaatggcttcaaaagcgggatgaagtgttatcagatgatattcgctctctatggtatgaactgagccaaggcgttctcgatattgttgtgaagttattcgtattgtgtcagttgcgggccattacgacaaaagtggaaagaattactccaaagttaatgcaacaggtatatgaagatgaattaaggccagtccacccaatgcttgcagctctacgctctggtgatgtagaagaaatcattaagttctcagacctcaaattaagtgataccgacaagagattactagaactgcaacaacgcgttgcagcatctactcaacaaacgccagaagagctagcgtatcaacaattacgaacagaggaagaacggcgtgtctatatggctttgaaagatgactttgattcagcgcatttggcacctgtaatacggatactgtttgatcaaaaccctgatttgacgtggataaagttattgccactggtgcacgagcaattaactaatccagagcaaacaatgcctaaaaatgagactaaaccaaataaaggaacaagagcatcctcaattaaacaggctcagtggcagacgctggatagcgaggatttgaggtttgtttattctcagtccgattctgacaccgaaatgtactcggcaatgtcaaaagcggggttggttttagatattcggtcattgttagaagaggccgtttaa

SEQ ID NO: 283533 - DNA, 1191 bp, Morganella morganii
atggcggtggaagcgttgagtgataaatcactgacaaggctggtcttggttgcacgacctcagtctgccgcattgagggaagtcgcgagaacctatagcgagttgtcatctctgggtatcaaaaatcagcaattggttgtcaatggtgttttccctgaaacggcggtgactgaaaatgataagttatcccatgcgctctactctcgtgaacaagcggcatcagagtctatgccggaagcactacgctcgttacctgtcgatattctttatttacaaaatatcaatatggtgggtgtcgatgcactgaagcagttgttatctgatgacatgccacaaattccaactattacccctacaaaacaacctatttctttacctaccttgtcagaactggttggtgaaatatctcagcaacagcatgggctgattatgttaatgggcaaaggtggtgtagggaaaacaacgattgcggcatcaatcgcagttaaattggcagaaaaagggcttgatgtacatctgaccacatctgatccggccgcgcatattgaatcaaccctcgatggtgttttacccaatcttcaggttagccgaattgaccctgtcgctgaaactgagcgttatcgtaattatgtcttagaaaccaaagggaaagatttagatgaagaggggcgtgcattacttgaggaagatttacgctctccatgcacagaagaaatcgcggtatttcaggctttctctcgcatcattagagacgcgggtaaacgttttgtcgtcatggatactgcaccgaccgggcatacattattacttctggatgcaacaggggcataccataaagaaattgttaaaaaaatgggcgaaaaaggccactatttaacgccgatgatgcaattacaagatcctgaacgcactaaagttattattacgacactcgctgaaactacgcctgtgcttgaggcggagaacttacaaaatgatttaattcgggcagatatacatccgtgggcgtgggtgatcaataacagtctgtctatcacggaaacaatatcaccattgttactttcaagagcagaacaggaagtcgctcagattgaaaaggtgacatcaacattggcaaaacgtgttgctattgttcctttgcttgaaacagagcctgtggggatatctgcattaagtcagctcgcagaataa

SEQ ID NO: 283534 - DNA, 438 bp, Morganella morganii
atgaacacactgaccaggcaacaggaaaattcagcacggacgcggcaggcattactgatttcggcacacggactttttattgaaaaaggctatcagtccgtttcgattgatgaaattgcccgtgatgcacgggtcacaaaaggggcgttttatcaccactttaaaagtaaaagtgacctgttattgcactgctatgaaatacaattacagaaaatcagtgctgtcctcgataatattgaacctctggcggataaatgggaagagctgcggcttgttgtccgcagtttcatgaattatctggaacagcattaccgggaactgattccggttcaggaagtgatgccggtcgccgggtggtatgaatttgaggatattaaccggcgctatatcagcagccgggtggataatattatcagtcagctgaaagcagagcactga

SEQ ID NO: 283535 - DNA, 627 bp, Morganella morganii
atggaatctatagacgaaattaataaaataggctccgattcgaaaaaaataaataacttcatggaacagaaaaaaacagatattgaacaaatactaaatgatgcgaaagatacaataaaaatacttagcggctcttctatagcaaagcatttaaatactcaagaaaaaaaggaagcagccgccgccaaatggtggcttattagctccatatcaattttaatttcctcggtattattagtggttgtttctttttcaatttatggcttatcatgggaaggaataactttaaaggtacttacattgccgatattattatcctctcttatatttacaatgagacagtatattaaaaggaaaaacatcgtagattcttatgcatataaaaaaatattagcactatcattaactggatttaaaaaacagattgataaatccataaacgatgaaaaacaaattgattatgttttaaaagcaattgaaatattaactgagccacctctaaatgacttagaaaaagatcatgttaaaaatgaacttgatacactaaacaaaataagagagtctgttatagataatatactctcaactattcaccctccaatgagttccaataaagacactaaatag

SEQ ID NO: 283536 - DNA, 444 bp, Morganella morganii
atgatgatgatttacggtatgtttgtttttatgctggaaaccataccttaccagaacttacagcgttcaatgagctggcgctatgccaaaaatgaccgtgtcggccgttccgcaagctggcagtatatcggggcgggtgaggataagattaccctgaacggtgtgctgctgccggaagtgaccggcggtgatatctcactggaacttctgcgcactgccgcctatcgcggacggccttaccctctgattgagggtaccggcatgatttacggtatgtacatcatggacggtctgaacgaaggccgggcggagctcttttcagacggtaaagccaagcggatagagttcagtatttccctggtgaaagccagtgaggatctgcgcgaacggctggccgagatggagttcagcgatttgatggatatcttgccggtgaagttgtga

SEQ ID NO: 283537 - DNA, 1311 bp, Morganella morganii
atgcaagaattttctctagaaatgatttcagatcaaatccattacggaaaaacaaaagggtactttcaagaagtattgtcctcatataataatggaaactatcgatcctcagtcgttatgctttggtcagtagcaatatatgacatcgtttacaagcttcagaacttaatagatttatacgacgacgcagcagcaaaggaaattcttcaagaagttaccacaatccaaaatgaagactacaagtcatcagcatgggaaataaaacttcttgatgatgttcatagtaagactttcttactagatacctctgagtatgaaaacttacgttatctccaaaaacaaaggcatctttctgcgcatccagttctcaattcagagagggagcttcattcaccaaacaaagaaactgtgcgttctctcctgagaaacactttggaagggttgcttattaagccaccgttttatactcaacgcataatgaaggaattattggaagacctcgcagagtcatccgatgttcttaatagcagagaaaaagtaaaaaaatatattgaaagtaggtatcttagtagaacaagacagtcagtagagataaatatttttcgatccttgtggaagctggtttttaaactagataatgaggaatgtgaaaaaaatcgaaaaataaatctgcatgctttagatgttctatccgctcggaatatatctgcaataccagctgaagttcaaggcgataatgactattacagtaatatagcctcaaccggaatgccactatcttatcttgttttttatctttcaaaaaaccaccagatttacccattattaagcgacgatgcgcgcctaaagatagagcattgcatcaacactgatgatgtgggtaaaacagttggttggtttataaaatccgatttaaatgcgcatggaaacgatgttgaagattggataaagggtgatgagcatcctacattcattgcggggcaatttgacgccttattggaaatatcagattcagatgagtggcagaaaaaattctgccacatcgtgactgcatactattcagctagctataactatgaccaagcagatactcggtttcaggtcgcaattccaaagtatataggcctattcgatcgcgactcacttagtcatttagcaagacaaatcgagaacaatgggcaatgtaatgctcgggctagagcacgagaagactatgttgtgatcaaggcacgtatagacgaactatttggtgatggctttgattatgaaggcgtacctttttttcggcgtaaagtggtaacggcggagtga

SEQ ID NO: 283538 - DNA, 630 bp, Morganella morganii
atgacactgaatgaactggaacgccttatttccaacctgttacgcgtgggcgtggttgaagaggtggacactgaaaagatggtctgccgggtcagaaccggggacattctcaccgactggatccgctggggcgctgaccgtgccggggcggggcggtcatggtgggcgccggttgccggtgagcaggtcattatcggcgctgtgaatggtgaattaaccacggcctttgtgctgtgttcgttgtacagcgacaaaaacagcgcaccgatccacagtgcgcaggctatgcacaaaacattcagtgacggcgctgtgattgagtacgaaccggcgaccggcacgctgaaagcgaccggcatcaaaaccgccctgatagatgcaggggaaagcatcaccgcaacttccccggttgtggtcgtgaatgcagaagagaatatccggcttgtcaccccgacggttatctgttcggacaatctgacctgtgccaccctgaacgtgatgcagggcggggagatgtccggcagctttgagcataccggaggctcattctcctcaaacggtgtcgtaattcacgaacatgatcacggcggcgtagaacgcggcggcagttggacggacggaataaaatga

SEQ ID NO: 283539 - DNA, 567 bp, Morganella morganii
atgagtttaatcgtcattcctgaattacagaagtcattacatcgtcaccagtcagtgttatttgagtgttattccaaaatattgatgatacggacggacttccattggtctgataataccgaccgttctcattgcgaagatgaacatcaattcagtcgggatatgagtatcctgatgttacgtctctcagaataccccggagtaataggttatgcctgggtattggaagaaagccctggtggtaaattacatgctcatgcagccatctacgtcaatggtcagcggcattgtaagaagtggggctttcaggatgtaatggaaagcttatggcgtgaggttaccgacagggaaggctattgttatcattgccctgataaaaaggattatcgtcattccatacgtcgcccgatctcctttgatgatgcaaagggccgtaaagccatgcgttacgtggtgaactatttcgccaaagccgaacagaaacccttcgaaccgatttaccatatctcccgtctacctgatatgaacaataaaccgattggtcgtccacgaactcgtcatcgctga

SEQ ID NO: 283540 - DNA, 141 bp, Morganella morganii
atgaacactgacagtctgaatgagctggaacgggggattgctgatacttcgcactacccattgctgcggttgctgcccccggtgaaccggatgttatcgatgaggcgtaataaaaaaatacagcggtttgttattgtctga

SEQ ID NO: 283541 - DNA, 222 bp, Morganella morganii
atgacgactcaaacagctttaaccaccagcctgctgaatgaccagtttgttgatatgaagtttatcacccgttttaccgggctcactgataaatggttctacaagctcatacaggacggtgagtttccgaaaccgattaaactggggcgcagttcacgctggttacagagtgaggtgaaggcctggatgcaggcgcgaattgatgaatcacggaatgagtaa

SEQ ID NO: 283542 - DNA, 228 bp, Morganella morganii
atgaagcaagatatgctaacccatcgcgcaaagggggcattactcggtcttgctataggggatgctctggttaccacactggaatttcaccccagaccgaatgagcctgccattaaagggattgtgggcggcggaccgtttaacttacgcgccggagagtggaccgatgatacctcgatgatgttatgccttgccgacagtttaattgactgtgtagtggtcaactaa

SEQ ID NO: 283543 - DNA, 237 bp, Morganella morganii
atgaaaaaacgaaatttcagtgcagaattcagacgtgaatcagcccagctggttgtggatcagaactatacagttgcagatgccgcgaaagccatgaatgtcgggctttccaccttgacgcggagggtaaagcaattacgggatgaacgtgccggcaaaacacctaaagcctcccctatcacgccggagcaaattgagatacgtgagctgaagaaaaaattcaacgtattgaaatga

SEQ ID NO: 283544 - DNA, 516 bp, Morganella morganii
gtgcatgcctgctggaatgaggcggttatccaatctattcagccctacctgaaggccaacaatgccatcgcagagacttactgggaaacggcatttgggaaaaactctccgctatacaacatgacagaaacgctgttaaaagggccggaactggcgctgcccgaaggcgttatgtttcacgataaaaccggtcagcctcgcaaaaatattcgtatccgctggtggcttccgcaggctaaaacctatcgccaactggcacaagttccaccggatgctgagtcacttatccccgatatcccgctaaatcagggttattcgccattcactcttgatgtcccagtggttatcggtcattacacgcttcacggtcagcctcaacaactttctgagaaggtcatctgtaccgattacaacgctgccaaaggtgaacatcccctggtggcttattgctgcacggtcgagggcgagtacttagcatcacaaggctttatttccagtacaggaaatattgtttag

SEQ ID NO: 283545 - DNA, 1362 bp, Morganella morganii
  misc_feature (1304)..(1313): n is a, c, g, or t
atggctggtgtaaacaaaacgaatatgagtgaaacggatattatcagcaaatttatccttcccgcagttaaggatgccggctgggatgatttgactcagattcgtcaggaagtgaaactgcgtgatggtaagatagtggtccgcggaaagctggcatcacgtatcaaagtgaaatctgccgatatcgtactgtatcacaagcctaacctgccattggcggttatcgaagccaaagccaataagcacgccatcagtaaagggatgcagcagggactggattatgccggactgcttgatgtaccctttgtgtttgcttctaacggtgatgggtttatcttccatgataaaaccaatccgcagcagctcgaatcagaaattacgcttgatgctttcccggcaccagagctactctggcaaaaatattgcgactggaaagggtttactcagcaacagttgcccgttatcagtcaggattattacgatgacggcagcgggaaatcgccccgttactatcagatgcgggcaattaaccggacgatagatgccgtatcagcgggaaagaatcgtattttgctggttatggcaaccggcacgggcaaaacctataccgcgttccagataatctggcggctgtggaaagccagaaacaagaaacgtattctgtttcttgcagaccgcaacattctggtcgatcagactaaaaataatgattttcaacctttcggcactgcgatgaccaaagtcaccggccgtactatcgatcctgcttatgaagtacatcttgcattgtatcaggccattaccggaccggaagagaatcagaaagcctataaacaggttgctccggatttctttgacctgattgtgattgacgaatgtcaccgtggcagtgcgtccgaagattccgcctggcgggagattctggagtatttcggcagcgccactcagattggcctgacagcaacaccaaaagaaacagaagacgtctccaatatcgattattttggtgaaccggtttacacctattcactgaaagagggaattgaagacggtttcctcgccccttacaaagtcgtgcgtgttgatatcgatgtcgatgttcagggctggcggccggttaaaggtcaactggataaatacggcaaagagattaaagaccgtatatacaatctgaaggattttgaccgcacgctggttattgatgagcgtactatgctggtggcgaagactatcaccgattacctgaaacgtaccaacccgatggataaaaccattgttttctgtaacgatattgatcatgcagnnnnnnnnnngcgcagacctgcaagctggtcgtgctggatcaaaatattcagtccatga

SEQ ID NO: 283546 - DNA, 729 bp, Morganella morganii
atgaacaacaatgagcttcatgaaaaaataaatgggcttatccctgacaaagcaagcgtcagccaaataaaaatgcactcagaaaaatacaaggaagaaataaaaaaatttcgcgagagaaacctttcatggatcgagcatgactttcaccctgctctctacctatggttttttctctttacccatagaaaaacaagatttcttgaatcaggctgcgatgatatattccccagaaaaacaaaagcaacccctgaaacaataaataatataataaccgatattttagagctttacgcacctaacatgagccaaccagaaagaatagaaaataaaataagtcgcgctcatgaaaaatatcaaaacctcaccggaaccaagcgacttacctggttgaaaaatgatgataaacaaataaattgggcataccaataccttaaggaaaaggatcgacacttctcaagaagctatgcaattgaccgcatacatgctctcacctgcatcaaagtctactatgatttaaacataaataataaagaagtattatatactttcttggaaatgagcaatgcgtggaatcaaaaacgatatcgcgaaaaaagaaaaagtgataacaaaaaatcattgagcggatatatcagtagtgaggcaaaaaacagattaagagaaattgcggaaaaagaaaacatttcagaaagtgaaatgatagagcttcttattatgacttactaa

SEQ ID NO: 283547 - DNA, 915 bp, Morganella morganii
gtggtggaggatgacacctttttcgcggcaatttacacaccggatgaggatgatgacccgttcgatgaaagcatctggataaaagccaatccggggctgggtgtctgtaagcgttttgacgatatgcgccgcctggcgaaaaaggcaaaagagcagattgcggctcggcctaatttcctgaccaagcacctcaatatgtgggtgaatgccgaatccgcctggatggataccggtaagtgggacagctgccctgaaaatgcgccggatgatgagctgaaaaattacccggtctgggttggtgtggatctgtcaaacaaaatcgatgtgaccgcagccgttaaagtgtatgaggatccgcgcggacaactgcatatgaagtgcaaattctggctgccggaggacagagtagtgactgcaccgaagcatatcgctgacctgtaccggaaatggggagctgccggttatcttgaactgacggacggtgaggttgtcgatcacgacatcatcaaagccgacattctggcatggtgcgaaggtgaggatttacgtgaactcggttttgacccgtggagtgccgttcagttctcccgccgcctggcggaagaaggtattccgctggtggaggtggcgcagacggtgaaaaacctgtctgaatcgatgaaaaccgttcaggccgatgtatattccggcaaatttcaccatgaccacaacccggtaatgtcctggatgatgtctaacgtgacggtaaaaccggacagaaatgacaacattttcccgaacaaatcgacaccggaaaacaaaattgacgggccgtttgccctgtttactgccaaatcacgccagatggtgaacggcggggacagcagcgacttcctttcctctctggatcctgacgaagaaattctattcctatga

SEQ ID NO: 283548 - DNA, 1275 bp, Morganella morganii
atgaacagaaaactaaaatgtacagccagtcagttttctgttttatatgatggtatttcggtttacagccggggaaaagatatcagtgattttgaccggttatttaataatgatgaccgctttaattaccgttttattcttgatgacaaaaaaatggaagaacgggatattaaccgtatctgtagtgtttttggtattaactacgatactttttcttatctggcactcctgacccgtgaagttatgggactgaatgtattaacccgcagccgggatgttatttctgcaatttatcgtcctgtggttttggctgacctgctgaaaataaaacccctggaattactcgcattaatgaaatcaatgaatcctgatgctcagtttggccgtttatttacagggataccggaaaaccaggtgtacggatcattcggacaggcggatattaccagtgcaatcagtgcactaatcagtcttcagacatggcggaaagagaataaactgtctgtagcacagatctttaattggatcacacctgcgattgtcgatgaccaggaagataaaactgagcgggaactgttccgccagattaaagaaaatacagacagtgcactattcagtaatgaagtcttgtatcttgctggtgtaccgaaggatataaactgggtttcggcattacaggaactggtcgatgaccagggaattctgaaggatgctgatgatggtctcgactgggacagttataaaaaaaatgcattaaaaataattacttccaagtcggaagaaaaattaaaaaatttaacatcggaagaaagaaatactatagttaatacgattctgtccgtccttttggaaaaaagagcagcacagtggaagagtgtgagtggattactggaaggatatcttggaaataaaactgacagtattacaccggcattgtactggtgtggtagtaatacaggtgagtttctgaaaaatatcagagcactgcctgataataatatgttgtccgctaaagataataacgtcatggtgttattgtcatctctgcggcgttatagtgatattattgcacacttccgtcttgagccagctatgatgtcacagttattatctcatgataataatcacaactggtacaaactgaaaacagaaaaacctgatttacagttgctttaccggctttcagtatatcggaagcttattgatgatgctaaacaaccggctgataaattattaaactatctttctcttattaattcactcccgatatactga

SEQ ID NO: 283549 - DNA, 903 bp, Morganella morganii
atgggatggagtattaatgagttattaactgcagcacagtatgtcgcgccggaaaatgccatcatccggacattgccgcaaattcttctcgttaaacaaatccattccgtctgcctgaaaacggggttgagcgcccgcagtgttatttcgctgtttaatctggatgaaagcagtgaatcatcactgtatcaatctgttgccggccaggtaatggaaagtctggcacagcaggatgtatcactttacagcaacgatgaatccagtcagggagacctgaccgcaagtgtttcagccgggaagacaacactgctggtttacagtgaaaatcagcaggaagaagaggaagagaatggggaagataagacattgctgacagttaccttacagacactggaaagtacaccgttggagggagtacccgttgtatggaaaaatatatccggactgggtgaattaactgatactgaaagtaaaaccgatacatcaggccgggcatcggtgacattaaaagcggggaaaaagcagggagttgcattaattaaagcatattatggtgtgaagaatatttcgctgcctcttatccggattgattgcgacagcagttcgttgggtgctaccgatattcagaccgtaccggaaaaaccggtagatattccggcagacgggatatcagctgttgaaataacagtacttttcagagaccaatacgataacccgggtatggataaaaatattcgctgggaaacaaccggaggccgttttatccataaggagaacattacggatattgatgggggctgtcacgcgacactggtcagtgataatcctgcagatattgcggtgaatgtgttctatgaaaataatcctgaatactcgatgagagttaatatctcttttatttaa

SEQ ID NO: 283550 - DNA, 441 bp, Morganella morganii
atggcgaacaccaaagataactgggacaagaaaaacagtacgctgacggttccgcctcatatttcaaaaaactcggattatcatgtaataccgttgtcaaaatcagcaacggcggttttacaggctcaggcaaaactctatccggactctgaatttttattcccagcaaaaacacaggaagggcatttgctgccatcggaatatgcaaagcagatcaaaaaattctgtgacaaaggcgagatcgctaagttcaccccgagagatatcaggcgcacatttaaaacactcgccggtgatatggggattagttctgaaatgcgtgacaggctccaaaatcacaaaaagccgggggtatcatcaaagcactatgacaggtacgactatctgaaagaaaagcgcgagataattaacacttgggaaagtaaattaatctcactttaa

SEQ ID NO: 283551 - DNA, 678 bp, Morganella morganii
gtgccgacagacgtgacattgttcaggttattctgggcaatattgcgggcattcacgttacgggcaacggaggcctgtgcggcagccagccgcttttctgcggcaacctgtgcatccgttccgcgtgatgcggcgagcgcctgctgcgcccggtattctgccgcacgcgctctggcaaccgcaatttgtgtcccgcgcagctgggcctgcgcaagagcgatctcgccttttgcggcactgaccaccccggaggatgctttaaccacgctggcggtcagtccgccgaaataccgcgcaaggccaaccccgaccagcgcaccggcaacggtggcaatagtgtctatatttcccgcaataccattcagtgcgccggtcagcgtgctggttgcgcctgatgcctcattggctccgcccacccatgccataaaggcattttccaccttttgcgaagccatactgacggtctgtggtaactgctcaaattcttttctgagttgctccgtatttgtcaggatcggaacgattttatcggtagtcagttgcccgctctgtaccatatcgcgcagcccgccgatggtggtccccatcccgtccgccagcagttttgccagccgtccgccgttctccatcaccgcgttaaattcttcaccgcgcagaacaccggaagccagtgcctga

SEQ ID NO: 283552 - DNA, 189 bp, Morganella morganii; identical to SEQ ID NO: 278144

SEQ ID NO: 283553 - DNA, 792 bp, Morganella morganii
atgagcaatctgattattgttgacggtattaatgtgcgccgggacatggccggtcgctattgcctgaatgatttacaccgtgccgccgggggtgaagagcgccataagccatctaactttatgcggatggaatcaacacaggcattgtgttctgaaatcgaccgatgctcagatatgagcatcgcctctgtaaacaccattcgtggcggtacggagcagggtacatatgttgcccgtgaggttgtttatgcctatgccatgtggataagcccgctgttcaacctgaaggttatccgcacgttcgatgcagtggccggaacacagcaggtgatacagctggctgataaggttcaggcaggcgctatcctgctggagtccatggcaaaaacactgaatctgtcgaattcctcaaaactgggcgggtatcagaaactgcaaaaaatggctggtcttccggatctggctccctcctatgctattgatgcaccggcgggtgcggtagatggctccagcagaccgacaacctctctgactacgctgctgaaaaatcacaatgccgcattgtctgcgaccagagcatataaacgtcttgctgagctggggattgtcgaacagaaagcccgtccgggttcgaagggaacacaaaaactgttctggtctgtcacatcaaaggggcttctgtacggtaaaaatatcacatctccggcgaacccgagggaaacgcagccgcatttctttgatagcaaatcagcggaactgctggcactgatgatgactccggcggtggcctga

SEQ ID NO: 283554 - DNA, 699 bp, Morganella morganii; identical to SEQ ID NO: 277961

SEQ ID NO: 283555 - DNA, 246 bp, Morganella morganii
atgttgatttctggatcaaattatccagctatcaatagcggtgatgtcaagcaattgaaagttcagattggtagtgtagaagaacaaaccgccatcgccactatcctgtccgatatggataaagaaattcaagcgttgaaacaacgccttagcaaaacctaccagatcaaacaaggcatgatgcaagagctgctgacgggtaaaacgcgattaatcaagccatcaaaggaggttattcatgagtga

SEQ ID NO: 283556 - DNA, 426 bp, Morganella morganii
atgaataattcaactgaatgtgcaattacaatgacactcgttcccgatgagcaacgcctggatttttggagcaaccacttcggaagcgtgaaaggctggagcacctttgaagtggtcatctttaccactatgggacagttttgtgaggactaccacggcgggtattgggaatattgcaccttatccaatggtggcgcctttatttatcccgatttacctcaagagacactgacgctgttcaacccacataacggtaacgaagccaacgtcagttgcgaagcggcaggcattgccgtgtgtttgatgatgtacagtttatggtcatttcaaacggaaagtgacatcctcgtcgatcgcttttatcaattgcgtgattatgcggcacaacacccagaacgttccgccattttccatctaatcgattaa

SEQ ID NO: 283557 - DNA, 774 bp, Morganella morganii
atgattggttttttatttgccaatattcaacaatttactgcaagccaagatgttgtccagcgctacattgtgactgattctatcgaacagactaaacgtactttaatcacaaatgctaaattagttgctgttattcctgttttcttttttgccattggttcagccctgtttgtgtattacaaacaaaatccaggtttgttacctgaaggttttaataccgggggtatcttacccttatttattgttacagaaatgccagtgggtatttccgggctaatcattgcagctatctttgccgctgctcaatcgagcatttccagtagcttaaacagtatttcaagttgctttaattctgatatctatattcgcttaagtaaagttgaacgacgttcagaacaaaaaatgaaagtcgccagattagttataattattgctggagtattcagtagcttagcaacaatttggttggttttatctgacgaatctgaaatatgggatgcttttaacagcttaatcggtttaatgggtggtcctatgaccggactatttatgttaggtatttttgttaaacgtgctaatgcaggtagtgcggtcgcaggcattatagtaagtatcattgctgtattagcagcccgttatggcagtgaccttaactttttcttctatggtgtaattggtgctatgtcagtagttattgttggtacaattactgcgccatttttctccgcagcaaaacaaatttcattggatgatagtgaaatatccgggaactaa

SEQ ID NO: 283558 - DNA, 459 bp, Morganella morganii
  misc_feature (393)..(402): n is a, c, g, or t
atgccgacattaacaactgcacaaattaaatcatcactgaactcagctaaacaatcagcaggtaaaaagctgcaatcagctggagcatcaacaaaagatgctttaaaaaaagcagccgaacaatttcgtaatgcaggtaataagcttattttgtttatacccaaagattatcagggacagggttcaggtcttaatgatctggtcaaagcagcagatgaattaggtattgaggttcagtacgaggaaaaaaatggtacggcgatagcaaagcaagtatttggtacaacagaaaaactgtttggcctgactgagcgtggtatcgctatatttgcacctcagctagataagttgatgcagaaacatcaaaatatcggtaataaactgggaggaagnnnnnnnnnnattatcaactctgcagaattttttaggaattgcactgtcttcaatggaattagatga

SEQ ID NO: 283559 - DNA, 525 bp, Morganella morganii
gtggtattaccggatggctcgctgtttggcgaaggcgtgaaaaccaagattaaaaaactgctcactgaggagtgcaatctgcacaccatcgtgcggttgccgaacggcgtgtttaacccgtacaccggtatcaaaacgaatattctgtttttcaccaaaggtcagccaaccaaagaggtgtggttctatgagcacccgtacccggacggcgtgaagaactacagtaaaaccaaaccgatgaagtttgaagagtttcaggctgagatcgactggtggggaaatgaagccgacggttttgctgcccgtaaagaaaaccatcaggcgtggaaagtcagcatcaacgacattatcgcccgcaacttcaacctcgatattaaaaatccctatcagggcgaaatcatcagccacgacccggacgaattgctggcgcagtaccagaaacagcaggcggaaatcagcaaactgcgtaaccagttgcgcgatattcttggcgctgcactgacaggcaataaggatgctaactga

SEQ ID NO: 283560 - DNA, 603 bp, Morganella morganii
  misc_feature (516)..(525): n is a, c, g, or t
atgaagaaagacaagaaaaaatcggttgaggtatttggcccttacattcacacctataagtttgatgaagctgtggccgatggcgttgtgctcgatttacgctacgaagcacgagacatcgaccaaaatgtcacgtcgcagaaaaagatcgatgaatggtttgaagccaaaactcgcggcttatctcgattagcgaaaacccagttgaaacagaaatggggcaccatgcaaaaggtgctgtccagtaaatcgcgtttgcagcaaattgtgaacgatatcttgctggatatggacactaagccacgcctgatggatggctacggcaatgccatgttggtctgctctagtgtctatcaagcttgtaaagcttatgaaatgttcagccaaacagatttagccggtaaggtggctattgtcaccagttttcagccgactgctgcgagcattaaaggggaagaaaccggtgaaggcttaacggaaaagctctttaagtacgatatttaccgcaagatgctnnnnnnnnnnccgcaaaccgtgttgaagagtttgaaaaagaagttaaaaaacaatttattgatgagccagggcaaatgcgcttattga

SEQ ID NO: 283561 - DNA, 312 bp, Morganella morganii; identical to SEQ ID NO: 278211

SEQ ID NO: 283562 - DNA, 243 bp, Morganella morganii
atgtatcgaccaaactggtatcggacatcagtgcaatttcatgagagtattttcgttgatgtttccgatttttatcaaatcaaaaaaaatgctattaatatgcatgtatctgaggttactaaatttggaaaacattgggaatcatttattgaagctcaagacaaagcaagaggtatggaaataaatgttgaatttgcagaatcattccaggttgtaaaattacaattatttaaaggagaatga

SEQ ID NO: 283563 - DNA, 240 bp, Morganella morganii
atgagacatgacgactatcttactttcattcccgccgccgtcattaataagcggaaaagcgatgagactgcaaacaatgccagaacactgcctgcccagatagcgaccatccaggcggcttttttccaccagggggccggtgcggcaggttcagtgatagccctggtcatgggtgatttttcctctgaagacataataactccaccaggtatataccaggatgaccggtatgatgaataa

SEQ ID NO: 283564 - DNA, 132 bp, Morganella morganii; identical to SEQ ID NO: 282673

SEQ ID NO: 283565 - DNA, 2964 bp, Morganella morganii
atgaaaaaacaatataatatacttatgagaaaagataactatcgactgaaatgtatctttttcatgacttttgtttttttaccaaactcatatgcagttagcgatgaaaaaattgtatatattgatgatgaaatctcaacaaaagattgggctgtaactatttatgatagaggtgattttcttgttaagggcaaagatggaaaacaagaaataactattgatcgcaatgccgcaaatattggagggattggaaggcgatacgcatcaaaaaatgtggataaaataatttttgatttagataaattaaatataaaccttataaataaaggcgataatgtttcagctataggaggtggagcctcacaattggatgcatcaaaaacagatgtttttattaatataaatcaaaaaaaaacagataggtttggtaggggcgagatatatggtgttttagctggaagttcagttacaatgggcattaatggagatgacgataactttaattctagtcaatatgctattgcggagtttaaaaacttagatattaaacaaaactcagacgcatctactttaacactaaataacgcattaagggctatccaaggtgcttacagggattcaggtactggtccagcaggtaaaataattgttaatggtgatacatctatttatctaaatggtgcaagacaagaggctatttatgtatcaggtaaaggtaaaggttatgacggtaatgaaggtgtaattagttctgttatattaaaaggcaataccaatatcatcctgaataatgccgcaggaaatgataatagtgctattaaaattggaaagacaagacaaataggtacagggcaaggatattttgaatctatgggtaatttatctatagatatgaaaaattcgaaaggatctgctgtgaaattagctgtttctggttctgaattaaaagcagattttgatagcagttcaactaatattaaaaccaatggtaatgcaataaatatagggcaaaatgactggggaactcaatcatcagctaatggtattaaagcatctttcaaaaatgctaattttgagacaacatcaacaaatgattcattattgaaagtatttcaaaatcagggaagggtattatttaattttaatggtgaaagaacaaatctagtcatgagagatgatcaaagttggttaattgatatagataactcaaaagagaatgggtatgaaaataaagtaacccttaacttaaaggattcggctaagattatggggttgtcaaatattgatggggatagtgaactgatcttgaacctgagtaattcattatggcatcttaatgaaaataaatatggaagaatatcttcatttactactttgaacttgaatgattcctcaaagcttattgcagaaagtaataacttcactttaaatggagctgtcaataatacatcaggcatcattgatttggtaaatcataaagatatcaatgataaaactaagttagttacattaaccattaatggaaattatactggtggtaatattaaaccaacggatgcaactccttttccagacggaaatagtcagttaattgttaacactatctggaataatgataacgactctgtaacagatcttctgcatatcaaaggtactgctaccggatacactcaggttcagactcaaaatggtattatcggtaatgtgactcgcggggatgctgaaaaatattctgttcctgttgtcacggtagacaatcaccaggaaggggctaacgccttctacggttttgcggataccaccggcgcggctcaggcccttctggtgcagaaagatgccaataattacacttggtatctggctaaaaatgatacacctgtagaccctgtagaccctgtagaccctgtagaccctgtagaccctgtagacccagtgaagccggaagtttccggatttattcgtatgccgacggcgaatatggaaatggggtataaccttatccgtacattgcatgaacgggtgagtgagcaacaaacaatggcctgggatgattgcatccagtgccagtcaactcaccgcgatgatcaggtctggggtaaaatgctgggtaacttagcacgggctgacggtgataaccgttatggttaccgttctaaaatgtggggtggtcagtttggctatgactttaacgttaactataacgagaataccggctcacgtcgtcattccggcatgatggtgacatatgcacacgacacgctgaaatttaatgatcgtcgttctgtattctttgatactggtaacggacagtatgctgaaaaggataagcgtacgggtaccggtaaaagtgatatggtggcgcttggggcttatactacgttctacgataagaatggcagctacttagatttagttggtaatctggattacactcataacaaatatgagtctgtccgcggctctgaatcaagcaatgattcttacggtgttgcggtatccggggaactaggccggccttttgcgctgaccgataatggtatcagtaatggtgactgggaaattgagcctcaggctcagcttatctaccagtaccgtaccttcagtaatttcaaaaccgagcatgatgtcagtgttaatcaaaaagaccgtcatggattaagaggtcgtgcaggggtaagactggcgtataacaccggaacgccggaactgaaaaccaacacgatctattttgtgagtaacgttgtgcatgatttcattgataatgaccaaacggtgaaaatcggttcagacagtatcaaagaaaaaactgcctctacctttggtgaagtgggcggggggattcagttaccggttggtgaaacctcctacctatatatggatgcccgctacagccattccttgagtaacagtgatggtaaggctgataatatgcgcggtaaccttggttttaaataccacttttaa

SEQ ID NO: 283566 - DNA, 498 bp, Morganella morganii
atgataaaattaataccctgttcattactacctgttacactgctcgcgttatttggatgtggtaatacgaataacgcctggtgcccgccggaaaaaaatgtcacaccagaaccggtaaaactggaaacgctgacactgtctgcggatgcgctgtttcaatttgatcagttcacactcagtggtttactccctgaagataaagcaagactggataacttcacccgtaaggtaaaggaaaataccgctcacattgattcattaaccgtggtggggcatacagaccgtctgggtccggatgaatataactatactctgggtctgaagcgggccggcacagtaaaagaattactggaagggaatgaagtaaccgtgccggtaaaaatacagagcatgggtaaacatcaaccggtgacaacgcactgtgaaggtaagggagttttgctaaaaatgtgtctgcaacctgataggcgtgtggaaattatagccaattataaataa

SEQ ID NO: 283567 - DNA, 600 bp, Morganella morganii
atgaagattaaagagtatataggtgatttagttggcggtggtttgttcctggctgaatccaggattattgcagaatcgctattgaaaaaccttcctgataacaagtggaaatcacaaattattgaaaataatattctccagaaaaaatcaggtcaaactgctattcgttatgcccgaaccattcgttgccgtattgaaggtcaaggtgaaaggtttatcactgagcttttaacggcatgcgagcgcgcatacatccaaatgctgatgatgtcattgctcattcattctccggtcctatctgactttatgcgacttactttagcagaggctcgtcgtacttataaaccagccttacctgctgatgcatggtctgaattctatgactcaaaaatgagagtgtatgctgagctcggtgatttttctgactctactatcagaaaaatgggtaataacgctattaaagcattagtcgacagtggttacctgagtgatagccgaaccaaaaaaatacaacctgtttacctaatgccagaagtcaaagattggttagtacgtctgggaagaaaagatttgattgatgtaatggagtgcacaatatga

SEQ ID NO: 283568 - DNA, 603 bp, Morganella morganii
atgaaggctcttcagaccagacttgatctgattttggaaagaattgaaagcccaaagttcttgaagaacgatggcttgggtaatgaaattggattttgggtatttgactatccagccaagtttgaactgctcgtacgagagcatcttaagcacgttgacgaaaagctcaacaagcgtggttaccgctttatccatctcagtatttttgaagtcttgattgagatgcttgaggaacgaggtttatttgaccgggcttgtcagcgagaaaggcaagtcggtgtagatggtcttcgcaaaacattggcggggcctctgagccaagagaaagttgcaaaatatatcgcggagaaataccagccatcagaacttgaatttgtgctgctgtcaggtttaggcagtgcatggcctcttgttaggggtcatgagttactcagtgcactacaagatattatgggtagcacgccattggtacttttctatccgggggaatatagcggaaaagatctgcatccttttggaatgattgaatcacaaaattactatcgcgcttttaaacttgtgcccgaaagtggtaaaaaaattaaaaagtggaaaacactataa

SEQ ID NO: 283569 - DNA, 3678 bp, Morganella morganii
atgaaaattgaacagattttttctaagaagttaactcgcaatattaatggtgttgtaaaagcagaacaaaaagacaacgatagtgtttatgttgaattagatgaatatgttattacgagagagctagatcgccattttcgcacattttttgaagcatacgagccttcagtcactcactcaagtatcgatatgtcaggcaaaattggtgtgtggatttctggcttttttggctcaggtaagtctcacttcctgaaaatattatcttaccttctcgagaacaaagctgttgaaaaagatggccaaggccgccaagcatttgaatttttcaaagataaaatcaatgacgcgatgctgctggcggatatccggaatgctgttaccaaagataccgatgtcattctctttaatatagattcacgagcaaatactgatgataaagaaaacgccattctcaaagttttccttaaagtctttaatgaacgtttaggttactgcgctgattttcctcatattgcgcacttggagcgcgagcttgataagcgtaatcaatacacgcccttcaaggataagttcgcagagctaaccctatcaacctgggaaaaagaacgtgacgcctatgacttctatcgggacgagatttcagaagccctcgctcatgccagtgagcaatcattagagtctgccaaggcgtgggttgagcaggttgaaaataattttcctcttgatatccgaaacttctgtaaatgggttaatgaatacctagaccttacaggagacaaaaatcttctgtttttagtcgatgaagtcggtcaatttataggtaagaacacacaaatgatgttgaagcttcagactattactgaagatcttggcacatattgtggtggcagagcttgggtcgttgttacctcgcaggctgacattgatgctgctattggtggtatggacaagcgtgatggcgaggatttttctaaaattcaggggcgttttagcacccgcttacagctgtcgagctcgaacacctcagaagttattcaaaaacgtttgttgtccaaaacagaagaagcctgtaaacacctcattgatatttttgcagaaaaaggagatatccttcgtaaccaactgacatttgataacactacaacggcttctcttaaaggttatactgacacttcatcatttgtcgacaattatccgtttgttccttaccactacacattggtgcaaaaggtatttgagtcgattcgaacaaaaggtgcgacgggtaagcacttagcaatgggtgagcgctcattacttgatgctttccaatcagcggcgaaacagatgaaggactcagaccttaatatcttaatcccgttcttcagtttctatgcaccaattgaaagcttcctggagccagccgttaagcgaacgattgaccaagcctgtgaattagattctttaacggattttgacggcaacatgctaaaaactctcttcttgatccgctatgtagatatggtcaaaagtactttagacaatctcgttacgctgtcaattgaccgaatcgatgcagataaaattgcgttacgaaaacagattgaagagagcctgaatcgccttgaacgccaattactgattgcccgcaatggtgatgaatttatcttcctgaccaatgaagaaaaagagattgaaaacgagatccgccacactgacattgaaatgtcagaggtatctaacaagctttcagcaatcgtctttgacggtattttgaaaggtaatcgtgcctatcgttacccgattaataagcaagactttgcggtgagccgtttttgcaatggtcatccgaaagatggcaccacacttgaagacctagtcatcaaagtcatttcacctttggatccacactttgaaaattattcacacgaccaagcgtgtatcaatcatacgcttgaggcagacgggtgcgtgctcgtcaaactgggcgaacataagcgtctttgggatgacctcacaacctttattaaaactgaccggtttttaaagcaaaattcaggacagcggccagaacaagaacatcttctccgtgaaaagcagatggaaaatattgagcgtgaaaagcgcttgagaacggattttgaagctttgtttgcagaggcagacgtttacgcgatcggcacaaaactaccgaagaagtcagcaacgccaagtgccattgtcgaagaagcatacaaatatgttatcgaaaacaccttcgctaaattgaacatgctcaaggcgacgcctggtgaagttttgcgtgagctgcaggctgtactcgttgctgatgatattgctcaaacaggactggatcttcaggcggatgaatgtaacccagaagctacgcgtgaggtcgagcagtacgttaccctaaaagtcgagcgtaatgagcctgtgtacttacgtgacatcgttgcccgcttcggtaagcgcccgtatggctggccagacaatgaaatcttattgctcactgcaaggcttggcttggctggaaaggtatcttttagtacccggggtacagatctgacgttgaaaaaagcttacgagccgtttaccagtgtgcgtaaacgcggcgagatccgtgtacataagatcaggcaacatgacgagcaccaaattaaaaaggctgctggtcttgttaaagagatcttttctaaaacctttaccggctctggtgagaaggagctcttcgaattagtgcgcgatgaattactggcctggaatgaagagcttaaatcattcagaaccaagtcacagacaggccatttccccggtaaatctcaaattgacgatggtcttgcattggttgcgggtattcttgagcaagcttcaagcttcgctcttatcgcccgattcttagaagatgcagatgcccttgaagaatttgctgaggactttgaggatcttgatgacttctacaatagccaatttcaaacttggcaagcccttgctggtgcattgaacgagaagtttaaggccaacagacctgcgttagaaaaagacagtgaagcattaaaagcacttactgaattagaacgcatttacaatatgccctcaccgtatgagcagttgcgccacattaatccgcttatcgagctggtggaaaaaataaactcaacattagttgaagaaaaacgtactcatgcctcagagcgtgttgatctgcgcatcggtcgtgtaaaagaagcgctagctgaagctcatgcaccgtctgaactacagaaccaggcactgcacccgttacaaatgtgcagacagcgcattgaagtgacctcttcaataccacaaattatcagtgagcaaactgaagcggaaggctacgaggacgaagcctatgagttgctgaatggttttatcgaagatcaacgcaaaaaagctgaagctgaacaaagacgtcgtgaactcgaacagaagaaacgcgaagaagaagcagcgaaagcaggtaaggcagctccagcacctgagccagcccctgaaccagtggagccacagccggttgtaaaacgtaccgtaacgattaacccaaccgatgccatggctaagtcagtaacaaccggattcattgaaaatgaagccgaagttgatacctatcttgccgctttaagagaacagctgattgctgctgtcaaagctggcgaccgagtaagaattaagtaa

SEQ ID NO: 283570 - DNA, 1764 bp, Morganella morganii
atgtatcaaacgggtggaacaataagatcattactcgacaaggttgctgagcaggaatacctgttaccggccatccagcgagagtttgtatggcgaccagaacagatctgtcgtctatttgatagcctgttgcaaggttacccgtttgggacctttctattctggaagataaaaccagagaaccgggatagctatcagttttatcagttcatgcagcattaccatgagcgagataactaccattgtgaaaatgtcactcagttaccggagcgtgagttcattgccgtccgggatggacagcagcggattactgctttgaacatcggcctacgcggctcatttgcgtggaagctgacaggtaaatggtggagtaatgatgacgccttcccagtgcgcaggcttcacttaaatctgttaagccagcccgacttagaaactgggtcgatgtatgactttgagttcctaaccgacgataaagcctctctggatgcatctgaacaatattggtttcgtgtaggccggatcatggaagaggaagaagatacacttatcgatgaagttgccgatgatgccaggttgtcctcggatcaacgtaaagaggctcgctcaactcttcgtcatttgtatcgaaccacccatgacaaagacaagatttcgttttatgaagaaagtgagcagagcctagaacgtgttctgaatatctttatccgcatgaatagcggcggtactaccttgtcctactcagacttactactttcaatagcagtagcccagtggggcttgttagatgcccgtgaagaaattcatgcattagtggacgagatgaaccgtgttggtgatggattcaacgtatcaaaagatctcgtcttaaaagcaggcttaatgctctctgacattggtagcgtgggctttaaggttgagaactttaacaaggaaaacatggcgattctggaaaagaactggacgccaattcgtgatgcgttattgctctcaatgcagttgcttgcaacttttggttttaatgcacaaaacctcagagcaacaagtgccatcctcccgttggcttattacctgtaccaccgaaagttaacggcaagctacctttctagggttgaatatgcggtcgatagagaatgcatcagaaactggcttattaggtcgttgttgaaagcgtcaggcatctggggaagtggtttggataccctgcttactatgcttcgctcagacatcaaacaatcgggtgatacgggtttcccgctagcaaaaattgaagcgaccatgcaacagcgtggtaaatcgttgcgctttgacccagaggaaattagtgaactagcacagttggattatggtaatccgcgtacctttgccttgttgactttgttgttcccaggattcgatttttcacgatactttcatgtggatcacatttatccgaaaggtttgtttacgcgtaacaagcttgcaaaagttggtgtcccagctgaacagttagatgagctcatcgaggcatctaacaagctgccaaaccttcaacttttggaagggacaatcaacaaccagaagcggcaaaaaatgccccatgaatggtatgcgcagcaatggcctgatgtgaatgcaaggcaaacacatctgcaatcgcaagctataacatcattacctgaacaactaatccagtttatggatttttaccgcgagcgtcaggaaacaatgcttgcccgcattagaacagcattacaacccgaaagcagcgtagagacagaataa

SEQ ID NO: 283571 - DNA, 3639 bp, Morganella morganii
atgaatacgaacaacattaaaaaatacgcaccaaaagcgcgccgcgaatttatggatgcggtagctaaacgattaaacacctttggtatcaccgcgaataaaaaaggcgagctacaaattgcagaagcgaatctacaaggttctgtgcttcaaatcgccggtaacagttttgacggtaaactggctgagcccagaaaacgcatagtggccagaagccagaagctggggtatgcacaacttattgaacaagtagcttatacctggttcaaccgtctgtgtgctattcgctatatggaaatccatgactatctaggccacggttttcgtgttttgtcgcacccagacaaccctaaaggctttgaaattatcgatcatgcgcaagatgctgcggatgaactcggattagatagagctcgcattattgaactcaagcttgcgggcaacaaagacgaagagctttatcgtgaactgctgttgagccagtgccataagcttcatgaagcgatgcctttcttatttgacgcattggacgatgaaacagaactgctgctaccagataatctaacgcgtacagactcaattctgcgtggattggtagacggcatccctgaagaagactggcaacaggtagaagttattggctggctttaccaattctacatctctgaaaagaaagatcaggtaatgggtaaggtagtcaaaagtgaagacatccctgccgctacccaactatttacaccgaactggattgtgaagtacctggtacaaaactcagtcggtcgtcaatggcttcaaacctatccagattctgccattaaatcgcagatggaatactacattgagcctgctgaacaatctgacgaagttaaccagcagctaaaagctattacgccagaatctattgaacctgaaaccatcagagtactcgatcccgcttgtggctcgggccacatattgattgaagcctacaacatactaaaagcgatctacgaagaacgtggtttccgctctcgtgatattccaaagatgattctggagaacaacctctatggcctggacatagatgatcgtgcagcccagctatctggttttgcgctgatgatgatggcgagagatgatgacaagcgtatttttacccgtaacgtgcgactcaatgtactgtcattgcaggaaagtaaccatattgacctgccgactttatggaaagcactcaacctatcgggaagttggcaaagcggcacatcgcagggcttattcgttgacgaagaacaagatttaagctcgttcaatgcagacaaccgctaccatctgctgaagcgaacgttggcaagatttactcaggctaagacctttggttctttgattgatgtgccaagcgatgagcatgatcagctaaaagagctactgagcacgcttgtcgagcttcaagaatcaggtgactcaatgcaaaagcctgcggcgaagcaattgattgaatttgtgcatcaagctttggttttatcgattcgttatgatgctgtcattgcgaatcctccctatatgggagcaaaaggaatgaatgcggacttaaaagatttcgcaaagacaaatttccctaatagcaaatcagatttgtttgccatctttatcgaacgaggatttggctggctgaaaaaagtaggtcttaattcaatggtaacgatgcaaagctggatgtttttgtctagttatgagcagatgagggactccatattaagccatagaactattgaaaacatggtgcatatggggaatggagttatgaaaattgcatttggtacgaatgcgactattttccgaaatattcaattgagcggttataaaggatttttttcatatgctgataataaagatataaatgcagatggtgtgccctatgaattccctgtaaagaatgaacgattagcgatcgtttcttcagattattttcagaagattccgggaagcccaattgcttattgggcgtctagcttacaattctcaatgttcgattcacacccgttgcttacaagcatcgctaatgttgctgaagggactactactggtgatgtaaatagattcctaaaaatgtggcatgaaatagatgtcaatggcttaggtataggttttgatagtcgagaaagagcaaaggattctggaaagaaatggtttccatacaataaaggaggggaatatagaaaatggtttggaaacaacgattatgttgttaattgggctgaagacggtaaagaattaagacaatatcaaggttcctttttacgtggtgaaaaattctattttaaagcaggtttaacttggtcaaaggtttcaagtgggatcttaagctttcgcctttttgatgaaggttttttgtttgataccggaggcttatgtgcgttctctgacaacattgagtacattgcagcaatactgaactcaaaagtatcactggatattatgagtattcttgctccgactctaaattttacagttggaacagtatctagtttacctatagtagaaggtattccgagactaactgaaaatgccaatagactaaaaagtctttccaagtcagattgggatagttatgaaacatcatgggattttactaaacacccgctgttgtcacatacatcactattgataaaggattcatatagccgcttattgctcgaaaatagtcaatctctcaaagagtatagagaaattgaagagtacaacaataaggttatcgctgaggcttatggaataacatcagacgctttaacaattgctgatcatgagattacattgttttcttctttcggttataggtatggtcccgatcgcgctgttaacggtgaatttttgtatagatctgatgtcgtcgctgaacttattagctactcaataggagcgatgttagggcgatattctattgatagtaaaggagtagtctatgcccacacagcaaacgagggctttgaacagcttgttgccgaaggagcttacaaaacattcccagccgatgaagatggaatcattccgttaacagatcaagagtggttcaaagacgatgctaccaaacggttccgtgagtttgttcaagttgtttggggtgatgatcatctgcaagaaaacttggatttcgtcgccgaatcactatgtctcaacgccattaaaccgaaaaaatctgaatcagcgttggagacgattcgccgttatttatcaactcagttctataaagaccacctgaagacttacaaaaaacggcctatttattggctatttagctctggcaaacagaaggcttttgaatgtttggtctacctccatcgatacaacgaagggacgctttctcgtatgcgtactgagtatgtcacgccgctactcggcaaatacgatgcttatgcagagcagcttgagaagcagattgaaacggcagactcgaccagtgaagcgaaccgtttcaagaaagagttggatgccttaatcaagaaacaggtcgaactacgagagtttgatgacaagctaaaacactacgctgatatgcgtatttcactggatctggatgatggtgtgaaggtgaattacggcaagtttggtgatctgttggctgatgttaaggcgattaccggttcagccccggaggttaactaa

SEQ ID NO: 283572 - DNA, 2661 bp, Morganella morganii
atgcagattagcgaactggcgcatggcgtcgctgcgaaacttgaacaaagccgcattgtgttttggtacgacccagagcaaagcttcactgaagaacttgagcatttagctaacgccctatctattgcaaaaggagtaggcgatagcgcggcagatataactgctagggtactgccaaatgatttgaccatcctcaatatgggcaatgagtctgtattggcagtgaaaaagcgcattgaagtggatgagcgtgaagctaaattccttatctattttccaagcgctgagccagagcccgaccgcgattggttgctagacgtgcgtttgtatagcgagcagttttttgctgatcacagctcaatgctgcttaatgagctgggtatcccgaaaatggcgcttcgcacgcacattcgtaagcgccagagcttttttgccaataaacagcgcatagccggtttaaaaaaatgggtgactgagaacgaagacgaactgtcgttagacaggaagatgatggcagtggttgtaaaagctgattctgcgtctttgtcggacattctgcttgggttactacgcgagtatgcggcttatatcgaagatgaaagccttggccaacctttatggagccagctaagtaagtttgatcttgagacctcactctgggcctatctgagtgagggttttggctattatacagtcgaagagccaaccttctcagacttcgtgttgaaattgttctgtactgaattctggagccaaattgaaggtgttgaacgcgattggttgcttaacaatgttctaaaaagcgcatcaggccgggcgacagccttggcgtttatggtgagctggcgcgacagccgctctttcgccgcttactacgaaagcatctctaaggtgcttagccaacagttggaaatttcggctcgtgctggccagtaccatccggttgagcttatcgaatgcgaaacgttcgaagctgtggaacaggccataatccgtggtttggttcgtgatttgctcgatagcagtaaagcgctagaccgggttcagtttgatacggtcttatcaagacgtcttgctagccactggacattatcacgcaaagaatacttcgcaatttatgaagctatccgcaacgctgaagagttaatgcacttgcgaaatcgctatgtagacgggttccactttgataacgcgaaagcaatgtacgacgcctataccacagacatttatcgttttgaccaggcgtaccgtttgttcaatgagcatgtgcactctgtattgagtaaaggtgcagacatactgcgtcagctcgacgacgaagtcgaaagcatttataccaactggtacttatatgagcttggccttgcctgggatcgtcacttggccaatgagaaattacttgaaaagtggcagatttctggcgtaccgcaccagtatgacttctatgaaaaagaagttcgcatacgactgagtctgaaacagacaaaacgcgtgtttgtgatcatctctgatgccctgcgttttgaaattgcgaatgagcttggcgctatcattaacaacgaaaagcgatttaaggctgaggtgtctacgcagttgggcgttttgccgagttatacccaacttgggatggcggcattattgcctcataaggcgcttagttaccagccagagcaaggcacggctgtatatgtggatggtatttcttcacagggtttagacaatcgtaattccatcctacagaaggttggtggtatggcagtgagttctaaggaactgatgagctggagtaaccaggaggggcgtgacaaggttcgagatgtagaagtagtttatatctatcacgataccattgatgcgattggtgataaggctgcaactgaagagaaaacgtttgaagcctgtcgtagcgccattgaagagctaaaagaccttgttggccgtgtcatcaaccgtctaaacggaagccgagttgtgatcactgctgaccatggcttcctattccaacaaaaagcacttgtagctgctgataaaacctcattgaaaactaaacctgctggtgcgatagaagccaagaaacgttatatcgttggtattaacttgccttcagatgaagcctgttggaaaggctcaataaaagatacggctcatggctctagtgataccgagttcctgcttccaaaagcggctcaacgcttccactttgttggtggagccaagtttgtgcacggcggagcgatgctacaggaaatctgcgtaccggtactgcatgtgcgagagctgcaaaaagaacaagcagcaaaacatgagaaacaaccggtaggtgttgttgcagccactcagcctatcaaattagtaaacaatatcgacaaggtcagatttattcagacagaccctgtaggcgagcgttttgtcgcacggttgttggatgtatatatcgtcgatgcacaaggtaatgaagtctccagtcgtgaaacgattaactttgatagcgtgagtaaagtgatggatgaacgtactcgcgaagccaggttaaagcttattggctctcagttcgacaggaacgctcaatacacattagttcttgagaatgcggaaatgagaacccgttatagccaatacgcggtaaccattgatttggcattccaagatgattttttctaa

SEQ ID NO: 283573 - DNA, 2079 bp, Morganella morganii
atgacaactgatttttcacaagatcataaagacgaaaaaaatcaggtgcaaagcaccgacttagacgcattgctcaatcaatattttaaaggccgtgtcgttcgaaaagatctgacaaagcaattgaaagaaggcgctaacgtccctgtttacgtgctggagtatttactagggatgtattgtgcgtccgatgacgacgaagttgtaatgcaaggccttgagaatgtgaaaaaaatcttggctgagaactatgtccgacctgatgaagcggagaaagtgaagtcacttatccgtgaacgcggcacgtttaaaatcatcgacaaagtaagcgttaagctcaatcagaaaaaagacgtctatgaagctgcgttgtcgaacctgggtatcaaggatgcccttgtaccgaccaaaattgtacaagacaacgaaaaattattaactggcggtatctggtgcattattaccgtgcagtatttctttgaggaaagtcagaagacatcacctttctccattatgagtttaaaaccgatacaaatgccgtccatgaacatggatgaggtgttttcaaccagaagacattttagtaccgatcagtggatggatgtgttgcttcgttccgtgggtatggagccaaccaacttagagcatcgggtgaagtggcatcttattactcgcatgatcccattcgttgaaaacaactacaacgtttgtgagctcggaccaagagggacaggtaaaagccatgtctacaaagagtgctcaccaaactcattgcttgtctcgggtggacaaacaactgtggcgaacttgttctataacatgagctcgcgccaagttgggttggtcggaatgtgggatgttgtcgcctttgatgaagtagcgggtattaactttaaagacaaagacggcgtccaaataatgaaggattatatggcgtcagggtcttttgcccgtggtcgtgattcaatcgaagcgaaggcttctatggtattcgtcggtaacatcaatcaaagcgttgagacactggtgaagaccagtcatctgttggcaccttttcctgatgccatgattgacactgctttttttgaccgtttccattcctatattcctggatgggaaataccgaagatgcgtcctgagtttttcaccaatagttacggattaatcacagactatcttgctgaatacatgcgtgaaatgcgcaaaagaagttttgcggatgctatcgataagttcttcaaactcggtaataaccttaatcagcgtgatgtaattgctgtacgcagaacggtttcaggcttgttaaagctactacaccccgacgcacagtacacaaaagatgatgtaagagcctgcctgacctatgcgctggaaactagacgtagggtcaaagagcaattgaaaaagcttggcggaatggaattttttgatgtgcactttagctacatcgataacgattcattagaagaattcttcgtcaatgttccggaacaaggtggcagcaagctaattcctgagggcttacctcgcgctggtgttgtgcacttggttactcagggaagtactgggcagcttgggttatatcgctatgaaacccagatgatggctggttctggtaaacactcagtgtctggccttggttcgaataccgcagcgaaagaagctgtgcgtgttggctttgattatttcaaaggtaacctgaatagaatcagtgcgtcggcgaagttttctgatcatgaatatcacctccatgttgttgagcttcacaatacagggccaagtaccaagtcatcgctcgctgcattgattgcgttctgttcaattctgatgaaccgaccgattcaagagcagatggttgtactgggtgagatgactttaggtggtgtcgtcaatcctgttcaagatcttgctggcagtcttcagttagctatggacagtggcgcaaagcgtattttgctcccaatggcctcagcctcagatattccaacagttcccgctgagttgttctcaaaattccagatcagcttttatgcagaccccgtcgatgccgtgtttaaggcgcttggtgttgtcatatga

SEQ ID NO: 283574 - DNA, 2115 bp, Morganella morganii
atgcgccgtttatccctgaaaaacctgctggaaaaactcgatctcagtctgcgtcagcgcattccggtgatccaccagaccgagtcctctgagtgcggcctcgccagcctggccatgatttccgcccattacggcaaaagtatcgatctgatttccctgcgccagcagttcaatctctccgcgcggggcgcgaccctggccggactgaccggcatggccgccgaactgggcatgaccacccgcgcgctgtcactggatatggacgacctgccgaacctgcgcctgccgtgcattttacactgggatttcaatcactttctggtactggtgaaaatcagcggcaacaaatttatcctgcatgacccggcctatggccgccgggtggtcggtattgaggaaatgtcgcgcaattttaccggcgtggcgctggaagcctggcccggcagcaccttcaccaggcaggaggtggtgaaaaaactcagcctgcgcaagctgatcggcaatattcacgggctgaaaaaagcgctgctgaaaatcttcgcgttctccgtggtgattgaggctatcggcctgattatgccggtcggcacacagctggtgatggaccatgctattcctgccggagatcaggggttactgtccctgatttgtgtcgggttactgttctttattctgctgaaagcagcggtcagtatgtgccgcgcctgggccagtgtgattatggaaacgctgatcaacgtccagtggcagtccggattattcacccatctgctgcggctgccgctcagctattttgagcggcgcaaactcggggatattcagtcccgtttcggctcgctggatattctgcgtaccacctttaccaccagcgtggtcggggcgatcatggacggtatcatgctgatcggcgtgtttatcatgatgatcctctacggcggccatctcacctggattgtgctcgggtttaccgccgtatatatcgggctgcggctggcgacctaccgttattaccgccagctgtcagaggaatcgctgatcaaagaggcgcgcgccgggtcgtactttatggaatccctctacggcatcaccacggtgaaaacccagggaatgagtgaccgccggggtaatcactggctgaatctgaaagtcgattccatcaacaccggcatccgcctgaccaaaatgaacctgatgttcggcggggtgaatacctttatcatggcctgtgaccagattgccattctgtggattggtgcgggtctggtgatcgacaacgccatgaccctcgggatgtttgtcgcgttcagcgcctaccgcgagcagttttccgaccgcgctgcctccatcattgagttcctgctgcagctgcgcatcatgagcctgcacaatgagcgtatttccgatatcgccctcaacgaacaggaaaataaaaagccggatgtgccgtacgagccgcagatgcaggccgccgggctggagacccgcaacctggcgtacagttacgacagccagtccgtaccgatcttccgcgataataatctgtcggttgcccccggtgaaagtgtggcgataacagggccgtccggctcgggaaaaaccacgctgatgaaagtgctgtgcggcctgtttgagccatcggatggcaaggtattcattgataacattgagatccgccagctcggcgtcaataactaccacaaaatgatcgcctgcgtgatgcaggacgacaaactgttttccggctcgatccgcgaaaatatctgcggtttcaccgaaaatcgcgacgaacagctgatgattgcctgtgcgcaggccagttatattcatgacgtgattatatcgatgccgatgggctatgaaacactgataggagagctgggcgaaggactgtccggcgggcagaaacagcggatctttattgcccgcgccctgtaccgcaagccccgcattctgtttatggacgaggccaccagcgcactggataaagagagtgaatcttacgtcaatcaggcgatccgccaactgccgatcacgcggattattattgcgcaccgcgagtcgacgattgagtcagcggaccgcattatttttctcggcgggaaaaacaataaataa

SEQ ID NO: 283575 - DNA, 318 bp, Morganella morganii
atgcggatggataatggtccggagcttatatcactgacactggcacactgggcggaagagcatggggtaatactggaatttattaaaccgggtaaaccgactcagaatgcctttatcgaacgttttaaccggacataccggaccgaaatactggatttttatctgttccggacactgaatgaagtacgggagatcacggaacactggctgagggaatataactgggagcgtccacatgaatccctgaataatctgacaccggaagaataccggttattagctgaaaataacgaaatctcaaaaagtgtgtggaactga

SEQ ID NO: 283576 - DNA, 1020 bp, Morganella morganii
atgaatgacaatataacctgtgaaatactggcgctttcacaaatctacaataacggcacagagattaccgatgacacaacagatcgtgagttatttcggctgatagcgtcacataccactgcattaattaaaagaaagagtcagcctttaccctttagtgcgtactattttggtgatgaattacaaataaaggccactaaaaccggtcggtttttttatgagttaatacaaaacattctttctctttcccgtgttaccggcaaccggcgtaaattacatccggttattccgctgattgtttctcttgctgagaaatatcatattcgttatgttccgatgctgtcggaatactatcctgactcagaggaggatattaaacagctaaatgaaggctattgtgagtttattcagtcagtggacagtaaagagtataaaactgctgtcagtacctttaagaacagtgcccgcaagaattaccggttctgttgccgctatattgaaaacctgtttgagcgccatgcaaagctgctggtggtacggacagacctgtcttacggaaaacgggtctgtcacagagtcacggccggggatttaacccgtcaccggattgccctgtataaagcaatacagcggttacgcctgtttaaacactgcgtcggttatatcctgaagctggaatacggtcgtgagaaaggctttcactaccactgcctgtttttcttcaacggccagcatgtcagacaggatattacgatagccaggcttatcggtgagttttggcaggaaaccatcaccgagggacaggggatctactttaactgcaaccgctataaatcagattaccgtatctgcggtatcgggatgttgcaccgcagtgagagcctccggcgggaaggcctgatgaccgctgtgaactatatctgcaaaacagaccagtgggtgaagctacaggtaccggggatagaccggacattctggcggggaaccatcagaaacaaacggcgtaaaacacgccggtaa

SEQ ID NO: 283577 - DNA, 324 bp, Morganella morganii
atgaaatttctacctgcaacaaatatgcgggcggcgaagccatgcctgccgcccgtgactatctggcaaatgctacttagtcgtctgctggaacagcattatggcctgtcgctaaacgatacgcctttctgtgatgcaaccgtcatacaggaacacatcgatgccggtatcactctcgctaatgccattaactttctagtggaaaagtacgaactggttcgtatcgatcgcagagggtttagctggcaagaacaaacgccatatctcacgattattgatatcatgagagcccgtcgcgatctgggtataatgaatcgtaattag

SEQ ID NO: 283578 - DNA, 357 bp, Morganella morganii
atgaacaatcactcagaatccggtgccataccggagaatcccccctgcaaacagtgggggctaaagagtacgatcacaccctgttttggagctcggctggtgcaagaaggctaccgcctgcattttctcgctgaccgcgccgggtttaacggttctttcagcgacgagcatgtgttgcgcctcgaccaggcctttccgttgatactcaagcagctggagctgatgctcaccagcggagaactctctccccgccatcagcactgtatcaccctctatcacaacggactcacctgcgaagccgatacacttggtagttgtggctacgtatacatcgccatttatcccactcaacgttaa

SEQ ID NO: 283579 - DNA, 474 bp, Morganella morganii
atgcgtttatctcatgccgccctggcggtcgttatgctggcctcagcctccgttgcacaggccatccccaatatgtggagcagcggcttcgctcagggtgtgaccgaatacatcatcaccagcccggagaaagtggtctttaatcttaactgcaccaccagccccgatgagcagaatgtgctgcagcacagcgtatacctggccctgcccgacggtaccttgctgaattctcatgatgacggaaccgacatcaccgtggtgatggatgacagccagtatccgttaccgtcatccctgggctggcgaaacggtgataatgcctgggtggcgtttattgacgccctggggcaggccgcgagctttgatgtttacgtcagtgacaaaaaagtaggcactttcagtccgggtctgaagaatacgcaaaaagagctgtctgacctcagtgagtgccggactatacactacagcgattaa

SEQ ID NO: 283580 - DNA, 465 bp, Morganella morganii
atgaaagtgaggtttgcagtttttgcgctggtcttcagcgtcagtctcagtaccgcggcccgggaacgggccgatattccggcgaacactatctggtcgtttaaggaccctgatggtcgggtgttatgggatgtctgtggtggaaaacaaagcacctgcaccatcgtgttggcggcaacgaacagggtggccatcgttaatcgtaaatctactaacggctgcgccctgggggatttttacgtggtgggcaaacccgaaaaagcctggaaccagtacgatacggggacctgcagcagcaatgcttacttcagtcaggggaccatgaacaacgggcagtacaggactatcgatgtccgtctcaacggggaactggtaaaacgatttccggtggaatactggtcgctggtgaaatccttttcgggtagcaaccggccaaaatggaaggacaaaacgacagacagataa

SEQ ID NO: 283581 - DNA, 501 bp, Morganella morganii
atgcttgctacctcatggtggacagtgataaaaattgcacaatttactgagagagaaattacaatgagtggagatacctctgagtttcctaataaacttcccagaaagccaattggttggcgtgaagagtatagtgattttacaggtagtattatattctatatgatattcccgttgcttccattactttttgagtcaattaactcagggacttaccctacaatacaatcattaacaattactgcatcaatatactctttttccatcggtgtatcttctagagataaagctattttttgcttagggatattttgtggtttcattctcgcttatctttacggtaaagttagcgagccaaaggttattatatatacctggtactatgtagttacggtaatactactggctataatatttatatttcatcttctcgaacgattcaataaacacgtggtagaatgtgagcctgttttctcctttaagtttacgagaggtgtataa

SEQ ID NO: 283582 - DNA, 468 bp, Morganella morganii
atggaggatattatacttatgtatgttggcttgatagcgtcttctttagcggcaattgtaggcttagtcacatctatcaggcatactcgtaaaaaagttaaagctaacgaagaacttgcgactgaaatggcaaaaaactttagtgagcttgaatctatcaataaaagcataggaaatttggaagcaacaattaaaaggatagaggaagatgaattaaagttaaaaatagcaattgaatccttaaaagaaatgacttctgaagaaaaagaagaatctagagagatgttgagagctatcgttaaagatgaggtattcattaaagttcttctcgaaagctataaaaaactcgattcccagtcgaagaatgagatttatttaacttttgccaagtcgacagatagaggtctttatcgatatataaaaagaatagcttcattagtactcgataacttaatggttaaaatataa

SEQ ID NO: 283583 - DNA, 489 bp, Morganella morganii
atgaaagttacatggaccgtcacgcccgtggggtatcagcgcattgcgaaacgctgcccttcatgcagcattaaacgggactttttgccttcgggggcatttcgggttaattcgcaaaagaaggtgctggacgtgtggagtatctacaaatgcacacactgcgattacacctggaatatctccctgtttacgcgcctgcacgtcagcaaaattgaccgcgaacttcatcaccgattgatgatgaacgatgcagccacggttcaacattttgcctgtgatatcgcgacgctgaagcggaacaacgccgagctatcgggtcggcctgattttaccgttcaggagcgctggcagttaagcatctccgcccaccagcgggttcgcgttagtgtcaggatctcccgttcatttcaggtaagtctgctgtcgattttgaagcaacagctcatgctgagtgcaggtgaaattctgaaaggggttgaggcagggtag

SEQ ID NO: 283584 - DNA, 150 bp, Morganella morganii
atgccactcaataaaatgaagcgtcatgccatactccacacgctctctatacctgaacgtaaaatacgccccttaaaatggcttgctcttatctcatccctgctcgttatattacaactggcaattgagagcctggtcataagcgaataa

SEQ ID NO: 283585 - DNA, 435 bp, Morganella morganii
atggataactatacgctgcatcgtggcagacttatcgaccatatccagctcgtggtaaacgactttgccgcaagcaaagcgttttacactgctgttctggcggaacttaagatccccatggttattaccgatgacgattatatctgggctgacgaactggtcatttcgtcagtaaaaagttcggagtctggcggagtgcctacaggacggcaccatctggcctttcaggccgcagaccgtgaatcggtgaacgcgttttaccacgcagcactaaatcatggcggacgtgataacggcgcacctgccgaacgaacctatcatcccggatactatgccgcttttgttctggatccggacggtaacaacatcgaagctgtttaccatggtgagggcgatcgcagtgcccgctctgtagaaatcagcttcactgtctga

SEQ ID NO: 283586 - DNA, 819 bp, Morganella morganii
atgaccgttattccggtatcagcccttgaatgcagcattactgagctgtgccgtattcttgcagacagctttaatgaatcattgacaccgtttgcgttgccaccggaaatgtttgcctcacgtttcatttccgaaggactcagccttgaagactcgtttgtctggctggtcaatgataacccggcggcaatagccatcgtaacccgcagaatggacaaagcgcgtctggcagcatttggtgtgttgcccgagtaccagagccagggactggcaaaacagatgcttactcctctgtttacctccttaaaacagaaaaagttatccagcgtgaggctggaagtgatgcgcgaaaatacccgggccatcgctctctatcacgcgctcggttttcaggttcgccgacatctgtgcaaataccggggagatccacagtctcgtctggaaataccttcaggggatattgaatccaagtctgctgatgacttcctgcgtaccgtctggtctgcaccagatgatgatcttccctggctggccagccccctgcagctcttgtctattccctgcgacatcctcagggataacgaacatgcatggtgtgctgtcgcggagttcatgggacaacctcagctccgctgtttgtttgtggaaccggtgtatcgttaccagggacgggctaaaagaatgcttcagaaaatcaatgccagatggcctggcataggtacatcagccgcgatcccagaaacgctggcaccattatttactgcggcgggttatcaggctgaaccattatgccagtttgaaatggaactgacattttaa

SEQ ID NO: 283587 - DNA, 573 bp, Morganella morganii
atgagttgcaagtttgaatggatcaatgagcccgccgtatggtgctacgaaaataacgccctgtcggtaatcactgatgagcatactgatttctggtgccgtacctggtacgggtttgagcgttttaccggccacatctacgctactgatgtaacaggtgattttacttttcaggtcaggatccgcgcaaacttcaccacactctatgaccaggccggaattatgattctctctgacgaacagcactggctcaaagctggcatcgaattcaacgatggcacacctgcaatcgggagtgtactcacgcagggatattccgactgggctacaggactctttcctggggatccgaaggaattctggctgcgtctgactcgtaaaaaagatgcgttacgactgcagtactcctcagatggacagcactggccattacttcgcttatgccatttccctacgggccctgtaaaaacgggcatcatgtgttgtacacctcagcgaaaggggttggagatagaatttcttgatctcagactgactcctgcgatggataaggaactgcacgatctaagttga

SEQ ID NO: 283588 - DNA, 435 bp, Morganella morganii
atgaagccattctcgggacgccttagcaggtatggcagcgtgctattatttccactggcgatgctcatctacgatttttcagcctacctgacaacggaccttattcagccgggcgtcattaacattataaatgagttacaggcggatgttacgctggctccagcatcagtcagtttgtatatggcaggcggactggcgctccagtggctcctggggcctctctccgaccggattggtcgccgcccggtcctgctcactggtgcaatgatctttgccctagcatgcctgagcatactgtttgtcacctcggtcgaacagtactttattgcccgttttatacagggaaccagtatctgcttcatctccaccgttggttatgtatcaatacaggaggcctttgatgaaaggattccatcaggatcttggctgcgctga

SEQ ID NO: 283589 - DNA, 231 bp, Morganella morganii
atgccctttgatcggcagcccgccggggttggtaatggcacgatggtggcgctgaacgcccgctctgttcaacatatcagacagttgcatgcgcttgccctaagtctgggaggcgtggatgaaggtgcgccggatcacaggccgcagtacggacaaggattccatagtgcttatgtacgcgatccagatggcaataagctggcgtttgtattctatgccgatgagggttga

SEQ ID NO: 283590 - DNA, 222 bp, Morganella morganii
atgcaaataatatcgtcaagatgcatcattcgaacatttcattcacacgaaattgatagttttatggtgtatcgtaatgatgctgagtggatgaaatatcagggatttaaggggctaacaaaagaggactatgaagcagagttgctgggagttcttacacttgttcgcggtattcaattggccattgtcaacaagctgacgcagtgttttgattgcagatga

SEQ ID NO: 283591 - DNA, 1944 bp, Morganella morganii
atgaacacggaaaatagcccttacatttttgtgaagaaaattgttatccacggagtggatacctcgtatgaggcaacatttgaaaatggtataaatctgatttggggggacatggactgtggtaaatccagtattctgaatctgattgattactgcttaggaggaagtaatgataccctcacgtatggtgagattttggctaaaggtagaactgcatacttagaggtagaccttaacggtaatgtaattaccttcgagcggcctattttagactcattagctccagtgaaggcatatcgagttccttattcattgatcctaacgacataccccatgctcttatctgccgattcgcaaaaatcacttcccgacggctggatttctgattttattttggatgctctagggattcctaaagttagcatcaaagagtctcgttaccgtgatgaggcgaactctgatcgactcagtttccgtgacttgatgaaattaatgtacctaaaacaaacaaaagttggcgctgatagtttattgaattacggtaatcctatagtatttaataaaaacattgaagttcagaagtttgtttacaatattcacgacgacaagttggcctccctgaataaagagttgcagatggagacacaagcactacacctcctgcaagcttctgaaactgctatctcaaaattcttatgtgatgtaaacatcaccactaaagctcagaacgatagtgatgatcttatcacttcaaaagagcttgcacttagcgaactggaagaaaacgcggaaaaattaaaggcagactatgagttctctagcgctgtttctcttgagatggcgcgcgaaatcgtgcaaatgagatcaagcgtttctcatttgaagtcagagcgtctagaacttgagaaacaacataataatttttctaaactaaagaatacataccagagcgatctagagtctctaaatatatctaaacttacaagagtctctatatctaatcgcaacattatagatacaacgctcccttgcccactgtgctctagtgaaattagcttagcagccccccaactcactgatagcgacttagaggcagagattaaatctattaagaatagactcgctggagtgctcgtagcactagaaaatatttgggctaaaaaaataaatcttcttgaacaagaaactgatatatcgaagaagctaagttcgttaactgttgattttgataaatttaatatagagaacatatctgctcttttatcctctatcgaagcgcttgagcgtgcaaaggtcgagattaaggtcagcatcgcttcagctaaaagagacttggctatcaataacaaatattctgatatatcaaagggaattcaagataaaaattcagttatttttgcgctaaaacgcaatataaaatcggtagaggacgggcttacgggacttgatgatgtagtatctagcttgagcggtatatttagaaaatacatttcaaatagtgggcttcaaaacgtccatgacgtatatgtaaataaaaaattcatccctcactttcgcgatataagttactacaacacaacttctggcggcgtaagaaccatcatgtccatcggaggattcgtatctagaatggagtatttactctctaccgccggaaatctccctacttttcttatggtagatacaccaggtcaaaatattggacgaaggggaagaaaggatgatgactcagccctttcagatcctgtcctctacaacaatatatttaaacaattccttgggctggtgaacaaagctcgagcagaaaatagactatttcagatcattgttgttgacaatgatttgccgccggttctagaggaaggaggggattatcacttggtgaaaagattcagcaagaatggtggagagtttgaaaagggattgattaatgattacgagtag

SEQ ID NO: 283592 - DNA, 468 bp, Morganella morganii
atgtcttcgataattgattatcgcgaagagttttttgtgcgtctttatcggtgctggttgatcgttagcattttaggattcaaccaaaaaggtaagaatattctatctatcaaaaaagcggcttttttcgattttttggtaagaaatccaaaattatttcatgaatttctcgtgaaatttgaccgactttcaaatgaacctccttgctcagaaattctgtactcaagcaatattgactatggtgcattccaggaatatcaagaatttttgaaaagcgttttagtgttagaaagcgaaggctatttagaaattacacgcgcaggagatgatttctttatcgcatcgactaataaaaagtttgccgaagcaatgacccctccaccaacgtggcaaattaacataggtttactcaagccgctggtgagtaagtctctcagtgtgctttataaaggagttcttagcaaatga

SEQ ID NO: 283593 - DNA, 1170 bp, Morganella morganii
atgaagaaaagttgcgtagtttttgtacatgggttcacaggaggcgcaggtacttggaagaatagcaagggggagagtttttcggacttgttaagggctgatcgtgaaatcgatcagtcttatgatttttatgagtttgattactatacaaagattgccagtttagttgattctgcactggtagttaggctgctcagtttggttggtttgggctcggggaaagtcaagaaaaaccaacctatcagacgaattagtgaactgctaagtacctatgttaggaccaacctaagtagctatgatagtgtcatatttattgctcacagcatgggggggttgattgttaaagactatatcttaaaccatgaaaaaggagacacaccggagccaattggttatctatctctcgcagtccctcacaaaggatccattggtggctatttgctgggttcattcaatcttaatgccaaagagcttcagccattaaatgcttatagcgacacactaaacaatgcgtggatagatgcaaaagagagcctccccaaagctcagtactatattgcactacatgacgaatgcgtcgacgaggttagtgctttgccgtttactgtaaaaagatcagataaatttgtggttgatcatgaccatatatccatttgtaagccatctgacgttaatgatatggtttgtggtcaggcagccaacttcttaaaaagccgagcttatgattgtacaatgtccgagttagcgacaacagtatacaaaccggagtcaaactcatacgagaaagagatatttgttattaaaatgatcttatcggacgtaggtgaaaaggggattgatgatgctaaaggatcattttttcacgcagagataataactaaagcagcagataaaaaggaccggataactctccaagacctacagacgaaggttctttctctatatcaacaatcctacaacgcgcattctagcaagctcgaagcaaatgaagtctttgctaaagtccatgacttactattggagcaagactctaaggttctggttagtggcgtgaactacattaactttatgcacaagaagggactactgcatcagttggcaaacaaacttaatactcaagttacttggtctgacaaaattggaatccaagatatcttggcaaaaatgtag

SEQ ID NO: 283594 - DNA, 279 bp, Morganella morganii
atgccaaaaatcgcagtcaaaacctcaagttgctctgggtacggtaagttcccttcctgcccgccaactgaagccgtggactttgttacggtcaacggcttcggtgtattcgcccagggcaatgcctacacctctcattctgacgggaaaacctcttatgaaggcacggagttatctacaggcccatggatcactatcaacggtatgcctgttgtctgtgagggagatcctgtgtcttgtgattcaacggcttccagtggtgaccaactggtgatgtga

SEQ ID NO: 283595 - DNA, 1953 bp, Morganella morganii
atggtacttcacacatatcaaataaacgaaaatcttaaacttacactgtccaaaaatgctcttgatcatgtcctccacggcgaagtcacggataaggtgtttgaaactgataatgggcgtattgctaaaaaagtaatctctggaggattacacacctattcaggatggcagtcttatttaagtaaaactcccggtctgaaaaatattttactctataataacaaaaccaatgacgaatggtactacgagcgagaacttcgaaatgggactattttgttaaagttaccagagtcagttttcacctctaaagcagcaaagatgacattatttcctgagaataattataaatcaggatttctctggaaaacactatttccaaagacagttggtgagagcgagattcttgatttactgaatgatgctttgttgaacatcagcaaacatgaaagccgtgatggtgagttaatttgttattataaaatagacgaaccgttgaattgcatgaggatcgctgttctatatcgaaacggcgaaattaattcattctatcctacatggtctcaaccaaatactgggaataatggtaaacctttctcattctttgataacattgggcatgttatttcagagtcttcatttgttaatgaatcggaaattattgacgttacagatgtggggctgttttcgaagttatctacccttgaggaaattcaagatgtgacgcctgaattatttctctctcggggtgcagttacccaggacattaaggagtgggacgacaaacgaattgactcaataaattcatttgcggagaattatagcttcgatgaaatacttgagatatataattatgtgaacgatgaagggatatctaagtaccatgacatagtttcacagaatgcgtactcccatttcttaccaaatattaaattatcagttggcttttttaatgcaataagtttcaatcagaatatagctgaagggattatggctttgtttttttacgatcaaaaaaataaatcaaagctatatgccaataccgttttaaatttaatcagtaatatgtttacatctccatttatggatatgtgggctaaaaaaagaattcattacataattgccaaccttaatttagagtatcatgatagaaactttcctgcggagtatattgactgcctttcaacatcgccaactcgcagagagttctattcggaatatttctacgatagtcacaataagaaaaaaaactataattccattgagacctatgaagaaatcgctgatctttttggtttaatattaacccctccgcagtatgaatcagtaacctactcacattttttacattatttttcagacaatttaggtgaatcatattctactaactttactgacgaggaaaggactgtttttttgctagaagcctaccctggtgattactatgaaaattatgttcaggataatctgaagttctataatcaaaaagttttcactcactccagctttattctggcagaatatttggaagtttttgctaaagagggggtcgcaaaaccaatcaagcttcatagagtaatatatgaatactttaaacttcaagtcgctcaacgctacagaattaacttaaattactccgattattatgaaatacccgaggtggttacactccctatcaagaaacatgatgtttacgctactatattaaagcatgaaagaaattctaataggtttatgacggacacgattatagaatctgttaagaaatatctattgactgttgaagacactaatttatcgaaggtcttaaaggatattgaaagagtggatagaaaagagattccgagatttccaattccataccatttgattattgagatggtgaaaaggccggagtcagtagatgttaattacctaaaggctttaagagtattagaggtagatgcaacggtttaa

SEQ ID NO: 283596 - DNA, 531 bp, Morganella morganii
atgaaagtggagcagcaaaaaattactaaattagtaatttcagatgttgaaaatcacgaccctattcacgtttatcttgaagatgaaggcgataaccggcgcggacgtgtaactatcagtgagtccggtaaatcatggtcatgcagttggggcggaatggggatgccgcttactgagtttctgctttggataactgatgattattggattggttatcttgatagcaatatgcaccgaaccattgatgctgataatgaagataatatctactttgttaaaaaggaaatattacggtgccgcaaaaagcagattattgatgaatttcaagcccgaactatgtttgatgattgcgaatatagcgaggatataaggtacagactcacgaacacatcaccggctggtgattacggatgcttattttcaggtgaggcgtggttagctcagtggcccactcaggataatcctgaatatatccgcatggcatccagattgaacgcagtacgtgaggcaattaagcagattcaggggtga

SEQ ID NO: 283597 - DNA, 399 bp, Morganella morganii
atgaacaaatatcgtgacaaatcagactttgagattaataaggctgtggctgattattatttaacacgcgcgtatagatttaacagtgagaatgaaactgttgagttgatagatatagatttatcttgtgaatttggcggtgaaataaatcgtgtagatactcaggttgtcggcacattcgccccatgcaacaacccagcggacgcaatgccgattgttattgagaatggtatttcattattcgcaccgggattgcctggcatgtggacggctgggtatgttgattatgaaaccgaccgcgaatatggtgttgataattacgaagctataaataaaaacccatatcgcgccgctatggaagtattcctgatgatgaaagaggcggagaatgaaaaatga

SEQ ID NO: 283598 - DNA, 210 bp, Morganella morganii
atgacaccacaggaagcagagaacggacgcagacgaatagcaagggaatgcctcacggaattaatgcagcacacatcagacgaacaacacaccgcaatactcgacaaatacacaccgaaatttaaaccacttaatcacctgcgctttccggcaaaaagagtgctcgggtattacgtgcgtacgttacagaaggagatgaaggatggataa

SEQ ID NO: 283599 - DNA, 189 bp, Morganella morganii; identical to SEQ ID NO: 222253

SEQ ID NO: 283600 - DNA, 555 bp, Morganella morganii
atgccctttaaatcggcgatacaagatgctggtgagcaaggctcctgttatcttatccagacgaaagatattggacttgacggcattttagatctaagtgctttaacctctgttatcccagagggtaatcctgagaagcattatcttatccctaatgatattttattacgtctgcgggggcctgtgttttctgctgggattatcgaaggaaatttaggcaaaccaatcattacgtccaatcagttagcagtaattagatgtaatgataatctaatactgccacattatttacattggtatataaactctacttctggaagtaaacatattcgcagtttgagtgaaggtacgagtattagtaaacttaattcaaaaacagtttctaaaatgactgttaaactcccaagtttgagggttcaagaaaagattggttctattaatagaaactggaataatcaaaaaacagtttataattcactaatacaaaatggcgatatgctctttgatggtatatgtgaaagtatcattaatagcgaggagttagaaaatgagtga

SEQ ID NO: 283601 - DNA, 1482 bp, Morganella morganii
atgagtgagatgaaggcgcttcatgaatcacttttacgtgcttgtgatttgtttagagggaaaattgactcatcttcttataaaaattatatattttcaatgttattgctgaaatatatttctgatgttaaggttgactatgaatatgatttaattaatgaagaatattctgagttgttagagattgtttctcgagtaccagaggatgcgagtttttataaaatatatcatgaggctaagaatcatggtgattatattggagagaggattgacgactcgctgaaattaattgatcaggctattgactcggtctgtcaaagtagaggtggttatttattcgagtctatacaatttgcgacggttaattttggtgcaagatcagcgagagatcgaatgcttgttaatttactcgctatttttgcacgtcctgaaatgaattttggttatatccaaggtggtaatgaaaagataaaagtagcatgtagatatctttttgaaaagattgcatctgactcggcgatgaggggtggagatttttatactccagaaggcatttcattactatttgcagagttattgcagcctaaggatggagatagtatttgtgatcctacttgtggatctggttctcttttaattaccctaggggaaaaaataaaaaaatcctttaaaagcaataactatactttgtttggtcaagaggctaatagatccagttgggccttggctaaaatgaatatgattatccataacgaaattaatagtcgaatagaatggggggatgtaatatctaatcctcagcttctggatacagataatagattgatgcagtttgatgtagttgcttctaaccctccattcaatattatcggttggaatcatgatgatttagtacataatgattatggtcgttttaatttaggttttccacctcagtctaagggtgattatgcctttattttgcacatgatttcaacacttaaaagtgcaactggtagaatggccatactggtatctcacggggtattgttccgtggaggtcaagaggagagtataaggaaaaatttagttagtgaagggttgttagatgcggtaataggtctaccagataggttgcttcttgggacagggataccatgcgccattttgatcttcaggagagataaaaaacattctaatgttgtgttcatcgacgcatctgatttggctaaacccgtaaaggggcgcaatttaataacaaatgaaatcattgagaaggtatcagaatgctactttgaaagaagtagtatcagtaatttttcacatgttgcttcttttgatgaaatacaagaaaatgattttaatttaaatatatctcggtatgttaagaagcatgaagagcaggcttttgttgatcttgagagcttacgtcaacagcgtgaggaactactatcaacattacatgaattagaaagagaaatgaaagattttattgataattga

SEQ ID NO: 283602 - DNA, 714 bp, Morganella morganii
atgtcattggttacctttggtgagctcactttcgatttgcagcgtaagccaattaaaaacttgcatatcagcgtactgcctccggatggccgagtacgagtatcagcccccgtctcactgtcaaacacagcgatcaggatggctgtagtcagaaggctggtttggattcgacagcagcaagcacaatttctggctcagcctcgccagagtgaacgagaaatgtgtagtggtgaaacacactatctttggggaagaggatatcggctagatgtagttttagtagataagcccgctgaagtgaaacttcagggtggttggatacgcatgaaagtacctccacattatgatacggcccagcgggaagctgttctcaaccagtggtatcgcggtattttaaaacaaagactgcctaagttaatggcaaaatggcagcaggaaattaaagttgaagccagttatgttggcatcaagcgaatgaagactaaatggggtagctgtaacccccaaaccgcacgtatctggatcaatctcgaattggtgaaaaaacctcctgaatgccttgaattcattgtggttcacgagctagttcatctacacgaacgcaagcacaatgagcgttttatcggcctgatgagtattcacttgccaaactggcgagaacacagagctaagttgaataagatgcccttggcttataatcactggggatattga

SEQ ID NO: 283603 - DNA, 3096 bp, Morganella morganii
atgaacagtgttggccaacgtgaacgcataacacaaaaacgtgttatccagttattcaccaaacatctcggttatcactatcttggtaactggcataaacgagaagacaaccggaatattgaaccaggcttagtttctgcctggttaacaaagcgcggcgtttcagaagtactaatagccagagcattacggcaactggatcgagccgcaagcctcggtgaaggtcgtatcctctatgatgcaaacaaagaggtgtatcgcctgctacgctacggcgtgaaggataaagaaggtgctggtgagcagaatcaaaccgtgtggttggtggactggaaaaatccagaagccaatgattttgctatagctgaagaagtgacctacaacggtgaaaataaaaagcgcccggatttggtgctgtatgttaacggtattgcgcttggtgtcattgagctaaaacgttctacagtttcagtttcagagggcatccgccaaaacctcgataatcagcaaaaagcattcattcgcaacttcttcactaccatccaactggtgatggccggtaatgatttagaagggcttcgctatggtgtaatcgaaacgccggagaaatattaccttcaatggaaagaaaccgctgaatcaccttacaccaacatgcttgatctccacctggctcagatatgcaataaacagcgcctgctggaattgatccacgactttattgttttcgatgctggagtgaagaaaacctgccgtcataaccaatattttggcgtcactgcaacgaaaccttttattcaacgcaatgaaggcgggattatctggcatacccagggcagtggtaaaagtctgactatggtttggctagcaaaatggatcagagaaaatattaccgacagccgagttttgatcattaccgaccgtacagaacttgatgaacagatcgagaaagtgtttaacggtgtggaagaagagatccttcgcaccagaagcggcgcagatctggtgactcgtctgaatcaaaccaaaccctggcttatatgctcgctcgtacataaatttggtcgccaagaggaggaagacaaagatgcagacactgacgatttcattgaacagataaaacgtaacatccctgccgattttaatccgaagggaaaattattcgtgtttgtggatgagtgccaccgaacccaatccggcaaattgcattcagcaatgaaaagcattctgccagatgcgcaatttatcggtttcaccggcaccccactgatgaagaaggataagaaaaagtcagtggaggtcttcggtccttatatccacacttataaatttgatgaagcagtcaatgatggggttgtactggacttgcgctacgaagctcgtgacatcgatcagcgggtcaaatcgcagaaaaaagtcgaccagtggtttgatgctaagacatctaaactttctcgccttggccagcagcaactcaagcagaaatgggcatcaatgcagaagctattgtcgagccgctcgcgactagaacagattgtcgcggacatccttctcgatttcgaacaaaaaccacgactcgccgacggccgtggtaacgccatgctggtttgttccagcgtctatcaggcctgtaaatgctatgagatgtttagtgaagctggttttgccggtaaatgtgcgattgtgacgagctaccagccaaatgccagtgagattaaaggcgaggagagcggcgaaggactgactgagaaactggccaagtacaacatctatcgcaaaatgcttgcggagtattttgaacagcctgaggctgaagcagccaaacgtgtgagtgatttcgaaaaagaggtcaaacaacgattcatcaaagaaccgggccagatgcgccttctgatagtcgttgataagttattgactggctttgatgctccgtcagccacttacctatatatcgacaagaaaatggccgatcacaacctcttccaggcgatatgtcgcgttaaccggttggatggtgaagataaagaatacggctatattgtcgactataaagaccttttccgctcattggaaaaaacagttcaggactacactgcagaagccttcgacggctacgacaaagaagatgtagccggtttactgaaggatcgattgcaacaggcaaaaatcgatctggatggtgctctggatgccgttcgcaccctttgcgagccagttaaaatgccacgtaatcaacttgattatcagcattatttctgtggagaatcaggggcgtcaatagagcagatatctgagaaagaagctttacgtctaacattgtaccaatccgtggcgaagcttattcgcgcttttaccaatctggcaggtgaactaacagatgctggttatagcgagcagcaggcagctcaaatccgcatcgatgttgagttttacacaaaagtccgcgatgaaatcaaaatagccagtggcgatttcgtggacatgaagcaattcgagccagggatgcggcagatgctggatctttgggtggatgccgatcctagtgaaacccttatggattttgaggaactaggactgcttgagttgattattgaacgcggagaagaagcactggatggacttccagccgacatgcgtggcaaccaggaggccatggctgaagcgattgaaaataacgttcgcagaactattgttgatgaaaaccccgtcaacccgaaatactacgaaaaaatgtcggtattgcttgatgaactgatcgcacttcgtcgtcaacaggctatctcctatcaggagtatctggagcacgtacgtgaactggcgaagcaggttaaacatccgcagtcaggtagtaaaagtacttatccagcaagtattgataccctcgccaagaaagcgttgtttgacaacctcgggcaggatgaagtcttggtgacaaagatagatactgcagtccgtcacaccaaaaaggccgactggtatggggatcgttttaaagaacgcgagattagtttcgctatcgcggaagagatcaaaggttattcagtgacggtcgccgatgtaatggccctggtgaaggctcagaaggagtaccgctga

SEQ ID NO: 283604 - DNA, 2031 bp, Morganella morganii
atgagtgatgcaaaggtaacatcctttacggtcagatcattactgggcgatgcatctcgttatcttatccccatgtaccagcgtaactatgcctggggagagggtgaaatcactcaacttgtacaggacatactcgactaccagcaaaaaagcctgcataacctataccctcaaacttactacatcggtacgttggtcgtgttcactcgtcctgatgggcacgcagagataatcgacggacaacagcgtttcactaccctatcccttctggctaactggttaaaaaaacaagcagggtccaccttggatatgggctggtaccaagggattaacttagggtttgagagcaggcccaagtctggcgaaacatttgaacgactctggcaaggtgtggaaccgcataaactgcggagcaaggaatttaacgaagggctgatcaatggctatgaacttattggtaaggtactacgcgacttgaaactggttggcgagtcattaaatcatttctgtacctacctgttcgaccatgtacaaattgcccgaatagaagtgcctgccgataccgacctcaatcatttttttgaggtgatgaacaaccgaggtgagcaactcgaaaagcatgaggttgtgaaagcacgactaatggcggtactcaacgagataacggaccagcaagatcgacagagcagcctgaacaccctctcacgagtttgggatgcttgctccaacatggaacgttatgtccagtacggttttacaccagccgaacgtcatcaattatttgggctggaaaattgggggcgatttgtgcctgctgattttaattctctagctggcatgcttatcccatcggcttcggcgcttggtacaagagagaaccaaacaaaccgcacactggctgacattatcaagtcatcttcaaccataagtggtgatagaggtgacgaagatgaaggtagctcagagcgttttaatagtgttatcaacttctccaacttcctgcttcatgttttgcgtgtctgcagcaacataggcaagaacagagtagatgttccgcttgacgacaaacaattaatcgaacagttcgagcttcggctgttaaagcagaatgacccagttaaagcagtacaggattttgtctttgcacttctcaaatgcaaatatctttttgatcagttcgtgataaaacgagagttcgccaaaggtagcgatagctggagtttgaaacgcctgcgttggtattcggaaaagagcaccagctataccaatacgtttaatgaagatgagggtaacagtaccagcatcaaccgacagattttgatgctgctttccgcattccacgtttcaacccctactctggtttataaacactggttgaatggagctttatactatctgtttaatgcccattccgctgaaaaccagatagatgcaaggaagtacctcgggtatctggagcatctcgcctcctcgtttgtctttcaaaacttcctggcagaacaagaaccaaaatcatattttgagattatctacggtaaagagctacatctccaacctgtggtactgtcggacaagattaataagaagatgcgctttgggatgatagcaaacaacctggtattcaattacctggactacttactctggtgccgtgacagacataaagctgaagtagtcaaacgtttcgaatttaccttccgaagctcggtagagcatttctatccccagcaccccatggatggctataggacattaccagatacatcgttgcataccttcggcaacctcagtctgattagccacaacaagaattcgcgattgagtaatttccagccaaaacaaaagcaagagcacttcgaagcgagtctggaacggaatgaaattgatagtctgaaactgctcgccatgatcgagctgatgaagaagaacaatcagtggggggaagaagaaatcgccactcacgaagcggaaatgctggcagtgttaaccagtgctggtggtagtgatagcgtattaagggaggtgttatga

SEQ ID NO: 283605 - DNA, 1434 bp, Morganella morganii
atgacacatgcccttgataagacagttctgtcggtcaagagtctattgagcctgactgacgtaaccattccggcctatcagcgtccttataaatggacggtcaaaaatatcagcgaactgtttgccgatattgatagccatcttgataaatcggcttatcggttgggctcagtggtgtttcatcacaccgaaagtgatgaaaaaaacaagctcgatatcgtcgatggccagcaacgaacgttgacattaatgctggccgtatgggccattatcgaaacccgacttgctggattggaacgcagagatttgcgggaaacgctagtccagataatgcccactgttaaaggctttatggagcgacagcgctttgctagccaggtctcggaacacaatctgcaccagaattatcaagagctaaaacgccgggtttgccaccgagaatttagcgagcagcatatcgattttcttctcaatcgctgccaagttgtggcctttgtactaactgacttgtctgaagcctttcagtttttcgactcacaaaatgcccgtggacgggatctggatcctcacgatctgcttaaagccttccatctacgtgaattcgccagccatgaggcagagctaaaagctgaatccgttgcccattgggaaggattgcccagcgatgacctggctaatcttttcgcatcctatctctacagagtacgtcagtggtcacaggggaattcagctcgcttctttggtaaggatgaggttggcttattcaaagggatcaaccttgaccagattggtcagttcccttatgtggaatctttgcgtatggctcaccattttgttgatgactataacaatcaataccagcgcaagattgacggccagaaaatgcgtttccctttccatctcgatcagatgattatcaatggaagacgctttttcgaaatggcagaacactaccagcaacaggtatcggcaattatcgccagtgaacatgccagcactcatagtcaaaagccgttaatgattcagggcgtaatccttggtgaaatggcaactcagatactaagaacgttaaatagctatcgcaatcgctatcgaacaggggatcaatatatacgcactatgtttgattgtgctctgatcttttatatcgacaaatttggcgggcagtccttatctgcagcgattgaaaaaagctttatctgggcctatagatgccgaatccgacagcaggtggtacagctagcgactatggataagtacgtgctggaaaataatctgttccgggtaatcaaagaagccagagtacctggtgatgtgctatctataccattacccacaattcgggcttcagaaaataataataaccgccgtaccggtaactatgagcaagatgagctggtgaggctgttcaaggagatgaactactatgagtga

SEQ ID NO: 283606 - DNA, 1305 bp, Morganella morganii
atgatcaataacccagaaaaaatgcaaagtaaagaatcgattgcttcaccgcaacagtctgttacgacaagctttagactaactgaattaggactcattccagaggattgggatgttgtttcaattcatgaaattgctgacatccgagttggtaaagacgtcaatgagaagagaatgtcgacagaatttgacaataaattctgttatccagtattttcgaatactgtagatgagccaggtatatatggatattacgattatgccgaatatttaatggatgctgtcaccgtcgttgggcgcggtgtagggcttggtaccgcaatttgtaggtctggagggttcggcgcaattggccgtttgatcgtcttattccctaaagggaatatcatatttctgtccaattatattaatcatgcagttgatgtattcaatgaaagtagcggtgttccacaattaactggagtagctcttggtaattgcaaaattgcatggccatcattaaaagagcaaatagccatcgctggtgtgctttccgatacagatgcgctgattacagaacttgagaagttaatcgccaaaaaacaggccattaaaaccgccaccatgcagcagctgctgactggtcgtacccgcttgccacaattcgctaaacacccggatggggtactcaagggtaataaacctagtgagctagggctcattcctgaagattggatatgcgtaaaattgggagaaataggtcaatgtatcattggccttacatatagccctcgagatgtttccgatacaggtacattagtattgcgttcatcaaacgttcagaataacaagctagcatatcaagataacgtttttgtaaatatggacttacccgagagagtcatcgtaaggaaaggcgatattttaatttgcgtcagaaatgggagccgcaaactaatcggaaaatgtgctttaatcgatcacgcggctgaaggatgcgcttttggtgcctttatggctatatatagaacaaaagctcatgattttattttctaccaatttcaatctaatttaattcacaaccaaatagatgaaaccatgggggcgactattaaccagataacaaataaagacctatctggttttataatatcaatgccatcctgcgatcaagaacaaactgctatcgccaccatcctcttagatatggatgctgaactcgaggcattagagcaaaaactcgccaagattcgcgatataaaacagggcatgatgcaacagctgctgaccgggcgtattcgtttaccattggatcgccaaccatga

SEQ ID NO: 283607 - DNA, 2457 bp, Morganella morganii
atggctatcaagaagaacgaactttactcctccctttgggcgagctgcgacgagttacgtggcggaatggatgcttcacagtacaaagactatgtgttgaccctactgtttatgaagtacgtctctgacaaagctaagggcaacccttacgcgatgattgaagtgccggaaggtgcaagtttcgacgatatggttgctctcaagggcaacaaagaaattggcgaaaaaattaataaaaccatcagattactggctgaagctaatgacctaaaaggtgttatcgacattgccgacttcaatgatgaagacaagctgggtaaaggcaaggaaatgatcgaccgtctttccaagctggtggcaatcttcgaagggttggatctctcagccaaccgcgttgatggagacgatctgctgggcgatgcctacgaatatttaatgcgtcactttgctacagaatcaggtaaatccaaggggcagttttacaccccagcagaggtgtcacgcattttggcgaaagtgattggcatcagtaaacagacaccacaagatgctaccgtttatgaccctacctgtggttcaggctcactgctgttgaaagccagtgacgaagccggtccgaaagggctgaccatttatggccaagagatggattatgcgaccagcgcactggcacgcatgaacatgatcctgcatgacaacgccaccgctaaaatctggaaaggtaacaccttagccgatccacactggaaggatggcaacgataaccttaaaaccttcgactttgctgtagctaacccccctttctccaacaaaaactggaccagcgggctggatgctgcgaacgatacttttgaccgttttgtctgggggaccccacccgaaaagaacggcgactatgctttcctgctgcacatcatcaagagtctcaagagcacaggtaagggcgcagtgatcctgcctcacggcgttctgttccgtggcaatgctgaagcacgtattcgtgaaaatctactcaagcagggctacatcaaaggcatcattggcctgcccgctaacttgttctacggcacgggtatcccagcatgcatcattgtcatcgataaagaagatgcccagctccgagcgttcaacgctaatggcgagagtcagcaaggcatctttatgatcgatgccagtaagggctttattaaagacggcaataaaaatcgcctgcgcgcccaggacatccataaaattgtcgatgcgtttaatcgcgagcaggaaatcccccgcttcagtcgcatggtcccgctgtcagaaattgcggccaacgacttcaacctcaatatccctcgctatatcgacagcagcgatccggaagatctgcacgacctttcaggccatttggctggtggcattcccgatcgcgatattgacgctctcagtgcttactggaaaattttcccaactttacgccaggatctattcgaacctgcccggcctggttatagcaatgcccgggtcgaagcaagtgaagttaagagcactatccaggcacacccggaatttgctgcttttaaaactggtgcactgataccctttgaaaaatggtttgctggttgtcagcttgacgaaattgctcgcggtgactcacctaaacagctaattgaagaaattggcgagcggcttcttgctgcttatgattcacaaactaccgctgatgtgcctctgctagagaactacgccatctatcagttactgatggactactggatggatgtcatgcaggacgatgtttatgttctgagtcaggatggctggctggcgggcaaagtgcttcgcgagcttattgtcgaaaaaggcgaaaaactaaaagaaatgccggatctagtgataggtaagaaaaagtataaggctgaactgttgccaccagcccttttagtggctcgctatttagcttctgagcagcagatgcttgatcaacttcaagtcgcttatgatgacgctgcgcaagcacttgaaagcttccttgaagaaaacatcggtgatgatgggctactttctgatgcaatgaatgacaaagagaaagtaactgctgccagcattaaagcacgattcaaagtggccacggataaagacgaaaaagtagtactgaaaactgctcaggcgttgtttgatgctgaaaccaaagccaaaaaagcgcataaagaagcgcaggaaaagcttgatcttgcagtgtttgcttattactcaaaactcactgaaaacgacataaaaattcttctggtgcaggataaatggaaagcaagcctgacaggtgctctggaagcggagattgagcgagtaactcagaggctggcaaatcgtgtaaaaaatctggaggaacgttataactctacactacctattctcacccaaagtgtggctgagttggaagcgaaagtcgcggctcatctgaaggcgatggggctggagtag

SEQ ID NO: 283608 - DNA, 297 bp, Morganella morganii; identical to SEQ ID NO: 279968

SEQ ID NO: 283609 - DNA, 378 bp, Morganella morganii
atgtttgaaacatatgaagaactaattgaactcctaccggaaagaaaggagtgttacgatatcaataaattaaaattgctcacaaaagatgaactgcgagattttattaagcaacatactggtattaagtctgatattgagcgggtaagaaggacaaaaaaaaatcatttttatccgaatagtggattaatcaaactatccacaatacatagttttaaaggtctggagtctaaaaccgtgttttatattatggatgacaaggatactcctgagattatctatacatcgatcacgcgatctattgagaatcttattatcctagataaaagtagtgaagggaaatataaaaattttttcagtgaaatcaatgcggattga

SEQ ID NO: 283610 - DNA, 351 bp, Morganella morganii
atgaattattacaaagatgaaaaaaatggcgtatggggatatgacgatgatcaggtatcgggcggctttgttcgcgaaggcttggtgaaaatatcagaaaaggaagcggataaattattagcgccgcctgcgccaactaaagagcaattaatcgaacaggctgaggctaaaaagcagagactgatggctgaggcgaccactgtcatcgcaccgctggaggatgcagtggactttggtatagcaaccccggaagaagcagcagccctgaaagagtggaagagataccgcattctgctgagtcgtattgatacatcaaccgcacctgacattgattggccggttaagccttaa

SEQ ID NO: 283611 - DNA, 753 bp, Morganella morganii
atgttcggactaccggaaatccccaactggaagggtattccagacgctgcgttagatgccggaatcagcttcggcggcgcgacactcatcaacaaactgttcggtaactattgggggatattcaatcagtacggagtgccgctgctgctggccgataacgtcctgtcattgcaataccagaacacaagccgtgttgtaagtgctccgattgagaaaggaacattcgccagctacaacaaagtcgctgacccgttcaaagccactgtgcaactgagcaagggcagcggcggcgcgctggagcgtggcgcattcctggctcagcttgaaatcctcgcaaaaagcaccctgaagtttatcgtcatcacgccggagtatgtctataagtgggcgaacatcaccggttacgacctggtacgcgaagcccgagacggggcaacgctgattaaggtgaacgtacatctggaggaaatccgcgaagtcaccgttaagtatgacgaggaaaaagtaaaaaatccggatgatgccaagaaaaaagatgccggtgataaaactcagccaaccgtcatgggggctatagagggaaccttgacagatctggataaaatatttagcgacccgaataagtcgataattaaaaaaggatttgatggtgggctagctatttataatggggttgaaaaagcatttgtagcggctggtaatatcggagaagaaacaaaatttatggttaatcaaatgatagggggatattaa

SEQ ID NO: 283612 - DNA, 537 bp, Morganella morganii
atggccagcagtaacaatctcttgacgagcggattaaggcgctggggacacaatgacaacacttctggtgggggaggcgacatggaatcacgagtagctagattagaatctgatgtctctcacatcagagctgacattgcagacacaaaatctgatatcagagtgttatcctcagatagctctgaccttaaagcaaacatgttggtattgatacaaaaaatagatggtctttctggtgttgtagcggatataaaaagaacagtagaaaatttaccgtcatcagacgtaataaacggtaaatttgatttagttgataataaactaacagagatggcagacaaaatctctaagcgcccatctgaagacaaattaaatacaaaattcactgatcttaatggcaagatagatctgcttgctgagaagactgaaggcaagttaaaagatgtcagacttcatattattttatggattctcggcctgccgtcagtgatatttggggtgtacaaactgtaccaagtacttgctgcaaccgcataa

SEQ ID NO: 283613 - DNA, 498 bp, Morganella morganii
atgagttttagtgaaaaggttgcggtcgtttacccagttggggttgatgttgatttcagtgattacaaagatgaaattgacccaccgccgagcgacgtctcttatttatttgattacttccctgtaacgatagacgttaaatttattgttggtgtacacctggtaatgaaggaaggggtctcctaccacatcaaggcgtgggtaaaggacgctaatggcaacagagtaaaagccatagatggcatagaagaaagcatcagcggagaaaggtactttaatatttgtatattaaaggaaaagattagctacctgatgaactacactatcaaaaacattcattttgaacgccccgggatgtatgaaatttttgtggaaatatacccagggacagtagaggaaaatccagagtcaacaggggctatacattcaaattcagcattcatctatatggataataaccccgaagaagatggagaggaagctgatggccagcagtaa

SEQ ID NO: 283614 - DNA, 504 bp, Morganella morganii
atgaagaaatttattttgcctctgattgccgcatcatctcttgcggcgtgcactatcgttgattacccgcaaaaaaaagaagaagtgaaaaagcttggcatagacgacattaagtattttgtcagaaatggaatataccagtgcgagtatcttgttattgccgggtttgatggtggcagcagcactaccgttgataatgggagagttatgttggttaaaatcggcagagtggatgattatgtcgccacaatgtctgtagcgttacctaacggagctatatattcaagcaaaaatctccaacttagaaaaccagatggtagcggaacgcagtattttgaagacccagattatctaggtaattctgggagacctggaatgacattcaaatacaattacttggataatggcggttttttagttgcaatcgggatggtgttcgttgatgggtttagctcaatgtcaatacagacaaattggtgcaaagaagtagacattaaaaaataa

SEQ ID NO: 283615 - DNA, 2436 bp, Morganella morganii
atggcgacgataattgacgcgctggttgtgacgctgaagcttgataatcgcggattcagcaatgaagtgaaaaaagcgaccgcagagaatgaccggctgtcggcagcaatcgacaatgtcagtgattcgtctgccgacctcactatcaccatcaaaaaccaggctgacgaaaccaaaaaggcagcgaaaaagcaggacgatttcacgaagtccatcaataacggcatcaaagcaattggtgctttattcgcaacaatcatggcatcgtcaggcctgtcaaaactcatctctgagatacagaaaagcaatgaccagctttacttcctgagcaaaaacctcggcatgagtgccactgagattaaaaagtggcagaacatggctgagatgtccggcggctctgcggatggtatggctgccagcatgtccaacctcagcaaatcgctgtgggacttggtcactatcggggattcctcggtactgccgtacttcaatgcgctgaatgtcggcgtggtggactccgggggcaagctacgcgacctcgacgctatactattggatgtggccgacagcctttccggtatgtccagaccgcaggcgtacaacattgcgaaaaacatgggctttgacgagggtacgattaataccctgctgcaaggccgtgacgcaatgcaggagatgctggacacgcagcgaggtctggttatctccagcgaggaagaactggaaatcagccgtcagctaaacaaacaaaatgcgcaggtgcgtcagggctgggaggggctgaaaaccctgctggcaaactacctgatgccgtcattcctgaaattttcagaaaaagtatccggcttcctgatgttcctgaataagaaccgcgataccgctgtgacgctgtttaagggcattggtatagcgatagggttgttccttatcccgatggctctgaaagccgctacggcgttcatggcgatgtttgcgcctctgttcggtggtgttggattaatcctgctgctcggccttgtgttggctggtctctatgatgactacgaaaagtggaagaaaggcggggattccctgttcgattactccgggtgggaagaaaacatagagatggtactgactgctctgaaagacctgaaagagtggttcaaagacacaacaatcggcaagtggttcacagatcaggatggcaaccttgaaacatggaaagtggcgctcggtgctttcgggctgtggtttgccggtaagtgggttgtcgggattaccgctggcttgctgaaaatcggtgctgggtttgctgcaatgttcggctggcccggtctattggttgccggactgataacagcgctcggattatggcaactgaaactgaacgagctggatttatccccgttgatgacggctgcggcagaggcaaagattaaattcgatgatctcaccaagagcatcaatatgtttcgcgatgccaaaaacggaattgataaagttcaggccggtatccgtgccggtagtgagatcatccctggcggcaatatttttaaggcaggcattgataataagattgttgacaaggtaatcgacaaggtaagaaaagacggattcctgaagtcagtgaatgacgctgcggttggggcttattcttacctttcaagcgccaaatctggtgatacttcggggtttactgcgtctggtgttgaggttccaaaccaaaataagcggatctacaaaacagccaatggagatattgttagagagggagggtctagatcttggaggaacaacaatccggggaatattattgccggagactacgctgatagcatgggtgctatcggaaaagacaaaatgtcgaatggtcacatcatggctatttttccaactgaagaaatgggtagagccgccaaggagcaattaatattcaggggggcaagttacaaaaatttgaaactttctgacgccataagccgctacgccccagagttcaacagtaacggtaagcgtattaatgataccccacaatatataaaaaatgtcttagctgcggtgggcggtagcgagaaagtgatgaaggattacaccccttcagagcagaaggccattatcgctgcaatgaaaaatactgaggattggagagccggaaatgaatacacgaccggcaaccccaaaaaactggatagtgaaaaattactaagtcacctcatttcttttaatgagcaaatatctcagcctttaacacctaatgctatgccaggaattcaacagacgatggccaactcccaagccttgcaatctggttctaaatcggtaacgtacaacatcaccgcgccggtggaaaatctcaatgtgaatactacgtcaccgactataagcggaactgttggcgatggcagtaatgcttggagggaaaatctatttcagacgatcacaccaatgagttaa

SEQ ID NO: 283616 - DNA, 573 bp, Morganella morganii
atggctagcggtctggaaaagtatctcaatgatttagaaaaaaggctgaacgcaacgggggtaagggtaggtttttttgaagacgcgacatacacagacggaacctcggtcgcaatggttgcgtatgtaaacgaatacggcgcaatcattaatcaacaggcaaggacggtaacgacctatcgcagcatgaaaaaagatggttcttttgcccgtggcggcaggtttgttaaggctaaaagctcaaattttgcaacgagtcacgatatacctgctcatacagtgaatatcccgcccaggccatttttccgtaatgccattaataagcacaaagaagagtgggttgatgccatatcggaaggcattgcaaacggaggggatgcgaagtcggttcttgaggctgttggcggagtgattcagggtgatgtgcaaacatcaatatcagaacttgcggaaccggagctttcggcagcaacactagcggcaaggaggtctcgtggaaatggaaacacaaatccgctaactgacacaagaactatgattacttcggttaattatgaggtgacagatgattaa

SEQ ID NO: 283617 - DNA, 405 bp, Morganella morganii
atggcaattgtggagctgaaaataaccacgttccgcgccatgttccccgagttttccaatattgcagacgatttgctgccttaccttttcgatcaggccactgattacctcgacaacaccgaaatgtctcttgttgcacaaagcgataagcgtgagcgattgctctatctgcttatggctcatttggcatacatgagatacggagataaagacggtaaaggcggctccggcatggttgggcgggtatcgtctgcaagtgagggaagtgtgtccgtgtcttctgaacttggtcagattgagttcagaaatgcatggtacacgctaagcccttacggaatggactactggcaggccacaaaggtttatcgaatggccacatactatccggggaacatttatggctag

SEQ ID NO: 283618 - DNA, 387 bp, Morganella morganii
atggctaagaaagaagtaacagatagcagtgcgggagataccacggcggcacctgctgtgattaccaagccggaaatttacgttattggctgcaagcttccgaacggcctgactttccggcatgaaggtaaatccatcactctggcaggggctaactcgtccctgctgcttaatggttttggtattacccgcgatgttcccgctgatgcctgggaggattttgagaaggcgttcaaagatcagaagattatccgcaacggcattgtattcgctgtaacggattacgcctctgctgaagatgcctcaaaagagcgctcaggtcagaaaacagggctggagcaggctagcactaaatcagccggagtggagccactcaccgaggattaa

SEQ ID NO: 283619 - DNA, 1026 bp, Morganella morganii
atgggacaattaactcaggctgatttttcagcatttaagaaagaggcagaatcccgtggtttttatctgccgccatctgtcactcgttttgctatggatgctgatgttcagccgtctatgcctgcaaacggcggcattccggcaatcgtctcaaccttcattgaccctgaaattgtccgcactatttttgccaagcaaaaagcaaccgatattttaggtgagaagaaaaaagggtcatgggcgcaggataccatgatgatccagcgcgttgagcaatccggttatgtggtcgcatacgatgactacagcgagcagggggctaaccaggtaaccagcgcatgggaaaaccgccaggtgtaccgctatcagacgatggtcacttatggtgagttggaacaggaacgctatggcctggctatgctgccgtatgtcgcagaaaaacaacgcgcagcagcctggacaatgaaccaggcgcaaaacaagttttatttttacggcgttgaaggtttgctgaactacggcattcttaatgacccggccctgcctgccccaatcactccggccactgttggtggcgcagttcagtggaaagataagcaggttatcgatatttataacgatattcttgctctgtatgccgatttaatcgcccgtactaacggtgcggttggtgacggcgttgatatggcttctcctctcgtgttagcaatgagccctaacacttccgtttggttcaaaaaggcgaatgagattttcggtaactctgtagagaaaatggttaaagatacgtttactaatattcgtatcgaagtcgctccgcagtatgaaacatccgccggtgaactaatccagatgtttgttgagacagcccaaggccaggaggccggttactgtgcatttagcgaaaaactccgcgctcatccggtgatcaccatgacatcaagctggaaacaaaagcattccggtacaacatacggcgcagttatcacccagccgttcttattcgctcagatggtaggggtataa

SEQ ID NO: 283620 - DNA, 489 bp, Morganella morganii
atggcatttcaatcaagtgtacgcacttactccggtgtgggtcaggaggggcagccagcctctaacagccctatcattgcggcggcgggtggcccgggggcttttcaggccggtgataatggcttgtccatgtgccggttcgcatggcgtgatactgccaaccctaaacttttaaataacacaggtacgggcaagccggttggttatatctacaacaatgccaacgcaacgattgattacctgaagagtaacagcctgttaatccctaaaggccgtgaagcctccccgattgttggtggtgacttctgggcgaaatctgcaacggcggctgttgtcgggcagaaggtcttcgcagtactggctgacgggacacttaaaacgggtgacgcaggagcaaccgttgatggtgcagttgaaacagagtggtatgttgcaagcgctgccgctgttggtgatttattcgtaatttctacatggagcaaagcgtaa

SEQ ID NO: 283621 - DNA, 1158 bp, Morganella morganii
atgaaagatgtgaaatttgcctttgataaagcaagtgtcaggacttacgacgatgacgggatgatgcatgttgcattgaccccaatcagcaagtccaacgtttgcatctactacggcaaggaaataccagactccgagtcgctgggtttggagccgaataaagcctatcgcctgctacgcgatcctgaagagctcaggaaagccgtcagtacattcaacaacaagccattgctcaataaacacattggcgtaaccgttattgacccaccaaaggaggcgattgtcggctctacaggtgagcgggctgagttcgatggcacttacctgaaaaactcactggtgatatgggatatagattccattctcggcgtagaaaccgataagcaaaaagaaatctcctcatcttaccgctacaggcttgatatgacgcccggcgaatatgagggtgagacttacgatggtgtcatgcgtgacatcgtttgtaaccatgtggcaattgtgccaagtggtcgggcgggtcccgatgtgtttgtttatgactcaaaacctacaggaaacatcctaatgacactgaaagaaaagctgatggcagtcatcaagccatatttggcaaacgatgaaaagccggacgaagttgaaaagaaagtcgatgaagtcatcaaagacgatgcgacacaggcagaaaaagacaacgaatccgaagctgagcgcttaaggcgcgaagaaaaggaactcaaagagcgggaagagcgcgaacggaaagatcgtgaacgtgaccgcaaggcagatgacagcgacgatgacaaagacggtaagtctaaaaataccgctgacgatgaagatgacgacaaaaaagccaaagataacaaaatggctatggatgccgctatcagcgctgtcgaacgtcgctttatggatcttcgtcaggctgagcgggatgttcgtccggtggtaggcgagcttgcctgtgatagcgcggaagaggtgtatcgtaccgcactgaagcaaatgggatgtgaagaccacgccaccctgccgagcggggctcttcgttcagtatttaacacgctggcaaaagcgccagttatggcgcaggactccgcacctattgcggcatcttcccgcgacgctgttcgtaatttctttgagggcaaataa

SEQ ID NO: 283622 - DNA, 807 bp, Morganella morganii
atgagccggaagacaacgagacttaagccggttaattacaatgctggcaacattaagtggtatcagaaacaactgctcgccgaaatcagagaaatgaatgatgaggttaaacgcgaaatagtcaacgctattcgcgacaatcctctcgctcaggatgataatttggctatggatgcaaacccagtttccgttattaaatggcttctggatgctctggcaagaaagtgggtggaccggttcattaacaaggctcttcctgtttctgatgaactgatgaataaaacgcaaagtgcggttgacagggggctattggcagctgcacggcgtgaatccatgaccatcaacatgcaatggactgatgccatgcttgaaaagcgtgaggccatcattgcggagaacgtctctcttatccgctccatccccgagaagtatttcaccgaggtggagggcatggtatatcgcgctgttgcccgtggtggtgacagaaaaatgcttgctgatgaaatagagcgcaatttcggtaaacgtcacggaattacacgacgcagagctgaatttatcgcccgtgaccagactcgcaaggcaacaagtgcactatcggcggcaaggcaacaggctgctggtatcgttgaggctgaatgggtgcatagcggaggaggaaataagcctcgtcacagtcacgttaaggcaggaagggagagaaagcggttcaggctgtctgaggggtgcctgattgatggcgaatatattatgcccggtcaattaccaaattgcgggtgcgtgtggcgccccgtgttgccgttctaa

SEQ ID NO: 283623 - DNA, 1410 bp, Morganella morganii
atgagcaagagtaaaaaaacacaacagcctgtcggaaaaccaccgttcaggattagtgaggttgatttagaaaaggcatccgtgtcgggtgaagaaaagaaattcgccgaatttaagcgatacgagcctttgccgggcgtgataccggaagcaaaaaaagctgccgcgctcgcaatggatgccacgccatatgatctgctaaataacatgtcgattggcgatgagtattccggctttcgcggctacccgcagcttgcggcgatgtctcagcaggtagagtactcaaacatgcacagtgtatttgctgatgagatgacccgtaactggattgaggttaaaagcaggaaagagggtgaccctgaaattgaaacaatggaacaggcgctgattaaatacgatgtgaagcgcctgattcacgaagcggtcagacaggattcacaatacggtgtggctcatatctacattgataccggagctaaaaacgacgatgaattggagaagccgttatttctcgacccccgaaaaataccgaagggggcactgaaaggcctgcgtgtcgtcgaccccacctggatttatccggcaatgtacaacacgcagtggcctctggctgataacttctataaaccgagcgcatggttcgtaatgggaaaaacggttcatgaatctcgatttaatgacattgtgagccgccctgttcctgatatcctcaagccgtcctataactttggcggattatctctgactcagttaatggaggactacgttgtagattggcgcgatgccaagaagaacgtaattaagatactccgcacgctgagaatgagagcgcttaaaacggatatggattctcgccttcaggttccaggagagttcgataaacgaattaagatgtttacgaaatatcaggataacttcgggctctgggcgatagatatgcaggaagacctgcttcatatgcaaacctcgctcagtgagctttctaatttgttgtcaaactaccaagaccagctttgcattccttcccggattaccaaccttaagctcctgggtaacgctcccgccgggctgaatgcctctggtgagtctgagctatcaacatggcatgaaacagtgtcagggtaccaggatggcaacctaagacgccctctggagaatatcttcaagattattcagctctcagaattcggggagatcaaagaagatatttactttgagtttaagcctctcgatgagattagcgaaaaagaacgcgccgaaatcactaaaattcgcgttgatgcggtggcagtggctgctgatagtcaattggttagttcggaagaagccagggacgcgctgaaaggcatagagggggctggtttcgaaaacctggatggtgattatgagccggaagacaacgagacttaa

SEQ ID NO: 283624 - DNA, 486 bp, Morganella morganii
atgagcaacaaaacagaatttgcacgaatagtcccgtcgtggattcaggaaaaggcggttgatttggttatcagtgctgcacaggaagatgttgagacaatcttgtgcgaaggcgatgcgggtgctgcaaataaggcataccgggtagcctccttcagagggcgggtaatgaatatggcaataaccgctctgtttgctgatgcgcagaacgaaaccaccacagaacaatcatcgcctaatcccaatgcgccgaaaggtcacgccggtagtgatatcggtgacttgggcgatacgtctctccgtcgttgtgggtgccataaattttccgcacctaattacgcgttcaggtcaatccctcaacttcgtcagcttcagaaagacctgatagaagagtacatgaataaccgtgacatagagtggttttcggagcaatcgaggctgattgatgccgctacacagatagcctactcgaaaggacgatattaa

SEQ ID NO: 283625 - DNA, 144 bp, Morganella morganii
atgatttatatcgcaattctggctgctttcgttgttggcttcttcgctggttcattcgtaatgagagcatacatagccgaaacaaagaaatttgagcgattgttggatgaaatcgcagaacgaaacggtatcacgcctcgctaa

SEQ ID NO: 283626 - DNA, 483 bp, Morganella morganii
atgactgagccaaaatggattactgaagcccggaaagaaatcggcgtatcagaacacacagcagcaggttccgcagctgtagaccagatgtggattgacagcaaactgcgtggactggttggcactgcgcgtaaagtgccgtggtgtgcaggatttgttaatgcctgcctggaacgttccggaatccgctcgacccgttctgattcttcccgttcatatctggcgttcggaaaaatgctgacacagcctgcatacggttgcattgtcacattctcccgtaccggtggtggtcatgtcgggtttgtggtcggtaagacagaatcaggtcagctgatggtgctgggtggtaatcagtccgacgcggtgaatatcaaagcattcggcactgaccgtgttacaggttatcgctggccgtcaggtgtaccgttggataatcgcccgctgccggtaggtgacgctgcgctgtcagtaaaagagtcatga

SEQ ID NO: 283627 - DNA, 771 bp, Morganella morganii
atgtttaaagaacttatagagcagagcctaaacgaggcaaaagccgccagagctgcgctgaacaaggttaacggcgtagttgtcggaaagatgcataatcctgatcaggggttgtatctcgctaactatgcaaatttgctaatgaacaggcagatagatatctttgatgatgcgcttctcctcctcgaaaacgaacgataccaaaccgcttgtgtcgttagccgggggatgattgaaacacatgctttctcacgactcttaaacaagaaagtggagaagatcctgacgaaccaaagcggccgcgaaagtgtagataaagctctcgatgtcatcctgggctttacgaacagttcccgatttaaaaagtcagagcaagaaaagattcagaaaggagtatttgaccctaacgactacatgtttactgaagagactaagcatcgttttgaaaacctacttgctgtcagtcagcatgtgatgaatgctttacgcgatctctatgaagatgagatgaaacagactaatgggagagaaagcgattttgaactgacgtatgacatacttagcgaatatgttcatccttcacaaacgagcatctaccaatactacacacctgaaacccacttagttcctacttcagttggtaatatccatgcttatgagtctgctcagatacagtgcgcgagagcgctacacttcatattagatgcgaagaatcaacattattggtcttcacagttagcagatgagatgactaaacgtggtaaacagtaa

SEQ ID NO: 283628 - DNA, 603 bp, Morganella morganii
atgaacacgtcaccgtggaacaaagaccgtatcataggccaaaaaagaccacttcagatatctcatatctggggtatccgaatccgacttgaactggaaggtaaaacgcgcgatttagctctgttcaacatggccctggacagtaagcttcgaggctgtgatctggtcaaactcaaagtatctgatgttggatatggtagctctgtttcaagcagagctacggttctacaacagaaaaccggcagccctgtccaatttgagataaccaaagggacaagagaagctgtttctgcattgataaagcttggcaatttacgcagtaaagactatttgttccgatctcgggtcggtactaaccaacacatatcaactcggcaatacaaccgaatttttcatgggtgggtagcaaaacttggtctcgaagattcgctttacagtacacattccttgagaagaacaaaaccttacctgatttacaagaaaactaagaatctcagggtgatccaacttctgttaggccataagaaactggaaagcacagtccgttatctgggcattgaagtcgatgatacgttagagatctctgaatcgattgaagtctaa

SEQ ID NO: 283629 - DNA, 1101 bp, Morganella morganii
atgttcgatgttgacgatactgtacccgatactcccgacccccgtgaactcagtcaggatgtgcaggcgctgatcaacaatggtctggattttctggataaagcccgtgaagagttggaggcctcgaagccgaagttctccgtcgtcagtttctggactgcggtcgagattttactgaaagttccgctggcgcacgaacactggtcgttggtctgcagcccgaaaaagccaataaaaaagcaggcttacctagccggtgattttcagtcggtgacctacgaagaaacccgtgaaaggcttaaggacgtacttgaaagacccctagacagagaaacggacagtgcttttgataaggtcagaaagcaccgcaaccgcgtagttcatttctaccaccccactttcaccgaggctgaacaacgtcaaatactcaaagaacaagctgacgcctggtttgccctgaaccggttattaagggatgaatggaaagttatcttcggtgtcaaacataattggaagctggctttcggtgaaactcgcctgattaggggaaacgaattttatgccgaggtgcggtttaaacaggttaagcctgaactcgagcagctctctgaaaagaatattcaaatcggtaactgcaatgagtgccatcagcatgcgacggtaacagggactgaaacgaccggtaatgaaaaccgtaagcttgaagttacgcggtgtaaggtttgcaccagtgctgtaaggcaaattaccctggtttgtccagactgcgaaatacctcaattgctacctgagggagatggtgattttgaatgcgaacactgcgactacacttcggataggtataaactgctggatgaggagttgttccacagtgtggatgaacagctactctccgtatttcctgctggatgtaccaattgcatgactcctgaaagcgtatgtaaatttggagacggctatctttgcactcagtgtttcatctattacaccgagcttcatgtatgtggttgttgcggtcacctgagcgatagcgttcctgaactgagccatatccgaggatgtgaattttgtgatggtgaccaacgttattttgatgactga

SEQ ID NO: 283630 - DNA, 1521 bp, Morganella morganii
atgaacatacaaattagccttacaaaaaaaataactggatctgccgttgctttaatatttttactatcatcatgtttttttatgctgaatacttcaggagtagaccattcattacggagtgtttttcttctgtctctattaatcataatattaaactgttcaacaaaagcattttggtatttagcatttccaatggttttattttataccctatatgctccttttggtttaaaatttggccgtccaaactttgattatatcgcctctatttatgcaactaatataactgaagcaaaagagttattttttagtatcccaaccataaattacctctacccattattaatcatggttccttttttattatttagatatacatccataaaattaaatataaaactccacagaaacaaaacatttctgtgtatttctgtcataatagtaatgcttgatcaaatcccatcaagaatatttaaagatttagtagggtcatgtttacacgtcaaagatgaaatatcaaaattaaaaaagctgacaccaattaactcctggggagaaacaacaagtaataattcaaaatataataactatattcttgttataggcgaaagcgcccgaaaggattaccatggcgcttatggctacccagtgaacaacactccttttatgagtaatagcaatggtatcttggttgatgggctgttagctggtggagaaaaaactatatcatcattaagaataatgctgaccctgcctgataaaaataaatgggagccttcatataatttaaatttgatcgatttgataaattcatctgggatggagacatactgggtttcaaaccaaggctatttgggatattttgataccccaatatcggctattgcagaaaaaagcaaacatacatttttcttaaaaagtggtgagttttattcaaagaacactagtgactttttgttactaaataatataaaaaaaataataagcgataaaaataagaatagattcatagttattcatttgtatggctctcacacaaatcactgcgatagagtctccgattacagaatgattgttaatacagaaaaatacaaatacataaattgctatatatcttcaatcagaaaaactgatgacttcctggaacaactcaataagataatgaatgaaaataaagagtcatactcaatgatttatttttctgaccatggcctaactcatgaaggaacgggtgactccatttacctaaataatggaaataaaataagcacattacattatgaaattccgttatataaaataaattctgactcaaactctaaaaaatcttgcaagtcatttaaatcagcactgaatttcacaaatggaattgccaattgggttggtattaaaaataaaaaactatctgagagctatgacctctttgattgcaaggatgattatttagacttcccaatttataaaaaaaagctggatactcttatagataaaaaagaagacagcccagttaacattaactaa

SEQ ID NO: 283631 - DNA, 528 bp, Morganella morganii
atgaaaagggtaatctctgtattactcaacggctgggtatgggcggtagtattcttcggattgtggatgttcagcctgttatcggctgaaaaatcagaagggcagcacaaagacaatgtgatcaccgaaaagcaaaaggtgattgataacgcccacaccagcatcgatattttcgatcgcgtggcaaccgcaaacgctaaccggaatgttcaggcggaagccaaatcacaggagaaacagattgaataccgcacaatcatccggaaagaggctacctgcaatttgtatattcctcagtctgtttctgacgggttgctcagccacgtctacgccatccgtgaatcagcaatgcgttccgctcccagcatcactgacacaaccggtactggcaccactgccacccgccgactgacatattgccaggcggttgaatggatagaaccgctgctgacggcgttggataaggcgaacgggcagttgatggatatccggaaagtagatgcagagcgaagaggtaagtctcgataa

SEQ ID NO: 283632 - DNA, 159 bp, Morganella morganii
atgtcacggaaccctttaacgctgatcatcattgctatcatcctgctgactactgctctgttggcgggctgttatctgtattcactcccgaatcactgtaagcctctgccgggtaacccgctggatggtgttgttcgttatgagtgtgaagcgccatga

SEQ ID NO: 283633 - DNA, 678 bp, Morganella morganii
atgattgagcacgatttgcagtacctgcgggatatggcgactatcgcaatgactgaccacagcagcagaaccaaaggccagcttgaagcatttgagggatttgtattgggaaacacaacgcgctacccacgtaaaaagccccgtgatattaccgttaacggcagaaaggtaagccgggaaaccgaggcggtatcctgctggtcaacacactattcggtgttaccaatgccgcccattgaccgggtggactatcagaactgctcctggcggcgggcaattatggaactggacgaggcagagcagtcctggctgctgtattgctatggtaaggaactgaagttctcacaccagaccaccatcaccgcctatgtatggagcgaaatgcaggaacggattaaaggccgccgggtgtcaaagaaagtaaaagaacgactcagggcgttggtatggttggccgtacaggactataccctgaacaaagacgggtattactatcagtctgaactggctgagctggtgggagtaactgcaaaaaactggaataataactacaaaaatcactggcaggagctgcttctgatttgtaaaacattggactgtggctcattacaaaaaatgagaaataacagagtggaaatatggcgcaaaaatacagcaaaaacttgcaaaagtagataa

SEQ ID NO: 283634 - DNA, 714 bp, Morganella morganii
atgcagcagattacccacggtgtcagtatttcgcctgtgatgcacaatcgggcggtaacgatgtcgagccgtgagattgccggtttaaccgggagtctccatgcaaatgttaagcggtcggcagagcggctggtcgtcgccggtattttaacctatccgttggatgagttcccctttgagcataacggtaatacctataccgagtaccgtttcaataaacgtgattctctggtgctggtggccagactttccccggagttcaccgcaaagattgtcgatcggtggcaggagctggaagaggagcttcagcctaaaattccgcagtcctacaccgaggctttacgcctggcggcagatctgaatgaacaacttgaagaaaaatcccgcgctctggaactggccgccccgaaagcggagtttgtcgatcggtatgtcgataccaccggctcaatgacattccggcaggtgtgcaaattgctgaagataaaagagccagaattccgcctgttcctccaggaaaacaaaatcatgtatcgcctgaatggttcatgggctgcataccagtgtcacattgatgccggccgttttgagatcaaaaccggtaccagccagacgaacaaccattcgttcgcacaggcgcggttcacaccgaagggcgtgaagtggattgccgggctgtggggtacatcccaggttgaaggggtaattgcctga

SEQ ID NO: 283635 - DNA, 351 bp, Morganella morganii
atgaactattacaaagataaagataacgttgtatggggctatgacgacgatcaggtggcgggtggttttgttcgtgaagggctggtgaaaataacagaaaaggaggcagataaattactaaccccgccgccaccgacaaaagagcagcttgtcaaacacgctgagtccaaaaagcagcgactgatggctgaggcaaccgctgtcattgcgccactggaggatgctgtagatttcggtatagcgaccccggaagaagaagcagccctgaaagaatggaagaaatatcgcattctgctcagtcgtgttgatacctcacttgcgccggatatcgactggccggttaagccttaa

SEQ ID NO: 283636 - DNA, 444 bp, Morganella morganii
gtggaaaacttctgcctgcatgaatccaacaaaaaactgttttacgagcaactgaaatcactactgagcatccacccgaagttaagtatcaccgcaaaaccctaccgaccgaaacgaagcctttcacaaaatgcactcagccatgtctggtacaaagaaatcagcgattacctgattcgtgccggtcgtccgttttgcactgaagcatgggtaaaggaaagcctgaaggcgacatatctcggatttgaaaccactgagtacaccgatgttatcaccggcgagaaaacgcagcgtgagacgctcaggcgcacttcaaaacttgataaaggggacatgcattactttcttcagcaaatcgaatcatgggcttcacagttcggtttaatactgactacgcctgaggattcggaatatatgaaactcaaaatggagcaggacgcatga

SEQ ID NO: 283637 - DNA, 201 bp, Morganella morganii
atgaaatggattaagtgctcggaaagaatgcctaagcacagacagcgagtgattatagcctctgaatccggcgttacatcgggatattacgatgatggtcgttatctgaaaaagcaggtcggtaaatggtattccgaaaatcggatactcggtgaagacgtaacccactgggcaccgatgccacaaccaccggaggagtga

SEQ ID NO: 283638 - DNA, 159 bp, Morganella morganii
atgaaagtatggattgtttcagttcgcggattagaaggtgaatttgagccggtggccgcattcagcaatgagaaaaaagccagagattttattgctgaaaaacagtatcggtcgtgggctctggatgatttaacggtcgatgaaccggaggatttttga

SEQ ID NO: 283639 - DNA, 696 bp, Morganella morganii
atgaaatcactcaccacagccattcagcagcgtgatgccggcgcattgcggtcaatggcaggggctgcaccaaaacagcaacagaaagttccacaggaagccattcaggtattcaacgagctgttccggcagctgaaagcaacattcccggccgcaatggcaaacttccagacacaggatgacctgaacgaatttcgccgtcagtgggttctggcctttgctgaaaacggaatccggacggtggagcagatcaacgccggcatgcggattgccaggcagcaggagaagccgtttcttccgtcacctggtcagtttgttcagtggtgtaaacaggctgactgcgtggccgttggattgccggacgcggacgggctttatgacatgatcatgaagttcagtgctaaccgcagtatgtaccggacagcagaggattatccgtggcaaaacaacgcctgttactggatggtcacgaagttgcacgcactgagtcgcgcatccggcctgaccgagtcagaactgaaaaagcgctgcgcccaggagttggcggtgatggcatccagaatccgatccggtgaagaaattccggcaccgagggtgcaaatcccgaagctgcacatcccggttccaaaggaaaaagcactggcgcatatcgcagaattaaaggccaagttcggtttccggacgcggacggcgtaa

SEQ ID NO: 283640 - DNA, 129 bp, Morganella morganii
atgtacgaatgtcatagatgtggaaatgaaatagatagccgcgaagatctgatggatggcgatgattacggctacgatgaagtttgccgtgattgccttgacgaactcaaggaagagaatggcgactag

SEQ ID NO: 283641 - DNA, 942 bp, Morganella morganii
atggcaaacgaactggtcgttatcgaaccagcgacagcgctctacctttttacagcgccggataaggttcaggtactgctgtctggtatccgggagagagcactcgcagaacaggcattactcgatactgatttatcgaaagccaagaatcgcgatgctatcaaatcactggcctacaaagttacgcagtcaaaaacatacatcgacaaagccggaaaggctgtcgttgatgagctgaaagagctgccgaaaaaagtggatgccagtcgcaaacagtgccgggatgaactcgacgcactgagcgaagaaatccgccagccggtaacagcctgggaggatgcagaaaaggcgcgtgcagcagcggaagaactggttaagcaaattgagcgtgaccacgaagaagcattgcagatgaatgagctgcacgacctgcgcaaagccgaagaagaacgcaaacgcattgaacatgaaaacgaaatcaagcgtcaggcggcagagcaggcacgaatcgaagctgagcaaaaagcacagcgtgatcgtgaagcggctgagctgaaagccaaacaagagcgtgaagctgcggaattaaaagcacgacaggaagtcgaggccgcagctaagcgcgaacgtgaggccagagaggcgcaggaacgcgcagaacgtgaaaagcaggaagctatcgcgaaggctgagcgtgaaaagctggccgcagttgaagcggagcggcgcaaggcagaggaagccgaacgcgcacgactggcggaaattgagcgccagaagcaggaagaattaaagcgccaggcgaacaaagagcatcagcgcaaatttaaccgcgaagctttacaggcactgactgcagcaggatttgacgatgaaaccgcaacaaaattccttgagctggtaattaaaggcgaaatcccgcacctctcaatgaactactaa

SEQ ID NO: 283642 - DNA, 387 bp, Morganella morganii
atgtcaggacacccacacgctgaccttatggctaaggcagcagagatagcgaagacggatcagtattggcagcggcactttgaggaaaaatttcacagtacggataagtggaatccaatgtcagatgtgttctttcaaacacacagagaatatcggctaaagcccagcttcatagacattaacgggcatcaggttccggagccggtgcgggagcctctggaagacgaccaagagtactggatagcggacattcgatatgcggtatctgtttttaattgggagaataatgacgctgacaatcgctggcttgaacgcggcatcattcatctaaccaaagaagccgcagaagcccactcagtcgccatgctctctttcacacagaagtaa

SEQ ID NO: 283643 - DNA, 339 bp, Morganella morganii
atgggcgttgactgggataaacacctgctggggccgctgcataacgtctttgcggaaaaggcgcgctgggaaccggtgaaaagtgccaaaggtgccgaattttacgatattgacggcatttttgaccgggcctatttccagaactatgaaagcacggacggtgaaagcggtatcaataccacccgtcctatcctcggtgtgcgcgatgttatttttactgtgcctccggcgaaaggggatcgggtgtttatctacagcgtcagcaccctgtttgtggtatccgatgtgcagccggacagccacggcgggacgcatctgatcctgaataaggtgaaataa

SEQ ID NO: 283644 - DNA, 1911 bp, Morganella morganii
atggcgggaaatacctttgattttgaactgaatgctgatgatcaggccagtcaggaaattgccaatattgaagcagagttaaataagcttcgccctgttttaaaggatgtgcgcgaaagccttaaaatgggtggtgatgaatcaatttccggattaagggatgttggcgaaagaattcgtgacatgtccgatttttcgaaaaaaggcgctcaaagcatcggagatatgatcccgccactgaaaaacttcggcgagttgtccggtaagtatatggacatggctaaaaaaattgggggcatcggagccattggttatgctgggtatcaaatggtcagccaaataccagaaaaagctcagaaagccactgaggtttcaaccagcgccaaaaatatgggaatgagcgttgaggaaggcacgcgccttaccggcactcttattcaaaaaggatctactgaggatgatgcccgccagtcatttgaaagcctttacggttctctgaatgacgcggtcagagggaacaataacgaattactggcgaccatccgcagtattggtgccagtattattcagcgtgaagacggaagtgtcgatctgacaaaaacactgctcagcctggaaaaagcaatccagaacatccctgaaagtcgtaacgctgaattgcaaagcaaactcggattatcaccagagatacttgcactgatccgtgaaggaaatttacagggacgactggataaatcagaccgaatgggccatacccgcgacgatgcggttgttgaacaactcagtaaaatggatgaggtacttaaaaatatttcagcggcatacgagggggcaaaaacaaaaaccggtgatgcggtcgcaggtgcgttactttcagatggttcagtaattgatggtttgaatggtgtagagcaaatattgacatacgggcccgataacgtggcgcttatgcaaacaatgggttttctgcatggtaacgattctgacattctgcgaaccacatataacacgccggagctttacggtaagttggggatgtgggatcagtcgatggtagattttggcatcatgacagatgatatccgaaaaaattatgaggagtgggcgaaagagcgggagtccgccaaaaaagcacagggaaaagaggaagaaaaacagcgacaggccaatgcaccggacggctggaaacaggatagtagtcacaatccaaaggttagggcatttcggaacaataatcccggcaacgtccgagaggctagtaatgaaataggtcgcgatgaacccggagttgatgccaatggtaacaaaaaaggtttttcaattttcaaagatgaggctgacggcagagcggcattagcgcgtcaattacttctttatatggaccgtggtaataacactatcggtggtattatgaataaatacgccccccggaaagacagaaatgatacccagggatatatagagcatatgtcagggtacatgggcgtagatgctaacactcctgtcaatttatatgaccctaaagtgcttgctcagtttatgaatggcatcataaaaaaggaatcaggatatcaaccgtactcctacgatgaaatgatggggtcaatagatgacgcggtgaatagctcccgctgggccggaaagagaaacccacaacgacttttggatcagcgtgagcagtgggccatgcgtaacaaccaagatgaaccgcaaccatccccggttattagcaccgataagaatccgactgagatgttgatgggttttgctgaacaactggtgcgagtgctggaagaaaacaaagctggcggcacgctggaaattgtactgaccaacgcagaaaccggcacaaaaagcagcgtcaatgtaaaacccaaaggcagagttacaaccgcgatgaatatgccgtga

SEQ ID NO: 283645 - DNA, 1401 bp, Morganella morganii
atgccaattatcaaagacgccatatctgatgtactcggcattgagccggactggaattggtctgaacacctgcagcaggcttcattccgtggtgtgccgttcggtgtgatcagtggtgaaagtgttttcggccgccgccaggctattcacgaatatgcctaccgcgatcagtcctggatagaggatatggggcgcagcaaccggcggatcaccataaagggatttctgattcaggacagtctcgtttatgacgcgccggatgttatcacccagcgcgataatctggtggccgcctgtgaagttggtgaggccggaacgctggttcacccgacactcggagaaatgaccgtcagcgtgactgagagcggcctgcgggtgtctgaaaatgcagaaagcggtcgggtgtttgagtttgagctggtggttatcgagtccggcctgaaggtgttcgccatcaccggcagtgaaaaaaccggtgaactgacgttcgggcagtggctgaaagaagcagcgcataccaccctgaaaacgatcgccatgattaaaggcgaagtccgatctgttacgcagatgatgaagacgctgaaacagactgcggatttctgggtaaatatggtcagcagttcagttgatgaggtcactaatctcagtaactcgctgaacagcgtattcggcagcaataaatacggtcgctatcagaaaggcagcgcgggcggggcggtgtccggtgcgaccggcaagcgcatacatcagggtgatactgatgaccgtgaaattatcgataaaacgctgaatcaggccattattgaccggcaacggctggataaaacactcagcgcggtcagtgatgctgaaacccccgaagatgtgattgcacagatacagcgggtgtttgtcatcctgataacaaaggatggtgacaccggccagaagatgcggatcctgaatacattatcccgtttccgcaatctggaatatcagcagacggagcaggataagagaattgccgcactgactgaaatgatgctggttgtgctggctgcatcggcactttccgtggtggccggtcagtctgacccgacaaacagcactgagtccgccggatatcagcgggaagtctgtgaatccctcgatgatgccatgactatcaccggggatctggcgctggatgacatctatcttaccctcctgaaccggcgcgaacaggttgtcattttcttcaccgataaaggctctgaacgcggccgcctgtcgtcttacgctctgccgtcggtgctgccgtctctcaatgtggctaaccgactgtatcaggatgcaacccgcagcgaagagctggtgatggagattcagccccggcatccggcgtttatgccggtgagatttaaggcactgaaaaaatga

SEQ ID NO: 283646 - DNA, 234 bp, Morganella morganii
atgctggtttttattgatctgcccgttccaggtgtcgatataaccggtgataaccctatcctgaccgagaaacacctcacagggatcgcccggcttaaacagctgcttttcatccgttgccgggtagtaatccatcaggctgatttcaaaatcgttcggcaaccgctcaataccacgggtaacccggacactgtcccatccggaaatacgcttgccgtttatcaccagggataa

SEQ ID NO: 283647 - DNA, 246 bp, Morganella morganii
atgaaccaacgttccggactcaccggcttcacaggcagcaaccagattgttgcgctgggtgataacgtccggcgcgtcatacacgagactgtcctgaatcaggaatccttttatggtgatccgccggttactgcgccccatatcctctatccaggactgatcgcggtacgcatattcatgaatggcctggcggcgaccgaaaacactttcaccgctgatcacaccgaacggcacaccacggaatga

SEQ ID NO: 283648 - DNA, 264 bp, Morganella morganii; identical to SEQ ID NO: 280013

SEQ ID NO: 283649 - DNA, 369 bp, Morganella morganii; identical to SEQ ID NO: 280014

SEQ ID NO: 283650 - DNA, 1482 bp, Morganella morganii
atgacagtgccatttgccactattccgcagaatctgcggactccgctatttttcgttgagtttgataactcgatggccaacacagcaactgccacgcagcgcacgctgttaatcggccagatgctggaaggtgcggcgggcaaagacagcattcctgagcgtataacatcagggacgcaggccgcagagcgttttggtcgcggatctatgctgcacaccgaagcggatgcgtatttccgtaatgacacggccggtgaagtgtgggtgttaccgctggcggatactgaatcgcagacagcagctgccggtaaactgaaaattaccagtgctgccaatgataccggtgtgatttcactgtatatcgcgggtatccgtgttcagatggccgttgtggccacggacacagcagaagtgatcgcaaccggactggctaaagtgattaaccgcaatgcgaacctgccggtaaccgcggcggcagagacagatacggtgattctgacggccaaaaataaaggcgctcacggtaacgggattgatatccggctgaactacctcgggctgaccggtggcgagtcgacaccgtccggttttgaaatgaccgtcacggccatgaccggtggtaacggctcacctgatttgcttaatggtctggcgaacctgaaagaccgatcctttgattttatcgtaaatccgtatactgatacggcgtctctcgatgtggtgaaaacctttctggcagaccgctgggcgtgggacaaacagttatacggccacagctacggggtgatcaccggcacttatggccagctggctgattttggtgaaaagcgtaacgaccagcatgcatccctgctcggtgtcaatggttcaccatcgccggattatcagtggagcgcagcctataccggtgccattacacagagtttgcgtaatgatccgggccgcccgctacagacgctcgttatcagtggtgtgctgccgccggacgacacaaagatttttgaactgactgagcgcaacaacctgctgcacagtggtatctccacatttaccgtggatgatgacggtaccgtgcggattgagaatatcatcacgacctaccagaaaaatgcctacggcgataatgacggcagttacctgcaggtggaaaccctgtatctgctgatgtttgtatcacgctatctgcgcacccaggtgaccagtaaattcgggcgtatgaagctggcagaagatggcacccgctttgcaccgggggcagcaatcgtcacaccgaatgtcattaaagcagaactgatcgcccagtatggcttcctggaatttaacggtcatgtgcaggatgcgaaaggctttgccaaaggcctgaaagtcgagcgcaacagccagaacccgaaccgtgttgatgtcctgtggaccggcaccctcattaaccagctgcgcgtgtttgcgctgcttaaccagttccgcctgatgccgggcaactaa

SEQ ID NO: 283651 - DNA, 489 bp, Morganella morganii
atgaagtatgtcttcatcgaaaagcatcaggctgagttcagcgtcaaagccatgtgccgggtcctgcggattgcccgcagcggctggtatgcctggcgtagccgccgttgtcagataagcccgcgtcaacagttccggctcgtttgtgataatgctgctcgcaacgcattcgctgaggcaaaacaacgctatggtgcgcctcgtctcgccaaagaactgcccgaatacaatatcaaaaccatcgcagccaatctgcgccgtcaaggattacgggcaaaagccagccgcaaattcagaccggtcagctaccgtgagcacgaacagccggtgactgagaatctactgaagcaaaactttcacgccagcggcccaaaccagaaatgggtgggagatatcacgtacctgcacaccggtgaaggctggctgtatctggcggtgattatagacttgtggtcgcgggctgttatcggttggtcgatgtcaccatga

SEQ ID NO: 283652 - DNA, 222 bp, Morganella morganii
atgaataccactgataccaccactgccccttccctgctcgacgaaccactcgtggacatgaaattcatcaccaaatttaccggattaacggataagtggttttacaagctgatacaggaagggcagtttccgaaaccgattaaactgggacgtagttcccggtggcagaaaagtcaggttgaagcctggctacaggcccgtatggatgaatcctgtgactaa

SEQ ID NO: 283653 - DNA, 1086 bp, Morganella morganii
atgattaaaaacggggaatggcgcgctgaaaagccgtttaccggtcacgcgggatttcatatctgggcggcgtacagcctgttcccgaacgccgcctggccgaatctggtgaaagaatggttgcgggtgaaagacgacccgctgatgcggcagacctttatcaacctggtgctcggtgagccatatgaggaccggggtgaaaaagctctgagcgaacaaaaattactggagcgttgcgaagtgtgggcggcggaagtgccggacggtgtcacgctgctgacggccggtattgatacgcaggatgaccgctttgaaattgaggtggtcggctggggccgcagtgaggaaagctggtcagtcgcccacgatgtgattgaaggggatctggaaataccggaaccgtgggagcgcctcgatgcgtacctgaaacaaatctggcggcgtgctgatggtcgcgggtttgccattatggctgcctgcatggactccggcggacaccacacccaggctgtttatgatttctgtaaagcgcgtctcggtcgcaggatttgggctgtcaaaggcgaatccgcccgtggtggcaaacgctcaccgatctggccgacaaaacgcatttcatcccgttcgaaagccggatttaaaccggtaattatcggtgtgaacgcggccaaagatgcggtgcgcggtcgtctgcatctcgaaccgccggcagcaggcgaaccggcaccggcgtatatgcacttcccggttgatcgtgatttgcagtatttcggtcagctgctggcagagcggtcagtaattaaagtgtccggcggtcagcggtaccgggtctgggagcagataccggggcgggcaaacgaagcactggactgccgcgtgtacagctatgccgcgctgtgtggcctgatgtatatggggctgaaacttaatgcgctggctgacgctgtcgccggtaatccggaacggcttattgcaccggcagagaatccggaaaccagagttaaccttcgcttcccgggggccatcatcccggaggaaaccaatgaaaagcctcagcggaagcggatatcccagcttttgccataa

SEQ ID NO: 283654 - DNA, 252 bp, Morganella morganii
atgtcacgaattaccacgctgcttaccggcatgagtgatgcgcagttaaagcaggcgcttgttcaggcgcagcaggcctatatcgatctgtcaaccggtgccaaaggcgtttcattttcctatacacagggtgacgggacgcgatcggtgtcctatcagcagaccagtcttggcgacctattggcgctgatccagacaatacaggccatgctggggatctcccgcaggcgtccaatcagggtgaggtactga

SEQ ID NO: 283655 - DNA, 1653 bp, Morganella morganii
atgagtgtacaaatcttaggagcggacgggcgcccgctgcctccggctgccccgaaaatgaaatacggggcactgtccggcagtggccgggtgccgtatgacgcggcggattcattcagtgatcagatggcgaactggcagcccgcgctgtggtcgccggataatgaaataaatatctaccgtgaccgcattgtgtcacgtatgcgtgatctggcacggaatgacggttgggcatccggctcaataacccgtgtcctggataatgcggtgggtgcctgttaccggccggtattcaaacccgattaccggatgctcaggcaactgaccggtaataaggcatttgatgcggtgtgggcagctgaatacagccggtttattaccgcgcactggcgctcatgggcaaatgacaagggccggtactgtgatgttgaacgcaaacagaccgtatcgcagatgctgcggctggctttccgtcacaaactgctggatggtgatgcgctggcggttctgcaataccgtcctgaccggcttggtcacggtaaggcccgttatgcgacgacggttcagattattgatcccgaccgcctgagtaacccgcagcagaattttgatatgccgaatatacgcggcggggtggagattgacagcgacggtgccccgatcgcctatcacatccgcgaagcccatatgggcgactggtgggccggtaagaaaaccatgacctggaatcgcgtaccgcgtgaaacctcatggggtcgtccggtggtggtgcatgattttgatatggagcgcggtgctcagcaccgggggatcggtattctggcccctatcgtccagaagctgaaaatgctgattaagtacgatgaatcagaactggaggcggcaatcctcaatgccattttcggggcgtatatcgaatccccgtatgatgcacagatggtggcttccgccctgggggataccggcgattttaccggtgatgaactcagtgcctaccagacacagcggacagaatactatcaggataagcgactcaatcttcagaacggcgcacgtatcccgcacctgttcccgaatgaaaaaatagtcacactgtccgctgcccggccgaccagtaactttgacggttttgagagtgcggtgctgcggaacatctctgcggccaccggcctttccgcccagcaggtcacacaggactggtctgatgttaactattcctcagcccgtgccgccatgctggaagcctggaaaaccctgacccgccgccgtgatgacttctcaaacggcttcgcacaaccgatagcggtggcctttgccgaagaaatccacgatgtggaagatgttccgttaccgaatggtgccccggactttatggacgcatcagcatcctactgccgcgcgcggtggatggggccgggtcgcggctgggtggatccggtcgcagagaaaaaaggggccattctcagtatggaggccggtttatccacactggaaatggaagtggctgaaaacatgggtgaggactgggaagaacaggtcgatcagcgggcttatgaaatccagcggtttaaagaacttaatctgccgccgccaagttgggcgctggccgatgactttgcaccaaacccggaaaataaacaggaggcgaagtga

SEQ ID NO: 283656 - DNA, 855 bp, Morganella morganii
gtgaatttaccccacctggcacagaagctgtttaacacgcctcttgccatacacccgcagaaagcggaagtgattgtgtcatcactgacagaacggctcggtatcacgcagatccgcagcgccatgatggaagacgatgacgagtatttcagccgtaaagcccggaaggacagagggtatgacgtactggaaggcatcgcgattatcccggtctacggcacgctggttcagaaactcggcacactgcggccgtacagcggcatgaccggttatgacggcatccggagggtatttctgacagccattaatgacccggaggtgaaaggcatctgtctggatattgattctcccggcggtgaagtggccggttgttttgacctggttgatttgatttatgccgaacgcggcaaaaagcccattcacgccattctgtccgaaaatgccttttccgctgcctacgcgattgccagcgctgcggacaaaatttttgtcccgcgcaccggcggtgtcggttcggttggtgtgatcgttattcactgtgactggtcacagcgtatcaaggatgacgggctgaaagtgtccattatcacctacgggaaccgtaaagcggaaagtaacccgtatgtggcgctgagtgatgaggcgaaagcggccattcagcatgatgtcgatgaaatggggcgtctgtttgtgagcactgtttcccgtaaccgcggactgtctgaggcagtgatccgcaatacacaggccgcctgttatctggcagccgagggcgtacatatggggctggctgatgtggttgccagtcctgatgtcgcatttcaggaactgatgaaagaatccggagtaatttaa

SEQ ID NO: 283657 - DNA, 594 bp, Morganella morganii
atggcagacaataagtttacctttgcacatctgatcggcctgggtaaaaaagccagagcctcggaagaggatgaagataaaaaagtgcgcaaagccaaaggccgtacagcggaagaggatgagcgcgacgaagatgcggaagacgatgaaaatcgtgaaaacgcggaagatcaggacgacgaaaagcagggccgtaaagccaaaaaagccgaagacgatgacgatgacgcagatgcggaaggcgatgaagaagatgccgaagatgatgatgaaaacaaagatgtaaaaaaaggccgccgtgctgaacgcaaacgctgtgcccgcatctttggcagcaaggctgcagccggtcgtccggatatggccgcacacctggcattcaatacccgcatgtcttcatctgaagcgatcagcaccctgaaagcgatgggtgcggttcagcctccaacacagcgcgcatcgctcgacagccgcatgcgggcagaacagcaggtacgtatcagcccggatgcacaggcaccggcagccggttcagctgccgcgctggctcagcagatgaccggcctttataacagcaacaagggagcgaaataa

SEQ ID NO: 283658 - DNA, 675 bp, Morganella morganii
gtgtcgagcacagtttccgatggcgggttacagattatcccgcaattcaccctgaactggggggagtcctcacagcaggtgatcgaacgctgctgccggtattctgcgctgctgtattacgaacagccggacggaaacctgttgctgacccgtgtcagtgacaaggtggcggccagtggcgtggagcaggataaaaatatcgaaagtgctgatttctcggattctatggcagagcgctattccgattataccggtgtgtcgctgtctgttaccccgtttgccggggatgtgtcagcggtgcagaacgcctcggcgcgggatccggaggccgggaaaatgcggtaccggaattatatcaccatcatcgaaagcaccctgatcaccgctaagcgggagcaggagagtatcgactgggaaatgaaccgccgttacgggcgctcaaaaatcctgagtgtgatggtggacagctggcgggatgcctccgggaaactgtgggagccgaacacgctgatcccgatagatattccggttcttggggtgacggataaattctggacgctgtcggatgtgacctatctgcgggatgccggcgggacacgtgcgacattacagttgatgccgccggaagcattcattgctgaaccgtatgaattttaccaggtaataagggtgtga

SEQ ID NO: 283659 - DNA, 585 bp, Morganella morganii
atgagtgatcaggtccgcgatttaaaaacccggatgtcgatgatgatcggtgccggtaaatccagcgtcaccaaagatgacggagcgattcagaccatccagtacagcactgcgctggaagtccgggacggtacttaccgtatgacagaatttggtttttcgtcttctctgccgccgggctcggatgttctgattgcctatctcggcggtaaccgttccagtgcagtagttatcggcagcaatcaccccggttcccggcataccggactctcaccgggtgaaagcgtgatgtacaacctgtggggtatgtacatccacatgacagaggacggcattgtgattgaggccaaagataaagatgtgaccatcaataacgccgataaggtgacgatcaatgccaaaacagaagtggtgctgaatacgccgatcctgaaagtgtccggtgatgtgattgataacttcgaaagcaacccgtccacactgaaagcgctgcgggacagttacaacaagcacgaccacgatgtggaaaatgtggaaccgggcagtgccacccgaaccagcaacccgattaaggagaaagtctga

SEQ ID NO: 283660 - DNA, 747 bp, Morganella morganii
atggcaacctaccgtatcgaccccgacctcgcgtttatcggtcagtgcagcaatgaggacctcggtctgctggtctccgtcctgacacacgacagtaaagacggcaaaaagcgtctggcggagtctctgaccaccttaccggaatatcagctcttttatcccgaccatcagaagtactggcccgccatctgtgccgaactgcaggccttcggtgccaatagtctggccacgctgctgcgcggcaacaaaggtgtgctctaccgtgaaattctgctggatgtctgcagcagaatgaaagtaaaacatgaaaagggggacagtacagaaacagcagaaatcaatctcctgatgcagataatgagaaccagcatcagtgatatgtcaccggacgcactggctgccttatcacaggaaatgaaactcaacctgactaatcccactccgcagctcgttatgatggctctgcaggcagcagtaaatgtctccggtgtggctgctctggaactcgcatccatcgcctctttcggtgtgatacaggcgatggggggtatggcaaccacagccggtgtgaccggaatggcttctgtattcttcggttcccgcatcttaggcatattggccggtcccgtcgggattgccctgagctccgcctggctgatagccgatatcgccggtcccgcttaccgggtcaccattccggcctgcatcattgtggcgtacctgcgccagaaggccctggcggcctga

SEQ ID NO: 283661 - DNA, 672 bp, Morganella morganii
atgcatacgccagattcacgtcatgaccggcttgcattccggctggccatgattatcagccgcctgttccgcggcgaaacgctgtatccggcacagctcgcccgtgagtttaatgtctcggcccgcacactgcagcgggatttcagtgagcgtctggtctttctggacactgagccgtatcagggcggatacaggctggccgccggtcagcgcccttaccggacagacagcgatatcctgtactttgccgatatcacccatatcaccccgctgttcccctcgcttgaccgcaggctgctgtccgttctgctcagcccggaaaacggagctccctgtctggtctaccacgaaccgccgcaatccgccccgacgctattcggcggcttttatgtggtgacgcaggcgattgtccggagacggctgctcagcttccgctgtgacggtcaggaccatgagggcatggccccctacaagctgatttattttcagcgggactggtatctgtgcggggaatggcagtcagccctgcgggtgttccggttcagtcagctgcagaacattgccgtgtccggacgccgcttccggcaggacaccgttatcgcacagacagtcacccgtcccgaatttatcaccgcattaccccattatcagtttatccgttcattaccttaa

SEQ ID NO: 283662 - DNA, 675 bp, Morganella morganii
gtgtcgagcacagtttccgatggcgggttacagattgtcccgcaatttaccctgaactggggggaatcctcacagcaggtgatcgagcgctgctgccggtactctgcgctgctgtattacgagcagccggatggaaacctgctgctgacccgcgtcagtgacaaggtggcggccagcggcgtggagcagggaaaaaatatcgaaagtgctgatttctcggattctatggcagagcgctattccgattataccggcgtgtcattgtctgttaccccgtttgccggagatgtgtcagcggtacagaacgcttcggcgcgggatccggaagcgggaaaaatgcggtaccggaattatatcaccattatcgaaagcaccctgatcaccgctaaacgtgagcaggagagtatcgactgggaaatgaaccgccgttacgggcgctcaaaaatcctgagtgtgatggtggacagctggcgggatgcctccgggaaactgtgggagccgaacacgctgatcccgatagatattccggttcttggggtgacggataaattctggacgctgtcggatgtgacctatctgcgggatgccggcgggacacgtgcgacattacagctgatgccgccggaagccttcattgctgaaccgtatgaattttaccaggtaataagggtgtga

SEQ ID NO: 283663 - DNA, 588 bp, Morganella morganii
atgatgagtgatcaggtccgcgatttaaaaacccggatgtcgatgatgattggtgccggtaaatccagtatcaccaaagatgacggagcgatacagaccatccagtacagcaccgcactggaagtccgggacggcacttaccgtatgacagaatttggtttttcttcctctcttccgccgggatcagatgttctgattgcctatctcggcggtaaccgctccagtgcggtggtcatcggcagcaatcatcccggctcccgtcataccggactctcaccgggcgaaagcgtgatgtacaacttgtggggtatgtacatccacatgacagaggacggcattgtgattgaggccaaagataaggatgtgaccattaataacgccgataaggtgacggtcaatgcaaaaacagaagtggtgctgaatacgccgatcctgaaagtgtccggtgatgtgattgataactacgaaagcaacccgtccacactgaaaacgctgcgggacagttacaacacacacaaccatgatgtgaaaaatgtcgagctgggcagtgccaccctaaccagtaacccgattaaggagaaagtctga

SEQ ID NO: 283664 - DNA, 438 bp, Morganella morganii
atgtctgatatttcttcctggtggaacgcggacacgctgcgcgctgactggaaacccggaaacggtgacctgctttccggtgatgatttgcagtcagcgattatgatcagtctattcacggaccggctggcgcacagcgatgatgattatgacgatgaacaccggcgcggctggtgggcggataccggaacggatgggtttatcggctcccgtctctggctgctgagacgtcagaaactgaccacgcaggtggcaaagaaagcagaagattacgcccgggaggcgctggcctggctgataactgacgggatcgtatctgatattcagatccggacacaaatcgtgtggccgcggcggctgaatatggttatccgctatcaccggccggacgccggtgcggaagatctgcgtttttactgggtatgggagaaacaataa

SEQ ID NO: 283665 - DNA, 630 bp, Morganella morganii
atgagagatagtgtttcttatacggcagttgctaattcaccaagaaaatctcacctcgggaaggcgcggaaattaactccggcgcaagaccggtgggtcagagccattatcaccgtgtgggctgatgaaatgcggggtagtgatagccctggctatggaggatgtggtggtgtatggcgatttttaacgggctggtctgtggaaaatctggataggtttaccgatgcctttaactctcttcgaaaacttggatataagggagaggaattactgaagaaggcgcaatcaatattatttcctaaacaatcactcagcaacatgttccagcgcgccaacgatgtagatgaagctgactttgtcgaaaaatcaatattgaaagccttcgataaaaccaatcccgtatatgtaatcgctactgattactatcttcacagagaaacaatgcaaaatctcgcaaattatatgcaggaaagaatagctccgtggctaacgataaaacaatgcacagatcgggttaggtggtgcattagtttatttaatgcaaaggtctacatggttatgcaggatgaaatagccaaagagcgtgtaacaaaaggagatttttcagaaaatatatcaaaaataacttga

SEQ ID NO: 283666 - DNA, 201 bp, Morganella morganii
atgaaacctgagatcacatcgataccggaaatgctggttaagcaccacggaaacatgactgcactggcgagagagctggaaataaaccggaacaccgtcaggaagtttcaccgcgatacccggtgtgaaatgcgcgttatctacaacggcgtgctgatgaccaaatccaagatgaaaggcaaccaggggaaagagaaatga

SEQ ID NO: 283667 - DNA, 213 bp, Morganella morganii
atgtctgtctttaaattaatggccaccacactcggtgtcgcaacggtggcgttagccacgtactgcgcctggcaggcggctgctgaggcggcagacaatgaggatgccacttcagcggaaaaactggcggctggcctcagtgccgcgctggcctgctcagccgtgctgggcggtacccttgaccgtctgctgggacggctctttccccgctga

SEQ ID NO: 283668 - DNA, 441 bp, Morganella morganii
atgacgttatcagtacttccgctgcagcagcctgcagccatcaaaagcaatctggttcatccccgtggcaggggcacattctggcggttttatttcggcagcgtaccggactggcagcgcctggaaagcgacatttttaagatgatggataatctgtgtgacatttatcacggtgcattctgggaattcagcatgctcaccaacggtggcgcatttatctggcctgacatgattgaaacgtcgctcccgatgattaacccgcataacggcaatgacgcggaactgagccccgaagcggccggtatcgctgtctgcttaatgacgttcagtatctggtcatttaacactgagagtcctgtgctggtggagtatttttatcagttgcgggactacgccctgcagcatgaggagtgtgccgctattttccgtcttatcgattaa

SEQ ID NO: 283669 - DNA, 537 bp, Morganella morganii
atggcgtgggactggcggccggggtcgaatatgcatgctgttctccgggcgctggcgcgcggttatgaggcctcggatatcgatgcggttcagttgcttgagggggcatttccgaagacggccacaacgttattgccggagtgggaaaaaacactcggtctgccggatgactgtgcgattggggagatggataccatcccgaaacgacaatccgcagttctttcaaaactgctgcgcaccggcgggatgtcaaaaccctactacatcagcctggccgccgagatgggttacaccatcactattaccgaattccggcaggcaagggcaggactgtcagcctgcggtgacgcactgaacggtgatgaatggccgttcgtctggcgtatcaatgccggaaacacgcaggtgacatatgcggtcgccggcggcagttactgtggtgatccgctgcgttcgtggggtgaacattacctcgagtgccagtttaaccagatttccccctctcacacgatccttcaggtcggttacggccagtaa

SEQ ID NO: 283670 - DNA, 789 bp, Morganella morganii
atggtcagcagttcagttgatgaggtcactaatctcagtaactcgctgaacagtgtgttcggcagcaataaatacggtcgctatcagaaaggcagcgcgggcggggcggtgtccggtgcgaccggcaagcgcatacatcagggtgatactgatgaccgtgaaattatcgataaaacgctgaaccaggcaattattgaccggcaacggctggatgaaacactcagcgcggtcagtgatgctgaaacccccgaagatgtgatcgcacagatacagcaggtgtttgtcatcctgataacaatggatggtgacaccggtcagaagatgcagatcctgaatacattatcccgtttccgcagcctggaatatcagcagacggaacaggataagagaattgccgcactggctgaaatgatgctggttgtgctggcggcatcggcgctttcggttgtggccggacagtctgacccgacaaacagcactgaggccgccggatatcagcgggaggtttgtcaatcccttgatgatgccatgactattaccggggatctggcgctggatgatatttatcttactctcctgaaccggcgcgaacagattgttattttcttcaccgataaaggctccgaacgcggccgcctgtcgtcttacgctctgccgtcggtgctgccgtctctgaatgtggccaaccgcctgtatcaggatgcaacccgcagcgacgagctggtgatggagattcagccccggcatccggcgtttatgccggtgagatttaaggcactgaaaaaatga

SEQ ID NO: 283671 - DNA, 234 bp, Morganella morganii
atgctgatttttattgatctgcccgttccacgtgtcgatataaccggtaataacccgatcctgaccgagaaacacctcacagggatcacccggtttaaacagctgcttttcattcgttgccgggtagtaatccatcaggctgatttcaaagtcattcggcagccgttcaataccacgggtaacccggacactgtcccagccggaaatacgcctgccgtttatcaccagggataa

SEQ ID NO: 283672 - DNA, 330 bp, Morganella morganii
gtgtatgcaggtctggtttccggcgatgtgaaagtccgtgatctggaagaatcgaaagccatcaaagagcactactttgcagagctggcccggttggagtacgaagagaaatccggactggtgctgccgtggcaggacatgatcgacaaggtgggcgaggagtatcacgccatgcgtacccgcctgattgcgatagcccctgaacacggtccccgcctgcggtcgctggcactgacttcctctgatacagagtttgtgtccgcgctgcaggatatcattcatgaggcgatggaggaattgagccttgaccacagtgaacaggggggataa

SEQ ID NO: 283673 - DNA, 213 bp, Morganella morganii; identical to SEQ ID NO: 278662

SEQ ID NO: 283674 - DNA, 420 bp, Morganella morganii
atgtgtgacggcaacagcaacggcggctttccgctgggaactgacggaccggctaccaaagaaacttattcagttcatgcgaccggtgaccagttgcgtgttgcagatcatatctgggatgtgcagacggtaacggcgctggtgtgggtctgttcacctattgcgaaaaagatagattttgaaattgaagggctgagtcgggcaacctcggaattacatcagcagatagccaaagccattgatgatgtgttcttccgggacagtgacccgaccggcggcgcaaaaatctacctttctgacctgcagtatgcgattgctgatatcccgggcaccaccggctttgtcctgaaaaaaccggctgaaaatatagttctgagcaccggtgaactggcgcagcgcggggaggttttatacacatga

SEQ ID NO: 283675 - DNA, 420 bp, Morganella morganii
atgtgtgacggcaacagcaacggcggttttccgctgggaactgacggaccggccaccaaagaaacctatgctgttcatgcgaccggcgatcagttgcgtgtcgccgatcatatctgggatgtgcaaacggtgacggcactggtgtgggtctgttcacctatcgcaaaaaagatagattttgaaattgaagggctgaaccgggcaacttcagaactgcatcagcagatagccaaagctattgatgatgtatttttccgggacagcgacccgaccggcggggcaaaaatctatctttctgatctgcagtatgcgattgctgatatccccggcaccaccggttttgtcctgaaaaaaccggctgaaaatatagttctgagtaccggtgaactggcgcagcgcggggaggtgtcatacacatga

SEQ ID NO: 283676 - DNA, 219 bp, Morganella morganii
atgattgcagacggatcggtgattatgtccggcgctgacctgatgggaacccgtgcatttggtgccatcattgacccgaaatttaattacggcccgatggcgtatgcaccgaagtcctggcttgtagaagatccggcgcagcgtttcatcatggtgcagtctgcaccgctggttattccgagccgtgttaacgcatcactgtgcgccgttgtggtttaa

SEQ ID NO: 283677 - DNA, 366 bp, Morganella morganii
gtgaccacggtccgcgtcaccggccgcctggaagagttcgatgaggaagaccagaacggcgccataaaagcagagctggctctcgaagccctgcgggaacagattgaacgggcggtgattaacagctatgagctgacacggcaaattcagcagttcctgaatacccgctctcagataaacatcagtgccgccggagaggggcatatggcgcaattgctgatggatctggatatcgaatactaccaggggccggaggagttttacccggttgacgcggatccgcttaccagtatcgatatcaatgttcagatgcctgacggcagcccggaacatcacgtctccatcgacctgactaatcaggagtaa

SEQ ID NO: 283678 - DNA, 366 bp, Morganella morganii
gtgaccacggtccgcgtcaccggccgcctggaagagttcgatgaggaagaccggaacggcgccataaaagcagagttggcactggaagccctgcgggaacagattgaacgggcggtaattaacagttatgagctgacccggcaaatccagcagttcctgaatatccgctctcagataaccatcagtgccgccggtgaaggtcatatggcgcaattgctgatggatctggatatcgaatattaccaggggccggaggagttttacccggttgacgcggatccgcttaccggtatcgatatcagtgttcagatgcctgacggcagtccggaacatcacgtctccatcggcctgactaatcaggagtaa

SEQ ID NO: 283679 - DNA, 159 bp, Morganella morganii
atgcgtacccgcctgattgcgatagcccctgaacacggtccccgcctgcggtcgctggcactgacctcctctgatacagagtttgtggccgcgctgcaggacattattcatgaggcgatggaggaattgagccttgaccacagtgaacaggggggataa

SEQ ID NO: 283680 - DNA, 225 bp, Morganella morganii
atgttcgaagttgattgcaaaaatgaaaatccggttgcaggtatagttaatatagtaacgaataatgacagtggcacagtaaatattgaacaggaaataataaacatatctggcatttgttaccttggcctggaaagtgactttaataaaagtgatataaaatccattaaggcattatttggtagcaatgacaatagtgaagttatatttaatattcagaaataa

SEQ ID NO: 283681 - DNA, 492 bp, Morganella morganii
atggaagatacgacgttaatcagaaaactattaacatataatgaatgtgacggactgttccgatgggctgaggatcgcagcagattaattaaaaaaggcgaagtggccggaacggttaatggttgtgggtatataaaaataaaaatcaatgggaaacaatatcttggtcataggttagcatggctaatgacgtatggtgagtggcctaatggagtaatagaccacaaaaaccacaatagaaaagacaacaggatatgtaacttaagggaagcaacaaaatcaaccaatagtcacaatgcgaggaagccaataaataacacttctggtgtgaaaggtgttcattggtgcaagagaaaaaatgcatggattgccaaggtgcagctgatggggaaaatcacagaagccggtaagttttcgtctttatctgaggctgcatctgcggttatggccttgagaatcaggcttcatggagagtttgctaatcacgggtaa

SEQ ID NO: 283682 - DNA, 477 bp, Morganella morganii
atgaataaccgattatttaaaaaagtcatggccgcttgtgctgccggggcaattgccggtgcgctggtgctgatccccgcatatgagggtgttgagtacaaaccttatcgtgatgtggccggagtgctcaccgtatgttacggccataccggcagtgatattcagcccggcaagctgtacacggacgctgaatgtaaggcgctgttgcatgacgacctgacgaaagtccggcgcgcggttgacccgatgatcaaagtgtcgattgacgacaatacccgggcggccatctattcatttgtctacaacgtcggcccaggcgcattctcgcgctccacgatgctgcgtaaactcaatgccggtgatatcgccggtgcgtgtgacgaaatgaagcgctggacgtttgccggaggtaaacagtggcagggtctgattaaccggcgtgagacggagaaagcgatatgccacggaatcctttaa

SEQ ID NO: 283683 - DNA, 180 bp, Morganella morganii
atgaaaaccctgcgatatttatttcatgacagatgggttctgattaagtggcggcgagacaacaaacccagcgcagatttagccgataacattatcaggtgttacaagctgacaggctgggtggccgaagatgtcaggcgcatctgtagcaaaccatatccggagaagcgaccgaaatga

SEQ ID NO: 283684 - DNA, 876 bp, Morganella morganii
atgtcacaccagatgacttacgcggattcacacaatgccacttcttcgccggtgtcggagtgtggtcacttgccctgcgccgagcaggatggccggatgataaaccagtctggacaggaagttgtccgtgccagcctttcagctcggcaggcaaaggaaatgggtttgctgacgagcggcacctttggcctgcattcttccacctcatcagcgagtgcaaacctggcgttatctttggtgaacaggttgcaagcaaagacggactcggctggctcgaccttgttcaaactgacttggaagcaacgaactacgccgtcggcgcggtcgatttatgcgctgcgggcttcggtgcgccgcatatcagacagcgattattctgggtggccgactccggtaacgactcaggcgggcgggacaccggccgattttttgagacgaaagcagcggacatcaccgggcacaacagcaatcacggatctgaatctggcagcacaacattacctggcaggatggcccacaccactggcgggggccagccggggagccggaaccagcggcaggcagggaggaatgaatattcaaacagctgcgaaattagccggatgggtatcgccaatagcgaacgatgccaagggctcgaaatcaagcgggacgggaaagacactatgtctgaaactaccgggtcaggctgcgattgctacaccggcccgactaacggctactggcgagatactgattggttgctctgccgggatgacaaatggcggccagttgaacccggaacattcccgctggttgatggggctgccggtcgggtgggaaaactccgcgcctacggaaatgccatcgtcgcgccggtcgcggaagagttcataa

SEQ ID NO: 283685 - DNA, 342 bp, Morganella morganii
atgaagaaaattgaaataccgatttacggcggatatcttgagttgtacgacacgcctgatgaattgactattcagcaccctgaacaaaactttgaatgctggggcgctggattcacagcaggcattgcaatcaaaggatgcctgactatcgtaatgcaattaaatctgcgtgatgcaaatacagtaacgcatgaatcaatacacgctgcatttgatattctggattttatcggagttccaattaattacgataacaatgaaaccgtgtgctatttggccggatgggttgcagaacaagctgaaagttattacagggagttggcgaatgaacaaatatcgtga

SEQ ID NO: 283686 - DNA, 360 bp, Morganella morganii
atgaacaaatatcgtgacaaatcagactttgagattaataaggctgtggcggaaattattcaccacggaaagatattcactcaggcctattcatttggtgatatctgcggaaactcagtgcagtggataggtggctatgctgaatacattcatgtcgatttctgcaaggacccagcggacgcaatgccgattattattgagaatggaataggcatgaactatatcggtaaagatattggttggtgcgcatatcattttgatgaagaaaaaggcgagctggaaatttacgataaaaattattatcgcgcagctatgatttgctttctaatcatgaaggacgaggagaatgaaaaaatatga

SEQ ID NO: 283687 - DNA, 600 bp, Morganella morganii
atgaaaaaatatgaccttctgttagccgatcccccttggtcatataacaacaaatcctccaacggcgcagcagataaccactacaacaccaccgatttttattccctcacccgcttacccgtcgaaaaaatagcctctgacaactccgtactctgcatgtggtacacgggtaactttgtccgtgaggcttacgagctggctgaggcgtggggatttaaagtgcgcaccggcttcgggttcgtgtgggtgaagctgaacaaaaacgcaggggatcggatagataaacatccgccagaagacatgttcgacttcatgggcactctgaacgcagagacgcgcatcaacggcggcaactatacccgcgctaatgcagaggtatgcctgattggtaccagaggccgggggctggagcgccagtcggccagcgtccggcagattgtgtattcctgcctcggtgagcacagcgagaaaccgaaggaagtacatcaccggctggaagatttatatggcgatgtcccgcgcatcgaactgtttgccagggagaaatacggcgaatgggatgtgtacggggatcaggtggacggaagcgttaagttatga

SEQ ID NO: 283688 - DNA, 303 bp, Morganella morganii
atgaatacagcggaagtgtatgaattccctgttaagcaggagcaaccacgagtggcagacctggacgatggttacactaaactcgccaacgaactgctggagtctctttcatgctgcaatctgacagccagacagttccgggtaatgttggcactgatcagaaaaacatacgggttcgggaagaaaaatgaccggatagcagattctcagctgtcagaaattaccggcctgtcccgtcagaacgttaacaaggcaaagaacgaattaattttgatctcttccctttcttcagtaccggtgtaa

SEQ ID NO: 283689 - DNA, 540 bp, Morganella morganii; identical to SEQ ID NO: 282428

SEQ ID NO: 283690 - DNA, 393 bp, Morganella morganii
atggcacgacagaatgtttatatgaatcagaaaacgtatgatgctttaaaatctattgtggaagagcggagagctgacggtgccagtttttcggatgccaatatgtcgagtgtcagttctgaaatgctggagataggtatccgggttaccatgaatctgaaaaaaaaatcagaagaattaggagatgacggttatacctgggaagagctttataagaagcagattatggatgaccttgttaaatcgaaagtctgtctgcagaaaatatttgaaatgctgtttgatctgcaggagataaaatcagattcccgttatgatttcagagaagcagttcaaaaaatgaaagctgaaagggatgagttgttagcgaagttttttgaagataaagagtag

SEQ ID NO: 283691 - DNA, 675 bp, Morganella morganii
atgtctgttgaacatgctattgatctatccttcagatctcaagatctttttgtgtcttcactcaaagaaatcatcaaaaaatcgtcatattggatggtttgcagttcagatgatgtttttttgttaagtaatgcgaagagtgatctgagaaaaataacagtcaaacctgagaaagactatcttctcagttcttttcctttagaatctgttgtctttattgaagataaaagattttccattgtatctccctatcaattattcaagattccagtaacttacaataatgaatattgtttgctttatatttattttaaaattttgagaaatgacttttatcattgttttttaaataatgatttgtttgataaggttgattcgctaggtaataaattgaattttgaatttcaggttaatagattaaaagaatttaatccattgactatttttaccaataaagagtggttggtgttgtggttgttaattcaaagtttttcaaccaatgaaatagcaagcatattacaattaaaacccaatactataaagaaaacaatcgatagagtattaggtgtaagaaagctcgctctattccaaagggagctatttattgaggtcgcaaaatatttgggatgggatttgcttataccggttttcttttcaaaaaaatacactgtataa

SEQ ID NO: 283692 - DNA, 378 bp, Morganella morganii
atgagtgaaatctctgtaatgaataataacgcggctgttccggcagtcaaaaaagggcttctttcccgtgcactggcggccgttaacaacaaaaccgccaaaaccctgttcagatatgtggccgcaccgctggcgctctggctggctgcacgcggtgtcgctaatgcggaagatctgacggcggccggtaagcaggatgctgctgatactttcggcgaaaactccaccatgatgtattacttcatgattgccgaagttatcctggtattcatcctgtatctgagaaaccacaacccggccactttcctgctgatcccggtctttattgtggtcaccaaaatcatcttctctatcatctcatcccgctccggcggctga

SEQ ID NO: 283693 - DNA, 225 bp, Morganella morganii
atgaaaaataacacgactgtttcagtacggaaagaggttacagaagcagatatatcagtgatgttggcagatgttaatactaactggtgcgttgccggaacagcagggaaagggaaaaccgtctcagcggcatttttacagcagatgcatgatttgaaagcatcgccgctgcagattgtcatgatgaacagtaatgtcaggcttaacctgaaaaaaggggactga

SEQ ID NO: 283694 - DNA, 165 bp, Morganella morganii
atgaaaattttccctctcctgccgttgttaaccggcttcgttctctttctggtttcactgtgtgtgccgggtattccggctgaggtggtgatgtttgctttatcagtcggcggacttgcggtactggctggtaattatatccggtctgatattcaggctggttaa

SEQ ID NO: 283695 - DNA, 543 bp, Morganella morganii
atggcatgcctcggatgtgatataccgccggacagtctgcagtatcagattgatagtgcaatgaccacaggcggtgattttatgattgtcatcctggtgatttcactggcactgaatgttatttttgcggtgaatttttttatccggaaatcccggtacagtcatctgcgtaaaaagataaaagaaccgttaacccgtgtggatacggatagctattattatctgacggatgacattgcgttacaaaattttgcactgaaaaatgcgctgcaggtatataagagcttttttaattctgttgtctcttatgccggaacatatccggcctggaaagtcctctttgagtttcaggaagccgtccgcctgaataaaaacacggagcaggttaaccggtatctggataagctggtctctgaggtgcagtacgttctggatgaaactgacccggcggaggcagagcgctggcgggagagtgtccggcttatccgttatgatatcgctcacctgaaaagtaaaaaacggagtcaggattatgtccgttaa

SEQ ID NO: 283696 - DNA, 369 bp, Morganella morganii
atgataataacagggttggctgtcggttttattataattcatgtcggtatatggagatattatcattgtgaaaaaagagccggaaagataatcagtgccggtgtcattatagccggtgttttggttattgccggagtgtttgctgttgacgctgtaaactataaagcaaatccttatcaggagagtcctggtaagtattacagcgaagaatgcaagcctctggtgttatccggcgggaatgctgacggtgaaattaatattattaagtgcaacgaaactatactgcaggttgatgcggcagagtatgataatgccatcaggatatacaataaatccgtcagtaaccggcagggaggacgttctgactga

SEQ ID NO: 283697 - DNA, 354 bp, Morganella morganii
atggtgactgttggttatatcattataggcgtgagtgttatttggttaataattggtatgaaatataccgattccacagaagtagtaatgatttcatttgtggtggcatttgcgcttgggttattacttgttgattatgaaggactaaataaagtgattcaggcaagaaaacaggagcggataaagcaggggggttattattttaatcaatgtaaattactggaggtcaatgttgataatggttttttttcgtcagccaccaacaaacttaattgtgacggtacaatcgtcaatattaacaagtctgattacgacgatctggtcagtaaatataaagcgtctgctgaaaaataa

SEQ ID NO: 283698 - DNA, 417 bp, Morganella morganii
atgatgacacttttgaaaaagatcaccatactaaaattagcggttatcgttattatttgtatcattatggctaatgaaaatcacagaatgattaataggtttccatatttgttcaatcttgcaggggtacttatatcatcggcatatatctttgcatgcttcaaaatggtggatgataagtatatatctgttgagtattgtgtattagctaatatggtcgcggtttttattttgtttccgttggtgtattccttattttcagatttacttcccgcggaaagcagcctgtttttttcaatatgtatagctgatactgcgttttttaaatttaccatctataaatttgcgtatgataaagccagtggcagtccattagtgaaatggataatggctaatatgactgataaaaagaactaa

SEQ ID NO: 283699 - DNA, 219 bp, Morganella morganii
atggctgatgaaatcgatgtctctcaggctgagagtgattttttactgtctttgcggttaagtaaacgggcacagtatcagggggaaagtgctgaacattgtgttgagtgcggtgatgctattcccgttgcccgccgggcggcactgccgggggtacgttattgtgtgttctgttctgaatgccgggaggctgcaggcattcatggtttaacccgttaa

SEQ ID NO: 283700 - DNA, 264 bp, Morganella morganii
atgaataaattttttatcgcctctgtgattgctctttccgcattatctttatccggctgtgcaaactcagggaaccagtcacttaaaaaagaaacagaggaatcagtgaaaacaaaaataacagagggggtatcaacaaaaagcgatataaaaaaatattcggttctccggcagagaccacatttactgacggaggaaaagaaatatggaaatatgagtttgccgatgtatcctctgacgcggttaactttataccggtcgtga

SEQ ID NO: 283701 - DNA, 303 bp, Morganella morganii
atgcgccctcagcgccgtacctacagcaaatctttcaaggcccaggtcattcaggagtgttctgaacccggtgcctccatcgcaaacatcgccttgggctacagcctcaatgccaacctcgaccacaaatggattcggctgcctacccacaaaaccacggctatccagccagcgttcatcccgttgccttctcaaatgctcggcgtgggttcgcatgctcaagcgcgctgttgtaggggtcagtttggatatcgaaaattattgtacgttaaggtgattttttgtacctctgagctgtggtag

SEQ ID NO: 283702 - DNA, 570 bp, Morganella morganii
atggacatcgatttcaagaagttggctccctggaactggttcaagaacgagcagcaagagcagcagaccgcctcttccctgccggtgcagcgcaatgacctgccagcggcgagcgggccagtcagcccgatcctgcaactgcatcgggaaatcgaccggctgttcgatgacgcattccggggcttcggttttccggcgttgaacatgccgcagtggccatccgattggtcgggcatgctgaagccggccctggacatccaggaaaccgacaagcagtacaagattgccctggaagtgcccggtgtcgaggagaaggacatccagatcaccctcgacaacgacgtgctgatggtgcgtggcgagaagcgccaggaacaggagaagaaggaaggtggcttccaccgtgtggagcgctcctacggcagctttcagcgtgccttgaacctgcctgacgacgccaaccaggattcgatcaaggcatcgttcaagaacggggtgctcacggtcacgatcgacaagcgcgaggtcagtgcgccgaagcagggacgctcgatcccgatcaacggctga

SEQ ID NO: 283703 - DNA, 2850 bp, Morganella morganii
atggccagaaaacaatgccaggtctgcggccaacccgccaccgtgcgggtggaagccaatctcaacggtcgtcacagcaccatgctgttgtgcgacgaccattaccggcaattagtgcgccagcaaaagcgcaccgtttcgccgctggaagccttgttcggttcgcgcagcggcctgttcgaggacttcctcggcagtgacttcttccgcatcggcgacgacgcgacgccagttgccgccgataccgatgacgtggtcgatgcctcgtttggcgagcccgccgccgcaggttcgggtgcaccgcgccgtcgcggcagtgggctggccagccgcatcagcgaacagtcggaagccttgttgcaggaggccgccaaacacgctgccgaatttggccgctccgaggtggataccgaacatctgctgctggcgctggccgacagcgacgtggtcaagaccatcctgggtcagttcaagatcaaggtcgatgacctcaagcggcagatcgagtctgaggccaagcgcggggacaagcccttcgagggcgagatcggcgtgtcgccgcgcgtgaaggatgcgctcagccgcgccttcgtggcctccaatgaactcggccattcttatgtcggtccagagcatttcctgatcggtctggccgaggaaggcgaagggctggccgccaacctgctgcgccgctacggcctgacgccgcaggcgctgcgccaacaggtcagcaaggtggtcggcaagggcgccgaggatggacgcgcagagacgccgaccaacacgccagaactcgacaagtactcgcgcgacctgaccaagatggcgcgcgacggcaagctcgacccggtgatcggccgcgcgcaggagatcgaaaccaccatcgaggtgctggcccggcgcaagaagaacaacccggtgctgatcggcgagccgggtgtgggcaagaccgccatcgtcgaagggctggcgcagcgcatggtggcgggtgaagtgcccgagaccttgcgcgacaagcgcctggtggaactcaacatcaacgccatggtggccggcgccaaatatcgcggcgagttcgaggagcgcgtgcagaaggtgctgaaggaggtgaccgagcaccagggcgagctgattttgttcatcgacgaggtgcacaccatcgtcggtgccggccagggcggtggcgaaggcgggctggacgtggccaacgtgttcaaaccgatgatggcgcgcggtgaactcaacctaatcggcgccacgacgctgaacgagtaccagaaatacatcgagaaggatgccgcactggagcggcgcttccagccggtgacagtgcccgagccgacggtggcccaggccatcatgattctgcgcggcctgcgcgacaccttcgaggcgcaccacaaggtcagcatctccgaggacgcgatcatcgcggcggccgagttgtccgaccgctacatcacggcgcgcttcctgccggacaaggcgatcgacctgctcgaccaggcggccgcgcgcgtcaagctgtcggccacggcccggccggtggccgtgcaggagctggagtccgaactgcaccagctgcggcgtgaacaggattacgtggccgcgcgcaagcagtacgaccaggccgccgagctcggcaagcgcatcgaagccaaggaggccgagctcaagaagctcgtcgagaactgggagcgggagcgggcctccggcagtgccgaggtcaaggcggaacacgtggcgcagatcgtctcgcgcctgaccggcatcccggtcaacgagttgacggtggaagagcgcgaaaagctgctgcacttggaacaacggctgcacgagcgcctggtgggacaagacgaggcggtccgtgccgtggccgatgccgtgcggctgtcccgcgccggcctgcgcgaaggcagcaaaccggtggctaccttcctgtttctgggcccgactggggtgggcaagaccgagctcgccaaggcattggccgaatcgatctacggcgatgagcacgccctgttgcgcatcgacatgtcggaatatggcgaacgccataccgtggcgcggctggtgggcgcgcctccgggctatgtcggttacgacgaaggcggtcagctcaccgagaaggtgcggcgcaagccctacagcgtgctgctgctcgacgagatcgagaaggcacaccctgacgtctacaacatcctgctgcaagtgttcgacgacggtcgcctcaccgacggcaagggccgggtggtggatttcaccaacaccatcatcatcgccacgtccaacctgggttcggacatcatccagcgacggctgaaggcgcgtggggcggccgacgaggagtacgaaaagaccaaggccgaggtcatggacgtgctgcgcggccacttccggcccgagttcctcaaccgcatcgacgagatcatcgtcttccatgcgctgggcaaggaggagatccgccacatcgtcggcctgcagctcgatcgcgtggcgcgcagcgccgccagccagggcgtgacgctcactttcgatcagacgctgatcgaccatttcgcggaagaaggctacaaacccgagttcggtgcgcgtgaactcaagcgcctgatccgcagcgagctggaaactgcgctggcgcgcgagatgctcggtggcagcatcggcaagggcgatcacgccagcgcacgctgggacgacaaggccgaacgcgtggtgttcgaacgcaaagagctaccgcagaccccggccgagccggagcagccggatgtcgcgaaggcgaccgagacgccgcacggcgacgctggcaaaggctcgcgcaagaagaagtcggcgagcgacgcatcgtga

SEQ ID NO: 283704 - DNA, 141 bp, Morganella morganii
atgggcgtgttcgagcacgcctaccggattctcgacatcaaccgcgcggtgctggagcgctgtgcgcgcgagctgctggcgcgggaaacgctcgacgaaagcgatatccgtcaattgactcaaggacttgttcggaactga

SEQ ID NO: 283705 - DNA, 459 bp, Morganella morganii
atgtctgcattgactccgtgggaccccttccgggaactggatgaattgcaaaaccgcctggcgacgatgttcggacgaataccccagcgacagggcgcccgtaccggcaacgaagccatgaccacggcggactgggcaccaatggcggacatcagcgaggatgagaacgcattcctcctcaagctggatctgccggaggtccccaaggatgccgtgcgcgtcagcgcggaaaacggtgtgctcaccatcagcggcgagcgcaaactggaaaaagaggagcagggcaagaagttccaccgcatcgaacgtgcgtatggccgctttgtgcgcagctttgtcttgcctgacaacgttgatccgaccaaggtgacggcttccatgaaagacggcgtgctggaagtgcggcttgtcaaggccgagcaagccaaaccgaaacagattgaaatctcagtcaactaa

SEQ ID NO: 283706 - DNA, 915 bp, Morganella morganii
atgaatatcaaacagccacaatacaccttctccgcacttgccctggcggtcgtcgtcggactgagcggaccggctctggcccaatcggcggcaggttctagcccaggtgctgcagcaccctctgccgcatccaaggcggcacagccacaggtagatgacaaggccgcccgggaagccgataaaaagcgtgccgagctcactcaagacgccatcacggcgctcaccaagacccaggaggctttgaccctccttgatgcaaagaagaccaaggaggcgcttgctgcgctggaactggccagcggaaagctggaactggtattggcacgcgacgccaaacttgctttagcgccggtcgatgtacgcgtcatcacccacgatatccacgccaacgtggaatcggtaaagaaagcggtcaagttgtctcgggagttgttgggtgatggcgaggtgcaaaaggcccggcccatcgttgccaatctggccagcgaaatcgtaatccaaaccgacaaccttccgatggcaacgtacccgtcagcgatcaagtcggccgcacggctcatcgacagcggcgagatcgacaacgccaaagcggaactcgtccgagcactgaacacgctggtggtgacctcggtcgcctttcctctgcccgtgctacgggccgaagccgcgatggcaaaagctgaaaagctggccgagaccgacaggcgcgatgccaagcagaacgaggagctcagcaccttgctgtcgtccgtgcgcacggagatcgagatggcgcagatcctgggttatggcaagaaggcggacttcaaacccatcttcgatcaggtgaagtccattgagcaaaagtcggctggtggcaaaagcggcaagggatggttcgacgagttgaagacgcgcatccaaaagctgttttga

SEQ ID NO: 283707 - DNA, 888 bp, Morganella morganii
atgaatgagcaaacaccgaatcccaatgcgacgaacgaaggaataaacgaacaggccgcggtaagcagccttcctgtcagtccagagtccaagcctgaagtcgtcacggaggtacagcctgaggttcagaaagaaacggactcacaggcggcagacaaacgtaaacaagtcctcgatgaggcagtctcggccttgtcgctgaccaaatcagcgctggccgcacttgacggcaaggacactgcacgcgcattggcaacgctggccgaagtgacgggaaagctggagctgatcgtcgcgcgcgaacccacgctcgccctggccggcgttgatgtgcgcaccatcgtgcacgacttgttcgccaacacggaaaccattgaggcgatgaccgacgaggcgctggatgccctcaaacatggcgaggtgcaacaggctcgccacgtgctggctttgctggccagtgaaatcgtgatcacggtcaccaacatccctttggcgtcctatcccgcagccgtgaaggcagtcgtgccgctgatcgatcagggcaagatcgaagaagccaaagccgcgctgcagtcagcgctcagcacgctggtcgaggagcgcagcgtgcttccgctgcccgtcctgcgtgcgaagctgctcctgaagcgcgccgagcccctggtagaagatggtcagcgcagcgaagcatccaatgagcgcctggagacattgttgaacgaagcccggcagcagttggaaatggcagaactgctgggctatggaaaaaggaaggactttgagcccctgtacgctgaactcaagaaaatcaaggaaaagacgggagggggaggctgcggaaaaggctggctcgatgaagtcaaggcaaaactgtccaagttgttctga

SEQ ID NO: 283708 - DNA, 612 bp, Morganella morganii; identical to SEQ ID NO: 121256

SEQ ID NO: 283709 - DNA, 1146 bp, Morganella morganii
atgcagatacaatatagctatcgagctatcgacaaagagtttcatgaaccttggcagagagctttgggaaatgtgatcgagcacgccctcaagccattgctcgacaaacacactaaagattcagcgcgacttcaaatcgtccttgatcgcgataagatcaagcggcaatttctggccagtggctatatgcacctgcccggcaaaaagattgtcagcgttactgcatcacataacgagctgacgcccctcgcgcagatgctcgcacagtcgttgttccgtcaggccaagaagcattttgaccgactgcatgctcaggatcaaatcaagcgcaaagcacgacgcgagcgcttgcgcgagctcaaggtgcagattgccgcaaaacccgcatcagccgcccatgaggccgaggtgccccgaatgcctctactgtcgaaacttgaggctgtcgcaaggcgtgagctggcttatctgcgggccgtcggcgatttaccgcgcgattatccgacgctgcgcgacgtggtggatgaagcgattgtccgagctaaggtggaatggcaatccgtgccgggggaaaaagaggcttacaccggtcttttgaagcatctgttcgccgtcctggataacgaagtggcaagcagccggcaatttggcgaatccgtttctctggacgcgccggtcgaaccggatgcccaagacgtggccgaggccatggtggaagaggaaatcttcgaattttatcagcacgatgacacactcaagctggccgatattttcgctggcagtcagcatcccgatgtcgcaacgatcgcggaacaggaggagctgattgatcggtcgagcgagttcgcttttgcatttgacctgctgaaggacatgccgcgtttgtggcggcgcatttttctgcttatccgagtggacgggctgaatgccagcagcgtctctgaaatcctgctgattcctagtaaggaagatgctgtccgaaggtggctcatgcaggccgaagcattcatcgctgctcatctggaagaggccggagtaagcaaaaacgggaacgattggctccaaagcgttgattggtcggcattgtctgtgacccgaaacgaggcagcctcactgtggtccaaggaggcgaaccatgaagaatga

SEQ ID NO: 283710 - DNA, 441 bp, Morganella morganii
atgaagaatgatcttcaccttgtctgcccgcattgccagtccatcaaccgcgtaccgactgcgaagctatcggaacatcccaactgtggccgctgccagcagcccttgttcacgggcgagcccatcgagttgaccacggcgacgttctcgcgccacgtggagcgcagcgatctgccgctgctggtcgatttctgggcgccatggtgcgggccgtgcaagatgatggcgccacagttccagcaagcggcgcaccagctcgaaccgaggatccggctggcgaaggtgaataccgaggctgagccccacctggccacgcagttcggtatccgcagcatcccgacgctcgccctgttccagggtgggcgggagatcgcccgtcaggccggcgtgatgggcgcgcaggacatcgtgcgctggacgtcgacgcaagtgggacgctga

SEQ ID NO: 283711 - DNA, 1716 bp, Morganella morganii
atgcagggcttgctcggcactacactaatcctgctggcggcttgcagcctggcggcgatggcgacggcggcgttcagagtgcccgccttgctggggtatctctctgtcggcgttgtactgggcccctcagtcatcggcgtgatcgcgccgggggagacgctgagctttctgtccgagctgggcgtggcgctgctgttgttcatggtcggactggaattctccctcggagacttctggctcgcccgcaggacggtgctgatggcgggcgctctgcagatgatcgccgtggccccgccgctgatcctgctattgatgtggctggggcagcccggccagagcgccgcgctgctcggcactgcggcggccatgtcgtccacggcgctggtcagccgacaactggccgaccaaggcgagctcaccacccgccacggacgcagtgccatcgccgtgctggtctttcaggacctggccagcgtgcccctgctggccttgctggcgatctgggcgcgcggcgagtcgccgaagatcgagcatgtgctgctcgaagtattcggtgtgctgctgctgttcgcggcagcggccctcgcctcgcgccgtctgttgcatggcctgctgggctgggtggcgcggcggggccacgaggaatcgttcatgctcgtctccttgtgcgtggtggtggctgccgccgccgctgcgcacgcggtcggcgtatccgccgccctgggggccttcctcgccgggatggtgctgggcgagagcgacttccggcaccacatggaaagccacctcaggccgtttcgcgatgtgttgtcgggcgtgttcttcgtgaccatcggcctgcaactggacgcagcacagattctttcggcaccgctggcggtgctggcgtggctggtggtgctggtaccggtcaagatcctgctcaatacgctggccttgcgggcgacgcgcctgtccgccctcgatgcctggcgcacgggcatagcgttggggcacggcggcgagttcgccctgctgttgttgggcacggtcttgcagcagcatctgatccccgcgaccgtcgtccaacccatgctggtcgcgctggtgctcagcatggccctggcaccgctactgatccgccatcacgatgtacttgcccggttcttgagccgcaccggcggcgtcattcagccaccccaggctgaagaagtcgagatcgccgcgcagacgacgcgatatcgagaccatgtcatcgtttgcggcgcgggcgagcttggcctgacagtcagcgagattcttcgccacgccggcgtggcgcatctgctgctggaggcggatgcgcagaaggtcgaggccgcgcgtgccgccggcgcgccggtgttccatggcgatgccagtcggcccgataccttgctggctgccggcttgacgcatgcgcacttggtggtgctgacgttcgcccatgcccagcaagcgttgcgcatcgcccaggcgattgccgagcgccgtccggcgctgaccttgtgggtgtcatgcagaagtacgaccgcggccgatgcatttcgcgccatgcccaacgtgcgcgtgtatcagcaatcctttgccgcagctattgggctggcggaacaggtgatgtcgacgcttggcatgtcgaccgagctgattgaaggacacatcagcgcaatgcgccgccgtctcgacagcagccgttttccagggagttcatcgtcatga

SEQ ID NO: 283712 - DNA, 393 bp, Morganella morganii
atgaaatcaacacgccttaacccatttcaggtcttacgtgaccaattggccatcatgagtttttacgagcgcttcgagcaggtcgtcgcgctcgtgctgtcggcggtgatcgccgtcatcatcgtggtgtcgctgttccagctcatctccatcgtcttcacgctgctggttctagatgccttcaatcccctggaccacgaggtattccagagcgtgttcggcatgatcatgacgctcttgatcgcgatggagttcaagcattccatcgtgcgcgtggcgctgcgtcgggacagcatcatccaggtcaagacggtggtcctgatcgcgctgatcggggtcgtctcagaaaacggaaaaaatcgtacgctaagaccggtttggctagccgggtag

SEQ ID NO: 283713 - DNA, 960 bp, Morganella morganii
atgagcaccggtcacacccatgccctacccagcgagcgcaatgaaaaatcgctctggatcgccctggcgctgaccgggagcttcttgctggccgaagtcgccgcaggcatcgttttcaacagcctggccctgctctcagatgcggcgcacatgttcacggatgcagcggcgctggccatcgccttggcggctgtacgggtggcgagacggccagccgatgccaagcgcacctatggctactaccgcttcgaaatccttgcggccgcattcaacgccctgttgctcttcggcgtcgctggctacatcctgtatgagggctggcagcgtttgcgcgagccagcgcaggttcagtccagcgggatgctggtggtagcagtgctgggtctgatcgtcaacctcatcagcatgcgtatgcttcagggcggcaaggacaagagcctcaacgtcaaaggcgcttatctggaggtctggagcgacatgcttggctccatcggcgtgatcggagctgcgctggtcatccgattcaccggctgggtgtgggtagatgcggtcgtcgccgtggcaattgggctttgggtgctgccacgaacttggctgctactcaaggaaagcctgaatgtcttgctggagggagtcccagacggcattgacatgggagccttgatggcatctgttcaggccgtgccaggcgtgacagggctgcatgacttgcacgtatgggcgctcacgagcggcaaggtcagcatgaccgctcatatcgtgtatgcgccggaaatagggcccgacgagttgctcaaaaccctcaagttgttgctggctgaccgattcagcatcttccatacgacgctgcaactggagattgttgcctgtgagcacagcgtcgatgggtgcaacttcgtggatcatcgccacaaagaaccgagttctcaaccagaccaagccgcagcccggcaggcgtga

SEQ ID NO: 283714 - DNA, 834 bp, Morganella morganii
gtggtggttacagcggtggtgggcatcacggtggtgggcatcacggtggtggcggtgggtacggaagcggcgggcctccagcgggcgggtggggtaatggcggccttgcttgccccaactgcaaggcatctaacgcgccaggcgctcgcttctgccagcagtgcgggacttcgttggttccttcggcttgcgcgcaatgtggaaccacactgcaaccgggtgcgaagttttgcgctcagtgcggcaaggcagcggtttgaccgtgccatgctggttggctatgcgcgcgtctcgacgcaggatcagaacctggagctacagcgggaggccttgacccaggccgggtgccaaaagctctttgaggacaaattaagcggcacgagagccgagcgccccggcttggccaaggcgcttgaaatgctacgcaagggagacacgctggtcgtctggaagctggatcgcctgggccgcagcgtcaagcaattggtcgatctggtcagcgagttgcacaagcagagcatccagttcaagagtctcaccgacgccatcgacaccggcacgccgtcgggacggttcttctttcacgtcatggccagcctcgccgaaatggagcgcgagctgacggtggagcggacccgagcaggattggcggtcgcccggctgtcaggccgcaagggagggcgcaaaccgaagatgaccaaaagcaagattgaatcggccaagaagctgctcgccagcgggatcgctcccaaggacgtggccaagaacctcggggtctcaatcccgacgttgtatcgctgggtgccggcttccggtcacgctgaacaaaaatga

SEQ ID NO: 283715 - DNA, 2970 bp, Morganella morganii
atgccccgccgttcaatcctctccgccgcagagcgcgacagtctcttggcgttgcccgatacccaagacgaactcatccggctctacacgttcagcgaacccgacctgtcactaatccgccagcggcgcggtgacgccaaccgcctgggtgtcgcggtgcaattatgcttattgcgctttcccggtcagggcctgctgcccgacgctgcggtgccgatgcccctgctgcaatggatcggacggcaactgcgcatcgatccatcgtgctggccacagtatgcagagagggaagaaacccggcgcgagcatctgcttgagctgcgtgcatatttgggcatggagccgttcggcctggcgcactatcggcaggctgtccatgccgcgaccgagttggccttgcaaaccgacaagggcatcatgctggccaacagtgttctcgacgacctgcggcaccgacacgtcatcttgccgacgctggatgttgtcgagcgcgtctgtgccgaggcgatcacccgcgccaaccggcaaatctacgaaaccttgtccgaaccgctatcggacgcgcatcgtcgccgccttgacgatctgctcaaacgccgggacaacggcaaaacgacctggctggcctggctgcgccagtcacccgtcaagcccaattcgcggcacatgctcgaacacatcgaacgcctcaaggcatggcaggcgctcgacctgccttccggcgtcgagcggtcggtgcaccagaatcgcctgctcaagatcgcccgcgagggtggccagatgacacccgccgacctggccaagttcgaggcgcagcggcgctacgccaccctggtcgcgctcgccatcgagggtatggccaccgtcaccgatgaaatcatcgacctgcatgatcgaatcctgggcaagctgttcaacgccgccaagaacaagcatcagcagcagttccaggcatccggcaaggcgatcaacgccaaggtgcggctgtttgggcgcatcggtcaggcgctgatcgaggccaagcaagcgggccgcgatccgttcgccgccatcgagggcgtactatcctgggatgctttcgccgaaaatgtcaccgaagcgcagaagctcgcgcagcccgaggacttcgatttcctgcaccgcatcggcgagagctacgccacgttacgccggtacgcgccggaattcctcgccgtgctcaagctgcgggctgcgcccgctgccaaggatgtgctggacgccatcgaggtgctgcgcggcatgaacagcgacaacgcacgcaaggtgcctgccgatgcgccgaccgacttcatcaagccgcgctggcagaagctggtgatgaccgatgccggcatcgaccggcgctactacgagttgtgcgcactgtcggaactgaagaacgcgctgcgctccggcgacatctgggtgcaaggctcacgccagttcaaggatttcgaggactacctggtaccgcctgtgaaattcgccagcctcaagctggccagcgaactgccgctggctgtggtcaccaactgcgaccagtacctgcatgaccggctgacgctgctagaaacacagcttgcgaccgtcaaccgcatggcggcggccaacgacctgccggacgccatcatcaccgagtctggcctgaagatcacgcctctggatgcggcggtgcctgacaccgcgcaggcgctgatcgaccagaccgcgatgatcctgccgcacatcaagatcaccgaactgcttatggaagtggatgaatggacgggcttcacccgccactttacgcacctgaaatcgggcgacctggccaaggacaagaacctgctgctgaccaccatactggccgacgcgatcaatctcggcctgaccaagatggccgagtcctgtcccggcacaacgtatgccaagctcgcctggctacaagcctggcatacccgcgatgaaacctattcgacggcgctggccgaattggtgaacgcgcagttccggcatcccttcgccgagcattggggtgacggcaccacgtcatcgtcggacggccagaacttccgcaccggcagcaaggccgagagcaccgggcacatcaacccgaaatatggcagcagcccagggcggacgttttacacgcacatctccgaccagtacgcgccgttccacaccaaggtcgtgaacgtcggcgtgcgcgactcgacctacgtgctcgacggcctgctgtaccacgagtccgacctgcgcatcgaggagcactacaccgacacggcgggcttcaccgatcatgtctttgccctcatgcatctgctgggcttccgcttcgcgccgcgcatccgcgccctgggcgacaccaagctgttcatccctaagggtgaagccagttacgacgcactcagaccgacgattagcagcgacaagttgaacatcaaggctattcgtgcccattgggatgaaatcctgcgcctggctacctcgatcaaacagggcacggtgacggcctcgctgatgttgcgcaagctcggcagctacccgcgccagaacggcctggccgttgcgctgcgcgagctggggcgcatcgagcgcacgctgttcatcttggactggctgcaaagcgtggaactacgccgtcgtgtgcatgccggattgaacaagggcgaagcccgcaatgcgctggccagggcggtgttcttcaaccggctgggcgaaatccgcgaccgcagtttcgagcagcagcgctaccgggccagtggcctcaacctggtgacggcggccatcgtgctgtggaacacggtctacctggagcgcgccgcgaatgctttgcgcggccacggccatggtgtcgatgaagggctgttgcagtacctgtcgccgctgggttgggagcatatcaacctgaccggcgattacctctggcgcagtagctccaaagtaggcgtggggaaattccgaccgctacgtccgctctctgggtcttag

SEQ ID NO: 283716 - DNA, 2070 bp, Morganella morganii
atgcccgttgattttctgaccaatgagcaggagcagaattacggacgctatgcggctgaacccaacgacgtccagctggaccgttattttcatcttgatgagcgggatcttgctttcatcaatcagcggcgcgggaagcataaccggctgggtatagcgcttcagctcaccacagcccgtttcctgggaacctttctgacggatttaacccaggttctgccgagcattcagcagtttatcgctgcacagcttaatatccgacgtccggaagtcctctcccgctatgcagaacgggacaccaccctcagagagcataccgcgttaattaaggaatattacggctatcatgaatttggcgactttccgtggtctttccgcctgaaacgtctgctttacacccgggcatggctcagtaatgagcgtcccggtctgatgtttgattttgccaccgcgtggctgcttcagaataaggtactgctgcccggagcaaccacacttgtacgtctcgtcagtgaaattcgcgaacgggcaaatcagcggctgtggaaaaaactggccgcactgccggacagctggcagacagcccgtgtgacggaacttctggacattccggaaggtcagcgggtatcgccactggaactgttgaaaaaaggcccggttaccgtcagcggacctgcgtttaccgaggcactggagcgttatacccggctgcgaaaccttgagttttcccgactgaattttaccggtctgcccgccatacagctgcgcaacctggcgcgttacgcaggcatggcgtcagtaaaatatataacgcgaatgccagagcagagaaagcttgccatactcactgcattcgttaaagcgcaggaaataacagcgctggatgaggccgttgacgtgctcgatatgctgatccaagacattacccgtgaagcgaagaaaaccgggcagaaaaaacggctcaggacgctgaaggatcttgatcgggcagcgctgttactggcgcgggcatgttcgctgttgctggatgataaggccgataatccagacctgaggcgggccatcttcagctgcgtaccgaagaacagactagctgaatccgtcagcaaggttaatgagcttgcccgccctcagaacaataatttccatgacgaaatggtagagcagtatggccgggttaagcgtttccttccggcgttattgcgggacctgcattttcgcgctgcaccagcaggagaacatacgctggccgcgattcattacctgaccgaactgaacggttcgaaaaagcgtatcctcgatgatgcgcctgaacatatcatcaccggcccctggaaacgtctcgtatacgatgcggagggccggattcaacgcgccggttactcattgtgtctgctggagcgccttcaggatgcactgcgccgccgagacatctggctcgaaaacagcgatcgctggggagatccccgcgagaagctcttgaagggtgaagagtggcaggctcagcgcatccccgtctgtcgggcgctgggacatcccactgatgggcataaaggcgtgaagcaactggctgttcagctggatgagacctggaaagcagtcgcatcccgttttgaagggaatgcagaagtccatgtctgcaatgacggtaaatatccttccctgaccattagcagtctggaaaaactggaggagccgccgtcgttgcttggtctcaacaggcgggtcagacagttgcttcctccggttgatttgacagaattactgcttgaaatagacgccagaacaggattcacacgggaatttatgcacgtcagtgagtccggagcacgggcgcaggatctgcacatcagcctgtgtgcggtcctgatggctgaagcctgcaatatcggactggaaccactgataaagcacaatataccggcactgacccgccaccggctgagctgggtgaaacagaattatctccgagcagaaacactcatcagtgccaacgcccgcttggttgattttggggtcacctcagaaaacggaaaaaatcgtacgctaagacccagagagcggacgtag

SEQ ID NO: 283717 - DNA, 567 bp, Morganella morganii
atgcgactttttggttacgcacgggtatcaaccagtcagcagtccctagatattcaagttggggcacttaagaacgcaggggtaaaagccaatcgtatttttaccgacaaggcatctggcagttctgctgacagggtgggactggagctgctgcgtatgaaagtagaggaaggcgacgtcattcaggtgaagaagctagatcgtcttggccgtgacactgccgatatgattcaactaataaaagaattcgatgccttgggtgtggcagtccgattcattgatgatgggatcagtaccgatggtgaaatggggaagatgatcgtcaccattctatcagcagtggcacaagcagaacgtactcgcatccttgaacgaacaaatgaaggaagactggaggccaagtctaaaggaattaaatttggcagaaaacggaagatagacagaaataaaataaaagttatgcatgataaaggaattggagcaactgaaatagctaagcatatgggtattgcgcgttcaaccgtatataaaattatcaattcagaacgctcactaatcaataattga

SEQ ID NO: 283718 - DNA, 708 bp, Morganella morganii
gtgagaacctttgttataatttggacaatagctttcattgcggtaattgctgtaatgtgtacagtggatctttcatcatatgtaccttcaatttacaccgtatttaataaaaacaaaccattagtaactggtattatatatatactattaatgtctatttttatatggctaattgtagcattgtatcttttaaaaaaatactcatttaaagtagagaaactaagtttaggtggtgttaatgttctgttcaatgaaagtggtacattatatcgcaaaagtataaaaaatcacttggattcaaaaagagctatctttaagttgaagaaaaatgtggacgcattcgatgaagtcatctcatcatattatcagacatatcaatttattagagatgaaatgaaaatattgaaccccaaaaaagataatgaattatataatattagcaatgatatgctaatggtgttgaataagtttttaactaaaaatcaaaataattataaaagatggtataaatatatatcagataaggatgaagttattgacattataactaatacaccattaaaagttcatctaacgcctataaataaaatacaaaaacaatactataactatagtaaaatatgtaacgattttaaagtagtaaatgattttttctcatcacgggttcaacaaacatttaacgtgaacaccaccaaatgggattggtaa

SEQ ID NO: 283719 - DNA, 615 bp, Morganella morganii
gtgactaagcacaaagttttcatcagttaccaccatgctaatgaccaatggtacaaaaacgaacttgaaaaaatgaatgatgtttttgatatttttgtgaatcgctcggtatcacttggagacattgatgatgaagaagaacctcaaaagatcagagaaataataagggatgaatatttacgtgatacatccgttcttattttacttgttgggactgagactaaaaacagaaagcatgttgattgggaattatattcatccatgagggatagccccagaaacggcaaatcaggtgtttttgttataaatcttccttcaacaggaacaaactacattagggccagtcatggtgaaaatgaaaaaaatgaatttcaccctaatataacggagtggataacaatcaatgacagaacaacatataaagaaagatatccatacatgcctgaaaggattatagataacttgatgagtgaaaagtcatatatatcaatagttaactgggatcagatacacaacaatccagaaaaccttagaaaaatgattgagttaacatttcaagataaagataagtgcgaatacgttttttctaccccaatgagaatgcgtaatggctag

SEQ ID NO: 283720 - DNA, 768 bp, Morganella morganii
atgcaattcatccataatgatctaggtcaaagaaaaagaggggagattgttgaaatcaccctcaccagtggtgcaaatgttagactaatggatagttctaacttcagtagttataagaatggccgacgacattcctacattggtgggttagcaaagcgctcccccataaggttacagatcccttcatcaggccattggcatattgctgtagatatgcagggattaagggggagtactagggtttctgttcgcgttcttccaggggttcttcctgaaattcaggataggccgttaagcgaagttcctagtctggtaagagataacagaccaccgtcaacagcacagagcgacgagatacatgacgtatttatttcgcatgcctcagaggataaagatgattttgttcgctctctggcaaactcattaatcagtcacggccttaacgtatggtatgacgaaatgacgttaagaattggtgacagcctgagacaaaaaatagacaaaggtttagcaaacagtcgtgttgggttagtagttttgtctccggcgtttataagcaaaggttggacaaattatgaacttgatggaatcgtcactcgtgctatttctggtgagcaaatattgcttcccatatggcataatattacaaaacaagaagttatcgattttagcccatcattagcagacaaagttgctcgtagtactgcaactcatacaatcgatgaaattgctcatgagatagccgagctattgcattctcgttgttaa

SEQ ID NO: 283721 - DNA, 234 bp, Morganella morganii
atgccacaggttcccctttttgattttccggtgtcctgtggttttcccagccttgcggaagatttctctgaacggcgtatttcactggataccgaattagtccgctaccctgaaagtacctattttctccgtgcgcaggggtattcaatgaaagatgctgggatttttgacggggatattgtgatcgctgaactcgacggggaaccccttaatgtctggagttgtgaggcgtaa

SEQ ID NO: 283722 - DNA, 1041 bp, Morganella morganii
atgcttaactacagagtaataaataaagaaagcaatgtaattatgtataacgacataaccacagaacaaatgtcaattataaacaaacacaatataagaaatgaaagtaaaaaaatagaaaatggtaaaataaaaataaaaaatattgatacagaccatttttttatcgacatgataacagatgaaaaagatttaattaaaagcaagaaactgatggatagagaagccaatctaattattttctctatacaaagaatcagtgactcctatgatttagcaaaaaaagaaataaatgcccatgcaagtcgtttaattcataacctaacaactataaatgggcaaaacttacagtatgtatacagcgtgatacctcaatccatatttgataaaaaaaatgaaaacacaacatcagattggttagaaataatgaatgatgaagtttatgaaaaagtaggtaaagcaacaaccagcttaatgcgaatagcaaaaaacagcatgcaatttaagaatgaaattaatatttacaatgcactgctaaataacaacttcaaattgagacttataaatcataatatgcacaaagttttaatgaatgctttttatgtgtttttcccagactttacagatgcatctataaaagtaaatatacacaaaacaaacatcagtgcaagactggattacgacacgttccaagttgccatatatcatataatagaaaatgcggttaaatatacaaaacctcatagcgaaatagacgtctccgtctataaagaacagggtgaaataaaaatcaaatttagcatgattagtttaaaaataaataaagatgaagagagcctgattttcaatgaaggttactctggagtttccgcaataaaatttgataagaacggtagtgggataggcatgccaaggacaaaacaattactaaaatacagcagtgcagaaatatctcttttagcgaaaagagataaagacagtgaacatttaattggtttcgattaccatagaaatgaattcatcataacatttctaaattaa

SEQ ID NO: 283723 - DNA, 654 bp, Morganella morganii
atggatttgagtagctttagttttatttacaatgatcagtatttaaattgggctttttctgggataggtttaactgttatggctggtttattacgttgggtatataaaaaatttttccataattcagatgataatatgggggctggaaataacatgccggataataagcaaattataaccataaataacaatatgggtcaacatggatctgactcaactaatggtgagaaaatggaattgaaagaagaaaaagacacaattgaacaagcacaaaaaagaactcatatactatttatagacgataaaaaattcctagtaactgatatattggtatcatcaggatggtctaacaccagagcaataaaagatgtaacaagcatgaaccagaaggaaataagggattccgatattatatttgtagatatacaaggtgttgggattaaaatgaaatttgctgaagaaggtttgggattggcaaaagcattaaaagaacggtatccagataaaaaaataatagtatactctgctgagcagacaggtaatagattccacgaaacattaaaattagttgatgactttttacctaaagacgcagacccttatttatttgaagagataatcgaacgtttttcattgaaaaatcaatgggcttga

SEQ ID NO: 283724 - DNA, 357 bp, Morganella morganii
atgactacatttaaaaaaccagaaaaatatttgggtgattcagattatccggcagcgattgatcacaacacagctatgattgaagaacttcgtgcagatccggaatacgctaatgcctatattgctaatgcgcttgaggaaattaatgaacccggtggtcttggaggatttcttgtcgctttacgtcaggttattgatgccagaggggggatttccgaagctgcaaaaaaatcaggacttgcgcggcagagtatctaccgcgcattatcggaaaagggaaatccgactatcacaacactagcccaactggcagcagtggccggattacaattaacactaagtaaatctaatcattga

SEQ ID NO: 283725 - DNA, 594 bp, Morganella morganii
atgaaaatattaataaatatattaatatctctactgtttggactttttaatagcgcttactctaaatctctattcatcggagacagcctgactctgagcctggcaaaaggagcgaaagaacaggacgttctggaatattattacctggacagatccggactgatgaacggggcattttatgactggctggcgttcgtacaatggatgccggtcagttcccctgatttaatcattgtatcgctgggtgctaatgatggtatggctgcctctgccggtcaccgttacagccaaaaaatcatacggtttatttccgttttaaaaacacgttacccggcggccagtattatctggattttacctccggccatgaaaaacacacagacagaaaacgcactggtgaatacccgccggattatttcagaaacatccgcaatggccggttacaccgtatttgatccgcgtccgcttaccggcagggtatggacatattcagtcaacgggattgttctgcgtactgctgacggtatccactacacgccggaagccggtaaactgatttcagaacagatttaccatactgtccggcaaaactga

SEQ ID NO: 283726 - DNA, 225 bp, Morganella morganii
atgaaaaataaattattaatgaaaggtggtcaaaacagacaactttcttcagcaattgacgccataaaaaaaccagctttaccaactaaaaaattacaaatgaacattcctgaagagctacatcatcgctttaaattttcttgccttaaaaaaaatattgatatgacagatgttgtcatttcactagtagttcaatggctggctgaaaatgaagacaaactatga

SEQ ID NO: 283727 - DNA, 630 bp, Morganella morganii
atgagcacaataatttcatttcttaacggaaagggtggtgtaggtaaaaccacaactaccattaatgtagccaccgcgctgggtaaaatggggcataacatagttgtcgtggatacagacccacaacaaagcataggaaattggtttgttcctgaaaaatgtaactttgacgtagtatccgccagttcacaaaaagaagtctattcgattaaaaaaagtctgaaatcctatgattacataatcatagacggtgcggcagctatttccgagatatcatcagcagctgtaatggtcagtgacttagtaataattcctgttacagcctctcctttagattttgccgctagtactgcaatactggccgtaatagaagctcgtaacgatttacaacccgtcaaagccaggtttttagtaacgaagaaagttcatgccgcaacaatggttcaggttttgaaggattcgatccaagaaactggtttcaaagcactcaaaactggtacaacccaaaggcagtcatacataaaaaccatgcttgacggcggaacagtatttgaaacttcagatagtcaggcaaaaggggaaattgataatatcgtgcgcgaaattttggagattttaaatgaaaaataa

SEQ ID NO: 283728 - DNA, 444 bp, Morganella morganii
ttgttagatgaaattttgacggaattggttgaacaggggctggcagaacgtgccgaactcactgtttcagttaaaaagttagagtacagttctcgccaacacgattcactctataacgcatggcttgatgagcaggatcgccagcaagttatgaccacgttgctggaagagggctaccttgggccagcctggtcagggaaaatctcatggttagcaggagataatcagaacaccgatcacggacgtgaactgaccgtgaccttcagcgatggcagtgaacattatgtgttgctcgatatgggactgagttactggcgttgtacaggtgacacattcttcgatttttcaggacgaataccgaatcaggtcgagcgcctggcaacatgccgggcattggttatagccccggataatggattgaagagttatatcatcgcaggctaa

SEQ ID NO: 283729 - DNA, 2832 bp, Morganella morganii
atgcgggtggttattcgtgatgcagagtggcgcattcgccgggcagatgacagcggtgatggtggcaacctgctgacctgtgatggcatttcggagctggtacgcggtaaagaagggctgtttctgacaaagctggagcaaaaagtcgagattcttgatccagcaaaaacaaatctggtggaagatgagtcagccaattaccaggcggctcaattgtacatagagagccagctacgccaacgcgtcccgactgacagcaaagtccattttggacatcaggctgcgatggattccatgccctttcagctcgatcccacgcgcatggcactggcgcagccgcgccagcggatattaattgctgatgcggtagggctgggtaaaacgctggaagccggtatcctggtttcagagctgattcgccgcggacgtggcaaacgcattctggtgctggcggttaaatccatgctcacgcaattccagaaagagttctggagccgttttgctattccgttgacgcggcttgattccgctggtttacaaaaggtgcgtaaccgtatcccaaccaaccacaacccgtttcactatttcgataagaccattatctccatcgatactctgaaacaggacatcgaatatcgccactacctggaaaatgcctggtgggatattattgttatcgatgaagcgcataacgtcgctgaacgtgggaccagctccttgcgcagcaaactggcaaaattgcttgccggacgcagcgatacgctgattatgctctcggccacgccgcatgacggtaaggctgaaagttttgccagcctgatgaatatgctcgacccgacggcgattgctaatccgaaagagtatgaatacgccgattttgccgataaaaatctggttgtgcgtcgcttcaaaaaagacgtgaaagatcagatggctggcgagtttccggaacgtaatatcgtcaaactcacgcacccggcaaccggggccgaagaagaagcttatcgtcggctggttgagagccagttccgtgacgacgatgatgaagactcgcaatcaaacaaaggccgcctgttcaaaattacgctcgaaaaagcgttgttctcaagtccaatggcatgtgccagcgtggtggctaaccgcctgaagcggcttgagaaccgcaaagaaataaacagtcagagccagattaacgaattagagtcactgctgctggcgctcaataatattgatgccagtcagttcagcaagtatcagttgttgctggagaccatccgtaacgatctccgctggaaagcgaataacacagaagatcgtttggtgatctttaccgagagtatcaaaacgctcgagttccttgggcagcaactgcgttccgatctcaagctgaaagacgatcaaattgccacgttgcgaggcgatcagggcgatacagttctgatggaaaccgtcgaagcgtttggcaaaacccagtctccgctacgcctgctcatctgctcggatgtggcgtctgaaggtatcaacctgcatcacctcagccataaaatgattcacttcgatattccgtggtcgctgatggtattccagcagcgtaacggacgtattgaccgctacggacaaaaacaccagccacagatccgttacttgctgactgaagccagtgaaccgcagatcaacggtgatatgcgtgtgttggaagtgctgatcaataaagacgaacaggcgcagaagaatatcggtgacagctccgaatttactggcaaatttacgcaggaagaggaagaagagcaggttgctgaattcatgatgcaggacgatggtgccagcctgttcgatgatctgttgaatagcaatgtcactgaaaatactggaaacgacctgtttggcgaaatctgcagcgcagtgtccaacgatgcctcagccgtgaccgaaagcgacattagcctgtttgataatgagcaggcatactgcgaaaaagcgctgggctatctgaaggccagcggtcagaccgtgcaatacgataccttacctgataacaccttatcgctggtcgcaccggaggagttacgccgtcgctttaaccagttaccgccggaaattgcgccggaaaactggcagctttatctaagccaggacaaaaccgttatcacggaagccatttcgcgtgcgcgtggtgagcaacatgcctggcccgatgtgcagtatctctggcaaattaacccggtcgtgcagtggttagacgacaaaattcagtccgcctttggtcgccaccaggctccggtgatgcgcctgccgcacctgtttgagcctgatgaagatcacttcatcctttccgggctgttcccgaaccgtaagtcgcacccgatggtgaatccgtggctggtggtgagctttaaccacgaaacgttaagcggtagcctgccttttgctgagtttctgaaacgacatccgcaattgagaagcaaattgactaacagtggtggtaaagatcgtaaccaccaacgccagcaggttctgctggaagcggcaatcgcccatgcgcgggatgtgtttgttcacgatcgaaatgcttttgaggagcatatcaatcagcaactcagtgaacatctgcaaaagctggacgttctgcgtgggcgtcagctgagccaactggaactggattttgccgataataaacagcagctttcagtgaaaaagagccgcaaagaacaacgtcagcgcgaaatcgaacacaattttgacagctatatccaatggattgaggacaccatgaccaccgaaaaagagccctacattcaggttattgctgtaatcaccggagcggagggctaa

SEQ ID NO: 283730 - DNA, 4923 bp, Morganella morganii
atggcgctggtcggtattaataacgaaaacgaattttactccaaccattatctgggcgaagtctttaccagcgacatccgcgatgttctggagccctggattgagcaggaaaatgccgctcgcgaagctgaacgcgctgcccgtgaacagggcaaagaggttgaggcgggttaccgcgcgccgtggaaccagcttaacagcctggcgacagagtttttccgtagactcactgatcatgaaaaacagcgccagatcccgcagcgtcttgccgatcagcgcactcgctggcagccgctattaaaggcattgggttatgaactcaatccgcacatacagatgctggatgacgatacgcctttgccagtgttggctcgttacaatagtaccgacggtagtccgtggctgtggattgttgaagcacatgatcaggatgaaggaacgctggatccgctggcgctgtcgctgctgactgcgcagttcccggcagataccgataaacataagcgcgacagtctgcgtaaaaaagcgaacggcgaataccgtagctggcaggatctgctctccacggcggtcttcacgcaaaatgaaccaccgcgttttgtgctgttgctcggtaaccgccagctgttattgctggatcgtactaagtgggcgcaaaaccgcctgctgcgctttgactttgaagaaattttaagccgtcgtgaaacggatacgttgaaagccacgtcggtattgctacacaaagattcgctgttgccaggcagcggtgcgccgtacctcgattcgctggatgacaattcgcacaaacatgcgtttggcgtgtcggaagatctgaaatatgccctgcgtgagagcattgagctgttgggtaatgaagcgatgcgttatctcatcgacaacgagctggcttattataccgggaaacgtgctattaacccggatgagttgagccgcgaatgcctgcggtatatgtatcgtctgttgttcctgttctatattgaagcgcgcccggaactaggctatgcgccgatgaccgccaaaacttatctgcagggctacagcctggaaacgctgcgcgatctggagatgatcccgctgaccagcgaagaagatcgcaatgggcgctacttccacgatagcctgaatatgctgttcaaactggtgcgtgacggctacagcggcggcgtgaaaatgcagagcgacctggagagcggcgaccggatcactattcacagccatcagttcagcgtgccgcgtctggaaagtcatctttttgaagcgaataacacccgtattcttaaccgtgtggtgttccgcaacgaaaccctgcaacaaattattcaggcgatgtcgttaagccgcccgagtaaaggacgttttaatcgccgggggcgtatctcctatcgccaattgggtatcaaccagttaggtgcagtgtatgaagcgctgctctcttaccgagggttctttgccagtgatgacctctacgaggtcaaaaaagccggagaagagtttaacgagctggagacaggctacttcgtcagcaaagacgagatcggcaaataccacgacgacgagaaggtctacgaaaaagacggcagcctgcgtattcaccgtaaaggcagctttatctatcgcatggccgggcgtgaccgcgaaaaatccgcctcttactacaccccggaagtgctgacccgctcgttagtcaaatatgccctgaaagagctgtttaaagagcaaattgatccgattaccgatccgcacgccaaagccgacgccatattaaacctcaccgtgtgcgaaccggcgatgggcagcgcagcgttccttaacgaagccatcaaccagctggcggaagcttacctgttccacaaacagcaggcggaaggtcgccgtattcctcaggatcgctacacccaggagctgcaacgggtgaagatgtacattgccgacaacaacgtattcggcgtggacttaaacccggtggcggtggagctggcggaagtgtcgctgtggctgaacgccatcagcggcgatgcatttgtaccgtggtttggctaccagctgcactgtggcaactcgttggtgggcgcacgccgtcaggtgttcaacaagagcgagctgacctacaaaaaagcgaaagatccgagctggcttaacagcgaaccggccgagttggcgatgaatattccacgtgaggagaagcagattttccacttcctgctgccggacagcggcatggccaattacagcgacaaaaccgttaagcaacgctatccggatgatttcaaagcgctggacagctggcgcaaagagtttaccaaaagctttgcatcgcatgagattgccgatgtgcagcgcattagcggcaaagtggaagcactctggaacacgttccgtcagcagctgaaagctgagcgccagaaaaccgccgacaattatccggtttggcctgcggaaaatacggcccaagtccgctcttctttaagcagtaaagacgaaaccttcagcggtcgccttgaagataacagtagctatcagaaactgcgctgggtgatggactactggtgcgcgctgtggttttggccaatcgacaaagcggatgaactgccggatcgcggtatgtggctgatggagatggagactctgctcgacggtattgttgtcacggaaagagtcactgaagccgcagaacaggccactggcgatctgtttgccgacgagggcgtggtgcgtgaagagtcttcgctgttttccggcgctggtcgcctgaaaaccgatgtgctgttccgccatttgccgcgtctggcgattgttgatgcgctgaagaagcaacatcgtttcttccactgggatctggaattcagcgatctgttcgccgagcgcggtggttttgacctgatgctcggaaacccgccgtggctgaaagtggaatggcaggaagctggcgtgctgggcgactacgagccggagtttgttctaggccgattgagtgcttcgaagttggcgacattgcgtcatgaaaccttcaatcgaattccgctgctcgaaaatgcctggcgcagcgagtatgagggttgcgaagggatgcaaaacttcctgaatgcgcagcagaattattctgtacttgtaggccaaaaagcaaatctctataaatgtttcttaccacaggcgtggcgtttgggagcgcagaaaggtgtggcagggttcttacacccggaagggatttatgatgatccgaaaggcgggcaattgcgcgcgtcggtgtatccgaggttgagagcgcattttcagtttcataatgagttgagtctttttgctgaggttcaccatgcaacgatgttcagtataaatatctatggaccgaagaatacagcgccgtcttttattaacatgtccaacgtttacgcagtaagtgcaattgatgcctcgtttgaacacaataatttaggtccagtgcctggtatcaaagatgaacaggaaattgatggaaaactgaaggtttcctggaacacctctggtcaccgctcacggctgattcatattggtgtaaaggagctttctttatttgctcgtctgtatgacagtgaaggaactactgcgtgccaagcccgcttgcctgctctacatgcaacccaattagtagctgtgttggacaaatttgctgaccagaaaaggaaactaggggatttaggggatagctattattcaacccaacattggaatgaggttaacgctcaaaacgatggaacgatgattcgtgaaacccagttttcagagaacgcctcacaatggattttatctggcccgcacttctttgttgggacaccgttctacaagactccgcgcgaaaactgtacgttaaacagcgattacgattgtttggacctgttaaccctacccgacgactatctgccgcgcactaactacattccggcatgtgatgctcaagaatatgccaaacgtactccgcgtgtcacatggaccgaacttggtgaagatgaaccgaggaaggtgacggattattatcgttttgtgaatcggagaatgtttggggcatcgtcagaacgttctatgatctcaagcatagttccaaagcacgttgctcacatacatcctgtactctcaactacattcagagagccaataagtctgataagcttctcagcattttgtcattcaatagtggctgatttttatttgaaaacaacagggcgggcggatgtttatgaatctacattgcgtggcttcccttatgttgagctaatgagtgcaaacacaagagcattagctttgaacgtgttaacgaaagattatgctggtctctggcaatcctgctataccccagatttcaacacccagcgctggagctgcaatctcccgcaactttcacaagatttcttcgccagcctgaccccagagtggcagcgtaactgcgctttacgctccgactacagccgccgccaggcattggtggaaatcgacgtactggtggcgcaggcgctagggttaactcttgaagaactgctcaccatctatcgcgttcagttcccggtcatgcgccagtacgaagcggacacctggtacgatcaaaacggccgcattatttttaccccaagcaaagggctggtgggcgtcggcctgccgcgtaccgcacgtaaagcggacctgaaaaatggttttgtctttaacgtcgacagccctgaatggactggcggcgactgcaccgatcaagccatcggctgggatgatgtcaagcatctgcaaaccggcactgtcagcgtcacttttgatgactatacccgcagcgacgaaggcgagcgccgaaccgtcacctggcaggcaccttttatcaaacccgaccgtgaagacgactataaagttgcctggtcattctttgcacaatataaggagagcgcctga

SEQ ID NO: 283731 - DNA, 6342 bp, Morganella morganii
atgctgccttctgttgtcagtcggcaggttgccgacagcgttgcttcctttttacgggcagccttcccgcttaacagcccgctgtttaatggtgaagaaaataataacgtctcgatgctggagcaatttctgtcccagccggaaacgctgctgaaagggccgtatctttccgctcagctgccgtttcgtaaaagtgacttaccgctgaacttcttccctaacctgacgctgccgttcccaccgcacgcgcatcaggcgcaggcgtttcagcgcctgggtatcgagatgcctcaaccgacgctggtggcgaccgggacgggttctggtaaaacggaatgttttatgttcccgctgcttaaccattgtgcgggggcatcagaggccggtgttaaagcgatcatcatttacccgatgaacgctctggcaaccgatcaggccagccgtttcgccaaaactatcgccagcgatccgcagttgcatggcaaagtaaccgtcggcctgtttgtcggcgacagtgaaatcgaacccagcaaaaagatgtctgcagataaagtcatcacctgcaaacataccctgcgcgagaacccaccggatatcctgctgaccaactataagatgctggattacctgctgatgcgccccggcgatcagaagctctggcgctataaccagcctgggtcactgcgttatctggtggtggatgaactgcatacgtttgatggtgcgcaggggtcggatttggcctgtctggtgcgtcgcttaaagcatcatattggtgtcgatgacaagcgttttacctgtgtggggacgtcggctaccgtaggtgacgaactgggacaactactcgattatgcgaaaacgatctttgatcagccgtttagcgatgacgcggttattcgcgaagatcgctacacggcggcggaatatctgcaaggttataccatcgagtacagtcagtatccgggccaggatgtcagcgctgcgctggatccgcaaacgtacgccagcccggtagattatctgaacggacaaattccactatggtttccggatagttcactgcaattacctgccgatctggacagcgatctcggacgtgaaaagcgtattgagttgggctcattgttacgtcgccacagcatcctgcacgtactccttgaggatttgcaggggggaattttgtcggaacagcagtgcctggaaaatctccaggtgatgctggcggaaagcgccgggcatgcaacccgcgtgctgcaaagcattctggcactaattgcccaggcacgcctggaggttccagaaaaacaggaagatcgggaaaagcgcctacaggtgaacaaagcgcggcccgtactgccttttgtgcaactacgttctcagctgtggttgcgcgagatgcgccgcctggttgccagcgtgtcaaaaacacctgagcttgtttttgctgatgatgtcgcggtggaagatcgcgaacattatcttcccgttattcactgtcgtgactgccatgctaccgggtgggcgagcctgcgccatggtcagagcgttcaactcgaaactgatctggacggtatttatcgtcagttcttcgaaaaaggccgttctattgtattggccttcccggataacaacgataaacctgtcagcggtgttcaccagaagttgtgcccttcctgtttaaagctcaataagcaatctaacgtgcagtgcgggcattgtggccatactggtctgctacaagtacttatcccggatatgctcaaagagcgtaaggatgagctggaatttgccaacgaatgcccgtactgcaacagcaaacagggtatttcgattcttgggtcacaggctgccagcctgtcggcggtgatgatccatcagctttatggcagccagttcaacgaacataaaaaactgattacgttttctgactcggtacaggatgccgcacaccgcgccagtttctttaccgcccgaacctggccgttgatggtacgcggacaaatcgccagcgtgttgggtgaaaaagaaacgttaccgttggatgcctttgcggcacgtgtctgccagcagacgcgtgaacgttcaccggatgatgcccattttgccgcgagcttcatcgcgcccaacatgcagtggatgaacgattaccagacgttgaagaacgaaggccagctggcagagagttccgatttaccggagctggtttctcttcgtctcgactgggaggtatacagcgaatttaccctacgcgcacgaattggacgtacgctggaggccaccggttacgcagctgcaggaattgatgttgcacgtttcaattcagcgataacggcgcttcaccaacagcttgtcgaagagctgggtgatgaaatggttggggtcagcgttgagcaggtggcacacctggtgattggcgttctttggcatcagcggcaggcgggagctgttctgcatccggcgttcgaaagttatcgtcgtgagggtaagacctttatgatgacgcagaaggagagaacttcacgctatatgccatctattggtccgaaaacgcgtaaaccggcctatgcctcgtttgaaaaaataaatggcttccatcgattgattggtgcgaaatccaaccccagctggtatcagcattggatcaaccgcacactcagtaacggtaataatctgtttatcagcagcctggcagagacggttttacgacgtctgtttgcggcactgaaaatggccgggttggtaaaagattttgatacaaaaggcaaagaagcatgggggctagtaccttcggcgctggtggtgagccgcgatgttgttcagctaaactgctcttgctgtcgtgaggttgttcgggcaccggccaatcagggggggcactggcgaaacgcgccatgtctttctctgcgctgtgaaggccgctatcaggaaactgaaaatacagtgacctggcactgggataatatggacatcgctcgtgttcagggggcagagcataccggattactgagccgtgaagatcgtgaggctacggaacaatcgttctaccgcggtaatcagccatggaatatcaacctgctttcggcaacaccgacgctggagatgggtatcgatgtgggtgacctttctacggtattactctgttctgttccacccgcgcaggctaattacttacagcgtattggtcgtgccgggcgtaaagacggcaatgcacttaacatcactgtggctgaggggaacccgcacgatcagttcttctttgaagagcctctggagatgatgcaagggcaggtacaggcccctggtgtgttcctgaatgcaacggctatcctggagcgtcagctggctgcattctgcatggacaactgggtgaaaaccggcgtcccggcatctgctatcagcaaaaacgttaaacagatgttggacgagctggagtttggacacaaatctgggttcccttataacttcctgcgttacgttgaacagcatcatgtggatattgctcaacagttttcgtccatcttcccggatcttacggaagatacacgtctacagctactatcatatttgcaagggacaccagggcagcgttctctggttcaacgtatcgaacaaacattaaaactgctggtggaagatcgcaaatcgttgcgttcccggattgataaactcaagcgcagtatcgacaagctggagagcgacccgcacgatcaaaactttgacagcgatatgcgcgagttgacatcggaacgccaggcgctgatggcgctggtgaaccagatcaacaacaagcaaacgcttaatttcctcaccgatgaaggattacttcccaactatgccttcccggaggccggtattacgctgcgttctgtgctgtggcggcgcaaggacggtggggaaacgcgtgagtatcagaacacgacctacgaatacgaacgtccggcttcaacggcgctggctgagcttgctccgttgaacaacttctatgcgggcgggcataaagttgaaatcgaacagattgatctgaaagtgtctgagcctgaaaactggcgtatttgcagccactgtaactacagcgagaatatcgatcagaccggcgatcagcataaatactgtccaaaatgcggcacaccaggttgggctgatgccgggcaaaaaacgacgttactgaagcttcgccaggtttatgcccgctcaagcgcccgtgacagccagatcagtgatgagagcgatagccgagaaccggcattcttccagcgacagctgctggtcagcttcgaaaaagaggatgtatcggccgcttatgctattgatgaaggagaaatcccgtttggctttgagtttttgagcaaagtgactctgcgagatatcaactttggcaaaatggcggatgatgccaatgagctgatgatcgcaggagaggcaaagaaacgcaccgggtttaaagtttgcctcggctgcggcatggtgcagcgccctcgagatcatgaaccacgtcatgacctgagctgtaaatatcgcgctgaacccgaaaaagcgaagtttgaagattatctctacctttatcgccaactggaatctgaggcattgcgtatcctgctgccagtgaccagctacagcaacgatcgcgtggtggaagcctccctgggggcagccattcagcttgggcttaaacattacttcaaaggtaacgtggatcatctgaaaggcgtggtgtatcgcgagccggaaaatgagggcgaatcctggcgtcagtatctggtgatttacgacaccgtaccagggggaaccggctcactcaaagaattgatgcgtacacctgacaacctgctgaaattacttgagctggcctacaaggcgctagtggaatgcagctgcaaccatgatacgcataaagatggctgctatcgctgtgtttatgcttaccgtgaccgcgggcgtatgaagtatgtatcaagagatcaggcgcgtctcttactggcgaaaatcctgaaggccagtgcttctatacgcgttattgattccatcaaaaacatttcgcttgatgccatgatggggagtgaactggaaaaaaggttcattcactgcctgcaggataacaaaaatcttctcgtgagccggagttatgcccatcagaacgcaggctggattattaatacccgtacagaaccggcgatgagctggcatctcaaagcacagattgatttaggggttaaagaaggggttggcatccttagccgaccagattatgtgctctaccctctgatgcagtcagaaaagataaaaccggtagcaattttcctggatggttttgcttttcataaagatagcgtgtcggatgatgtccaaaaacggcaggcgattaaagacagcggtaatttttgggtatggacactgacctgggctgaccttcaagaacaaggtattaaacacgtacagaatgtcatggggcttgggcataacccgtatatgaaacagcctaagtattataacctgttccatgatacaaactttgcgacacttgaaggttcattcagggagagaaacagttttgcactgctactcgattatctctctgatcccggtaataaaactctgctatggcagaaaatggccgctgcctatgcttgggtgtggctggatcctaaaaagtcgcaggataccggagccaaacaaaagtatgcctatgaaatgcaggagaacgctcccgcttatcggttgaatacacttttgcctgatgaaccttttgtatttggtggtttactggatagctgtagttcatcacaacagttcattgagctggcagctgttgtaccgcaacaagccattaactcaacgacaagcattgaacaaatgcgaaattggttgaggctgcatatttgctttgacgatcgttattcccaggatgatggctatgaagccggatttaacggtttctggtggatggtgaatttactgcagttcctgccagatatgacattcaccagccgtaaagcggtccatttaccgcaggagcctgaagcggtaaaaatgcagacttcggtggtagtggatattcagcctgacgagagctgggcggaaataattgagtttggtttattgagcgcagaagaagtcgctttgcttcagtcgttatcactaccggcaccgacagtcggatatgaattgcaggatgacgatggcgaaattattgcagaagccgatctcgcctggccattacaaaagcaagccctgattatcgataatcaaggctttactgctttattcgcaagtaagggttggctcgttgcattcgggccaattgacgaaattacattgcagcatctgtccggaggtgacaaatga

SEQ ID NO: 283732 - DNA, 2124 bp, Morganella morganii
atgacggttccaacgccaaaggtggcactttctgatggttttctgggggcttttgcgcggattcctaaagcgcagcaaaaaaaggtccaggaattcatctccaagttccgccaggatccgacgagtaatgggttgaactacgaaaagatccacgatgcacgcagcaataatgtgcattccgttcgtattgaccaaacctaccgggggatcgtcctgaaacctgagcagggtgctttgtatatgctgatgtgggtggataagcacgacgaagcctacgactgggcgcggcgacacgaatgtgcgattcacccggtaaccggtgcgattcaggtgattgataccagctatatcaaacctacccccgagccgactgttgttgataaacccaaactctttgctgcttatacggcagagcagatcctcgcgctgggtgttcctcctgtgtttattgagcaggtgatggctcttgtggataccacagggctgaatcagctggaaagcgtgatgcctgcggaagcctgggaacccctgcactggctggcagaaggtctggattaccaggaagtgctggaggagtttaacgatcaccgtgatgagcctgttgataccaacgactttattgaggcaattgagagaagtaaacgtcgtttccatgtcgttgaaaatgaacaggagctactgcagatgctcaatgcgccactggaaaaatggcgtgtattcctgcacccgagccagcgaaaactggtggagtctccggcaaatggtccggtgcgagtattaggtggtgcaggcacgggtaaaacagttgttgcgatgcatcgtgcacgttggttatcccaacgcctggccgatatacccggtaaaaaagttctgttcacaaccttcacccgtaacctggcggcggatattcgcgccaacctacagcgtttgtgtagtcgtgaggagatggcgcgtattgaagttgttaatattgatgcctggatgagcgagcagcttaaacgccatggatatgatttccgcgtggtgtatgacagcgatgaaggacgacgtaaatgctggaactatgccttgcagcaagtccctgctgaattgggattaccggataacttttattctgaagagtggcaacgtgttgttcagccgaatgcagtttacagtcgtgaagaatatctgaaggtgagccgtattggtcgtggcacggcgttatcacgtattcagcgcgcgaaaatctggcctgtgtttgaagagttccgggcacaaatggcgcgagccaaactgcgagagatgggagatgccatgcatgaggctatgattctgtttaaagaaaaacaggtgcaattgccttatagcagtatcgtagtcgatgaagctcaggatataggcgtaccggcttttactcttattcgtagcctggttccagagtctcctaacgatctctttattgtgggtgatggacatcagcgtatttaccgcaataaagtcgttctgggtcagtgtgggattaacgttcgtgggcgccgtagtaaaaaacttaaaattaactaccggactacagaagagacgcgacagtttgctgtcgggttgttaacaggagttaaggttgacaacctggatggtgaaactgattcctgcaacgattatttatcattgcttcatggtgaaaaacccatgatcactcatgcttcagattttaaggaagaggctgagaagattatcaagcaaattcgggcgttgttagccaatgatgtccgttcccaggatatctgcattacttcccgcacgaggcatacgaatgagcgctatgtgtcagctctgaatgaagcgggaattgaaacttttaatttagggaatgatagtggcgacagtaatcaacgggccggtgttcgcattgcaacgatgcaccgcattaaagggctagagttccagtatgtgttccttgcgggtatcaacgatggcatcgtgccggaagttaaagccatagcatctgacgatcctattgaacaacgtgatgcattatttaatgaacgagcgttgctccatgtagcggcaacacgtgcggtaaaaggcttatttgtttcgtcttacggtaaacctagtttcttactggagtctgaaagcgagtaa

SEQ ID NO: 283733 - DNA, 345 bp, Morganella morganii
ttgagtacaaaacgcgacaagatgctgaccatgtgggttacgcaggatgagcatcagcagctgcttgaacgctgtgacggcaaacagctggcggcgtggatgcggcaaacctgtctcgatacccgcccggcgcggtcatcgcggctgccgtccatcgatccggttttgctgcgtcagcttgccggcatgggcaataacctgaaccagatcgcccggaaaattaatggcggtcagtggtcaggtgctgatcgggttcaggtggtggctgcgctgatggccatcgatgccggccttgaacggctacggcatacggtgcgggagaagggagctgacgatgatcgttaa

SEQ ID NO: 283734 - DNA, 870 bp, Morganella morganii
atgaaaaacattagaaatcataattttatagaagataggctctggtatatagaatggcttttgacgatgcgggggtggttatcccgtacagacttaatggataaatttggaattaagggcgcagcggccagtcgtgacattaagagatataaggaacagaaggatggaaatctatatttagatcatcgggttaagcgatatgttgtcgatctcgataagtttgagcctgtttatgatacctccggagagctcatcttttcgaagctctccgatccggatgagtctaggtctttaggggcgggatacccactgattgaaacaatcccgagtctggctgaaataaatccgaaggatataactggaatcacccgggcgattctaaatatgaatgtgctgaaaatatcctattgctcaatgacttcaggagcttcggagaaaaaaattgttccccactcgatgttccacaatgaccttaaaacatacgttcgttgctatgacctcggtcgaggtaggtttttggatctcgttgtaggacgaatacttgagatactgggagaagatgggtctgcacctgctgaatatctgagagaatttgatgatgattggaacacatacctttctttggaactggttgttcaccctcgagttaagcataagaaagccattgaaagtgatatgcaaatgactgacggagttaaagtcgttgaggtcagaaaatcgttggctcagtactggttgcgtcgatggtgtgttgactgttccgcgacagcaatgatgactgatcgggctttccagctccacttgcggaactccagtgtcatcaatggcgttaatggtgctttccctggggtaaacaaccatatcgactga

SEQ ID NO: 283735 - DNA, 123 bp, Morganella morganii
atgcagacagacgagtctcaggcatacatttttcgcccttacatcacagtaaagggcaaacggatcacccgtcctaatggcggaatgttcaaaattccaattaatcgcgaaaagaagaagtaa

SEQ ID NO: 283736 - DNA, 267 bp, Morganella morganii
atgtcagtttactgtgtctcttatgacttgaataaagcaggtcagaattacaacgcactgtatgaagagttaaaaaaatccccaggttattgccaccctcttgattcaacatggctggtatcaacctcagagacagcaaagcagctttcagatcgactgcgtaagcacttagatagtaacgacaatatactcgttattggcgtgacaaaagattactcaggctggctcccaaaaagtaactgggaatggctaagcaagcatgtatag

SEQ ID NO: 283737 - DNA, 402 bp, Morganella morganii
atgtccagagcggaattactgcgtgatattgaagcaattgtctcgggtgcaggttttgagttaagcagctcagaaaatccaatgacgtttaggaaaaatgtcagttatccaggactgatcgctggcaaaaatgaaatagctcactttttgctgttcaccaacacaagtaccgttcaaataacggctaaatggcaggaggtcagcggtaccgcgatagagaaattaggccacacagctctcgatgcgcaaaacacacagcatcaaaattatttcgttgtctgtggcggaggtaagctggttacaagggccattgattacttaaacggccagcaatctttagccccacgcctcagagcaatgcaggtagcggagcttgaaccagcactggaagcaatagtctaa

SEQ ID NO: 283738 - DNA, 129 bp, Morganella morganii
atgagtcttaagccaggtccgaaacgaattgccgaatcaacaggggaaccagataaacgccagcgcgacaataaaaaaaccccgggaaatactgataaattgaaacccagtaaatcctcagaaaaataa

SEQ ID NO: 283739 - DNA, 1038 bp, Morganella morganii
atgtctggaatcgtaagcttagtaaatcgacagcaggatattgctgagggaaacgctgaaccactgcaacttccgaaatttgatacttataccgtatgtaatttaaggggggggataggtaaaacatctttagtttttaacttatcttatttgactgacgatttacttgtgttggatacatgcccacaaggaaacttgtcttatttttttgataatggatatgcaacatcaagttctgttacagttaatgatgttcttcttccttattttcttcctggattaggaaaggcatccagagttgctaaaaaaatatcagcaaccaatgcttttttccaaaataaaaataattattacatccagtctagtagtgacctttatgtactgcctacgcaaatggcaaatgctttagctcaagctaaatttgtttcaggggccacacaagtaaatcttattgacaacatgctctattctctgaaaacagagattaagcgtgaaatgtcagaaactagcacaactcgttgtttaatagatacatcaccattcttttcaggtgcaacccatttgtcatggcatgcatcagacgcacttattgtacccgtaagaacagatcagcaatcaataaattcgctagaacttcttttagatacgctatctaatccctctagtgagtttagaagaaacattccttccgatggtcatacgcctaagatacaaatggtagttcttacacactgtggttggtctacagttcaaggttcaaaaaataaaccaaatcagcaaactaaggtttatttagagcatgtgaaagatattgttagtaggaatatcactcactttacgactaatgacccagataatcatattgtcatattagacgattttcttggctcgggaagaatgtcatcagccaagtcaaagccgatcgatatattaaggtcgggtgagtcgatgacaataaatagagttaaaactacagttaatccgtctgtatctaagatacagcaggagcttagatttattagcaatagtatatggtag

SEQ ID NO: 283740 - DNA, 279 bp, Morganella morganii
atgtcagcagcgacatccatcaggcttgatgatgaactcaaagaccgcctgaaaacccttgccgatgatcgccatcgttccgcacacgcgctgatgctggaagcgatcaccgaatacattgaccgggaagaaaagcgcagccagtaccagcgggatggacaggccgcatggcagcactatcaggaaaccggcctgcacctgagcgccgaagaagtggaagcgtggatagatacctggggaactgagaatgagcaggatgctccgccatgccacaggtaa

SEQ ID NO: 283741 - DNA, 312 bp, Morganella morganii
atgccacaggtaattgtttccgcactggcgcagcgggatttacagcgcctgcaggactttctcaaaaccaaaaaccggctggcggccagaaaagccggtgaggtgatcgtccgggctatccagcagctgaaaacgcagccggacatgggccgcccggtttctcttctcccactggaataccaggaactggtgatcggatttggcgacagtggttatgtgatgctctatcgccacgaccgggaaacggaccggatagttatcctgacagtccggcaccagaaagaagccggctatcgcggccttcaggaataa

SEQ ID NO: 283742 - DNA, 432 bp, Morganella morganii
gtggcaaaaacattgctcaacctttcacaggcagcacaggcagccggcatcaccagaagaacgctgtataaccacgtaaaacaaggaaaagttaccgtgtcacgcgacgggaaaaacaaccctgttgtggatgtatccgaactgatccgcgtatacggcaatgtgaatttacctgagaaacaaattcccagcatttcacaccgtgaaaatacacagaaaaatttcccacatgagcagctgacagccatgcagaaagaactggccgaaatgaaacaggccatcacgctgatgctggaagacaaaacgctgcgggaaaaagaaaatcagctgcatgaggacgagaaaaaccagctgcgggaagaaatcaggaagctcagtgaaagcctggagcaggcgaaaaaaaaagggttctggtccaggctgttcggttaa

SEQ ID NO: 283743 - DNA, 216 bp, Morganella morganii
atgacggaactggaaacgcaattattgagcgcattcgagcaactgcagcaggattacgcgcagcagttgagcgcgtgggaagccgcctcctcggagttgcagaggatgtttggcattacgcaacaggagaacgcgaggctgagcgagcgcgtatcggacttgagcaggcaggtgcagagtttgagcgagcagctgcgccgcttgtccgtgagatga

SEQ ID NO: 283744 - DNA, 498 bp, Morganella morganii
atgagcagtcttttaaccttggcgaaagatctggagcagacatcgaaagcgcagcggcaatctaccgacgcgatgctgaaagccgcattcagcgagcacgaggcgtatgtaaatcaggaactgagcgaaagcgcgaagcgaatcaacagcgctatcctcgaccacgaccagaagctggcctcagccatcagccagaacaccagagggatgctgaaaaccatcgggcggacgtggctgattatcgccggggtgtcgttcctgttgatctgcacgagcgggagcattctgtggtggcagggccagaaaattcgcgacaactatcaggccatcagcgagcagaaagacgcgttgacgaagctgaacgcgcggacgtggggcgtgacgtaccagaaggacagccaggggcgttttctggtgttgccggcgggcatgaaagcggacacgaactggacattcgacgacgggaagaagaacggcatcagactggtgcaggagtag

SEQ ID NO: 283745 - DNA, 1437 bp, Morganella morganii; identical to SEQ ID NO: 278784

SEQ ID NO: 283746 - DNA, 1071 bp, Morganella morganii; identical to SEQ ID NO: 283248

SEQ ID NO: 283747 - DNA, 471 bp, Morganella morganii
atggataattcagaacatctcaaaataaatacagaaaattttagcatcaatattttaaaaaatgttaatgatatttggtttgaatatcgacaaataaatacaaatatgccagaagcttttggtgtactgattggcagtaaagaccttgtaacagaacattataaaatcgttaatgtaacagtcccacaacagggggatcgctgctcaagaatgagttttactctgatggatcccgcacaccaacgtatagttgatacccattatcgcgattccgggggtgaattagtttatcgcggcacatggcacacgcatcccgaagggattcctcgtgcttcaaatgttgatatcagagactggaggaaatgtaaagaaagaaatcaagacaagcaacttttctttataatcattggtacagagaaaaaggctctttattattttgtaggtgaaaatcttctacggcatgagttttga

SEQ ID NO: 283748 - DNA, 3558 bp, Morganella morganii
atggaaagtgataaacataatttacttttttcacggatagttgagcaggcacttccgggattttcagataaattatcagcaagaaaaaatgaaaaatcggttattacccgtctgaagcagggaaaaaaagggctgatggctgactatcccggactcggatatccggatgctgaaatattgcataatcgtctggcagttgcagttcatactgtggcccgtaaacaacgggaattacgtcagatcagtgagtttcgttcaccgcgcgaagaaaaaggactgaaagcattaacccggcaattaacttatgaagatcaattctcgccaaactgggcgggaaatactttaccggatgcgatagattcaggccacggcgctgttgcttatctttatgacctgcttacatttgtggaaagaatgattgaaccgaagggagacagtgataaagcgattacactcaaacagcgcagaccggatatttataatattttactgaatgaagagaatgtaaacggaagtatttccaaaattcagattattaatcaaatcatgagtactgcaataagtcagcaggaaaatagtgaagatcctgagaaactgatgctgaatgcacgctatccttaccagtttccgtttgaaaactatatgaatcagatttatgccgtactggatgaatatgacctatctataggtgatattaaacggcattgcgatcccgaggcgccttatttcacacagccggttttgcacggaaagcgttcagattctgctctctggctggatagtcgtttagggcctggtctgcgtaatattttgctggccggaccacaaatacaaaatagcaagaaagaagataatgagaaatattttaagagaaattttggtgttgaacagtttacggatttactgaataccacggttttctgtcagcaattaaaacttgagcgtgtagatctggaatcattgttttcctgtggtgaatatacaccacatttatccccgaatgttataccggaaataagtaacagatatgcggataaggagccggggcgtgaggtatctccggctgtttacggttcggtatttattaataatggtgtaatgcctgctattagtgttaatgaaaaaatacacagtttcaatgaactgaatgaaggaagatacgaacgcattgaacgttttctgcgtctgtcgagggcacttaatcttccttatgaaaaacttgataccttattgatatctattttaaaagctgaaaataaccagagcggtcacaaatgggatattactacaaataccctgagagctattggcttgttcacgcaaatgaacagaaaactaaaatgtacagccagtcagttttctgttttatatgatggtatttcggtttacagccggggaaaagatatcagtgattttgaccggttatttaataatgatgaccgctttaattaccgttttattcttgatgacaaaaaaatggaagaacgggatattaaccgtatctgtagtgtttttggtattaactacgatactttttcttatctggcactcctgacccgtgaagttatgggactgaatgtattaacccgcagccgggatgttatttctgcaatttatcgtcctgtggttttggctgacctgctgaaaataaaacccctggaattactcgcattaatgaaatcaatgaatcctgatgctcagtttggccgtttatttacagggataccggaaaaccaggtgtacggatcattcggacaggcggatattaccagtgcaatcagtgcactaatcagtcttcagacatggcggaaagagaataaactgtctgtagcacagatctttaattggatcacacctgcgattgtcgatgaccaggaagataaaactgagcgggaactgttccgccagattaaagaaaatacagacagtgcactattcagtaatgaagtcttgtatcttgctggtgtaccgaaggatataaactgggtttcggcattacaggaactggtcgatgaccagggaattctgaaggatgctgatgatggtctcgactgggacagttataaaaaaaatgcattaaaaataattacttccaagtcggaagaaaaattaaaaaatttaacatcggaagaaagaaatactatagttaatacgattctgtccgtccttttggaaaaaagagcagcacagtggaagagtgtgagtggattactggaaggatatcttggaaataaaactgacagtattacaccggcattgtactggtgtggtagtaatacaggtgagtttctgaaaaatatcagagcactgcctgataataatatgttgtccgctaaagataataacgtcatggtgttattgtcatctctgcggcgttatagtgatattattgcacacttccgtcttgagccagctatgatgtcacagttattatctcatgataataatcacaactggtacaaactgaaaacagaaaaacctgatttacagttgctttaccggctttcagtatatcggaagcttattgatgatgctaaacaaccggctgataaattattaaactatctttctcttattaattcactcccgatagatagccgcagtgatgaaatacgcctgtatcgtgatcaggcactgaataaattatctctttttatgggatggagtattaatgagttattaactgcagcacagtatgtcgcgccggaaaatgccatcatccggacattgccgcaaattcttctcgttaaacaaatccattccgtctgcctgaaaacggggttgagcgcccgcagtgttatttcgctgtttaatctggatgaaagcagtgaatcatcactgtatcaatctgttgccggccaggtaatggaaagtctggcacagcaggatgtatcactttacagcaacgatgaatccagtcagggagacctgaccgcaagtgtttcagccgggaagacaacactgctggtttacagtgaaaatcagcaggaagaagaggaagagaatggggaagataagacattgctgacagttaccttacagacactggaaagtacaccgttggagggagtacccgttgtatggaaaaatatatccggactgggtgaattaactgatactgaaagtaaaaccgatacatcaggccgggcatcggtgacattaaaagcggggaaaaagcagggagttgcattaattaaagcatattatggtgtgaagaatatttcgctgcctcttatccggattgattgcgacagcagttcgttgggtgctaccgatattcagaccgtaccggaaaaaccggtagatattccggcagacgggatatcagctgttgaaataacagtacttttcagagaccaatacgataacccgggtatggataaaaatattcgctgggaaacaaccggaggccgttttatccataaggagaacattacggatattgatgggggctgtcacgcgacactggtcagtgataatcctgcagatattgcggtgaatgtgttctatgaaaataatcctgaatactcgatgagagttaatatctcttttatttaa

SEQ ID NO: 283749 - DNA, 423 bp, Morganella morganii
atggaaacgacaaaatacgcagtaacttacctgggcaattatccgtgtggccaccgccacgccctgactatcacagtgacggctcaggatgcagattcggctattgaaaaagcgcaggaatcctttgatgacgagcggatcacctcaaccaatcacatgcttcatgcagtcgttccggtcgggttcagtaccagcatgatggctgaagtcgatatgtgcccgccgcgcagtgagattgaactgcaaccctgccctttctgcggtaatgacgacatcaagctgaatagtactggctgggatggtgaatacctgtataccgtccgctgtgactgctgcggttccagtcagcctgaagactctctgaaaactgccgtgcgcgtatggaatcagcgtgaagccctgcaaacagcggaggttaaataa

SEQ ID NO: 283750 - DNA, 321 bp, Morganella morganii
gtgcaggccaaatactggtaccggaaagcggcggaacagaacaatccttatgcccagaatgagccgggaaaactgatcctgctcagcaatcactccgtgacagcattacaggaagccagagtctggttcgagaaagccgcatcacagaatcagccggatgcgctttatcagccgggggtgatgtattatcgcggaaaaggttgtgaacgcggtgattgcgccattgcccggagtttttatgagagagcggcagcacagtcacacggctccgctcagttttacctcgcgatgatgtatctccggggacacggcgtggcgtag

SEQ ID NO: 283751 - DNA, 2175 bp, Morganella morganii
atgactgcactttaccgcacttccctgttccggctttcgctggcggctttactggttgccggtgtctgccacgccgctgaagatgaaatcgtggtcaccgccgcgccgcctgccgtcagtccgctggaaaataacggcacataccgcgccacacacagcgacagcgccaccaaaacggccacgccgctgaataaagtcccttcctcggtctccgtgatcagtgaggaggaaatcaccgcccgcaatcctgccacactgaaacaggcactgggatacacacccggcgtagtgaccggcacctccggcagttcatccgttttcgacagtgtgatgatgcgcggcttccataatgtcagccagaatatctatctggacggattaaaagttcagggggatatgtatgcggaaagcaggatgctgccggaatttatgcagcggattgatgtgctgaaaggcccggcttctgtgctttacgggcaatccaatccgggcggcgtggtcaccatgacctccaaacggccgcagatgaacccgctgcgggaaatccgcttacaggcggggaatcaccacctgtggcagaccgggtttgatctcagtgatgccctgaatgatgaggaaacacaggcttaccgcctgaccggcacactgcatgaccagcaccaacagcaacagggggagcgggaacggtattatgctttacagggttcttatctctggcagccggatgatgccacttctttactgcttaccgcccaggccatgaatgcgccgcgtaacggctattacggctggctgccgcgtgaaggtaccgttgacggcggcgctgccgggaaattgccgaccggttttaacgaaggcgagccgggctataaccgctttgaacggcagcagcggctgatcggctggcagtttgatcatacattcaatgataactggtcactgcatcagggcgtgcgttaccagcagatcagcaccaactggcgcactatttacggcagcggactatgcagcagcaatccggcggcctgttacggcgtaccgcagcaggatctctcatcaacgcttgcccgcagccatatacataatgacgagcggctgtccggtctggtcactgatacccatgtcatccacaacatcagcggccacggctggcgcaataccctgatgacaggtgtggattactcacagctgcgcaaccggatggttaatgaggtcggtgttgctgccccgctggatctgcgatccccgcaatacggcaatctgacaatcatcccggggataaattcgaaagcaataaataaaaaccaccaaatcgggatctacgcccaggatcagctctttctgaaggactggacattcaccctcggcggccgttatgacgaaaacaccagcaaatcccgcggccgcgataacatcagcggtgataccactcatcaccagactgaccacgagtttacctggcgcggcggtgtgaactatcagctgccttatggtttcgctccgtatttcagctacagcgaatcctttgagccaagtactgcggccacggtcagcggcaaaccgctggatccgtcacggggtaaacagtatgaagccgggctgaaatacctgccggaaaatgccgcgctgtctgccacactcgccgtttatgagctgaccaaagacaataacctgcaccgtgacccgctgaatccgtttttcagtgtgcagggcggaaaaatccgttcgcgggggattgagctggaaaccaaagcggcgctgacctacaactggaacctgatcgccggctatgcttataccgatacccgtttccgtcagcaggcggagaataccaatcatcaccccgcgatggtaccggcgcataccgcctctctgtggacagattatacctttgacaccacgccgctcagcggcctgactatcggcggcggcgtacgctataacggcaaaacacagggggatgatgccaacagcttcactgttcccgcctataccgtggcggatatgatgctgcgctaccggcttgataacctcccggctcttgaagatgcggagatcgcgctaaatatcaataacctgttcaataaacactatgtatctgcctgctttacggatgcagcatgcagttggggcaatgaccggcagataaccaccacactgacccttcactggtaa

SEQ ID NO: 283752 - DNA, 1221 bp, Morganella morganii
atggcaaatgaactaaataagctgagtgataaaaaggtcaggtcactgtacggtaaaccagtctctaaaattgagtttgtggctgatggtgccggtctcagtgcaaaggtgtcagttgctggtggtgtaagctgggtgtttacatatcgccttgatggtaaaaaattgaatcggctgacactggggcgttatccggatatgagtctgaaagaagccagggagctacgtgataaatgccgtaactggctggcatccggcaaagatccgaaactacagcttaatcttgatactcaggaatcactgaaacctgtcactgtcagggatgctttgggatactggatagaaaactacgccagagagaaccgtgcaaacgttgtccgacacatttctcagttggaaaagcatatttatccttatatcggtgaaatggctctgagtgactgtgaaacccgttattggctgaaatgttttgaccgtgccagaaaggagtccccggttgctactggttacatattccagatgtgcaaacaggctctgaaattttgccgggttcgccggtatgcagtcagtaatgcgctggatgacttaactattcctgatgtggggaagaagcaaaataagcgtgatcgggttctgtctgataaagaattggggcaattgtgggaatcaacggaaacagataagcattggccctactatagccatttgctgcggatattgattgtttttggctgccggtcgcatgaggctaggctgtctcagtggaatgaatgggattttgaaaactggctctggacggtcccgcgtgagcatacaaaaacagatgagaagattatccgccccgttcctgagaatatgcggtcattactcgaaaagatgtaccacctgaaccataaaagcgggtatctgctgggggaattaaaaacacctgagactgtttctcaattcgggcggaacctctggaagaaattgggacattccgaagcatggacacttcacgatctgcggcggtcgtttgcaaccaaattaaatgatatggggatatcaccccatattgttgagcagctattagggcactcactgccgggcattatggctatttataaccgtagccagtatttacctgaaaagcttgatgctttaaataagtggtgtgaccggttggatttattggctggtaatcatgataatgttattttgttatccagtataaataaatag

SEQ ID NO: 283753 - DNA, 951 bp, Morganella morganii
atggcagatataaaaattccttttaaatattgccgcattagcagagcggcggatttcttaaattgcagagttgaagatttattaacgctgggtttagaaaataaaataaatataaatttgatgttagattcagtaagttcaattatgattatggatatgccattaaacgaagctgaaaaatggagaactacattatcatattcataccatctctgtactggagctaatgctatttcagaatattcatcttttaagtttgatatattatctgtggatagtgatgataatccaatttttaaaccatatttcattgatgattatggtgtaactataagttgtatcgggcgagcatatggattatggcgattgactagatgcttggatgatcttattaattatggagtggcttatgtagaatgcaccaattttgttccctgttctccgcaggaaaatagccctttcatacaattgataacaggtgttgaacgcaacactgatgataattcaattgaagatgattgtgaggatgatgattattgtgaaagtgctgattctggtaatagaattacagataaagatgtgtggataacggggcacgatattcgaaggttattagactgtgatggtgactattttaaaatgccatcattaaatgaaattaagaatgttaattctgaattgcaagtggctcatcctgttataaatcgtcatgctaagaatagagaagaaattttaatagcggcaatcaggtttaaagaagaacagcctaatgtttttttagaaaactgtattaaaaaagatggaactataaattacaccgaattttctaggcagcttttggaaagaccatttttattcccggacggtgattcaccgatgaaatccacagaagcaataattaaaactcttaagaaagcctttaagcaaaaaaatcaagcaaccccgctctaa

SEQ ID NO: 283754 - DNA, 282 bp, Morganella morganii
atgactaaccaattttcaacaccaacaccagaatcacgccgctcaattcttgcggagtatggcgaacagtatgaccgccttattcgtgagaaggatcgccagcgcatcacatcaatctcccgtaccaccgcctatacactcgaaaaagaaggccgtttccctgcccgtaaagcattggggcgtaattcctgtgcctggctgctgagtgacctgctgttgtgggttcgcaatccgccggtggtggataacgtcaataatccgcatagccgtaaaactgcgtaa

SEQ ID NO: 283755 - DNA, 327 bp, Morganella morganii
atgaacaaatatcgtgacaaatcagactttgaaattaataagtctgttgctgaggaattaattcaatccggtttcattattggcgttgaatatcatgacaaacatatattagttatggataagtatgctaataattatccattcgacccatgcaacaacccagctgacgcaatgccgattactattgagaatggcatatcaatgattaaaagctcagggggatggatatgctgtcatggtgcagccggtgtaattgagcatgaaaacttataccgcgccgctatggaggtattcctgatgatgaaggacgcggagaatgagaaatga

SEQ ID NO: 283756 - DNA, 294 bp, Morganella morganii
gtggaaaataaatgtgtagttattgagattggcactggtgataaagtattttcaaccattgattataaagaggaacaatgtgttggattatcgatatctgaacgaaaagataacaatcgtgatatcggaaataaattcacctacccggaaggcacgacaattggcgaccttgagccaatcattgttgttgtaacgcagaatatcaactctctgatagctttgcgtgaccaggttgatgatgtgattgcgttgttaaaatcaaaatgtgaggctgtcgatgaacaaatatcgtga

SEQ ID NO: 283757 - DNA, 267 bp, Morganella morganii
atgaaaagtgaaacatgtgaattactgaaatcagacgaccaaatgacgctgatgatgcgaggtgagcacactgctttaaaggttatcgacactgccattaagtcaggtgaaattgaagaggaagaccggcagcggtgggaaaatcacgacaggtttgatgttggatatttcaaagccgttccgcgtgatggatattccacatattactatccatcaaataaaggcgttaaaggtgcgtttttagcgactaccttggtgatttattaa

SEQ ID NO: 283758 - DNA, 840 bp, Morganella morganii
atgagtaacccaccaatcgcacaggcggacctgcaaaagacaaagcaagcccccgcagaaataacaccagagcaatcactggtcgcattcatgaataagccgtcaatgaaaaaccagctggcggcagcattacctcggcatatgaccgccgacagaatgataagaattgtcaccactgaaattcgtaaaaatccagaattagccggatgtaaccaacagagttttatcgggtccgtagttcagtgctcacagttgggacttgagccaggaaatgcgcttggccacgcatatcttctcccattcaataaaaataaaaagaacccgcaaaccgggaaatgggaagtggtgagcaaggatgttcaactgataatcgggtatcgcggcatgatcgacctcgccagacggtccggacagattgtcagcatatcggcccgcacagtcagggatggcgataattttcattttgaatatggccttaatgagtcgcttacccacatccctggggaaaacgaggattctccgatcactcatgtttatgccgttgcaaaacttaaggatggcggcattcagtttgaggttatgacgaaaaaacaaatagagaaagtcagggagaaaagcaaggctggtgatagtggcccatggaaagaccactgggaagaaatggcgaaaaagactgttatccgccgcctgttcaaatatctgccggtatctatcgaaatgcaaagggccgtcattctggatgaaaaagcagaggccaacgtggaccaggagcacgcatctatttttgaaggtgagtacgaaactgtatccccttctgataaccccaccgtttcaggatga

SEQ ID NO: 283759 - DNA, 192 bp, Morganella morganii
gtgagtgaatccattccggacattgccgcgcgccttgcctgcacgctggctcaaatggaagaaaaacacggctctaaaatgatgagtctgacaaataccgtaagcgacaacgcgagagaggcattgcggcagtgcatcatgattcttcactcatacgactatgaactgatgcagttggataaggagaaataa

SEQ ID NO: 283760 - DNA, 570 bp, Morganella morganii
atgaaattaaatatcacagtagaactcgactggctcgacgaaaatggcgacatagacgcagaagttaagcatgaaattattaacggtgtaaaaaaagccatttccagagattgccttgcaaaagtagagaaagaggcaagtgagcaaattaataaagctattgctgaatcaattacgtcagctcgtcaggcaataaatcaaaaggccgttcagttcgccgacgattggctcatgaaagaagtcaaggtcaccgataagtggggtgatgtaaaagagcagatttctatcactgacatggttaaacgcagctttgatcagacacttgaaaagaaagtcgattcaagaggcaattttacaaaagatagttatgacggcactccgttaattaagtatctgacaggaaatttaattcaggagttggttcaggagaaaatcaagcctctccagaaagaaatcgacactgctattgtcaacgcagttaatgccggtatccgtaaaaatgtttctgacaaattcgctgaaatggttgttatcgcggctcgggatagtaaagcgctcgagtcaaagtaa

SEQ ID NO: 283761 - DNA, 432 bp, Morganella morganii
atggcaatagggttaatttcaattactgagcttgattttatttcggtggaaagaaatcatcttttctatgaccgagaaaaatcagtatctgaggaaacaactatctcattggaaatatctgtttctatttcagaaagatctgacggaagtgaccaatgtaaaataactatggatgttaatttatctggtacagaagaaagtgaaaataaagatgacccagatattgagaccattaaacttgatatgtcagtcgattatatctttgatataaaagatagagaggcatttgattcatttactgatgaagacaaaactagcactttgtcacacatggtatacttagatttcagaagaagaataatgatgagcatggcatcaataggtgcaactagattcagcatgccattagcgctaagcaaaattcaaaaataa

SEQ ID NO: 283762 - DNA, 609 bp, Morganella morganii
atgattaataacacgtttgacccagaaaattacaccatttcagtacggaaaataaccgaagatggcgatacgttctatgtagcaacagtcttagagcttccagatctgtgtgaatacgcagacacacctgattttgcaagaacgctagctctggattcaatatccactgcgtttaatttatgtaaagagaataatatttatttccctgaacctcataaggatatcgaatcagcgaatgtaagtggaagagtaactcttcggctctcaaaaactctgcactcaagatgcattgctttggccaaagctgatgatgtcagtctaaacacatacatatctaattgtttatcttcttatgctgagaggaaagagaatattaatttagtggaagcccaactccatgagattaaggcagctatagaaaagacgatgaattatcataaatatgatgatcacttaaaagtaagtgatgcgagagagctgttctcatccaattatcattttcaatcaacagcaaggtttggggctaagccttcggaagatgatatagattttgataatgataagcgtatgatagacataagattaaataaggcaatatcatggcaatag

SEQ ID NO: 283763 - DNA, 165 bp, Morganella morganii
atgactacagaacaactcgcagaattaaaacgtattgcactggaaaggcttgcagaggcagagagggcggtgaattcctatgcaggagagtgcgaaggatttcgtaggattgaagcttttgatgcattaaaaaaaatcaagctggcgaagcaactttgctggtag

SEQ ID NO: 283764 - DNA, 195 bp, Morganella morganii
atggaaccaacggattttgaaaagtggtgtgctggtgagatggggtgctcgatttattacatcacagaaaacagggtagacgctgggtatcgccggaaggaaatagataagcgttaccgcgcctacatggccggagttcacagcagactgccgtaccagacaccgccaaaaggagatgaagatggaatggattaa

SEQ ID NO: 283765 - DNA, 354 bp, Morganella morganii
atgaagtatttcaaaaaatacccagtaactctcaggcacttttttgaccggccaacgtacgccgccgcagctggatatgacttcaatttcttcgactgcatggcgtttacggcgcataaatatgtcgaatgcatgaagagttacaattggtttttctggctggatactgaaatcagagagctgccattcacagctatcacattgttaaccatgattttcattgcagtgacaacgccgtttatttatccggtttatggtgtggctacatacgttatgtgcaggagagcgaaaaaagtgaagcacaccgaaatcatcgacaggaacattaccggctggttaatgaggttcaaatga

SEQ ID NO: 283766 - DNA, 198 bp, Morganella morganii
atgacagagaaaacacaggaacttaagccgtgtccgttttgctatggtggggaaacagatattcgcgaaaattctcactggacaggaatgcgctctgttgtcaccagcgtgacaatttatcactggtgcacaccaagggatgtattcaggttaacgagaaacacgagagaggaagcaatcgccgcctggagccgctga

SEQ ID NO: 283767 - DNA, 333 bp, Morganella morganii
gtgactctcggtgaaaaacaacgcaaatttacccgcatgattgcggacttaattatcttcgcatatgacagcggctatgagctgacattctcagaggcataccgaacaccggagcaggctgcactaaatgccaaatccggtgctggaattaaaaacagtctgcatacccagcggctggcggttgatttcaatctgttcaaagatggcaaatacctgacagcatcaagtgaccacaagccactcggtgaatattgggagtccatcggcggtacgtggggcggtcggttcaatgacggcaatcactactcgttagaacacaacggcgttaagtga

SEQ ID NO: 283768 - DNA, 399 bp, Morganella morganii
atggcgctgacagtgaagcaggaaaaattctgtcaggcatacgtcgaaacaggtgatgcttctgaggcttatcgctcggcgtatagcgctgacaagatgaagccggagacggtacacaacaaagcgtaccaactccgtaatcagggcgagattagggcgaggatagaagcccttcgcggtgaggctaaaattaggcatgacatcacagtaagctctttgcttgaggagttggaagaggcaagacaggcagccctgaaagcggaaacgccacagtcatcggcagccgtggcggcgacaatgggcaaagccagaatcaccgggctggacaaagttgtcattgaccttaccgctgacgtcaaagttgagaatcgctctatcaaggatattttcgatggctaa

SEQ ID NO: 283769 - DNA, 444 bp, Morganella morganii
atggctagcggtctggaaaagtacctcaatgatctggccggaaggctggattcactggaagtcagagccggttttttagagggcggaacttaccatgacggaaccagtattgcgactgtggcatattccaatgaatacggatctcccggaaataaccaacctccgcgacctttctttcgtaacgccataagtgaaaatcaggacgagtgggcagcagctatggcaagcgggattaaggcagggctggatgtcagagatgttttcgatgcggtgggcgcaaaaattaaaggtgatatacaaatatctatcgctgagttttcagatcccccgctcaaggagtccacattgagggcaaggcgctcccgtggaaatagcaacgaaaatccacttacggacaccagagtaatgattggtgatgtcaattatgaggtgacagatgattaa

SEQ ID NO: 283770 - DNA, 2433 bp, Morganella morganii
atggcgacgataattgacgcgctggttgtgacgctgaagcttgataatcgcggattcagcaatgaagtgaaaaaagcgaccgcagagaatgaccggctgtcggcagcaatcgacaatgtcagtgattcgtctgccgacctcactatcaccatcaaaaaccaggccgacgaaaccaaaaaggcagcgaaaaagcaggacgatttcacgaagtccatcaataacggcatcaaagcaatcggtgctttattcgcaacaatcatggcatcgtcaggcctgtcaaaactcatctctgagatacagaaaagcaatgatcagctttatttcctgagcaaaaacctaggcatgagcgccactgagattaaaaagtggcagaacatggctgagatgtccggcggctctgctgatggtatggcggcgagcatgtccaacctcagcaaatcgctgtgggacttggtcactatcggggattcctcagtgctgccgtacttcaatgcgctgaatgtcggcgtggtcgattccggcggcaagctgcgcgacctggacgctattctgctggatgtggccgacagtctttccggcatgtcacgaccgcaggcgtacaacattgcgaaaaacatgggctttgacgagggtacgattaataccctgctgcaaggccgtgacgcaatgcaggaaatgctggacacgcagcgaggcctggttatctccagcgaggaagaactggagatcagccgtcagcttaacaaacagaatgcacaggtgcgtcagggatgggaggggctgaaaaccctgctggcaaactacctgatgccgtcattcctgaagttttcagaaaaagtgtcaggcttcctgatgttcctgaataagaaccgagataccgctgtgacgttgtttaaggggattggcatagcgataggcctgttcctcattccgatggcgctgaaagccgctacggcgttcatggcgatgtttgcgcctctgttcggcggtattgggttaattctgttgctcggccttgtgctggccggtctctatgatgattacgaaacgtggaagaaaggcggggattccctgttcgattactccgagtgggaagaaaacatagagatggtgctgaccgcactgaaaggcctgaaggattggttcaaggacacaacaatcggcaagtggtttacagatcaggatggcaaccttgaaacatggaaagtggcgctcggtgctttcggtctgtggtttgccggtaagtgggttgtcgggattactgccggattgctgaaaatcggtgccgggtttcttgcgctgttcgggtggccggggctgctggtcgctgggctggtgacagctctcggtatctggcaaatgaagcttaacgagctggatttatccccattgatgacggcagcggcagaggcaaagattaaattcgatgacctcaccaaaagcatcaatatgtttcgcgatgccaaaaacggaattgataaagttcaggccggtatccgtgctggcagtgagatcatcccgggcggcaatatttttaaggccggtattgataataaagtcattgagaaaacgaaagccaagatagaaaaggacggcctgaaaaagactcttagtgacgggtggggcggcttagtgtcatttatggccagtggttcgtcttctcaatcgtcagctaccagtgtaagcgcgccaagcaaaaacaagcgcatatacaataattctgatggtgggtttgccagagagggcggctccagatcgtggagaaacaataaccctggtaatgttgaatatggtgattttgcaaagagatttggtgcgataggaactgatggacggtttgctatattcccaaccgaagaagcgggtaaaaaagcgaaagagcatcttatatttgagagcggaggcgctcgacagctttcgacaaagggggattacggtgccggacttggttatagggacaagacgttatctcagatgctgactgcctatgctccgccagaggaaaatccgacagatgtttatattaaaagggttctttctgctgttggatctgaaaaaagaatgggcgattactcgacggaggaaagggctgtaattctggaggccatgaaaagagtagaaggctggagggctggtgaggaatacgcactgagcaatccaaagataaacagcgaaaaactactggagaatatcgcttcctttaaccagcagatatcgcaaccattagcgccaaatgctatgccgggaattcagcagacaatggttaactctcaggccttgcaatcaggctctaaatcggtgacatacaacattactgccccagtagaaaaccttaatgtgaacacctcggcgacgacaataagcgggacggttagtgatgctcgtgatgcgtggagaagtgacctgttccaggcgattacccccatgagttaa

SEQ ID NO: 283771 - DNA, 465 bp, Morganella morganii
atgctgaaaaattttgtcatcgggcttttggccatccccgctatgtctatcgcggcctttgatgatctgtctgttaaacgcgattcatctggaaacttggaagttgctgatgctaattacacctgcaattaccgcagtattgatgacgcaaaagacaaaaataaaaatgctggcgaggttactctgtatacggaaaagcttgaagacggcagcatatttttcattgttggacttcctggagatgtatctatctcatcaccgcagataaaaaagaccaaagctgaaaaatcggcagtggtttacatggggggagagggaagtgatggttacttcatggtcggatcgtcggttgagcatggtgttggtgcagcaatcaagaccaatgacggtaagctgaatgcatccatcattgttgatgattgtcacctacttaaaaatcttgaaaatccagtggtaaccaactaa

SEQ ID NO: 283772 - DNA, 531 bp, Morganella morganii
atggggttggtaaaattcatatcaggtatattcacgaaaaaagaaagtaacgtgaataatgaggaaaaactcaggtcgctaccaacagttaaaagcgatgtgaaaaaatacttatcaaggcatgatgtctatagcgtcatccaagaaataaaaaaagaatatacgagcatcacttttgacgatgatgacatgatagacagcgtcttggctggttataacatgcgtattgccggggattccttaaggcgcataaatgcgggaatatcaagttcagatgttaaggatatttccgcttggctatctggttggtgtagttacctgaatagttcaagaagggcaatatccttagggtttacccatggcatatgggtcagctcaggatgttgcggctatcggggaagagataaaaaacacgataaatttaatggcaaaaaattccccctaaaagacggcttttcttactatgggaaaacttactacccagggtcccaaaggtattgccggtgcggatataaatcctataacccataa

SEQ ID NO: 283773 - DNA, 1026 bp, Morganella morganii
atgacggacgaaaaaaaattagggtctaagaaatccacggaagttaaagaagttaaaggaaaagcgaaaggtggtgtagcaagggccaagtcgctgtccccagagaaaaggtctgaaatagcccaaaaagctgccgcagctaggtggaaagacaaagcaatcattgcaaaacacaaaggtaatttttttgatgagtttggcattgatgttgattgttatgttttggatgacaaaaataaaactggcgtcattagccaaaggggaatgggtgaagcactaggaatgagtgagggcggatcaaagctaaaaagattcgtcagcgggaaaacaatatctcaatatatcgggccagatttaaaggaaaaaatagataatcccattgtatttcaatatgtaggcggcgggcctggtgagacaccaaagccaacaatacatgggtatgatgtgaccatactgatagatatatgcaaagccatcattgaagcaaaatcccagaataaactggcagttaaccaggagcacctagcaaaacaagcccagataatagtgaacgcatcagcaaaagctggcatacaggggttagtttatgcgctctctgggtacgacagaactaaagaggaggttatcgcttcatataagcgatatgttgcagaggaagcaagggaatatgaaagggaatttactccagaattgtatgatcagtggtacaggctttacgggctgtcaaaaccggaaagaggaaggccttgggagctgcggtatttgaccatagagcacatatatatgccattggcaaacagcaacggtaaagtatacagtcttgctaaaaccagtcgctcggatactggagtgaaaaataaaaaaatacaccagtttttatccgaggtgggtgttaaagcgttaagaactcaaataggtaaagttactggtatcgcaatggtatctgagtctcgagaagagtacgaaaaatacattgaagagaagatttttgggcaaaaacagttgccttttgacgacattgaataa

SEQ ID NO: 283774 - DNA, 1134 bp, Morganella morganii
atgaaaaacccaaaattaatagtgaagcctttcgcaaagaacgggcagaaaaacgtcatccctgaaaactacgaaaccagtatggaaagcaaccaggcaacatgggatcagggcttcggtcagataactatgctccctgtcgctgccggtgggttgccgccaaaaggtcaggattttaacggtatctttaatcagatctcagagaatatcgtttatctctctcagggtggccggtttaagttttcagcggagtacgcggaagcaatcggcggatatccgaaaggcgcaatcctgcaatcagacgatgagaaaaaagaatatctgagcctgattgataacaacaaagtcgactttaatacagtgtccgatatcagcgcatcatggaaacttgttaacactgacgatctgttggctcagattgccagcaagcagccgaaaggtgattacgcaactaagaccgatcttaatagcggtctggctggtaagcagccagcgggtgattacgccacaaaaacagaggttggattaaagctcgacaaaacagcagttgtccagactacagggtcatcaaccacaagcgttatgagccaggatgttacaacgcgtgggttgctggcgaaagtcaacacatctgatgttacggactcgaccggaacggactcagtgaaagttatgagccaaaaagcagtaacagaagagctcaataaaaaattcaacaaaaatgaagtgcttcaaaatgttggggcatcaacaactcaggttatgagtcaggatgcatcgaccaggcttttttcactaaaaaccgaccttcctaaactgccgcttattgggaatggagcaagtcgcagtggtgtaacctcaagccgtgaacttggtgtcacttacacaaataaccggccatactccatttttgttaccgtgatgctgcaatccacggcacgtgattcaaacctgattacaagaatgagaattagtgacacgccagcgagtaacttttatgtcggaacacgggggtcagatgccgatattttagcggaggcaacccactcgcaattagtattgcctggcgaaagatatgtcgttacatcatcgccaaattcaaaaattgtttcatgggtggagattgcgcaatga

SEQ ID NO: 283775 - DNA, 348 bp, Morganella morganii
atgaaatattatatagatgaaaataaagttatttacgctcttgaggatgaacttaatcctgaggaattgcttccggtgaaggttaaggatattagcgaaaaagaggccctgttaattgctaatccgccgccaacaaaggagcagttgatagctgacgcagaactgcaaaaacaatcattactatcagaggctacaagtataattgacccacttaatgatgctgtggatttagggatgtcgaccccggaagaagaggtgttattgaaggaatggaagaaataccgtgtactactgaaccgtgttgacacatccattgcaccggatatcacctggccggttaagccttag

SEQ ID NO: 283776 - DNA, 1239 bp, Morganella morganii
atgaagcaaggttatttgtcacagtattttgaaggtgtagcactaaaacgcttaagtgtggttgaagctgatgtaattcactcaaatcaacatgaattcaacggtgttgaaggccttcgtgatattcttggtgaaccggatggaaaggtacgttttagcgcaaaatttttgtatcttactgatcaagatgatgaacctatagtcgaagatggatttttaacatggtatgacgcacgacagaaagcaaggattgagcgtaatatcatgcgttgggaatatcgactttactttccgacaaatttagtctcgcagtgtgctgctgcgggtgatttacttgtcattgccaaacaggcagataataccttgctggcaattgttgctgaaagtgaaacaacgattgcccagcaaattatgtggctatttggattttcatcacttacccacccaggattttcggtcaaatcagaattagaaactgagcaagatagaataggttttgcagcccgtgttatacttgagcaaattggtatagagccagaggaagaggcgcctaattatttagaccagatgctggataaatttaattattctttccctaaaacaaaagaattctcagcgtatgccagaagtacaatttcagatctagtcagtcttgatgacccagataccgcgctatttgtctggatggagcgggaagaaatactttttcggacccttgaaaaacaactcttgggtgaaaaattacgtaacctaacacagtccggtatagatgatacagatccgtttataaaactggtacagagcgcactacaacgccgtaaatccagagcaggatcagcattagagaatcacctagaacaaatttttagtgagcactgtattaactataccagaaacggtataaccgaaaataacctaaagcctgattttattttccccagcattgaatgttataaagattataatttctcatcatcaaatcttacaatgcttgcgtcaaaatcaacgtgcaaagatcgttggcgtcaaattttgaatgaagcttctcgaataccaaataaacaccttctaactttggagccaagcattagcgaaaatcaaaccaacgaaatggcgaacgaaaaggttcaacttgttattccaaagtgtctacataatagctataccgtatcacagcaaaattggttaatggatttgagctcatttataaatctggctcgacacaggcaaacaacataa

SEQ ID NO: 283777 - DNA, 1257 bp, Morganella morganii
atgacacttgtccaaccacttgagcttttgaaacaggctcgaagcaggttttcacaacgcgaaatcgcagaatttgttggtaaggacacaaaaactgtcagacgctgggaaaaaggagaaaccccttgtccggcaatgttggtaccggcactgcgagaactgttgcaacgctcagacagccctgttaaagatgaaaatcgccactttagctttatcgacttatttgctggcatcggtggtatccgtcaaggttttgaaactcacggtggtaaatgcatttttaccagtgaatggaacgatttttcaaaaaaaacgtacattgaaaattatggagacaaccatccttttattggggatattgttccatttcctgctgaggatgtcccagaccatgacatactgctgggggggttcccatgtcagccattcagcatagctggagttagtaaaaaaaactctcttggacgtccgcatggttttgaatgcacaacccaaggaacgttgttttttgatgtggcaagaataattgcaactaaaaaaccaaaagcttttttactggaaaatgtgaaaaacttgctttcgcatgataaaggcaacacatttgatgtgatacttcaaactcttagagatgaacttgggtatgatgtatattacaaaataattgacggtcaacacttcacccctcagcatcgggaaaggataatcatcgttggtttcagggaaaaaacaaatttttcatgggatgacttgcagttaccaaccgaaggcccgcgactagcctccattctccacaaaaccgatggtagcgagcctattcttccttgggatgaagatcgcttttttaatcatgaccagcaattagtgcaatcaaaatacacattaacccctaaactatgggcctacctgcaagcatatgcagaaaaacatcgtgctgctggtaatggatttggttttggtatggcgtatccagatagtgtgacccgtacactttcagcacgatattataaagatggctctgaaatacttgtttaccaaggaaataataaaagaccacggagactaacccctcgtgaatgcgcacgcttaatgggctttccagataccttccggattcccgtaagtgatacccaagcttaccgccagtttggaaatagtgtagttatgcctgttatgcaggaagttgcacgcataatggttcctcacgtccaagccatcactgaacgggaaagctcaaggttattaaaccttcacgcttaa

SEQ ID NO: 283778 - DNA, 1026 bp, Morganella morganii
atgattcgtgagcgacttttaagagcaccacaagctttagccggagcacagaaagctggaggtggtgtatcactaaaatcgttaccggtagatattgacagtcggctaaatacagtagacataagctatcccaaaattgataagagtgagttttttttacctactggtatttgtagtcgagttgatgaatttataactaacgttcaacgatttgatgagttctttaaggttgatgctgctctacctagccgtttgttagtttatggaaaacccggaaccggtaaaacgatgatgtccaagtatattgcatctcgtttgagttatcctttattaacagttcgttgtgatacattaataagtagtctattaggtcaaactagcaagaacttaaggcaggtatttgactatgtcactcagcagccctgcgttctttttttagatgaatttgacgcattggcaggagctagagggaatgaacgagatattggtgaacttcaacgagtagttatatcgctccttcaaaatatagatgctgcttcagatgatacagttattattgcttcaacaaatcacgaacagcttttggacccagccatttggagaaggtttagctttaggatacctatgcctcttccggatcaatctcaacgagaatcaatttggaaaaatcggttaagaaatatgattggtaatgatctcaatctatctgatttggcgaaaaaatcagaaggtatgtctggagctataatagagcaggttagtttggattctcgccgggatgcggtgcttgaaggaaataaaaatattagtgttcctaagctttataggcgtttatatcttgcccagtcacttgttgatggtgtaaatttaagcacttacgaagatgagattcggtggcttcgttttaaagataaaaaaactttttcaatcaggattcttgccggcttgtataagcttacatcgagagttatcactaatattttgaaggagtcaggaccttatgagcagaaggggaacacagtctag

SEQ ID NO: 283779 - DNA, 2265 bp, Morganella morganii
atgagcagaaggggaacacagtctagtaatgctaatgtttcaaatccaatacttaggatacctttttcaaggggggacttaggttcgatagaaacagcaggtggtggtgccaaagagttagttgatgtaactgcagaatataggcaaggtttagtcaacaatttaacaaatacaaaaaattatttgcagactaaactttcagcgtttccgggaagtttgggcactattgtctttaaacttagagaacaaggtattgcgaaatctcatcggccaaacaaagtaacaagagaagctggtttgctaaatgctggccatgcaaaaattaatgaaatgcttgttgcagcgcattcgggaagctttgatgcgttagagtctgtaatattaaatcgtagaattaaagaggtggttgctaatctcagcgcgattgaaagtattgaaccatgggatgaagaacgaaaaattccaagcgggcgtgaagctctttttgattctccaaatatacttgttcgactttttcagtatacagctgaaagtgccacatccgacaattatgaaaatataattaatatattaaataataatgatgtagattatcaaccgattagacaaaggcgtggacccccattgttacgcctgaaagatctctctgttgaccatgacactttattggatattttaattaatcatccaggggtaagatccttagtaccggaaccgatttattcggcttctcctgttaacactagttttgttgaagaaatagtaatcgataattatcccgctccaaccgatgaattacctcttgttgctgtttttgatacaggtgtaagcccaattgcggtgactgttagcccgtgggtagcaagtagcgatacatatgttgttccacctgatactagatatgagcatgggacgatggtttcatctctagtgtcaggtgctcattttttgaatgatggtcattcttggattcctaataccacatctagggtgcatgacgtatgtggtttagacgagggtggtacatacatagcagatttgattttaagattaacagaagcagttacaaagagaccagatattaaaatttggaatctttcattaggtggtggaccatgcagtgagcatatattcagtgattttgctattgcattagacaagcttagtgaccaatttggaattttatttgttgtcgccgctggtaactatgtagatgcgccaatccgtacatggccaaatccaagtctgcttggcggagccgaccttgtttcttctccaggggagtctgtccgtgcattaacggttggttctgtttcgcatattgatgctgctgatgctttgagctcgttggggacacctacgccttatacacgtcgtgggcctggtccggtcttcacaccgaaaccagatattatccatactggagggggtgttcatgaaccttggtctactggggctagcagtttaaaagtcattggtcctgataatcggttatgtgcaagcttcggaacaagctttgcctccccgatagttgctagcttggccgcacatacttggcaaaagatagcaacaaatccagacttcaatgtatcaccttctctagtaaaggcacttttgatacattccgcacaactttcatctccggattactctgcaattgagagacgttattatggagcgggtattccagaggaagttgttgaaacattgtatgacacagatgatcgatttactttgatttttcagacattccttgttccgggaatgagatggagaaaagaaaattatccaataccagcttcattaattaataacgataaatttaagggtgaaataattattacggctgcttatgccccacctttggatccaaatgcgggaagtgaatatgttcgtgctaacgttgaacttagttttggcttgattgaagacaatagtatgaaaggaaaagttccaatggaaggagatacagggcaatcgggatttgaaagtgctcagattgaacatggtggaaagtggtcacctgttaagattcaccgtaaagcatttagacgtggaatagcttctggcaattgggctctacaagcaaaagtgacccttagagcgaatgaaccggcgttgagtgaacctctgccagtaaccataattgttactcttaaatctttgaatggagatactcgagtatactctgatggagtcagagctttaagtattaataactgggcgtattcaccgttacctatccgtgtaccgataacagtttag

SEQ ID NO: 283780 - DNA, 192 bp, Morganella morganii
atggcaacaatgaccattcaggcagagagcgaacgccgtagcccgtacccgctaaagctggtggcatttgatatgaacgcactggaactgatgacctgtcagaaagggagccgaattactgctactggctggcctcgctggtataacagttaccaactagcgggcgcgctagttaccatgtggctaagttga

SEQ ID NO: 283781 - DNA, 1125 bp, Morganella morganii
atgtacttttatgttgatgaaactgggcatactggcccaaaacttttcgatcctgctcaacctgtactttcctacggtgttttatcatcccctgaaaatttagatgaagttgcggagtttgagctcgcagttatacgtaaaaaactgggggtgcaccgtcttcatgccgctgaattgggtatgtatcgactctcggaaatcgtggatactatgctcgtattgcaaaaaaagcatcggattcgttttgatatctggcaagtggttaaacgcgatcatgccattatctcgttcttcgaccaagtgtttgatcaagggatgaatccggtggtaccttggagcgcttactggactcctttgcgttatccgctgttacttaatctagcaaatctgtttgatgatgaacttgctgaaaaagcctggaatgcccgacttgaagcacataatgagcgttctgccatacaatttagccaagtctgtaatattctacttcggcgtgtgcatattctcgatgaacgttcaaaagagataatcaccgatgctttaaattgggctttggtcaactttaatgagttgaattataactgtaaaacaaaaaaagacaggttgcgagtcatgcctaatatgattggatttcaatcagtaatgcatggcatctgtgctcgcttgggtgctccaaatagaaaagctaaaattattgttgaccaacagtcacagttcaatacaacccagcaggaattaagtgagttttaccataaaatacgagaacagccgtggctattggggcctggtctacccgtaatggatatgaaaaatatgcctgctgcaccacttgtcttcgaatcaggtacccgcagtgctggcttggaattggttgacctatatctctggaccttcaaaagaggtatggaaaacaaggagctaactaaaccacttcaccgtctcatttataccaatcgtaatacaaccaacactgatagtgtgtctttagaatcaataggtaaacgcttccgagagtcctttgaaaatttgccagaattaaccccagaaatgattaaaaagggtcaggaatataatgacatggaagaagcccggcgcctgcagtatcgagtgaacaagttaagttag

SEQ ID NO: 283782 - DNA, 1455 bp, Morganella morganii
atgatgcatttagggaaaaagcatgtcttcaatattgatttagaaaactttttcgggagttttaatttcggaagggtgagaggttttttcattaaaaacagaaactttttgcttgaaccagaaatagccacggtgattgcaaaaatagcctgttataataatgaattgcctcagggcagtccgtgctcacccgttatttctaatttaatcactcatgctttagatattaaattagcggcggttgccgcaaaacattcatgtacgtatacgagatatgcagacgatataactttttcaaccaggaaggaaaatataccctcttctgtagcaaaatcagataatcacacttttattgcagggaggatcatcagaagagagattgcccgttcaggattttcgattaatgaatctaaaacgagggatcaatacaaagactcccggcaggaagttacggggttagttgtaaataaaaaaccaaatactaaaaaagaatactggcggcttgtgcgcgctcagtgcaatcatctgtttaatacgggggagtttaaagagacgataaatggcgctgaggtgactggcaacattcacaggctcgaaggaaaactgactttcattgaccaggttgatcattataaccggcttcgtcagggcgaaaagttaaatcctaaatatcatttaaaaaaagacgctatcaaaaaaaaagactcttcaataaggcgttatttacatacgtccagagagacaacatttagtaagtttcttttttatcgctggttctatggtaacaccaaacctacgattcttactgaaggtcagactgataatacttatttaaagtcagcaatatggaagctagcagtccaattcccgaaactggcaactgggaaaagtgccacagagccttataaggctttgactcagtttttcaaatataatgagcgaacccgatacttattagagctttttggtggtggtgattatctgaaggattttgtagccaattacaaaaaattgtttaatgcttacaaagcacctaaaccatcgcacccagtaattatattcgtggataatgactccgggcctaataacatgattaattatattaaaggagttaagggcattggtattttcccagcgaatataggtgtggccgacatccgtcagtctgaatttgttcatattttttgcaatctttatctggtgctcacacctcagggagcgggaagctctgagactgatattgagtatttctttagtgatgctgatcggctcagggaacataaaggaaagtgttttaatacggtcgccgaccgtgacacagttaatgacctcagtaaagaagcgtttgcgacgcatattgttaaggcgcagaaaagtattattgatttttcacggtttactcatcttttagaacgcatagaaaaagtaatagatcactataattcaataaagtga

SEQ ID NO: 283783 - DNA, 213 bp, Morganella morganii
atgcaaaccgaaccaatcatcaccacaaacaacatgtcagtagacgatgttgccgcgtggatcaccgaaaaagcccaggcttttcacaaactacaatcactccgtaccgaacgcgaaagagcaatccgcgatcacgaacgtgctctggaccgctttgatgaagacattgccaagtgggaagaccgctgtgctttaacagtacaaccgcagtaa

SEQ ID NO: 283784 - DNA, 1329 bp, Morganella morganii
gtgaataataatgaatttaaagaaattcatcgtggtttcgtttcttttgaaattatcgctgtattagttttgattttgttaggctctttatacggggctgaaaagtattctcaatatttgcaggagaaagaatggcatgttgctgctaatcaaatccaggttttcaatatggcagcaaaagaatatattgcagataacaatgattcaattttatcaggatcattacctttaagggttacaccatcatttttaaaaggaaaggggtatctaagtaaaaatttctctgagataaatagttttggacagggctatttaacaggcattgttaaaaataatgactcaaactctaaatcaaaattacaagcgcttacctgtactgtaagtggtacagctattactgaaaagggaatgagagccattgcttctgagattcaggggttaggcggatatatttcagataaaaatattgctactggagcatatggcggatggtctagcaaaccttctgattttggtttggattgtcgtcatggacatatatctattgcgttatcatctgaaatattaggtagtgttcttcaggagagtgaccggttatatcgttttaaagttaatcataagcccgatcttaatactatgcatactcatatagatatgggtaaaaatgatattaagaatattaatttgctggaagcaaatgatgctgtctttatcaatacggtaatgtcaaaagggaatattaccagtagctcattagtatctggtcaatacttattttcatcatcaactgcgttatcaggagccgcctgtaataataatgggttaataagtaaagatagttccggtgctattttatcctgtacaaatggtgtatgggctaaagggggaacgggtgtcccggttggcacgattgctatatggggagcgagtaagttccctgatgaatggcttgaattaaacggaagtgcgtttgataaaaataaatatcctgaactggcaaagctgtttccatcaggttatttaccggacttcagaggcgtattcttgagagggttagacagaaacagaggattggacagtgagtccgggcgtgggttacttagttttcagaacgatgcaatgcaacggatttatggcgaaatgagaacagatggcgcgagtactctggctaccggcccttttaaagtcttacgaagagatggtactgagtggtccggcggacgtggtgcgtcacaccgtttcgattttgactcagcaagagtcacgagaacagctgaagaaacgagagtaaaaaatatagccgtaatttatattattaaagcgcggtaa

SEQ ID NO: 283785 - DNA, 669 bp, Morganella morganii
atgttcattaatgtatttttttatgcgctaattactttgtttttatcaatgatggttaattactcaatgtcatttttggcggagaggtttctaaatagaaataatgaaaactcactaaataatgtatggggtaagattaaatttgttattccatattcttcggttattatttttcttacgatgtttaatgatttaaagctttgttcggtattttttcttgtggtttttcatgggttcctggttttatttgtttttttagattctgctagtagatgcctgccaaggaattatacgttttcttttattggtgttggcgtaatataccattttagttcattaggtagggattttttaggtgttgcttttatttttatttgttcgttgtttgttctccacgctgtccgcgtcttaacaaaatacatcaatggttttgaatgtatgggcaaaggggatatatatcttatttcaggcttggtggtttggtttgaattttatatttctgtcgtggttataataatttctttgttacttagctctgtctttctcttgataagaaagtatcgcaatccaatatgctgggccgaacagtcaaactatagaacaatcccgtttgcaccttttgtatgtgtaattgcaatgttctattcaccatgtcttattgtgaggtga

SEQ ID NO: 283786 - DNA, 474 bp, Morganella morganii
atgcgcaattctgtgaaggtgggtgtgttatttatagtatctattttttttagttgtaaatcatttgcatactgctttaatgaggccggagaaaaatataaaattgaccctgctttgttaaaatctattgctatgcaggaaagtggattaaatgcaaaagcaataaataaaaacaaaagaaatggaaaggtggtaagtatcgattatggtgttatgcaaattaattctactcatatccccggactcattaagcttggtgttataaaaagccatgaggatttacttaataatccttgcctgaatgttcaggtaggcgcttgggttctggcaaaacatttacgaaaatgtggtgtcaattgggagtgtttgggatcgtataatggtgggttttctgagaaaaacaaacagataagattgaattacgccaagagaatatatagtaagtatttaaaagaaactacgtttaggaattag

SEQ ID NO: 283787 - DNA, 612 bp, Morganella morganii
atgaaattaatgaaaataaaatctgaaaatgaaaaattaaaaaacaatctcattcatcgtgggtttttaagccttgatacaatgggggtgttattgattattgctatttcagtgattgttgtattaggtacagtttcaatgatgtttagtaaaaatactgtaaatacagaaatgtcaaatattcagtctgtagttacagaagttcggggaatgctaaaaactcagggtgaatatccattcagtagtgctgcgaaaatgacaggaactcttgttcagttcggtggggttccgggaaatttaactattaatggagataaagcttcaggaaatgcaaaaattgcaaatggttggggcggtgatgtgctcatctcacccgaaaaggtgcagggttcaacgaataataaaggtttctcagtaacatataaaaatgtgccgcaggacgcatgtattgcacttgcgacgaaattaagcagtagtgcaatgattagtgaggtaagtatctcagggactaataactcaggcgctgtaaatgcagaaacagctggtacacagtgtaaggcagataatggttcaactggtcagaatacaatgatatttaaatccaataactga

SEQ ID NO: 283788 - DNA, 1101 bp, Morganella morganii
atgtttaaaagactgcgtgagaaaatgcagtctgttgaaaataatgattccggaatagcgcgttggatatatcaaaaaacattttccgcaaaagacaggatttctttttatgaaaatcttgcatttcttttagataatgataagacaattaaacaagccttctctgatatgcgggatgtagcaacagatttcggaaagaagcatagcccttatgctgtattgttaacggactgtattagctctttggatgaagggcaggatgcatttgaattagttcttcttgaatggataccagagcaagaagctgtattaataatgtctgggctggaagctggtgatgtcgaaacatcattgcgtcaggtatgcaaaatagttaaaggtaaggctgagattaatcaggctgtcattaactcgatatcatatcccggttttttgatttttcttgttttattaatgatgagtcttatctatgataagttcattcctcagttggcgaaattagttccgcgagaaaaatgggatggggcattaaaatatttgacagtgatttctgaatttttcattgataataagatactgcttttattgttggctattattattggggtttttatttattggtcaatgggaaactggaaggaaaggcgatgggctgataatttaatgccttggtcaatatatcgttctatacagggggtttattttttatttaatatttctgccttattaaaggttaatactcctattttaaaggcaatgaaaacaatatcagcaacatccagcccctggcttgagataagaatacattcagcaattgattatttgaatcaggggcagcatataggattggcattaaaaagcacggggtataattttccatcaaaagactgtgttaatcaaatggtgttattaactgaaggaaaaggagctgaaaatattcttgagaaatatgctgaacattggtttgaggaaacggttagtttagttaaaaggaagactagatacctcacagggttttgtttatgccttgttttttcattcatgattatgttggttttggctacaagtgaactaaataatctcgtcaatcaaatgggttaa

SEQ ID NO: 283789 - DNA, 1515 bp, Morganella morganii
atgacgaaaatattacagcctgatactgaaattgatcgttttatcagggtaaccagtactgatggtggcggacttcaaatatgggtggcagataatcaaaaaacaaatttgaaagtacaaaactatgtcaaccgtatgcaaaatgccaataccggtaaagtatcagttagctttgtacctcttgatgaaattggtaaaaaagaacagataattgaagcatcaggacgtagccaaaaccagaaaaaagtaatgacatatttcagaaaagccagtgaattaaatgcatcagatgtgcatttaacaattggcagagatggaagtaattattgctatgttgaggttcgtgttcacggggaactaagatgcattgactgtattgataaagaagaggggatggagttggcatcaaccattgttctctcaatgtgtgatgtcaccgaaaaacagttttatcctaatcaaaatcaagatggcaggattgctgaggaatttgtaaaagcgctgggaatatttggtgcccgttatgctcatatgcctgcggtcggcggtttgtacgtcgtaatgcggctgattccggatgatagtgaaacacctcccacaatggaggagctgggctttttaccggaacagattaaaaccttcagaagcttgctgaggcgtcctgatggcatgattatactatctggtccaacgggatcgggtaaatccacaacgttacggtgtgcgtcctcaatgtatctcagtatttgggggtatgatgaaaaactaccacgcaggcggttgctgaccattgaagatccaccggaaggtcgaattgagggggctatccagacaccgataacagcagataaaaaggatacagaaagtcttaaacgggcttgggtattggcaaatgtgtacgctatgcgctgtgaccctgatgctattcttaccggtgaaatacgtgaccgtgaatcagctgaatcagcgacaaaggcagctttgacaggccacctgttacttgcaacattacataccagtgacactctgaatataattgaacgacttgaatctgaaggggtaagtagtcgcctgattgcagatccaaaagtattgacggggttaatcagtcagcgattggtgcagcggttatgtgaacattgcaaaattccctggagtgccagaaagcagttattgttacctgatgatgttgaactcgttgaaaattactgtgatataaaatcagtttatacaagaaatatagaggggtgcgaacattgtaataaaggaattaccggtcgaattgttgtatctgaagttattgcacctgatgcaaaattttatgagttgtatcggacgcacagcaaaataattgcgcgttcttattggcactataaattaggtgggataacaagaaatcagcatgtgattcattatattaataatggcatcgttgatcctttgggagcgcatgctatttgcccaattgatgaggatagttattctttgctaaaggagtctgagttaaatgtttaa

SEQ ID NO: 283790 - DNA, 489 bp, Morganella morganii
atgcaaatccgtaaccatatattttggggtgttggtatgatggtatttattttttcagtaaacaatgcctatgctcaatcaccattaccattattaagtggcaatgaaccttccttaagtatgcatactttgcagcgtttggagttgatacaggccgaaacagtattactggaggctcaggcagcgagagcaaaagttcaacgcgaactggatgaggttcctttaaatagtaataaggaactagcaacgaatgtacctcagacacaacagcaaatttttaccaggtcaacatattctttacctgtagtacaggaaatatatggtaataaaaaacgtctggttgcccagatagtcactgcggaaggtgggatcacgacagtttcagttggtcagataattcaagggactaattataaggtgacgtcaataacatcaaagtcggttcaggtttcagacggaatagttacacagactctggcttttaattag

SEQ ID NO: 283791 - DNA, 1293 bp, Morganella morganii
atgagtgacaaccctgtaaaaactcattctgttttaattgaaaattatgcttttattgcaggtattaactggagaccgatatcattaagagaaacaaggcatttaaaaaaaatagcgcggagagaaagggctgatttaactgttatcaacaagtatcgtgatgcagatggcaatgttcagtatttggcggggttgcttaaaaagagttctcttaaaatacctaataaagttaataagatttattcattaggtctgtatttaagttcatttttccaaaaaaacgggtatgttattttacgattggatgaaaatctgttctcgttttttggatatgtgaatggtactctttataatgatgttgtcggaaataaaattaatattgaacaagccaaagatacctatattaattttaatatttcatctgtgcctgatgatggctggcttatctttgcaccagatgattgggggattgagggggcagttccatttgaactaagttctcaggtaaataaaaagaaattatctgcggcatcaaaatttaaaccagcttcgaatataaaaactggtttactggtaagtgcagttgctgtacttggagctggtgtttatttttttacacaccaataccaagagatggaattggaaagggtaaggcaagagcagcgagaagcaatccttcttgaacaacagaaaaatcaacctcgtattatccctccctggactacgacacccgatctaaatgagtttgtaagaacgtgctctacacattggcaatctctgcctttgtctatagcgggttgggtgttccaggaggcacaatgttcacgggaaaaacttcggatggcataccgtaagccggcgggtgttacggttgcagatttttcgacacgtctcaaatacctgtaccaggggaaacatacaccatatttcaatataccgggtcagggtgatgcaggaggattctcggtgtcgctcacaatggttgatgccggaaacattgaggttttgttaccttcggcagatgaacaaacacaacgtatagtcagcttcatgcaacggcagcgaataccaattactctttctgaagaggataaccgtattatttcaccgaatggtgaggaaacaatacttccctggcggagtttcaatttcaattttgaaactgttgttcctccacaatacttattttctggttttaatggtgagggtataaggctggaaagtattacagtatctctgaataaaggacgtttaacatataaacttgaaggtcatatttatgcaaatccgtaa

SEQ ID NO: 283792 - DNA, 1614 bp, Morganella morganii
atgagaagtcttacgtttttaccgtcaatcatggcgattcttgtgcttgctggttgtgcgggcagtgatcgcataaaccaaaatatggatacagcagatgtcaattatgatgccgggcgtcggcaaattgagaaattgaagaatgcgaaaccggtattgagagaggcatcccagcaatgggtaaaccgtgagccgattaaggttctttcatcaaatcatgctggcgtaccatcctgtgctattacaatcaaccggcagggcagcattagcctgaatgaaatttcgcaacgaatttcttctgaatgccatattccggttttcatcacgccggatgcccgtcaatctgcagtaagcatcggaagtggtgttacgcatcaaatacaaggggatataccacctcctgatatcaatggaatgcttccgttagcatcttttggaaaaacagcaccgtctgcgcaaaaccaaaatggccaaaacagccttgaaagcttattttgggagggggctttatccgggttacttgatactgtaaccagtcgcatgggattgtcctggaaatatgaacatggccgtatcgttgttttttatctggatacccgttcatttccggttacattcatggattcgaaggcggaattcaactcaaaagttgtcagcggaacaacaacgacatcaggtaatggtgatggcgctatttctggtgacggaaatacatccacggctacaactatggaaataaaatcatcgttatatgcggaccttgaagacgctattaaatctatgttgactcctggtctggggcggatgtttttatcttccggcatgttgactgtgacagattccccactggttcttgatactgttgattcatttataaaggagcgaaataaggaattaaaccggcaggttgtacttaatgttcaggtgctcagtgttgaaaaacgtaataaggatcagttaggtattgactggaaagctgtatttaacagtggaagcatcggactttcattgagcagcggattagctaatgcagcagaaaatagcctgactggcggcgtatcaatcattgatggcaaattagcaggttctaagggctttatcagagctctttcagaacaggctaaagtcagcattatgacacagcagtccagtactacgacaaatatgacagcattaccgatgcaggttgcagagcaggaagattatgtttccaaaataaccactgaatcaacagctaatgtaggtacatctacatcaataacacctgcgacaatcacgactggttttaatatgacactgctgccttatatcatgccaaactcgaatgaccttcagctgcaattttcaattagcctttcagatccaccgaccagacgaacatttaccagtggtgaaaatacagttgaattattgaatacaaaactaaaaactgtaaatcaacgtgtgaatatgcggtcaggtcagactattgtattatccggtttccagcaatctaatcagaatggaagtaagcagggggttggtcagccgtggttcttcgggttaggcggaggtcaacaaggtgatgcatccgataccatgctggttattctcattacaccaattattttgtaa

SEQ ID NO: 283793 - DNA, 447 bp, Morganella morganii
atggggtatttgttactttcatttttcctgattattttcacacttggcgattattattatgaccaaacaaatattcatcaggatcaaagcgaaattactgttttaacaactcaaagagcgattgaatctgtccggtatatcgatgcaattaatgattatatttatgaacatccagaggtaatgaactcagaacatgaaattattttaactgattctcagataggtatggttcctcattatgggattcgccatgttatctggaagcgccgtatttttgtatggcagccgccttatcctggtttaaccggtgcaatgaaacagcaaacaaattcatctgcactgttgggaactgtgaacggatcacatcttattgatttagagggaaatgacatgcaggtttctgttcctttgtcactcccggaacacgccgttgtgtacctgaattag

SEQ ID NO: 283794 - DNA, 750 bp, Morganella morganii
atgaaaaaattcccgatcttagtattaatttccggtggtttaagtgggtgtacattgaatttgcaccagtatcctgaacaggagctgaagcctaaagttgaggataccgattcgtatgtacaaaaagcagtagtcaacttcattgaattactggacaggccagttagcactggcgtagatagatatacaaagttaactaccaacaaaaattatattaatcaaagtactaattcttctaagactgctcagaatgttaagctgggtgtatcaatacccctggcaaaaaaacctgaactttcgcgctggaatttgaatccaaatcgaaaattaaaccctgaaaaagttaacaatcaacatacgcaagctgccaaagataaacttccagctataaagaaacctgaaggcaccgggaacgcgaagcctataatacgcgccgctgcggcgagtgctgtacctcgaacatcaccagtgattctatcttggcggattactaaaggacaaacattacgtgacggcgtcactttttgggcgtcaaaatacccttgtaagatcaccggaagtaaaggttggaatgtcatctgggcaactgatgtgaactactcaatagatgcaccacttgaattcaagggagactttcagtcggcgttgaaggaattgtttgaattatatcttaccgccaagaaaccgttatatgcagaaactattacgtcccagtgtcttatcagggtaattgatagcatttcagattag

SEQ ID NO: 283795 - DNA, 1182 bp, Morganella morganii
atgtcagctgtacctgaacagttacaactatttaatttttctggtcgtctggatggcgaacaaatgaaatgtttttttacatggtgtgccaaaaattcagtgtctgatattcacatacagggggggaacgagctagttgtaggaagatacggcaggcttattcgagtaagtcagtttgttttagctgatgatgtaatgtcaaaattatgtgatgaaatattcaatcccgaggtcagagcaactgttaaaggtggccggccggttgacagagcgcttcaactggatggcgatattaaccagagatatgatttggaaaggggtgaacgactgcgtttccgttgtaatttcgttcagggaacggcagggcggcttgatacgacattagcactaacaatgcgagtcataccttccgaaattcaggctctggagtctatggacatcgagccggaattatttgacgtattacttccgcataaaggtctgggtttaattggtggtgaaacaggatcaggtaaaagtacacttcttgcgagtatttatcgttattgcctggaacaatatccggaccggaagctaacaacccttgaagatccaattgaatttattctggcaaaaccaggtgatattttgccggtaacccagttacagctgcggcgtgatatagactcttacgctgagggtatcagagctaatttacgccgtgcgccgtctgtcattggtgtgggggaaatgcgagacagcgaaactattgaagctggtattgttgccggacaatcaggacacctttgtttatcgactactcatatccactcaccgggtgaagcgatttcccgttgtgtgacgaggtttcctgcagaagtcagagaagcttatgccagggatatgctcggtgtacttcagtatatcgtggttcaaaaattaatcagaacaaccgatggtaaacggaaagcattaagagaatacatagtatttgatgatcagttgcgtacagaattaggcgacaagaaatatcaggtatggggtcaacatattgacagtatcattaaacacgaaaaacggcgaatagctgaccatgcgtggcaaatgtattgtaataaacaaatagaatatagcgaactatctgttgctatgaataataaacagattcgagagtttgaaaatgggggttgtcatgaacaatga

SEQ ID NO: 283796 - DNA, 801 bp, Morganella morganii
atgcgaaatgtattacttccgtatgctttattattttttggtttaaatcctgtggcatttgcaagttcagagaaagtatctgataaacctgcggggattaatcagtacttatcaagaacagtacaaacatcggatatctctgtaactaaataccaacttttgtcagaagcgggaagaacgcttggatttcgtggaggcaaggcggaaagagcatttgagataactcaggcattaacagataaggctgaaacattggatcgtctatacgatttcagaacgctgatcagtaatcagggttggcttccaccagtaattgatgaagcacaggatatcgcccacattaccgatgatcaaatcagaacggctaataaagtttatgaaattattcaaccggcaaggtttattagtaatcccccttcctggcgcagttggttgttgaccggtctatctggtattcctgaaaacgggcctgaatccgatgttatgactgagaataatgctcagaagaaagtatgggaaaccgcagtcaggactggttgggacgaaggacgtgaaagtgctgatttaattctggaagccaattttaacaggcttacccgagattataaggggatgttgatatattcgcagctactaaggcaaggctatattacttctccggttattacggatcaacaacagaccgtaaccggagacaagcaaaaactgactactggtgagcgcttacgcaaactgaaaaggcctgctgaatttgtcacggataagaccaaatggcgtcctgttataataggagaaaaataa

SEQ ID NO: 283797 - DNA, 450 bp, Morganella morganii
atgcagtttactaaaaacactgtattatcatgcatatttattctgtgtggctgtatctatcagcagcctaagaatattgaaactaatcgtattgaagtgtcgaatgaggcagtattcgttgcacaacaacaactgcttggaattcaaaagattataaacacgccagacggtataccaaaacaagccataaggagtaatataagcagagtttcagttaattgggatggtgatgcaattgaactgttatcgtacttggcgaaacaacgcggacaaacatttaattgggtcggtgtgcgactacctttaccagtaaatattcatgttaataacataacatatcaaaatttactcagaatgcttaatgtgcaaatttcatggagagctgtattagatgaatatcctggtaaaataacattatatttttcacctgttgtgaataaggggagataa

SEQ ID NO: 283798 - DNA, 216 bp, Morganella morganii
atgaaacaaagtaaaaaagaaaaaaagactcaagggagtaagagtctttatttgagtgcgagctgtatagaatctattaaattattttccgttgaagtaagctatcgctctgggtgtgaagtgtcaaagaataaatttattgaattcctgctcgaaaattatgggaagatagctgtcgataagtatgtaaaagaatccacaaaggaaaaacaataa

SEQ ID NO: 283799 - DNA, 501 bp, Morganella morganii
atgaataattggtatcttttatattgtcaaacacagaaatttgacttagtagtatctcgaatctcaagtcttggcgttacttgctattatcctctggaaattgtgatctcaaccagaacagatcgtccatcgatgcgagttaaacgcaaacctctctttcctggatatttgtttgtttactttgatcctgaagttattcacacaaccaccattgctgaagttcccggagcacatcaatttataagattcggcggtatgccaagtatcgtcgatgaaaatgttattgaatcctttaagggatttcaacaaatcagggagaatcgtgaattggaaacaatagaatgtattaatttgccgaaatatatctctgatgaagttattaatatatacaatgtcaagaattgtactgaaagaagtgttttattaatgaatctggtagagagatggcaaaaggtattaccaacaaaattgcaagctttctctacattatcaacatattaa

SEQ ID NO: 283800 - DNA, 573 bp, Morganella morganii
atgagcaattcaaatagttcatttggtgagcggctagcaaaggcgctgagtttcagaaacatcaatcaggctcaagcttctgaattaaccggcgtaccaaaagcaacgataagtcacattattcgctcacaaagcgatagctataaaaactctttcgaactggctgatggcttgaagatcagccatgattggctttctaagggaatcggaggaatgcttaatccctcacctcactacctacctgttataaaggaatatttcagattgagactgttccattctgaacagttcatcgaagatgatacacaatttattatcactgatagaaactatggtgctggcatgtttgcaactgtagtaaatcaatcactattaatttgcacttcacttccggaaaactatgaagttacagaacgtaagctgggatatttattgtggactgagcggagaaaaaatatcatatctgatttaactcaaattcagggcaaaagagtatttgtaatacatgaaataagaaattatgaaattcaagttgaagatttatatttttcattgaacatagccaatgaataa

SEQ ID NO: 283801 - DNA, 1926 bp, Morganella morganii
atgatcatcattattccgccaaaacgacaggatggagatacaagttttcgcaaacttgtagagtacatcagcgttcgtgacggagtgaataatgatccggacaaggtaatacaaaccgaagcacacagcgataatactgacccggcatcagcagcatttaaccggcttgttgattacatcgagcgggcagacagccacagtaaaattaccgttacagaagaatttcaggacggccgctcgcgggccaaatccgggatcgtggaaagtgagacaaactgtttctcgctgcaaacagccgcctcagaaatgaatgccgttgcatcacagagtatccgttgtcagcagccggtataccatttcatcctcagctggcaggagagtgagaaacccactccggatgatatttttgccagtgccagatactgcctcgatgcactcgggatgagtgatcaccagtatgtcacctcaatccatactgataccgataatcttcactgtcatattgccgtgaacagagtcaatcccaaaacctatctggcgaaaagtatctggaatgatgcggatattcttcagaaatgctgtcgtgaacttgaaagaaaatatcagtttaagcctgataacggcagctggatatggagtaatgataatacgctggtcagggccccttttcattttaaaccggctcctcagggtgccgcaaaacgtgagattttttctgataaagaaagtctgtatcactatgcggtaagaaacgtccgtgacaacctgacggacgcgttccgtcagccatcctgcagctgggatatgattcatcgtatcctgaatgagcagggactttcgctcagagagcataatcaggggctggttatctgtgatgccggttccccggatatcatcagcgtgaaagcctcagacgttcacccgacactgacaaaatttcagctggaaagatatcttggtgagtatcaggatgcgccacagtttaacaacctgaatgatcccgatccggaaaactggtatatgtctgatatcaaaaatacgtacaatccggagttccagcgacgtgacagcgagatcagaacagcacagcggattgccagagccgaagccagagccgcattaaaaatacgatatcagacctataagtccgggtggcaaaaacctgatctgcaaatcagggaacgttaccgccgaatcgccgcgcattgcagtgccaaaaaatcggcaatccggcgctcccggcatgatccgctgctgagaaaattactttatcgtgttgccgaatttgaaaaaatgcaggcggtttcaaaactgcgtttaacgctgaaagcagaacgtgaaaacctgattattgcggggcattacaagccattatcataccggctgtggtgtgagcaggaggcgattaacggtgacaaagcggccctcagtcagttgcgtggctgggcatacagagagaagcgtaatgtgaaacaggcacagttaaaccgtaacagcatttttgtttcccgtgatgattcaccgggggagtcagcggtagtgactaccgggactcataccggtgttctgcagaaggacggcactgtcctttattatcgtgacggacagccaacagtaaaagatacggcgaagggtatcgagttaatgccgggatttgagtattcaggaaaagaagagaattaccggttagtgaagacaattatcagccgttcagaggtaaaagaggtcactgtcagcggtgaaagcgcgacagtgcgtgagatagagtctgtcattgccggcagccgctacagtggtcaaaagccggcgcatttaagcaatgtgacagcccgggccacaagagtaacagtgatgccggaatgtaaggacggtcataattctaaaacagcatcagatatacatttacaacgtaagcctaacagctga

SEQ ID NO: 283802 - DNA, 315 bp, Morganella morganii
atgtcaaaaagtgaatcgcgtcagaagaccgtttttatacagatccgctgcactgctgatgaagcggatgcaatacgtgataaagcaaaaaatgcgggggtaagcacctctgaactcctcaggaaatcggcccttaaccggaaaatcacagtaaagacagatatcagaatgatgaatgaactgctgagactcgggggattacagaagcacctttacaatgaaatgcaaaagcacatgacaccggaactcagcagacaattttccgatgttttagtgagtataaaacaagccattaatgagatggatttacgctga

SEQ ID NO: 283803 - DNA, 300 bp, Morganella morganii
atggcttctgctgaaaaaaaattttactcgaaagaagatattacacttgctcttgatggtctgagggggctccctgacctttcagaagagaaattaaccaaaaatgatgttctggaatcactgaaagatgaaattattattcttgcaacaaagaaatcatacagcgctgctgagataaaatcggcactgctgacagttgatgtcaatgtgagtgagaaagcgataaatgatattcttaaagcgtctgagggtaagacaaagagaagccggaagaaatccgataagaataaagaacaatga

SEQ ID NO: 283804 - DNA, 747 bp, Morganella morganii
atgtcacaacttgattttgatctggtattcccggaaaaaaatatccgtcaggcacagttgatcagtgttattaagactgaatacgaagaaaaaaaaggtatcagaaactataaaaaggaatttatcactctgtttaaaagcacggcgcaatgtcataaacggtataaggttttttctgattttcttgctgtatcgtcaattgctattcagaattccgttctgaaatgtaaagagctggaagatgaatattttaaaataatccggcgctatgaaaaaaaagatcttctaaatttttcaacactgctgtcctttattgtagccggtttagagtattgtactgaggattttttaggttcggtttatatggatcttgagctgggtaacaaagatacagggcagttttttacgccgttttatgtatcagaactgatgagtaaaatattgctcggtgatgttgctgatacgataaaaacaaagggctatgtctcattgtgcgaacccacagcaggcgcgggaggtatgataatcgctgcggctaaaaatctccgggacaaaaattttaatccacaaactcaaatgctggccgtgtgtacggatatagattcagatgctgccggtatgtgctacatacagttatcactgttaggcataccggcagtggtcaataccgggaacacactgacaaacatcataacaaaaacatggtatacgccattttattattttaattcatggcgtttcaggtaa

SEQ ID NO: 283805 - DNA, 258 bp, Morganella morganii
atgaaagcgaaaagcatcattacattaaatcagtctgatgtaaagaacgaaaccggggcagcccgaaaaatttcacggcactgccgctgtatcaggaaagatatcagtgcttcctgtatcagaccggaagtcaaagcctttgcaaaacatatgaaaaaaatgaacagaaaaaaacagtcagtacgtatacccgcaatgtcatctgacatgttagggcagttactgcgcagtctggaaatccggagagcctgcaaataa

SEQ ID NO: 283806 - DNA, 339 bp, Morganella morganii
atgcacacaatctgtgaaaccgaaaatttcgattatttaaatgatgctgttaatgcggaagcctggtactggattgcccgggaaaaagcggcaaaaacggacgttaccgaaattacagaagaagagtacacagaacggatgaataccttaacaccgtatgaccgtcagggggcattccgttctgaaacatttaaattcatggaaatgtatctggggaatattacggatattttcgcaaaaattgacgggcgttattttactttccgcgatcagtgttatctggcgcattccgagattatccggcgggtttatgaatcgccggtatggctgagaaaataa

SEQ ID NO: 283807 - DNA, 1896 bp, Morganella morganii
atgtcagtcaaaaatgaaactaaaaaaaataacaaaaagaaaaccaaaacgaatgatgcttttgaggaatattgttcaataaataatacagccattgattttctgccgttaaacacgctgtgttcttctcccttaaatgtcagaaagaaagaacccggcaaacaggctattgctgaactggctgacaatatttattcggtcgggttactgcaaaacctgattgtctaccgggcgacagagacaagttatgcggtagcgggaggagggcggcggctccgcgcactgcaaatactggaagaaaccggaaaaatagacggcagctatctggtcggcgtaaaaattatcagtgaaagtgaggcggtagatatttccctgaccgaaaacgccctgcgtgaagccatgaacccggcggatcaggttggcgcattccggacaatgacggagaacgggaaaacgccggaacaaattgccgacaggctgggatacagcaccaaacatgtaaaaaaatgcctgaaaattgcgggaatggcaccggaattactcgaactgctggggcaggattcaatcagtctggagcagttacaggcaatatccgtaacccctgatcatgcccggcaggtgcaggtctggaaaaatgccatcgctgactggcagcaaagacctaataatctgcgttcagcggcactgaatcaggcattaccggcagagggtaatgcggcatatgcctttgtcggcgaagcggcctacgttgcggcaggcggggaaattattcatgacctgttcacggagcagggatttatcagtgatccggtcttattgcagacactgctgacagaaaagattgaacaaatagccgccggtattcaggaaaacgaacaatggggctgggttgaaatacgcggagagccggtttggagctgggagcctgagtttaaacggcactctcccgatgattatgaacttacagaagaattccgcggattgtttgaagtcagcagtgctgaactgaccagaatgcaggagcaggaagttactcaggaagaaattaaaccggtatttgatcgtataaaagcattgcgtgaacgatcatttttaagcagcagttccccggaagaccgtaaagaactgggtctggtcatttcattctaccgtgatgaactgagtatccagagagcgatagagcgcgttgtcagcacgcaggaggacagcagcaggaaatccgcgactgctgtgaaatcagaatacagtgcggcactggttaaaagtctttcatcagagaggacactggcggtacaggccgcactgttagcgcatccggatacggcactgtcatttctcgtccacagctgcacccgcagggtattcagtaaaggcgcatactggcataacccgatgactgtcagcttatcgctgaatcagggaaatttactgagttatgcgcccggtgcggaaaatggcaaagccattcaggaattgcaggcacattacgaaaaatgggagcaggaattaccggcaggatgggaagacagtgcggaatggttatccggctggtcagcagacaaaaaaacagcacttttaacattttgcctggcgcagaccattgatggtgtacaggaacagttcgtgccgtcccgggaaataggcgataagttatcggaaatagaatccgcgatagatttcgatctgtcagcgtggtggacgccgacaaaacagaattttttcgggcggatcagtaaagctaagataacggaatgctttgaaaacgcagggtataccggtgaggccacccgttcacagaacatgaaacgggatgaagcggcggaactggcagaagaaatactgagtaacggaacatggttaccagtctgtctggaaataaaaaaaccacagcaataa

SEQ ID NO: 283808 - DNA, 474 bp, Morganella morganii
atgtctcaacagcaagaccctgcagctcaggaatctaacgaatgtcatgttaaaaaaccaatgacagagcgtgaggtttcagatccggaagaaagacatgaatttttatataaacatttaaataaggtgtttatttttggtgagacgtttgtttattcgtggatggataaatatgcctcttcgtataaaggcggtttctgggattttatttcggtgagtaatgatgctttttatatgaagccggaaaacggttaccgggtagaacttccgaactatttcagtgatgaactgactgccagagagtgcggaattgtcgtaacgctctatatgctcagtgatatggccgccagaacctataacggggaatgctatgccatgagcgaatccctgtcaaaaaaataccataaattaagggattacgtttgtcagcttcctgtgcaggaacaaaataaaattttcgcagccatcgattaa

SEQ ID NO: 283809 - DNA, 396 bp, Morganella morganii
atgagtaccgaccggaagaaattcacactctatcttcatccggacaatgaagcggacacccgggcactggaggccattgataccgtgccgaaaaataaccggggtgagcttttccggaacgtattcatggcggggctggcattacaccgtctggacagacggctgccggtcatggttgcggaattatcggccggagaactgacggccgataaactggttgaattaaccgccttactaaccggctggcagccgtcaaaagcggatattaaatcagtcctggaaagtctgggaggtgcggtaactgctgcaccactgaaggtaaaagaggcggaacaggacggaaacaaaaaagaggcactgaagcaggcaaaaagaaaattagccggattgctttaa

SEQ ID NO: 283810 - DNA, 972 bp, Morganella morganii
atgaaaattttttgtgatgacggctcaaccaacgtaaagcttgcctggtttgaaaaaggaaacataaatacttcattatcaacgaattctttcagaaaaggatggaaggttgaggggctgggcagtaatcagacttacaattatgagctggaaggacagaaattcacctttgatgaggtaagcaatgaagccattaaaactactcatattgagtatcagtattctgatgtgaatgttctcgctgtccatcatgcattgttgaagagtggtataccaccacaggaagtatcattaacagtaactttgccaatcagtgagttttatacaccggactgccaaaaaaatgagctggccattcagcgtaagaccgataatctgatgcgaccggtcaaactaaataaacatgagggttttgtgatcaccggcgtggaagtgatgccggaatcactgccagccgtgttctctcagctggttgaggacgaagtgggggcgctggaaaaatcactggttattgacctgggcggtaccacgctggacgttggtgttattgtgggccagtttgatggtgtcagtgctattcacggaaattcagcaatcggtgtctctatggtcactcaggcggctctcactgcgcttaaaatggcttccagtgacaccagtgcacttgtcgctgatgaactgataaagcggcgtgaagatgaagcatttatccgtcaggttgttaatgatgaaagtaaaatcccgctggttctgagtacaattaactccgcaattgaaaaactgggggctgaagttgttgatgatcttgccgggttccggaatgtgaacagggtatatctggtcggcggcggcgcatcattaattgaaccggctgtaaaacaggcatggcataatatcagccataagatacatgtgatggacacaccgcagctggcgcttgtgaaatcaatcgcgaaattcaaagaggaataa

SEQ ID NO: 283811 - DNA, 636 bp, Morganella morganii
atgataacagttgttggaggcaataaaggtgggtcaggtaagactacaaccgcagtaaatatagccgtggaactggcacaacaaggacaggatgtatgtttacttaacgcagatatacaaaggagtgccgctaaatggcacgcggaacgggaggcatcaggaatactccccagaattacactgatcgaaaagttcgacaacttaacgcagacgctgagagctttagaagaaaaatatgctcatattatcgttgatgtagccggccgtaattcacgggaatttattacgagcggtgtagtggctcatcaaattattgcaccattacagtgctcacaacctgatctggatacattggaagaattgcaacaacaagtagaagccatgcgggatcttaatcctgaacttaaagtattctgcctgcaaagtatggcatcaactaaccctgttttacgcggcaacgaacgtaacgaattcctggaatatttaagtgaattccctaccatacagactttagagtccgtcatttgttttagaaaggtttacagggattgcatgagtaatggaaccggcgtagttgaaacaaataaccaaacagcaaaagctgaaattattcagcttatgaaagaggtattctga

SEQ ID NO: 283812 - DNA, 294 bp, Morganella morganii
atggtaaaaagaccaagccagcaagccattaacagaacggctgtcaccagtgaacaagccgatgagcttgccagaaagttagcagataagccttatggttccgaagaacgacaaattataaatgaagaaccagaaaaacaaaaaagaacaacaatatctattaatgagtcacttctattaaagatcgaagatttagctttaagaaacaagcgcgaaggaaaagatcacaaaagtgtaagtgccatagcaagagaagcctttgagctatatttagaaaaatatgcagaaaaatag

SEQ ID NO: 283813 - DNA, 699 bp, Morganella morganii
atgttcattcgggcttatttgagagcatcaacggaagatcagtttgcagaccgggcaaaagagatgctggaacagttcgccggggagaggggacataagatagcaagctattaccgggagaatatcagcgggacgaaaattgaacgtcctgagctggggcgtttactaatggacagtcaccgtaatgatattttactggtcgagcagatagatcgcctgacccggttgagtaacaatgactggataacgctgaaaaaacaaatcgaacaccatgagctgcggatcgtcagtctcgatatccccacatcctggcaggcgcttactgataaagatccctcccggaacgaccctgttacccaggctgtgattactgcgattaacaatatgctcatcgatctgatggccgccatgtctcataaagactggctcagtcgccgtatgagacaaaaacagggaattgagcgggcacacaaactcggtaaataccggggccggcaggccgatccggaacgtcataaaaaagtactgtattaccggcacatcaaaaaactcagtatccgggaaacggcggatgcaacagggtacagtccctcacaaatctgccgtattcaggccctgtacaaaaaagaaggcaatactgacattccgtcatgcgacgattatttgtcaacatccctgtatcttaaagatgaaacctaa

SEQ ID NO: 283814 - DNA, 618 bp, Morganella morganii
atgactgaaaaacaggttgtcacacctgaagaaatgaataagcagctggggaggatggcctatgctgccctggctgcgcttaaacttgcccagcatgacgggatggccggacaaagtgatcaggccgagaatttatttttagtgcgctggctgaaaaccgcactgaaacaaaaacgttttcatcgctgcgtggccgcagatctggtctggctgagtaacctgggtcagaaacgggtaatgacggcaaaattgcgccagcgactggattacctgtggaaatcctgctgctgtgatataccggcacaaagtgccttattccggctgacttatgccactgagatgctgaaaaacaccggctggtcaggcgaagtactgagttctgacctctgggataaagtcaggcaaaaatctccgctgcctccgcaggaaaatccggttttttatatttgccgggacactctggatcaaggatttgatgataccggcgctcagaccggcctgctggaatttctggttgccggcgatcctgaacagtttgaagcagtcatgaaacaacatcagctgagcggtcagttttccggccacgatcgctcgttgttctgtataaaaccggcctga

SEQ ID NO: 283815 - DNA, 282 bp, Morganella morganii
atgaaatataaaagccttgatcagattcatgataaagcaatgcaggatactgaataccgggatgcttatgaagctgaggaagcccgtgaacgtctgcaggagactttatgtgtctggcgtaatgaagccggtctgacatcggcgcaggtagctgagcgtatgggggttaagccgccgactgtctcgcgaatggaaaaaaatgcgactaaaatgagttacgaaacgcttatgcgttatgcccgcgcctgcggcgtgacaaagccaatgatcccgctgtactga

SEQ ID NO: 283816 - DNA, 321 bp, Morganella morganii
gtgttcagagtaattttccatgatgaagcagaatcagagctattcgcactacctgcaccggtcagggtaaaaatggtccggttattaaaaaaactggaagccaatccccggctgctcagagagccgtatacgaagccactgggtaacggtttatttgaactgagaaccatgggaagtgatatagccagggggttatgggtatatcagaccggtgagcgtatatttttattgcggatatttataaaaaaaacaaacaaagccccgattaatgaaattgaactggcattccgccgattggaggaaatgaataatgaaatataa

SEQ ID NO: 283817 - DNA, 954 bp, Morganella morganii
atgactatgaacctgcatacccagacaagcgcccctaattccgcaccggcgaccagcgtatccccgctggagctgtcaggctcaacaaaaacgaaatttcccgggaaaaaaagcaaaacagatatttatcagacagtaacagacaacatcatagaaatgctggaagcaggtgttaagccgtgggtgtgtccgtggaaccgtaacggtatggtgtccggtattccgtcaaatttaactacggatacaagctacagcgggatcaatattatgttgttgtggtgcagtgccgcaaagcagggatttaaagattcccgctggctgacctataaacaggctcaggcactgggggcgcaggttcgcaaaggtgagcgcggcaccatggctattttttacaggatgctggagaacgaaacggaagacggcgggacagaacggattccgatgctgaaaacgttcaccgtatttaacgttgagcagatcgacggcctgacactgacagatgaagacagcacagccgggccggtcagtgggttcgaccccctgccccacgttgaggcattttttcagcgcaccggcgcgaatattaccgaacggggccagcaagcctttttccgtcctgctacagatgaaatctggttgcctgagcgtcatttattcgcagatgcggctaatttttatgctacggggctgcatgaaattgtccattggtcaggaggaaaaagccgtttaaacagggaaatgaaaggacggttcggatctgaagaatacgcttttgaggagttggtggcggaactgggaagcgcgtttctgatggctgattttggcgtttccggcgatgttcagcatgaaagctatattgcttcatggcttaagtctctgaaaaatgataaacgctatatttttaaagccgcgtctgccgcgtcaaaagcgcataaatatttaactgaattctga

SEQ ID NO: 283818 - DNA, 1122 bp, Morganella morganii
atgatagatgataaaaacccacaagcattaaatatacttgatgtaatacaaggtgattcatattctgaaacaatagataatattatatctatatctcagggtaatattgaattacagatattactcttggattttttttaccaaaatcctaaaaaagaaatccaccaaaatgtaaattcagcacttaatacattaaataaagcacgaaataaagataattggatatgtggacacaatggctgtaagacagccagcacctattcacatgaattatctgagaaggcagcactccgtcccttagcaaacaagaaaaataaagcatttattctcaagcctaacttacagagtaatgcatttgaattttattttgccccaatacatacacgagatattttgaatttttccggttactgtagtcaacatgaccaatctttatttaaaatattagacaaacctggcagagccattgattctgaacatgtcaacttacaatctttaagaatgatgagacgccacatactcatttatgaaatacaattaaaagtagctaaaaacataagtaatgaaatcggactggtagtcaatgattacataagtctcgggaaagatgcaacagaaattcaaaaacaggctgatttttttcaggataaaataaagtcattggaatgttcactaaaaattgctcgactattttatgataaactatgggatggtatcaaatcaaactcatacattgttgattataaaaacattaacgaatgtaaaccagggtgggctttctctcatacgtttgagtttcaattggtagaaaataatgacattatgttttttttcatgtttaagtttgatatcaatggccagccagtattgataacagcttgggataaaacaacattaccaagtgaatcagagtcgtttgatattccttgggaaaaaataatctcaggcatcttattaaataaagataagctagtattatccgaatcttttattaattccatagataaacatttcattgaaatgatgattaaaaatgaagaactatatagcaacttagacaaccctatatatctatatatatataaaaatattttctttaattgcataggaagtgaatcataa

SEQ ID NO: 283819 - DNA, 1266 bp, Morganella morganii
atgattgccctggttgatgtcaattcgatgtttgcctcctgtgagactgtattccgtcctgatctgaaaggtcacccagttgttgttctgagtaataacgacggttgtgttattgcccgttctgcagaagctaaaaaactcgttaaaatgggccagccctattttcagatccgaagtctggtaaaaaaatatggaattgtggttttttccagtaattttgcgctgtacggtgatttcagtgaccgttttgtttccgtgctgtctgaatttacaccactccttgaaaaatacagtgttgatgaatgtttctgtgatttacaggggataacgactgactacctcagttacggccgccggatgcaggaagctatcctgcaaagaacgcatctgccggtaggtgtcggcattgcaccgacaaaaaccctcgcaaagttggctaatcatgccgcaaaaaaatggaaaaaaaccgggggtgtggttgacttgactcttcgtactcggcaactgaaattgatgtctctgatgccggttggtgaagtatggggaattggccgtaagctatctgaacggttgaatgtgctgggaatacagacagcactgcaacttagtcagcttcccccgtatgacgcacggcgtattcattctgtggtactggaaagaactgtacgggaacttaacggtgaatcctgtctgaaaacagaagatattcagcaggccagacagcagattatttgttcccgttctttcggggtgaaaacaggcgattatgagcaggtaaggcagtccgtctgtgccagagcagaacgtgcagcagaaaaactccggcaggacagacgctattgccggatgatttcggtctggctgcatggttacggtaggaacagtcacacagacagccggtatctgcatcagacggaaacgctacgatatcctgttcaggatacccgtgacataattaaggttgctatcgggctgttggactcattatggtgcgataatatcgtatacggaaaaagtggcgtgatgcttggtgcatttagtgaatcaggtacctgtcagccagatttgtttgatgaaatgaagccggctaaaaacagtaaaaggctgatgtctgtaattgattatattaaccgcagcggaacaggcgttatctggctcgctggtcagggtacgaaagctgataagggggactggaagatgaagcagtctttactttcccctaatgtaacgaccagattgtctgatattcagatagtaaaatgttga

SEQ ID NO: 283820 - DNA, 390 bp, Morganella morganii
atgtcacaaattccttattttgattccagagtatcctgtggatttcccagcccagcggatgatttttcggaacggcgtatatcactggatgctgaattagtccgttatccggaaagtacctattttctccgtgctgaggggcattcaatgaaagatgccgggatttttgacggagatttgttggtcgtggaaagctatgaaactgccggggacggtgacattgtgatcgctgaactcgatggggaatttacctgcaagtacctgaaaacttatcctgtaaaagcgcttataccagcgaatgaagcttataaaccggtgattattacggatgaaacagaaattcggatctttggaattgtccgttttgcggtacaccagacagggcgttaa

SEQ ID NO: 283821 - DNA, 1518 bp, Morganella morganii
atgaaaccggcgaaacccacgaaacccataaaaccaatgaaagaagtgtgtcccggtggtacgacagtgacctgccgggtggagggtgcacagcttccctcctttgaaaatgagtgctatctgaaggctaaagcagtgtttgccagctattttccccgggcatcatacactaaagacggggcaaaacgttctctgaaacaactggtgatgagcgggcttatccgggcggaggaatcactggctgattggttgtggccgtacaaagcggaagtggtatttgcaatgcggggaacaaaacggattcctttaccgataatggccaccagtgcagataagcgaaaaaaatacgggaatgatttaccgcattcatcaaacccgtttgccatgccgccatccggtcagtgggtccctaaaggggtaacagggagacgaaggccggatatcattcttgttaaaaaagaggcaaaccgctggccgggccggggggaaaactgggaagggccgtgcattgataacctgcaccggcttattgaagtcaaatttcccggagaccggctttccagagagcaggagaaagactataaactgatatccacacccaaacgtttttcagttttccatgttgaggaaaaccgccgctcccgccgtaaagagcgggagaaagcctgggaagcacaggaacgtttgctcgctgaatacgggaaaaaaaccagacataagccggtattttcacaggaggcactggaaaatctggtgttagtggatttcccgctggtcagtgaaaatctctggcgtattaaaccggcggcgagtctgtggtgggcactgaatgttgatgtgccggcttttggtcaggcagtgctggctgattcacagccggtatcaggctggcagatgtttactgacggcatacaggaagccggagagtaccttgttcatgaagcacgcggttatattgtctccggttatgaatatacccgcgatactgctgcagaagcttgggcggtgtcctgtgattatatcggaagcgggctggattttctgagtacggagttggcggcccagttttctgctgccggtatctggtttcgtgaaaccggaaaatgggtggtcagggaagtgatagaacccggaaccggtgttctgctgtatgccgtttactggctcagtgatgttaccggagaaatgattcagctgagtaaggattatctgctcgcagcatggcaggaaatcagttattacacggatctgactattgaagttcttaaaaatgtaaaatggtcgcagattatgactgatctcggtaacggcatggtgcagattgcactctgggttgaagatcatgtgtttgaagttgtggccactgttgcggttgcggcggcgattgttgtactggttgccctgacaccggcgactggcggggccagcggcgcagcggcagccgggttgagtgaggtattagcaggcttgtcggctgccttgtttgcaggcagtgctgcaaccttagccacccagtaa

SEQ ID NO: 283822 - DNA, 2208 bp, Morganella morganii
gtgataccttccatttctgacctgctgccggggcattccgggctggtctttacctgccaaatcgggcgattgccggaaagcacttttcaggtcactgaatttacacttaatgaggagatatcctcgttatttaccttatccgtttccgtgatcagcctgctgccgtcagtcagttttaaagaatgcctcggtctggctgcctcattaacagtaacccgtaacggcacccgcatccgtaccgtgcagggactgctggcctctgccgaacggggcaatactgacggtaacaaaacctggtatcattttattatccgtccggaaatgtggatcatgacgctgaatcaggacagccgtattttccggcaacaatctgttccggaaattctggcaaccctgctgaaagaagcccatgttaaaaatgacctgaaattttatcagaatgagctgcatcagaagcgggaatacattactcagaagcgggagtccgcttatgaattctggtgccgtctggcctttgaggaagggattaatttctggttcgaggaaggcccgaaacttttttacagtgataatcatctcggcatgactgccggtattcacctgacctacaatccgcaggctgataccgatattacggacagtaccgctttctcctggcgttataccgaacaattgtgcggcgatattcagatccaaaaagattataacccgcagaatccgacttacccgctgcaacatcaggtgaccggtgagatacatcagcagcacagcacatttgaaagctacggacgttttcagcaggatgtctccggaaaatcctttacgcagctgcgttatgaacagtcccagaatcaccggcagaccggtacggcgggtaccaattgctttgccctgaggcccggaaaaattttctccctgaaaaatcatccctccgctgatatgaatacagcatggcaggtgatcagtgtctgtcatcgtggtgtgcagccgctggcagacaacagcggcggtgaagggactcagctttcgaacacggtgcagtttatccccggcactcaggaatggcgaccgccattccgctataaacccacggcagacggcgacgagctggcaacagtagtcgggccggaaggggaagaaatttacacaaatgaacagggcgcggtgaaagtgtatttccactgggatcgccggggaaagccggatcacagcgcgtcctgctggctgcgggtagcacagggatggaacggtgacggtttcgggtttatatcgatcccccgtatcgggcaggaagtcatagtgtcataccttaacaatgacatcgacaggccgattattaccggctgtacctataacggacgaaaccgcccgccgctcagcctgccggaagataaaacccgcaccacgttccgcacgaaaacccataaaggagagggctttaacgagctgcgttttgaggatcaggccggaaaagaagaaatctatattcatgcacaacaggacatgaatacccgggttctgcataaccggcttaccgaggtggataatgatcatgaggagcgtatcggtcagcaccagaaagtgtctgtaacgcaggatcaaacatcagaaattggtcataaccggacagtatccgtaaaacaggatgatgaactgaccatcggcgggcagtcatcactgtatgtcgccggtaatgtcactcagacaacggacggtcagctggcacagaaaatcggcaaaagtctgtataccgaaattggcgataatcatgagcttcatgccgggagaaatctgctgatccgctcatccggcggggaaatcattatcggcaatgcgggcgggcatattgtgatcgactccatgggaaatatccgcatcgagggattgtctgtcactgtgtcagaccatgccgccggggttaaagcagcgcctgctctgtttgagtattccggccgcttccggctgacggcggagggaacagaggagccgctggttaaccagccctaccggatcaccacagccggtgggcaggcggtcagaggtgtaacggatgccaacggttttaccatgacgcttcagacgaagcaggcggaatcactgacactgacagtcccggtagagagccagccgaaaacccgtaaattataccggatgtttgataacagcccggaggaatatgtgatggagtttaaggacgataaccaatga

SEQ ID NO: 283823 - DNA, 519 bp, Morganella morganii
atgccaactccatgctatatctcgatcgaggggaaaactcagggcaatattactgccggtgcgtttactgccgagtccgtcggtaatatctatgtgcagggccatgaagatgagatgctggtacagcagttcgatcatatcgttactgttccgaccgacccgcaatcgggtcagccatccggccagcgtgcgcaccgtccgtttaaatttaccgtggcgctgaacaaagcggttccgctgctgtataacgccctggctgccggtgaaatgctgccgaaagtacagctgaaatggtaccgcacttcggttgaaggcaaacaggagcatttcttcactacgtcactggaagatgcgactattgtgaatatcgactgcaaaatgccgcattgccaggaccctgaaaaatcggattacacgcagctggtcgaagtctctctgtcttaccgtaaaatcgactgggaacataccgttgcaggtacctccggtgccgacgactggcgtatgccgatcgaagcataa

SEQ ID NO: 283824 - DNA, 381 bp, Morganella morganii
atgctgactgacaaacaaattgaacaagcaaagaaaaccacacggtacagttcccgcaatgacattcttcatgagcacaatgattgtattcgcatagcttatgaatggctggatgcccaaaagaagctcaaagcaccaactactaaaacttatgcgttaaagcatttaattgagaattggtgtggccggtatatttcaaaaactgatgttgaagttgccgcccacatacaccctgagatacatggtcaatacccacactttaatatcagcgctcgactgacgcgtccttccacggatcgcctcaaaggcattagtgaggcgttcacacagaaaagctacctaaaaaactctgatagagatgactataccaaaacagagtag

SEQ ID NO: 283825 - DNA, 747 bp, Morganella morganii
atgtttagtaaagctggtacagtatctgcttctatttgtatttgggataataaatttttagcaaatgaccctaagaattgtaataataataaacaacacctgccagtacctacggatgagctaattattcctattaaaaataacaaaaaaattattcttccggtttcgtcaaggtttatatctgatattaattcacataatattataaactgctcatcatctataaattcgaatagaagaatatgtctagttgatgataagtataaaaattcaccatctaagaatgtagaaagaaagttctataaattcatggatataggtggaagtgtcgttgattgcaatgatattaatattgatgatatttgtgatatttttttacatttaacagaggttagatggggacgatttggtggagataaacaactgacaaaagatttttttagaactgtagagccttatattttcggtaatattttatttataaaaggccagccattggcatataatttcactactaaattatcatcatgtgacaataattacatagaatatattcattcaggaactgactttaaccttgttcctaaaaatatttcaccaggtgaaatattgatttattccaatataaagaaagcatttaatacatttaagaataatgtcagatattcgtttggaaatccttctcgtgattataaaaaaagatggtgttcaacagtaccattgagtcgttccgcatttcctatataa

SEQ ID NO: 283826 - DNA, 252 bp, Morganella morganii
atgacaggttttgaactacggctatggcgtaaagggctaaatcttacccaagagcaagcagcagctatgtttggattaacacgacgaacatggaataggtatgaaaaaatgaaccctccaaaagcggttgacctggcaattgttgctctttcaataagagaactggaaactgaacttaattcacctgatggtattttatccatgagacttaaagtattaatttctgaaattaataaaatatcagataaataa

SEQ ID NO: 283827 - DNA, 900 bp, Morganella morganii
gtgcttgatacaagtattgtttcacattattcagacttttcaggtcagccgcgccggcggtgttcatatgtcagtaatccgaatccggtttacaaatcccccaatgagtcggtaaaaaaaccagctattgttaaagcattaacaaaagctgcggcctcctgtaatccggcccgtcatgaagcatggtatacgacaccgcgagttgtacaaaaaagcggtatggtcagaccatttagaaaaagaatgaatgaacaccgggcaagagccatcaatgcattgatggttgctatggccgatcgtctaaatattatcagtggtaaagttgaggcgtcagtagaacagttatctgattggtgcgggctatcgacacagattgatggaggagtaaaaagtatctcccggtgcagcagggcaattctgacacttgaagaactgggtgctctggcatgtgacagggtttgggatgaagcaagccggtcgcatatacctaagcttatatgggtaaccgagttgttttttgttctgataggatatgacctgggacgttttcaggcggcgcaaaatcagcaattagcctgggtaaatcaaggtctggtaaaaaatggtgataaacctataaccctgacagaagcccggcgcagggctaaagaacagcacataaaaagggcgtttgaagtgcggattagaacccgtaatttcaagaaacaaaggaaacatgctctgaagttaatgcagcaggaagaacaacaagcaaaatctgcaattctgcgtgatttagtgaagatgtatagcccatttgaacttcaatcgatggggcatgtggagttgcagagacaagttaaccagcggtacttcgcgttacgtaaactcgccgcaggaaccaagcctccggataaataa

SEQ ID NO: 283828 - DNA, 216 bp, Morganella morganii
atgcttactaatcaagaaataatcgatcggttaaatttaatcggtcagctgtgtgctgtactatctgccaatatgacaccgttgattcagaataaaactctgcaatcccagttgctggataccttacttaggggacgtctcagaaaacggaaaaggggttcggggtccaatgatgtaaaaaaccacgctaagggtttaattcattgtttgtattga

SEQ ID NO: 283829 - DNA, 3009 bp, Morganella morganii
atgagtgatgactttctgacctgcgaacagacagaaaactacggtcgctatgtggcagatccaaatgaggttcagctggcccggtattttcatctggatgagcgtgaccttgcttttattaatcagcgacggggaaaacataaccggctggggatcgcacttcaactgactacggcgcgcttcctgggaacatttcttcctgacccccttcagattccctcatgcatccgtttttacattgcggcacagttgaacatcagccgaccagagatcctttcccgatatgctgaaagagaaaatacccgttgggagcatcaggggcttatcaagctctattatgattatcatgattttggtgatttcccctggacgttcagactgaagcgtttgctctatactcgcgcctggctcagcaatgagcgcccaggcctgctgtttgattttgctacctcatggttgctgcaaaataagatcctgctacccgcagcctcgacgctgacaaggctgattggcgaagtacgtgaacgggcaagtcgacgattgtggcgaatgctggctttgttgcctgacagctggcagaaagcacaactggacggtttacttgaaatacctgaagggcaacgtatatcggtactggaggagatgcgaaaaggtccagtcactatcagtggaccagcatttacagacgctctggaacgatatacccgcctgcgtagcatggagttttcccggctgaatttctccggtctgcctgccatccagttgcgaaatttggcccgttacgccggaatggcttcggtgaaatacatatcaagaatgcctgaggaacggcgactggccgtgcttactgcgtttgtgaaagcgcaggaaattgcggcgcttgacgaggccgtggatgtgctggatatgctgattctggatatcacgcgttctgcgaaaagtatcggccagaaaaaacggctcaggaccctgaaagatcttgatcgtgccgcgctattactggcacgggcatgctcgttattacttgatgagaacaccgatgaggcagctctgcggcaggctatttttcgccgcataccaaaggacaaactggccgaatccgtcggcaaggtaaatgagctggcgcgtccgcaggatactcattttcaggatgaaatggtggaacaatatgggcgggtgaagcgcttcctgtccgcgatgttgcgtgacttacactttcaggctgccccggccggggagcacacgttgtcagcaatccattatctggccgaactgagtagctcaaaaaagcgaatactcgacgatgcaccagagcacatcatttccggtccctggaaacggctggtatacgacagagatggtagaattctacgcgctggttactcgttgtgccttctcgagcgtcttcaggactctttacgccgtcgtgatctctggctggagaacagtgaccgttggggtgacccgcgtcaaaaaatgcttcagggatctgaatggcacgcacaacggatcccagtatgtcgggcgctgggtcatccatcagacggaactaaagcagcaaaacaactggctacgcggcttgatgacacatggaaatcagtggcttcacgttttgcctgcaacgctgcggtcagcataagcaatgaaggtaagcatccctcactgacgatcagcagtctggataaactggacgagccaccggcactgatacaattgaaccgtcgggtaagagaactgatcccacccgttgatctgactgagctgttgcttgaaatagatgcccgaaccggttttacccgcgaattcagccacgtcagtgaatcaggtgcacgggcgcaggatctccaggtcagtctgtgcgcaacactgctggcggaagcctgcaatatagggcatgaacctctgataaagcataatattcccgcgcttactcgccatcgtctgagctgggttaagcaaaattatctcagggcagaaacgctggtcagcgcaaatgcacggctggttgattttcagtccacgctcccactcgcggggtactggggtggtggtgaggttgcctccgcagatggtatgcgttttgtcacaccggttaaaacagttaattccggaccaaatcgtaaatattttggttcaggacgcggtatcacctggtacaacttcgtctccgatcagtactccggttttcatggcattgtcgttcccggtacgcttcgtgattccatctttgtactggaagggcttctggagcagcagaccgggctgaatccggtagaaattatgacggacacggcaggatccagcgatatcatttttggcctgttctggttactgggctaccagttttcccctcgtctggccgatgccggcggggcgatattctggcgggcagataaaacggcacattatggtgccctgaatgagttggcccggggatgtgttgagctgtcaaaaatagaatcccaatgggatgaaatgatgcgaatggcgggctcactgaagcttgggaccatccatgcatcagagcttattcgttcactgctgagaagtagccgaccatcaggtctggctcagtcgattatggaagtgggccgggtaaacaagactttgtatcttctcaactatatcgatgatggggattaccggcgtcggatactcactcagctcaaccggggagaaggacgccatgcagtggctcgagccatttgctacggacaacgtggtgagattagaaaacgctaccgtgaagggcaggaagatcaactgggtgctctgggcctggtgaccaatgcggttgtgctgtggaacacactttacatgcaggaggcgttgtcacatcttcgcaaatcgggggaaacgcctgaggaggagcatctggcaagattatcgccgctgatacatggtcatataaatatgctggggcattatacattttcgttaccggaagatattctgaagggcgagctaagatcattaaatttcaatacaaacaatgaattaaacccttag

SEQ ID NO: 283830 - DNA, 657 bp, Morganella morganii
atgtggtgggttattggttttttcttttcattgatattgtttttttgttttttcaaaaaaataccttctattgtttttaaaatattaaaaaaatataatcttttattaaactctgatagtttacattcacaacgtctttttcaactagcaatttcccttcctttgttttcaagtttgtactttatgatatggcttggatgggactaccccactcgctgggatagcactgggttcaatgctttcttaaatatacaaaaattcccgttaggtattttagcattgtctcctatactcggtgtttttgttgtatatgcacaccgttcattacaaattgacgagcagataaaaacagcagaaaaacagctaagagaagcacaaaagaaaaataaggcagatatttattacttaaaaagaaagttcattaatgaacagttactgtctattactactgctaataacgaaaaaataaatagacctacctcattatatttaaaatcatttgaaataggaaacttaaatgacaaaaaattagatatcattataaataaaatggaaaattacttaaagtcactagatactctaatgatacttaatgatacatttcatacgcctgtctcttatacacatctgacgctgccgacgatctactctgtgtag

SEQ ID NO: 283831 - DNA, 921 bp, Morganella morganii
atgaaaaaactaatatctatattgaaagttttttctctgacaatacttggtttagcattccttgcgtggatagctcttttctttgatgaaaaggctgatttagctgatgtggcattgtcattgttagcatgtactgctggtttaatggggatattgatttacctttggtacatcaaaaaacctaaacctaaacctacagaaagttttggtgatcgcatacgaaacgagtttgaacgaataaaagctcagacgacaactacagataactcccctccccgcactgtttctgattttgatgatgatatctttgacccaccaattccaagtaatgattatgtcatggtaaatggtgaggcgcttatatgggaaggcagcacaaaaccagcatcagtaaaaatcagagatgagagagataaaaagcacggcatctttacccggatggtcattcgtgaagatggtgagttctatctttctttaactgaccctgaatccggtgaagataccgagatcagagaaacagaaattcaaacagcgatcaccgttggtaaaacgagatatgatttcgtggaactatgccgcagggtttttggcttggaactacacgaattatttgagtatgcaaaagccatccgatatgaagccaaagaacctaagttaataactgaatttccagccattcctactacattcacctacctttctggatcaggtaaaaaccgccggacggttgatatcactgaatataagagaaatggctatggcgatgaatacatagccggttattgtcatttacggaatgagcacagaaacttcgctgtatcacgcattcagacaatgctggcttctgaagggcatcctaaatatcattttcatgattggctaattaacgttgctgaggttaacggcaatggcgatcagtaa

SEQ ID NO: 283832 - DNA, 813 bp, Morganella morganii
atggcagagaaaacaatcctcaaatgggcgggttcaaaagtcggcattatggaacagctgcgcccacacctgccaaaaacaaaacgcctcgttgaaccgttcgccggttcttgtgctgtgatgatgaatactgactatgagcagtatttaattgctgatgtgaataccgatttaattaatttatacaaaattatcaagtattgcgatcctgatgtatttattggcaatgcggagcttatctttttggtatcaaatgagaaagcggaatactataagataagggatttatttaatgaagaaagtagatttcgattttctaatcctcttacattggctgtatggtttttatatttaaatcggcacggttataacggactatgcagatatagtaagagaaccggatttaacgttccgtttggtgattataaaaaaacttattttccggaaaaagagatccgtgcattttcggctaaaacagttaaagcggctatcatccgccagggctgggcggaaacgctgttacagacctgtgccggtgacggtatttattgtgatcctccttatatgggaaaaggttttaccaagtaccacatcgaaggtttcaatgatggtgatcaggtcgctcttgccgaagcgctgcaaaccctgcatgttaccaaaggctatccgataactgtgtcaaactccattgacgcaaaagagctttacgcggatttaggcttcaccattcacgaaattaaagcaccgcgaacaattgcggccaatggaaaccgcaaaccggtcaccgaaatcattgccacactcggggcgtaa

SEQ ID NO: 283833 - DNA, 351 bp, Morganella morganii
atgaaatactatcttgatgaaaaaaataaagtttacggattaaatgacgatcaggatccggcaaaatggatacccggtaacgttaaaatgattgatgagaaacaggctgttgagattgcaaatccgccgccgtcaaaagagcaactggcggaacaggccgaacaactgaaacaggcattgattgcagaggccggagataaaaccgaactctggcgaactcagcttgcactcggcatcatcaccgatgaagacaaagccagcctcacggaatggattctgtacgtgcaaaaagtccaggcggtagacacatcaaccgccccggatatcatctggccggagaaaccggaatga

SEQ ID NO: 283834 - DNA, 1674 bp, Morganella morganii
atgaaacccttattcagacttcagttatccggcgaagaagttcaggtcacggacgttaatatcatgcttgaaatctccgctgccggccggggatttgtcaccgtcaaaacagacgcggattacgccgggaaactggtgcggctggatgccggttatcctgaattactgctgcgctacttcaccggctatgtggagcgggcacaaccgtcagcaaacggatttcagcgtctgcttgtccgcgagctgaccggcgtttttgaaaaatcgtggccgtgttcattccagcacccgacattacgcaccatcaccgactttctgcagaaagaatcagggctgacatttgatgtccctgcatccggttatgccgataagccgatcccccatttcacccacaacggcaccggctatcagttgctggccaaccttggcaatgtgttcagtattccggattacatctggcagcagctgccggacggtaccgtatttgtcggtagctggccggattccctgttcgcggaaaaaccggttgagatcccgaatgaatttgctaccggtcaggcgggcgggaacagtatgaccatccctatggtgcagtcactgcgcccgggcgtaaaagccaatggccagcggctgacaaaagttaacctcaataacgaggatatgacgctgacgtgggaagtcagcagcgcagttaccgggtctgcagccagaaagaacccgatacaaaaccagattgatagcgcctatccggagctgtccgccgggctgcatctgccgaagacggccagaattgtttcacacactgaaccggttgccgccggtgatatgtctgatccttaccgcccgcgctacgccgtggatgtgcagttgctggatgctgacggcaaagaatccggtgcgccggtttacagtgcggtaccgctgccgctgccgatggccggaagtgaaagcggtatgtttcagttcccgccggttggtaccgtggtggaaatcgcgtttgagggcggacggcaggataagccgtttatccgccagactctgagccagggcaataccatgccggatattaagccgggggagcagctgcaacagcagcgacaggaagtatcacagcgcatcactcaggaaggcagctggcagcggcagacagaccagacaatcagcgaatcatccatgcaccggcaggtaaccgcggattctgagaaacgggaactggtcacccgggacaccaccatacaggcaacggataaaaccgttgtgctcggtaccgccacattactggccggagccatccagcagatagcggacggtgattacagtattgcggccaaaggtagcctggtcggcagcgtcggtaaaaacatggaactggccataacggaaagtgctactcttgagatcgggcaaaagctgattgagaagattggccagatacgccagagccttgccgggcagaaacaggaaatcattgcgccggtcgtctggataggcagtcaggaaatcaacgtggcgcagttgatgttagacacactcgacgtggtaaaagaactggccgaactcacggccgcacacactcacgccaacaccggcaccccggacaacgccggtgacattaaaggtaccgccaccaaatcggacggactaaaacaaaaatacagcccagtaataggctga

SEQ ID NO: 283835 - DNA, 555 bp, Morganella morganii
atgggacccagtaatattagttttgctgattttaaaaataaaggttccagagaaaaaattaaagatggaaaaaataactctggagggggaggcggagatatggaatcacgagtagctcggctggagtctgatgtcagccatatcagaaccgacatttcagatataaaatttgatatcagaaaactgtcctcagataacgctgatcttaaagcaaacatgttagtcctgatacaaaaaatagatggactcactgatgcaacatctgacataaaaagaatggttatcggccaaccatcatctgaagaaaccaatggtaaatttgatttaatcaacagtacattagccgagatgacggacaaggtatctaagcgcccatcagaagataagttgaatgtaaaattcaccgaaatgagcagcgaaataaaactgcttactgaaaaaactgaaggtaaattaaaagatatcaggcttaatattattttgtggattctcgggctgccatccgtgatctttggggtatataaattataccaggcattaaacgcttcggcataa

SEQ ID NO: 283836 - DNA, 459 bp, Morganella morganii
atgaatgattcatccaaaatcatgtttttttatacagtatttgatcgtgaacaattcaatattagggagggggcattgccaccacccagcccgacttacaatttacccaaaggtggagtgatcaccgttggtttttcttttggtgtcatgttgtctattgataacaattatcataccgtaattttcattgccgatgatagtggaaaccagctatcaagcacggaagatcaacgtattgctgttgatggatacaatatatcttcggaaattaaagaatacgagaaagaagtgatagctttggcaaaaatggatgttgatactaatattttgaaatcagggcgacacaaagcaactatagagctgcgggaagggcttacaccaaatgaaggggatgatgttgccagagaagtcatccatacattggatacatatttttacataaatatggagaaccaatag

SEQ ID NO: 283837 - DNA, 1047 bp, Morganella morganii
atgaatatttttgatactaatgtattaatccaggttgttccgaatctgatgaccagtcagaactggctgctggataagtttttcccgaatatcgtggaatccgatactgaagaagtttccattgatgttgacgtcggtctgcgccgtctggctccgttcgtttcgccgctggtggaaggtaagctggtggaagcgcgtaagttccagaccaacagctttaaaccggcgtacatcaaagacaaacgtgcaccggatctgcgcaaacccatccgccgtcagattggtgagcgcatcggcggtcagtattctgccgctgaacgtgaaatgctgaacctgcagttcgagctgactgaccagattgacatgatcaaccgccgtctggaatggatggcggccagcgcactccagaccggtacggtgacagtaaccggtgaaggttatgaaactcaggttgtggatttcgggcgttcgtccgatctgactattgccctgagcggtgccgataaatggccggaaaccgtggaagcaggaaaaaccaacaccaaaccggctgataacatcgaagactgggcacagcgcatgctgaaggagtccggtgcggtggcgaccgatatcgtgtttaccaccaaatcgtggaaagctttccgtctggacacatcggttaaggatagcgccattaccttccctgcgctttctccgttcggtaaccagattaaccccggtacgcaaatcaaaacaggtgctgtatacaaaggccgctggggcaattatgacctgtgggtatacaacgactggtttattgatccgctggacggtaaagaaaaaccgatgattgctgacggctcggtgattatgtccggcgctgacctgatggggacccgtgcatttggtgccattatcgacccggcattcaattacggcccgatggcctatgcgccgaagtcctggctgcagcacgatccggcgcagcgttttattatggttcagtctgcgccgctggtcatcccgagccgtgttaacgcatcactgtgtgccgttgtggtttaa

SEQ ID NO: 283838 - DNA, 612 bp, Morganella morganii
atggcagacaataagtttacttttgcacaccttatcggccttggtaaaaaagccagagcctcggaagaggatgaagataaaaaagtgcgcaaagccaaaggccgcaaagcggaagaggacgagcgcgacgaagatgcggaagacgatgaagatcgtgaggatgcagaagagcaggacgacgaaaagcagggacgcaaagctaagaaagccaaaaaagccgaaggcgacgacgatgatccggacgccgaagatgatgaagatgcagaaggtgatgacgaagacgacgatgaaaataaagatgtgaaaaaaggccgccgcgctgaacgcaaacgctgtgcccgcatctttggcagcaaggctgccgccggtcgtccggatatggctgcacatctggcattcaatacccgaatgtcttcatctgaagcgatcagcaccctgaaagcaatgggtgcggtacagcccgcaacacagcgcccatcgctcgacagccgcatgcgggcagagcagcaggtacgcatcagtccggatgctcaggcaccggcagcgggtaccgccgccgcgctggttcatcagatgaccagtctttataacagcaacaagggagcgaaataa

SEQ ID NO: 283839 - DNA, 264 bp, Morganella morganii
atgataacggcatctgctataaccgcaaccggaatcgtcacaaaagcccctcagcgggttaagacggcaaccggtaagataatggcaacaatgaccattcaggcagaaagtgaacgccgcagcccctatccgctgaagctggtggcatttgatattaacgcactggaactgatggcctgccagaaagggagccggattaccgctactggttggtctcactggtataacggctatcagcttacaggcgttatcatatcgttgtaa

SEQ ID NO: 283840 - DNA, 312 bp, Morganella morganii
gtgaagtatgtctttattgaaaaataccgggctgaattccgtatccgtatccgtatccgtatccgtatctgtatccgtaccctgtgccgggtacttcatgttgcccgcagcggctggtaccgttggtgtcagcggcgcggtaaagtgacttcccggatgatattccgtcagcgctgtgacaccgccgtccgtgactgttttttttcggcaaaacaacgttatggtgcgctcagactgacggatgaactgcatgataacggcatctgctataaccgcaaccggaatcgtcacaaaagcccctcagcgggttaa

SEQ ID NO: 283841 - DNA, 300 bp, Morganella morganii
atgaaaaaatcagtctcagagacgaaaaaagtacgcaaacagcatacgcctgaatttcggctggaagccctgaagctggccgggcatatcgggatagccgctgctgcccgtgtacttcagcttcatgaatcgcagctttatacccggcgcagtaaacaacagcaaaaaatgtcggtatcagatcgggaaaatgagctggcggctgagaatgcccgtctgaagcgacagctggccgaacgggaggaagagctggctatcctccaaaaggccgcgacatacttcgcgaaacgcctgaagtga

SEQ ID NO: 283842 - DNA, 225 bp, Morganella morganii
atgccttccatttcacaatactcttcacgtaaatcccgttttcttgaccgtatgaatgtcatggttccttggctcggaattgttgatatattgcgtccgtggtatccatcctcccgccacgggcgtaaacctttccccttgattctcatgttacgtatccactgcctgcaactgtggtttgatcttagtgacgggactgctgaagatgcgctgcatggtgagtga

SEQ ID NO: 283843 - DNA, 1551 bp, Morganella morganii
atgaaaatatcagatatatacttaggcacaactgatgcgaaaaatgagttattaactaatagccctgaagagagattgaaatttaaaaaactatatgttttacctcctgcgttaactgtagataaatacttaaaccacagtaagtacttcattacaggattgaaaggtacaggtaaaaccgccctattacgatatatatctattgtcttggatgagcaaaaaaatacaacatcaaaattcatacttttcaaatcagaagtcagtgaagaaacaaagaaagatttcagtaaagcttcaaggattgaagaagtaatcgaaaatagttcaggctttgaaggaagtgacttcgaaaatgtttggcgttggtttatatataaagttatatctgacatgataaccgaaagtggcattgacacttttcagaataatgagaatctctcaatatttcatactttaatgagatcagagaaaaaagaggaaaatgggaaaggttttttttcaaaattgataccgaacattagaagaggtaatatcgaaatcagcaaagatcctaaattaaatcttgattttgattgggatggcaatggtgtcgcaaggattgctttttataagttaatcgaaaaggctgattctgcatttgaatcacttcaaccttcaaacgatagcattaatattttctttgatgaacttgaacttaattatacaacaaaaaaacaatatcagcgtgactctaggttgttaagagatttaattataacaattgaaagaattaacgctatatgtaagagaaatggattcaatatatgcttgttcgcagctattcgctctgaggttctaaattcagttgattctttagggaaggaaataaataagccacttactgattttggtactgatatagtttggaaccgtgctggtgttgattcgatccagcagccactacttcatattgtagaacagaggataaacaactctcgagaggaatttggattagacgtattacatccagctgagttgtggagcacttactttcctaaatttattcataataaaaaacctcaaacatatctccttcataattcttggtatcgtcctcgtgatattgtcaggctattgctttccgcacaagagagttatggtgaggagagtgtttttagtactcagtctctggaagcgattagaaaaaggtattcttctgcatgttgggttgaactgactgaagaacttaaagcaaaatacaagtcagaagaaataaatgggatcaagaatatcctatatggatatactcaaatatcaaccattcagggtattacattgcatgcagagaacattgcacaatcctaccctgatacaagaaaacttcttgatgagagaacaattacggagatattagtagatctatataggattggtgttattggtaattattctaatgaaaatcaggcaggaaagaaaaagtttcgtttctcctttcgtggggatgatgacattttacttcatcagagaatttatatacataatgcactcaaagcccatttatcaatagattga

SEQ ID NO: 283844 - DNA, 576 bp, Morganella morganii
atgaatttgatgagcatcagtcagtacgccagacatgccggcatgagccgtcaggcactgtacaactgggaagccaaacagggattccctgccagagtggacgggaagattaaccaggcggcatgtgatcagtatctggcccgttaccgtgacagtcatgatccccggataaaaaacaacaccccgtcaattaaagcagcagtacctgctgacggtgtattggtcccgctgagtgtggcggagattaaacagctcattgccaccggtgcggaccgggtaaccggtatggatgatcatgaacgggcaacactggcggcaaaggcagccgggctgtatctgagcgagggaccggacaatcctcctgtcacgttcggtggttaccgcctggctatcgtgaaaacgccggagtgggaaaccgggcagatagttgccggtggcgcgttcgggctgtctgcggacgatgtgatctttgaatgccgggattacaccctggccctgatggacgatgaaaccgaggataccgccctgcgtgacgtggtgccctcactgctgtatgtgctggcagacgatacctga

SEQ ID NO: 283845 - DNA, 615 bp, Morganella morganii
atgaaacctgatacttattcatttgctcacctgtcaccggacacaccacgcgctcagggttacgccgggcgcagtctgatgtaccgtgccgccgctgcctcagtcagtgaagaatcagacaccggacacaacaggacgcattcagacgctcactgtattgctgagagtcaggaggccaaaaacaaccctgtctatgctctggcgctcattaaacgcaatgtcccgtatcagtccgccattgaacaactcaccggtagtccccgccacctcagcagatacaccacacggaagatggaagccctgcacccggggtgggagctgctggacgatgaggataagaacatgaccgcattccgccacagtacacagaacagtgacagtaacggctatacggcatcactgcgggcagccggtgagaagctggcacagtaccttgagccgatgacggaagcagaggtacaggcattaatccggcgtaccacacagcgacacaatgagttacagacaccggggagcgttgcacaacgcatgtatgaggcggagcaggagaagcgcagggcagatgaggaaggcgaacggcagagaagggagtaccggcggcggtacggagcctga

SEQ ID NO: 283846 - DNA, 186 bp, Morganella morganii
atgaccgaagatgaagtgcagaaaatgattgagcgcacccgtcaggcaatgaacgcatccaatccggatacgccggacaataccgaagcccgtcagaaagccgatgaggaatatcagcgtgatatggcgaaagcggcagagaagctgagagccacctacaaagaaaccggtgttaatctgccgtaa

SEQ ID NO: 283847 - DNA, 693 bp, Morganella morganii
atgaaacgccgattcttttttctgatgatgcttattttatcaggtaatgctaccgccaatatcgtgattaacggaacgcggcttatttatcatgaagaaaatgacagcattactgttcagctgaataataacagccagacatcatcattagcccagagctggacagatgacggtgacattaatgccacaccggaaaacagcagttccccgttttatgtttatccgccgattgtcaaaatagacggaatgcagggacagcagcttaaaataaagaaaaataatgaaaaactaccggatgaccgggaaagtgtcttttatctcagtgtgctggatattccggccacgcccgccaatgccaaaggaaaaagtgtgttacaggtggccctgcggtcacggataaagctgttttaccgcccagccgggctgacggcaaatccggaaacggttattgataatattcagtggaagctcaacggtgaccatttatccgtcactaataattccccgtatcattttaccattgcggcggtcaatgctaatgacagcagccacacctggctggccgcctccgaaatgattccgccattttctgaaaaacaattaccactgaaaaataaacccgcagcccgtaatgcctcagtgacctatgtggatgattacggtgtgtataagtcgaagaatattaccttctga

SEQ ID NO: 283848 - DNA, 336 bp, Morganella morganii
atgaaagaatctgatttattttctttgcttgacccggtgctgccgggcagggtttttccgtatgtggctccgcaggatgaacccaaaattcagccgccgtggtgtgttttttcactctatgataccggcggcgatgtgctgtgcggtcgtgctgagacaatgaccaatatccaggttgatgtgtatgcaaaaaccatcgatgaagcccgccggatccgtgaactgtctgttgctgctgtttctccgctttcaccgtcagagtttacagaaaagcagggctatgaagcggatacctcgctttaccgggccacgctggagtgtcaggtctggcaataa

SEQ ID NO: 283849 - DNA, 417 bp, Morganella morganii
atgaaacttgtcaagatcaacgatgatacaattctgacattgcctctgttcttggagcatgtccccgctgggttcccgtcaccggcggcggactatatcgaggaacgcataaacctgaacagtgaactgatccgacacccggaaagtacctatttactcagggttgaaggtagctcgatgatagatgcgaatatctttgacggtgatgtggttatcgtggacagcgcggtaactgcggcggagggggatattgtgattgccagttttgacggagagtttactgtcaaaaaattgcaattgtcaccggtacctatgctgatcccgatgaatccggattatcagcctatcgtaatcagcagtgagcaggatttacagattttcggtgtggtcacctacatcatccatcgggcgcagtga

SEQ ID NO: 283850 - DNA, 531 bp, Morganella morganii
atgctggtctgtacaaacagtccgatcatccggcaacgctgtttttcttccctgagtttttccgctgacctttcggcatattcacacacggcctttctcatggtaacaatgtccgtcactttggtaccgaatgatcgggagcagaggatctgctgtttcacctttctgacttcttccagcttgatgcagggttctccgttcagttcccgcagcgtacgctcagtaataacaccgaaagttttacggatagtcgccggtgcggcgttcgccaaatctaatgcagtgcgaatccccatggtgttcagtctggccgatattcgccgaccgataccccacacttcactgaccggtatcagtgccagtaacttacgctggcgcagcctatcagaaaggtcgaccactccgccggtttttttccatgtttttgctgcatggttggcaagttttgcgagtgtctttgtcggtgcaatgccaacaccgaccggaaggtgtgttttctgcagaatagcagcctgtatctcacagccgtaa

SEQ ID NO: 283851 - DNA, 855 bp, Morganella morganii
atgagcactgtacttttaaatgctatgaaaaaagaaatatcttctcgaaaccctttgaaacaagaaattttacttaaaacatctacatttagaaagattttcatttttgaaggtgtcgacgattaccctgtatatgatgaatggatgaaacgtaattcagtttatatcgattcaggacacttagttgctaaagggaagaaacagataattgagctttatgagcatgcaataaaacatgatgatcaagaaatactaaataattgttatttttttgtagaccatgattatgatctcttcgagcataattctgataacatagtgacgctatcatgctattctattgaaaattacattatcaattcgtgctcggcaaaaagttattttaaagatgaattcaaaatggacatcacttattcagacttattagatacaataaaaaaagattttgaacatgatttcaaaaaattcaatgaactagctaaagaattatgtaaaccactttttgtgaaccataacgtgaatggcaaagcaaaattttatgaaaaaatatcttcggttataaatcttgaatataaaaatattaatataaaagaaaacgcaaattttattatatatgaagtcaatgaggaatcagaaaacgctaaagatttaattaaaattttcaatgaattaccatacgaacgtgcaattaagggtaaatatgttttcgagttcattaagaactggttgtcatcactaaaactgcatctttcaaaaaatgaaaatttaaaaataacgaaagaccctttaatgttagagcgacgaagattagcctgttcaactcctgtgcctattgaaataagaaaattttcttaa

SEQ ID NO: 283852 - DNA, 897 bp, Morganella morganii
atggatctaattttcttaccaacttacagaagagttgaaaagaatttcgaaactcaatatagagatgaaagagaaatccaaaatccaagaatgtttggaagaaaaagatggatgaaattgcaacgtgatggtatttcatatggactcaaggatgttgaagatgcgttaaaaggtttaaccttagatatcgagcgaacatctaatcttggttatagatctttaagcgcaaaaatgcttgaagatttgattaaatatgataacaataatcgaatagctaaggggcaacattcactcccttccatagaagacttagaaagatttcttaatcgagtagaggatacaccttcgaccccccgaataagaagaacatcacaggcaaagaagggttctttaattaactcactaaaaaaactatatagtgataatgcaataaaggatattacttatttaaattattttcttacccaattaaactcagtaatacaagaaactaaagaacaagaatcaaaaattgaaaaatttgtagctgtttgtgataaatatctttcctctgcaggtgactctaagtcactaaaatttgaccctcaaagtttagaagttattgtcagtgataaccatacaggagaacgcatctctctaaatgatttatcatctggtgaaaaacaagttatttcattaatggccacaatttatcttaatgacagcactccaaaaataattctgattgatgaaccagagctttcattatctattgattggcaaagaatgattctacctgatttaaatgcaggcgaaaacgttaagcaagttattgctataacacactcgccatttatttttgacaacgagttagacccatatgcaacagcaatgaaagtaatcaaaggtaatttctga

SEQ ID NO: 283853 - DNA, 600 bp, Morganella morganii
atgattcttggaatggctgtaaaaaatgcgactctaatgttatcaactttgctattaactgggtgtgtaattgttcaaaatttgagattggctgcagaggggtttgagtggcaacgcagctatgcgtcagcatctgtatataaaatggacaacacccccaggtacaataaaaaggttaactatattgttaaggttgatgataattataggtatataagctatgtcatcgatgttggacatgcattagcagggtttccaacggttttcatggaggattatgatgtaacaattgaaaaactgaatatgtttattcggtgggcgaatgaaccgtatgatgtgcgcaaaaaaaccatgctggaagtgcagaatagcttgccccaaaatagccagaccccaggaaaaggaataacagatttttatctgtttatggttcctgaggtaaacaataatacaccttatctggcatacaacagggataccggctttttcagttcagagcgatttttaataagcaaacaggatgctgaaattattatctatgaactaatggcatggaaagcagatagcgaagaaaaaaagaaaaatagcacaaccaaataa

SEQ ID NO: 283854 - DNA, 144 bp, Morganella morganii
atgagcctgtcgtattccaatgctcttattgttgctaatggtaaaaagccgcacacagctcttgtgttaagtgataacgaggtgattgatactgtggcggcgtatatgaaaaaaggccgcacatggcgacctcgggagttataa

SEQ ID NO: 283855 - DNA, 141 bp, Morganella morganii
atgctggtcatcattgctatcatcctgctgactaccgctctgttggcgggttgttatctgtattcactcccgaatcactgtaagccgcttccgggtaatcctctggatggtgtgatccattatgagtgtgaagcgctatga

SEQ ID NO: 283856 - DNA, 660 bp, Morganella morganii
atggcaaatctcacagacctgagcaaccagctccgaactctgcggaagcagataccttttgccacagctcaggctatgacagctgttgtcagaaagattgaagacgcgcagaaagtggcaatgcagcgcaatctggataatccgacacctttcaccgttaaaggtgtgagaagcaaaggcgctcggaagacagacctgactgcgaaagtgtttgtgatgccgactgccgccagttatctggagccattcgagataggcggagtgcataaacttaacggatccacactgctgaacccgaaggccatcaagctgaacaaatacggcaacctgccgcgtaataagttatccagcctgaaagctaaagagaacgtattcatcggtgagctatccacccgttacggcaaaaacgtaaacggggtgtgggagcggaagaaagcgaaaaaagttaagaagggccggaaacggttgaaacggtcaccgaacggagcgcggcgagaacgcataccggccagaccgccgaaactgttactccggttcggtgatgccctgcctgtagagccggtactcggatatcaggacagagcaatgaagatgacacaggctctgctgccacaggagattaaccgggcgatagcagaggcgatacgaacggcgaggtaa

SEQ ID NO: 283857 - DNA, 576 bp, Morganella morganii
atgaaggtaaaaatatcacaaaacggtaaaaccatctggagtcgtgacagcgagaacggaacagggatgacatcacgcagatatctgatagacagcacacagcagaagattgttgctgcactgattgacgcactgaatcaggctgacggtgaaatgtcattgtccctgcctgtgggtgaggtttgtctgacattctcagatgaacaactgaaaaagattgcagaagaattgagagcacatccggcatttataccaccactgtatcctgcacagaaagagatgaacctcaccgaacaagcaatactggacagagccagaggttgtgaaaaacgtccggttgcgtggattgttcaggtgggtagtgatgacgtatggttcagtcgggtaacaaacgggcgcatagattatgactacgcgcccgtcagcagagacaaagctaatgtgtatgcatcggctattctgaatgatcttgaaccaccaagacatcttcagaagtccgataaaccgactgttcaaactcaatctgaacaacatcctcgttcgttttgtttacacagcgaaaatccagtccgctga

SEQ ID NO: 283858 - DNA, 1212 bp, Morganella morganii
atggctgttaataaacttagtgataaaaaactcaaatcactacactgtaagcaaactgataagcagcaagttatcgcagatggtaatggtttgtcagccagagttagcaaaacggggactatcagctttatttttttctatcggcttcatggggggaaaagttcacctgtatggctgacgctgggcaaatatccggatttaagtttaaaagcagcaagagagcaaagggataagtgccggacatggttagctgaggggaaagaccccagaatacaactgaaaataataaaagaagacaccctgaaaccagtaacggttaaaaatgctatagagtactggattaataactatgccgttaataaacgcaaagcagcgcaggcaatccgggcttgtttttataagcatgtttataaagatattggtgacattccgttgaatgaatgttctttaaccatgtggattaaatgcttcgacaaaataaaaagaaatcaccctgtgcaatctggtgacattttaagaatatcacagcaggcactgaagtattgcagggtgaggaaatatgcaattagtcatgagattgatgatttaaaagttgaagatgttggcaaaagaagcaatagaagaaacagagttttaacaaaagatgaattacgggatttgtggcagtgtatcaataaagattatgacaataacattatttcacatgagtatagacttattctgatgtttttagtggtttttgggtgcaggatgtcagaaatactattatcaacatgggatgaatgggactttataaataatttgtggagagttccgcctgagcatagtaagaatggtatggagatcatcagacctataccagataacttcaagcattggttattatcacttcataatgcaacaaaaaacagatctcatgttatcggctttgtcatgaaacaagctactgttagctcaactatcgggcaattatggaaaagactaaaccacaaagaaaattggacagcacacgatatgcgaagagtgcttgccacgaatttaagcgataacaattttgaacataatgtagttgagcagctattagggcattcattagctggtgttgccggtatatataacagaagtaagtatattgaacaaaaaaaagaggctctcgtctggtgggtcgattaccttaattcattaattgaaaaagatgaggggcaggaatga

SEQ ID NO: 283859 - DNA, 225 bp, Morganella morganii
atgataactattttaactcgcgatgaattggataatcttgatggaattgataggttaataaagatagaggaatgcgaatggttgacatcattgaatagccaatatatacgcaagcttgagagtaaaggtgaatttccacaaagaattatgatcgggccaaaaacaaaattacatcgcttatctgaggttcaggactggataaaaggtacttggaagcctgagtaa

SEQ ID NO: 283860 - DNA, 171 bp, Morganella morganii
atgtcaagagataaaaccaaaaccgaccaataccaaatgcggctgccgcatgaattcagagaacaacttgagtctgaaatgaaaaaagatggcgatacatcgctggctacatggattaagcgcgttctccgcaaagaactacaatctcgcggtatcgaacccaaaggctga

SEQ ID NO: 283861 - DNA, 195 bp, Morganella morganii
atgaaaaacaatgaattagcggtattactggatagccctgtgatggagatccgcaaattggaatcattgctggttatctggctggaagctgaaagtgaaggtgatattgccaatatggttggtatttcactggactatgtacgccgcgtgcaggaacagttatctgctgttatgggggaaaataatcatggctga

SEQ ID NO: 283862 - DNA, 471 bp, Morganella morganii
atgtcgggaccaccgaaaaccccgtcacacctgcgtttggtcaggggtaacccatcaaaacgcccgatcaataaaaaagaaccaaaaccgccgtcaggggtacccccaactccgaagcattttaccaagcaggggaaatactggtttaagcggatcggggaagaactcgatgccatgggcgtgatgagttcgatggatgccaaagcgctggagctgctgatcgaggcatacaccgaataccggcagcactgcgacaccctggacgaagaaggttacacctacacaacacagagtgatggcggaccactgataaaagcacacccggtggcggcaatgaaagccgatgcctggaaacggatccgggcaatgctgggtgaatttggtatgaccccggcgtcccgctcgaaggtaacgattaacacaccagccgaagaagaccctttcgaggcatttatgaaaaagcgcaaatga

SEQ ID NO: 283863 - DNA, 1239 bp, Morganella morganii
atgactgtgactaatcaatttgctgcgcacgttggtctggactgggctgataaaaaacacgatgtctgtgttcagtttaaaaacggtgaacgcgtattcgatgtgattgaacatacagcagaagcgcttgatgcctggcttactgagttacaccagaaagtaaaaggtagaatcgcaatagctctcgaactgaagaagggccccgtggtatatgctcttcaaaaatacccctttatcaccgttttccccgtccacgcattgtccctggctcgttatcggcaagccttctcgcccagcggcgctaaagatgatccgcaggatgccgagctggcattagagttaatgctgcgttacccccagaagataaaagctattgaacccgacaatgcggatattcgcttacttcagcaactggttgagcaacgtcgtcagttggttgaagataaacgacgctttgtgaaccggataatcaacacgcttaaacagtattatcctcagccactggagtggttctcacatcggggtagcttactgttgtgtgagctgattatccggtggcccagtctgcaacaactgaaacgagccagacgcgacacgatccgcaactttctgaatgccaaaggtggtcgcgctatggcccttaccgagcaacgtgttgcgagtattgataatgcgatcccattgactacagacccgagtgttatagaggctaatgctttgatggcagcagcactggcgacacaaattaaagtcgtgagtgaaatcatcaaaacctatgacgaacgaatcgaaacgctgtttgacacattgccagatgcggggctgttcaaatcacttccgggcatgggaccgtgcatgggcccgcggatgcttgctgcacttggtgataaccgtgaccggtttaacagcgctgaagaaattcaaaactacgcaggtatagcaccggtgaccgaacgaagcggccaaaaatcctgggttcactggcgatggcaatgtgccaagttcgtcaggcagacctttgttgaatgggctgccaagacggttaattcatcatactgggccaaactgtattatcagggcctcagagaaaagggcaaatctcatcagtctgcgatccgggcactggcgttcaaatggataaggatcatttaccgctgctggaaggccagaacctgttatgacgaagcgaaatatttgctggctctcgaagcgagacactcgcccttactgaagccataa

SEQ ID NO: 283864 - DNA, 207 bp, Morganella morganii; identical to SEQ ID NO: 129973

SEQ ID NO: 283865 - DNA, 726 bp, Morganella morganii; identical to SEQ ID NO: 129974

SEQ ID NO: 283866 - DNA, 417 bp, Morganella morganii; identical to SEQ ID NO: 129975

SEQ ID NO: 283867 - DNA, 141 bp, Morganella morganii; identical to SEQ ID NO: 278464

SEQ ID NO: 283868 - DNA, 534 bp, Morganella morganii
atgtatgctgactcaataaagaaattcgcacaagaacaagaggttaagttaatagaatcattaggtgataacagagaacacatcggtctccccccagaaaaaagggaacgaaatgcttatcagcgcgattatgctcgtatactctattcatcttcgtttcgcagattgcaggggaaaatgcaactgtttgaagtcgaccctgaaaaatttaatagaaacagactaacgcatagccttgaagttgctcagattgcgcgaagcatagcatctgatttggaattaaaatatcctgtagtcgttgaacttgcagcacttgcacacgatattggtaatcctccctttggtcattcaggtgaaaaactacttaacaaattatccgaaaatattggaggatatgaaggaaatgcccaagcactacgcatcctgaggaccctagaaaaaaaatatccttattgcaatggtcttaatctaacacatcgaagtttactttctattattaaatatcccaataatcgctttcaaataatgatctaa

SEQ ID NO: 283869 - DNA, 600 bp, Morganella morganii
atggatctatctgatgaaattgcttacgcagctcatgattttgaagatgctcttagcagaaacatggttacaattgaagatatagagtacgagtttaaaatatcaaaggattataaaaatgcaacagagagcttcaatgaaatagttaatatatcaaaagaaaccgcatcaaaagcgacttcactgaagtcttctgaagagtttgcaatgatatttcgcaaagaattgacagctaacattgttaatcatctagtcatggatatttcaattatagaaaatgaaaacggctttagtgagcttgggtttagtaattataaaactttatcaaaaggtctaaaaacactcctctttaaggtaatcatgcgcaaaagaaacatattagattatgaaagtaaggggaacgaaattattagttatttatttgatttttacaacaaagagaataaccataaatttctatcgcctgaactacaatattctttacctgatagtaaatcctttgattatgagtataaaaaaatgagagctgttgtagattacatttcaggtatgatggatacgtttgctataaaagaatgggaaaatcactctcggaaataa

SEQ ID NO: 283870 - DNA, 606 bp, Morganella morganii
ttggagcttaatttctttgtatcaaagtattctgaaatgagtgacagagatggaaataaagtttccatttattgtttaaattatggattgacattattagagaatttgcgttggggtaaacctaatggaaatgattatagaaaatattttatagctagaccttttaacttcaatggggcttttgaagagtttttaagaaaatctaagagtattgtctgtgttaatcataaatgtaagaaagtatatccatatgaagatttaccatatattgaatttaataaaatgagatgtgttgagtgccaaagtgaagttaaggtaatagcaatagctactagtatagaggaagaacttaaaaaaatagaaaaatctaagcttttacctccaattgagttaggtattcttcatgaattaaatgctagtcaaaagaaactctatgctcgagagttatctgaggaattagatatatcatcttatcttgttgctaaaagagctgaaaaattagataaggataaaggattggtaaacagagaaaaaaaatcaggtcagcttattaaatattctattacagataaagcaattaagagttatttttcagatgcggattaa

SEQ ID NO: 283871 - DNA, 1320 bp, Morganella morganii
atggcggataatgaaaaagccctgctgctggccgggcgttatgacgggatcgccgtacatcaggaaagtgagggtttctatgtctatcaggcgggagtgtgggaaaaaatctcacacctcgaactgagccgggaaatgggaaaggtgtactgtgagcaccagaccaatttcagcaaacgggcggtaaacaatgtcgtggatgcgctgaaaattattgcgccggtgatgggtgaaccgtgtaaaagtgtgatcccgttttccaacggtgtttttgatatcgagacaaagcagttcaccgcacataagccggataactggctgctgaatcataacgggattgaatatacaccggcgaagcctgacgagaacctgcgggataatgcaccgcactttcatcagtggcttgaccatgccgcgagccatgacccgcataagatgaaacggatttttgccgcactgtatatggtgctggcgaaccgctatgactggcagttatttctggaaatcaccggggagggcggtagcggtaaaagtgtctttacccaggtggctacgttgctggccggacagcacaataccgccagcgggaacatggccgcactggactcagcacggggccgggcgcagtacgtggggaaaagtatgattaccctgcctgaccagccgaagtacaccggtgagggaacgggcatcaaagccattaccggcggggatgcggtggaaatcgacccgaaacacgaacagcagtacaccagtattatccgggcggtggtgattgccaccaacaacaccccgatgatattcactgaacgggcgggaggtgtggcacggcggcgggtgatcttccagttcaacaacaaagtgaaagaggaagacaaagacccgcatctgtccgaaaagatagcctgtgagataccggttattgtccgtcgtctgctggctaactttgacgacccggaacacgcaaaatctctgctgacggaacagcgggacagtgacgaggctctggaagtcaaacgggcatccaatccggtactggatctgtgtgcggcactggcgtttatcggtgaaccccgggggctggaaatgggcggcggacgtaaagccgaagatgaccgccagccaaggaaatacctgtatcacctctatctgtcatttatcgaatatcaggggctggggcggccgctgagcgtaaccgagttcggcaaggcggtgaaagaagcagcaaaggagtataaatcggaatacctgacccggactatcaaaggcagacggcagaccaatgttcagttaactgagaaagctgaggagtttttgtaa

SEQ ID NO: 283872 - DNA, 192 bp, Morganella morganii
atggatgtcattgatctggaatattcaatatttgaacttgataaaattaaatatgcagtagaatcaatcagacgaatagcagacgtcaaaatcgaaacaaccggtttttttctcaagcgaatgaggattaaaggtacaccggaacaaatcaaaattgccggaaaggcattaaggcgcagataccatcattaa

SEQ ID NO: 283873 - DNA, 531 bp, Morganella morganii; identical to SEQ ID NO: 283850

SEQ ID NO: 283874 - DNA, 417 bp, Morganella morganii; identical to SEQ ID NO: 283849

SEQ ID NO: 283875 - DNA, 336 bp, Morganella morganii
atgaaagaatctgatttgttttctttacttgccccggtgctgcccggcaaagttttcccgtatgtggctccgcaggatgagccaaaaattcagccgccgtggtgtattttttcactttatgatgtcatcggtgatgtgatgtgcggccgtgctgagacgatgactaatattcagattgatgtgtatgcaaaaaccatcgatgaagcccgcaaaatccgtgatctgtctgttgctgctatttctccgctttcaccggcggagttcacagagaagcaggggtatgaagcagatactgcgctttaccgagccacgctggagtgtcaggtctggcaataa

SEQ ID NO: 283876 - DNA, 384 bp, Morganella morganii
gtggcgaatccgaaactgtcattaaaagaactggcactcagtccaaaaaacgccttccgctcaaaaatggtgaaggtacctgaatggaacggtatcgccgttattctgcgggaaccgtcttcggcagcctggctcagatggcgtgagctgatgaataccgacggggagggtgataaaaagttgtcggaggcagaacaggcgcagcgcaatctgcgtgcagatgtggtgatgttttctgatgtgctgctggatgaagataaagagcgggtgttcagtgatgacgacactgaagaagtgatggctgtttacgggccggttcatgcccgtctgctgaaacaggcacttgatctgatgaccacgccggatgaagcggaaaaaaagtag

SEQ ID NO: 283877 - DNA, 129 bp, Morganella morganii
atgacattaacaaagttttttaaagtcttttcatcaacctcagagaaatcatctaaaaatatcactaatttctttatctttaacttagataaaatattttttatttcatttattatatcttttatctga

SEQ ID NO: 283878 - DNA, 210 bp, Morganella morganii
atgaaaacgctggaaacctttatgccgaaactcaaagcccgttacgacgatatttacgtgctacgtaacgacgagcagtcaacgcgctttaagctcacagaattcggcggtgtacgcggttttatgccggatttcatcatgatactgacgcgccatgcggataatgcttactggcaggcgcatggaaagagcgaatgctggaaaccctga

SEQ ID NO: 283879 - DNA, 177 bp, Morganella morganii
atgctggaaaccctgaatgaccgtgaacgcattgtgattgatgaaaatgaggacgtcagactggtcgggattaagttctttgccaacagtcagatggacgcattcgtcaccgacatgcagaaccgactgaatgaaggcgaaccacttgaaaccacctcgctgtcactgcctttgtag

SEQ ID NO: 283880 - DNA, 1029 bp, Morganella morganii
atgactattgaaaatgaatcaccccaagccaaaggcggcaaagctcgagctgagaaattgactgctactgaacgaaaagaggttgctcagaatgcagccaacaaacgctgggaaaaaatcaagaaagctcttccatctactcaacttgaaggtgttttaaaaataaatgacaccgagctggaagtggcagtgctgaataatggaaaacgaataatttctcaatcatccgtatttaaagctctaggacgcccaagccgaggcgtgagagccactcttgatggcgagatcatactccctgctttcatggatgcagcgaatctagttccatatataaatcatgaccttatggacgcgatcaaacgtgagcgttttttggacaattcaggtgccgaacttgagggttatgacgcttcaattttgccattagtttgtgatgtttatctcaaagctcgtcaagatggggccttaaaatccaaccagatggatacagcacaaaaagctgaaatattagttcgttcacttgcgaaagtcggaattatagccttagttgatgaagcaaccggctaccaagaaattcgccccaaggacgcattacaagcttatctggacaaaataataagcaaggaactcgctgcctgggcaaaaaaatttcctgatgagttttatgaaaatatctataaattaagaaattggccttggagtggcatgagtaaaaacagatttagtgtagttgcccactataccagagatcttgtatatgagcgcctgggagattccattcttcaagaactcgagaaaaaaacccccaaacaatctaatggtcaacggaaaaataaaatgcaccaatggcttaccgatgatgttggcaacccgatgctctcccagcatttacattctttaataatggttcaacgtttagcaattgctaatggatatggatggaatcgatttattaagatggttgaccaagttatgccgcgaaaaggtggcacatttgaacttgagctgaacgatacatctctggattaa

SEQ ID NO: 283881 - DNA, 615 bp, Morganella morganii
atgaaaccagatctgtattcatttgctcacctgtcaccggacacaccacgcgctcagggttactccgggcgcggtctcatgtatagcagcaccacagcctcagtcagtgacgaacacgccacagaacacagcagggcgcattcagacgctcactgtatcgctgagagtcaggaagcccgaaacaaccctgtatacgccctgacgctcattaagcgcaatgttccgcatcagtccgccattgaacaacttaccggcagtccccgccacctcagcagatacaccacacggaagatggaagccctgcacccgggctgggagctgttggacgacgaggataagaacatggccgcattccgctacagcacacagaacagtgacagtaacggctatacagaatcactgcgggcagccggtgagaagctggcacagtatattgagccgatgacagaagcagagttacaggcattaatccggcgtaccacgcagcgacagaacgagctacagacaccggagagtattgcacagcgtatgtatgaggcagaggaagagaagcgcagggcagatgaagaaggcaagcggcagagaaaggagtaccggcggcggtatggggtctga

SEQ ID NO: 283882 - DNA, 681 bp, Morganella morganii
atgggtaaatttacgttatcacatctgatggggagccggaaaaaagtgaaaaaacagaagaacgcagccgctcaggggttcgggcatctgacagccggagctgaaaacgacactacggacaatcagcaggagcagaacgccgccgtcctgatggcttcagacgaccagccggaagcgccgaagaaacacagccgttctcacaatgtggcggtatcggaagaagcggcagagagtcctgcactggcggttcacctgctgcgtgagacagacctgtcctcaaagaaaatccgtgcccgtctgcgtgatgaaccggaatacctgtcaagattcaccgtgaagtacatggaagacaacgatccgacctgggaatttctcgacgatgaggaacgggtcataaaggcattacaggtatcgtcacaacacggtgacatcaacggctatatgaccgcccgtcagcaagccgtacaagcactgaaaaagatggaagagccgatgacgcaggaggaactaaaagccctcattgcacgtaccgccgatatgatgaatgcggctaacccgaacacagcggacaatgccgaagcacgtcagaaagccgatgaagaatatcagcgtgatatggctaaagcggcagagaagctgagagccacctacaaagaaaccggcgttgatctgcggggctga

SEQ ID NO: 283883 - DNA, 165 bp, Morganella morganii
atgaaaatagacagcaaagccattctgctgacacagacgcagatggacgcattacggaagattcagcaggaagaacacaaccggtcaggactcgggattaagccgactctgcacgaagtagcccggaaactggtggataaagcattgaaacaggtagagggataa

SEQ ID NO: 283884 - DNA, 420 bp, Morganella morganii
atgagcaattctaaccttgtcgcctttcgtctccccgccgaactccagaccctgtttaatgacgctgtaacggcttccggcagcgataaaacatcatggatagtctcagccatcaaagagaagctgaaccgcccagaggggaatcctgacgctcgtatgctcacgctggtggaaagactggaatccgccgctgcttccttgattgttggtaaagccgatatcccgcctcatgcctacaatgaaccggcaatcgtcgctgtggtgaatcaggtactgtctgaggggatggataacggacgggttattgctgaacggattaacgaggcgggctatcagaccaaagccggtaaagcgtgggataaagatatctattcagcatggaagcggcacaaagatattgccgggaagctggataactga

SEQ ID NO: 283885 - DNA, 501 bp, Morganella morganii
atgaaagatgagaatattcataaggttatacgttttataaataaatttggattgggtgaattattggatttcgtggaattaaatagattaataaaatcatctgtcttttcagagttttgtgaaaaaatcgctgaaaaaacaaaggagtgtagtgatgttacgcaaatagaaggtattgttttcttattcataaaaaagggtaactctaattacaatggcgtattggaatggttttcattaaagatggggaggaaattagtatttgaaaatggaaaagttaaaatttataaaagtttaaaaatagaacgccgttcgaaaagtagtaaaataccaaaaatctataattttttagaaaattattctaaaactaccagttgtgatgaaaaagaacccccttcatcaaaaaagataaaaaataaaatgaagtcaaagggtagtgaagacgttatggatagtcgtttaatgtatggaggttgttatggtatggggaaacggcgttaa

SEQ ID NO: 283886 - DNA, 420 bp, Morganella morganii
atgaccagagcgatattgtcactaaagagaagtaaaaatattgttacaaatccacccgcaactgaagcacaaaaaagcgcaccggctgaaacgcagcaggaagccccgcagcagccgaagaagaaaaacaaggcagaggctcacgcgaagaagcggaaacgccgtacagaccgcatagcgcagcactggacgatattcacagagcagggagtcagaccgcgggcaataggtatacgggaacagatgattgccgatgctgaggcacgggagctggatattaccgtttcacacatcaagcaggggctgtacgactacatcaaccgcagggtgtatctgaaagcccttactctgggcggaagtcgttttgatatgaccgggctgttgaataataaaataatgttcaggatattaaagcgataa

SEQ ID NO: 283887 - DNA, 2697 bp, Morganella morganii
atgaaagcgattgatatgatccgtgaagtaaaactgaaagctaacggacaatggcagggcatattgtcagccgtgggcgcggatgtgccggtaaatactcacacagcgtgcccgggttgcggcgggaaagaccggttccgctttgataataaggacggtaacggcacgtttatctgtaaccagtgcggcgcaggtgacgggttagatctcgttcagcgtgtactgggtgtgggcgtgacggaagctgcgaaagaagtcgccgggattatcggtattgatacccgttcagaccatctgcccgccagagaacagatcccggttaacgggcagcaggagagtcacaaagcggcgcagcagcagaacgaagcccgtgacgcaacagagcggttaaaactttttaccgcccgttacagcggcctgttatcgcaggttcagcagggagagtctgtttatctggcaggcaaagggctgaccggcttcacgttgccgttactatctgacggttcacttctgatcccgctgatgaatgcgaccggtacagtgaccggcgcacagaccattaagccggacggcgggaaacgcctgttaacggacagtacgaagaaaggcagttattaccccgtcaatgcgcctgagaacgtttctgaggtgattatcgcggaggggctggcaaccgccctgacgtgtcacttaatccgccctgacgcgctgaccgtggcggcaatggatgccgggaacctgatccacatcgctgaggtgatgcggggtaaatatccggcagcactgataaccattgcggcagataacgatgcggacaatacggttaacaccggcagagagaaagcagaggcggcagcacgggcggttaacagtcaggtaacgataccggccaccagcggggactggaacgatgtgtatcaggctgaggggctggatgccgcagcacaggcattcacacagggtatttatcaggttcagggagcaacagcagtgaacgatacggaggatatgattacccgggctgtcaaatctgacccgatggctccgcgtattgagtcacgggatgacggtgtattttttgtgacacccaaagccgataaagataccggtgagatcattaaccgcgaacagtggttatctgatgcgattaagcgcgtaaccagcggcactgacgagttaaatcagcggttcctgattgtcgaatggggcactaaacgcattcaggctatcccgaaaggggatattggtgagcgtgagggctggaagtcgctcaaaaatgcggggctgacagtgaccaccaaatcaggattgcgtcagacgctggcagactggctattgcggcataacaccggcagtgactggagtattaccaccaaatcaggctggcacaaaggcgcatatattatgccggacggctcaataatcggcacaccggaacagccgatattctttaacgggcagagcgcagccgccaccgcctaccagacaagcggctcaccggaaaactggcgtgatgatgtggcacggttagccaatggcaacagctttatgatgttcgctgtcggcgcagcacttgccgcacccatgacgggcattaccggcgcggacagcttcggtattcacctgtacgcacaatcgaccgcagggaaaagcaccaccgcagacatggcggtcagtctgtacggtgatccggatttacagcggctgacgtggtacggcacagagtacggcatgactaacgaagccgtggcgcacaatgacgggcttttatatctggatgaagtcggacagggggcagacccgcgacacgtctacaaatcggcatacacgctgtttaacggcaaaggcaagattcagggcgcgaaagacggcggcaaccggcaggtacaaaactggcgtaccgtcgcggtcagcacaggcgaaaaagacattgagacgtttttaaacgccgcagggattaaaattaacgccggtcagttactccggttgctcaatatcccgatagagcgtgccacggaattacacgggtgcgggacagggaaagcacacgccgacttaatcaaagtcaattgccgtgccagctacggggcggcaggacggtactggattgagtacctgtcagcccgcaaagaggaagcccgcgaaatctataaagccgcacagcaccgctggaacaagctgatccctgccagttacggcgaacaggtacaccgggcaagcgaccggtttgccacgattgaggcagcgttaattatggggcgtgcaatcaccggctggaatgagcaggattgccgtgatgcggttcaggcagggtttaatgcatggatcgccgagttcggcacgggtaacaaagaacttgagcaaattaaggaacaggcggagggctttttaaatgcgtatgcgttcagccggtttgccgttcatccgtatatgacgggcagtgaccgggtgaacaatatcgcagggtacagagaggtgagagacggcataacgttgttccacaccttcccgaaagcctttacggatgaaatcgtcaaagactttaacgtcaaaatggcagaaaaggcactggcagaaaccggaatgttacaaaaaggtgataaaggcaggtataaaaaacgcacgataacggttgatggcaacagaccgttgttctatgtcctgatgtatgcgccggaagattgccagccagaataa

SEQ ID NO: 283888 - DNA, 351 bp, Morganella morganii
atgacattaattaaaaaaaacttccgtgtgaatgggctggcgaatttgtttgccggagcggtttatcacgatgtcaccacacagaacggcggcgactggttcccgatgaatgttggcagtaagtccattgaggtagcgattatcgacggtgtgaaaggcatccggatgctggtggacagctatctgctggaagccctgcaacaacagtcaccggcatgggaaccggcagcagtgaacatactggagcggtgtacagcgaatggttatatcaccgggttcgggcgtgagatatggcagagcatgattaacgatatgggcgacacactggcagacaagggagcgtttcaatga

SEQ ID NO: 283889 - DNA, 543 bp, Morganella morganii
atgagcgagtaccgtaccgaagtcaccggctccgccgtggatgtgatgaaacgcaacgctgccggtaaatatcagcatatcgccctgatcccgctggcagacattcctgcccgtgcggatgccggagagtgggacagtaacctactgctggggctgcgactgattgcgacctggttagaccatgctcagggtgacaaagagaaagatttacaggctttccgctggatggttgctgtgctgtatatccgtgaaaccaccgcaaagaacgggatgccgtactaccgtaatcacggggtcatgctgccgctcctgccggactgcgaacggatagcaatggcgaaccacattgagggcgcaatggcagaacgttacggctcggacagtgcggaatacatcgtcagcctgtacacctcaatgattgacggcggcggcgcattacgcctgtctgagtggggcactggcattatggacgctatgcacgaagcattaacacaggacgtggctggcggggtattggaacagccggaactgcggacacactga

SEQ ID NO: 283890 - DNA, 189 bp, Morganella morganii
atgcctgatgctatccgtattgatgccgcgaaatacaacgcgggtttagtgagttcactttacagcgtcattctggatcaggcgtgtaaagagtgttcgccggatttactcaacctgatttcaatagcctgtgacttaaaccagcagatcagccagtccttaaatcacgaaccggagggcgggcaatga

SEQ ID NO: 283891 - DNA, 906 bp, Morganella morganii
atgtcaaaaatcaatgtgccatttaaattttgtcgtattgaaagagctgcaagtttattggggatggagcctgaagatttcatacacttagccagtgtgaataaaatagaactatctattaatgttgggtttgtcgatgcaagaataacgttttatccattgatagagcatattgaaagtatagaaaaaaagatatatgagtcagttgatgtgaactttatgaatttttcaaagttaactgagttttcgtggttcttttttcctcaaatatcaagagggtatgttgatgattttgaggggcttcagctttgtgttgatggtttgctcagtggaacatattgtgcagatggtatagctagcggtatatggactgtcgagccatttttaattagaaaactagagttatgtgatgaggttaaattaaaagaattttcactaagtacatcaggatatacaggtttgtatgattcctcatcgttcatgtcaatatatgatcctgatgaaagagtgataactagaaatgatttatgggtgaattatgtagatgttaatagaatcgttaaatcaaatggcgatattaataaacttgatgatattaaaggaagtaagtactttaatagagaaaataataaggatgagtgtattgttagtattcatccaacaactgagaggcatgcaattaatagggagcagatattaaacgcagcattaaggtttattgaagaacaaccaaatgtatttaaagataactgtagaaagaaggatggcactattaattattcagcgtttgccagagaattacttgaaaggcatcattttttccctaatggtgaaccaccaataaaaacacaggaatccatagcagggattcttagcaatgcatataaatcaccgaatcaaaagtaa

SEQ ID NO: 283892 - DNA, 1407 bp, Morganella morganii
atgacacagactgtttatacgccgcagcggccgctggatctggtgctgctttcgccgaaagggccgctgtaccgcaagcggggcgggattttcaaacgctcgctgcgttatcagccgctgacgctgaccaccctttccgcactggtgccgaaatccctgccggttaatatccgcctgattgatgaaagtattgaggaactgccggaggatttcacggcagatctggtggcgatgacggtgatcacggggaatgcgccgcgcgcctatgaactggcggcacagatgcgggcgaaaaatatccccgtcgtgctcggcgggccgcatgtcacactgctgccgcaggaggcgctgcagcacgccgatacggtctgcaccggctattccgagcagagctggccgcagcttatccgtgattttatggcgggtaatatgcagcgtgaataccgtcagggcgcggatttcacgcttgatatcccggacttgccgtttccggaacgcgaacggtttgatgcaaagcattttctcacccagggggtttttgaagcgacacgctcctgtgctcacaactgtgagttctgtgttgcaccgagtgcctgggggcgtaagcagtttcagcatccggtggagtgggtggttgaggatatccgccgttatgtggagcgcaccggcaaacggaaagtaatttttgtcgatctgaacctggtgtcggatatcggttatgccaaacggctgtttaccgcactgatcccgctgaatattcagtggttcggtttatccaccgtgctgatagctcataaccacgaactgatggatctgatggcccgcagcggctgcaaagggctgctgctggggctggaaacggtcagtgatggcagcctgaaagatgccgggaagaaatttaacggctcggtggattataaagaactgataggcgacctgcaccggctgggaattgcgattcagggctgttttgtattcggtctggatcacgacaccaccgatgtgtttgaccgtacggtggatctggctatcgatgccgggattgatttaccacgtttctcagtgctgacaccgtttccgggaacgccgctttatgcgcggctggcgcaggaaaaccgcctgcgctttgagcactggtggctcgatgatcattaccgttacaacgaactgccgttcagtccggcacagctgtctccggaggcagtaacgcaggggtgcctctcagcaaggaaggcattttacagttcacgctcgattcttcagcgcagctggcgtaaccggggcgatttctttatgtttcgtaactatttcccgattaactggctgcatcaccgtgaaatcagctgccgcaacggctatccgctcggtgatgagaattggcagggtaaattagcagaggttaaatga

SEQ ID NO: 283893 - DNA, 1296 bp, Morganella morganii
atgtatgattcaagccatttgtttagctcgttcatcaagggtggtgagcaaacagagtacgacagagatatactgctttatgcctatgagcttgatgaggacattgctgaatgcaaggactttgagcgttttgagaaggctctaaaagaggtcaatagttcatgtagtctgagaattgaaggtgggaaattatgccttgaatttgaagctggtagcgaacactggcaagacgatttcatgagctatttctacccgaccttagataacttcatgcgagtgtgcgttaaaaaaaggagcataccatctaagttctgtattcttgataggaaactatcagaatcggatacagacgactccttattaaagaaggttattcaggttactaagtgggtgaagttgttgtctgatatggctgaccatattcaagataacaatgtcctggtgttctttgttcatcacaaagaagggaagactaagccatatcagattaatccgttcgttgatcttcaagtaattgaagaattggaactagactgtgatgagtctagatatgaacgtttgcacggaagctggcatttagaagatgctcagaccaaagacagacaaagtgtcatgttggtttcatttgctgagattatgtcttcaatggaagatggagaaaacccatttaaggtgtttctatcaagtaccaaaaagttccatgataggtactgcgagaactatgaaatctatgtgaatagattcactgtagatagtcagcttcgagagattgatgaacagcatttaagctttattggtaaactacaggatttggttacatcattacaaaccaaagcatttgcattgcctggtgttatggttgctattggtgcacttgcaaggacaaacaacttcctaggaatagttgctattgttgttggtgttgtaatgacaaaaatcctgatagcaaagtctaatgagcttcttcatgagaacttaaaccactttaaggacacctttgacagagcattaggtcactatgtgaaatctagaactgaagctgaagaagtgaaatctcatgcaatggatgcacagaaaaagcttgatactcaattaaataaagctaaaggaagagttgattttatcggtactatgtccaactggatgcttggatttgggttagtgttggcatttattatgctcatattggttttcaaaaccgaccatccagaagaggtcaaagctatttgggattggggagtagaaatgtctaaaatagtttgtcactggactaaagctaagctagcaacattataa

SEQ ID NO: 283894 - DNA, 1092 bp, Morganella morganii
atggttgcatcgctagttgtacttaacgctattgccgcagaggttagtaaacaagatggtcgttttggctatgagtttggagatgtctgggacggaggcaatgagcatgcgcttaattttgttcaagagatagaagcaaaatttagacgtaaaactaagacttatggcttcttaagtgtggatactggtagaaattcgataccaacaatattgactaatttcaatgccaatactgatagtgcttttgaggacaccacccaaagcatgatggaaaggctaaaatcatcattgaatgaagatggtcgcggtaacacacaagtcggtcatatggtttttattcattactgtaatgaaggtgaagaagaagacttaggtcgtttgcttgttgttatggtagacaagaaagacgtgtttgattttggtgcgggtcttgtacctacaagatttaagtctattgatgttgatacgctgcgacaagctgtgttgtatgatttgactctattcgattcagtctatcctgaccatattgaggagcaccaagataaagcttacctacgatttatctcgggtcgttcaaaaggacaatttttccaagaagctcttggcacgaatgacatgatagataatactgtaagtgtatccagtgtttttgatgcagttgaacagtttggtaaagagttgggtctaaggactgctcatattcgtaagcttcgagatgaagttgagctattaattaccgacaagaaaggtaagcaagttagcgtaaacagtgttgctagaaaagtaattgcgaatctaccagatggcaatgatgagataacagctgaagattttgtcatgttcatcaatgaaaatgattacaaaatcagtgaaatttttgatgtaacacgcggtcaattgcagaaagcgactaacattgaaggtcaaaaagggcaggattacttttatcgcattaaaagaagtgctttgggggatgttgatgatgaggaaaagagcattaggtacgatgccagaacacgaactatatatatagaagtacaagatgaagagcagcatcgtgaattattggaagcattaccagataggagttaa

SEQ ID NO: 283895 - DNA, 261 bp, Morganella morganii
atgctgacccttgaagaatggaacagcagattgccaataccaagaaatatggagaccgtcagacggtgggtgagaaatggtcagatatggccgccaccgttgtttgatggatacaggtatttagtgcaagacgatgccgttaagcacaatggaactcccggacaaaagaaaagtagtaacctgatcgagagaataaacaatggcaaagaagcgaaacagggaaagacgagacctgccaccaaacctatatgtccgaaataa

SEQ ID NO: 283896 - DNA, 234 bp, Morganella morganii
atgcatttttttgttgagttcgataaattatattacgaccttacatttgaccaatttgatttctgtcaggatatcattattgcaggtgacaagtcgccgtttgatggaataattcacgatatcctttataggaaaaacttcgctgatttcatttccgaatataaaaacagcccatataacaacaaagagttaatacaactcgccttagaggaaataaattcagccattctatag

SEQ ID NO: 283897 - DNA, 459 bp, Morganella morganii
atgaaaggcaactgcgccgatctccacctgggcggcgcggtcaaattgccgggccttacggcatcgagctgggcgacgcgcccacttccccggagccgaacggggcagggcgttacgtcgccggtgacgccgaccagggcgaagcgcccaccccctccctgcaaagccggttttggcgggctgtcagacgataccgccgccggaacagtggcccgtcacaacggcccggttgagcgggcgggctggcgcgtagcgacgggccgggcgcgatttatccgggtgttggggggttggtcgcgcagcggccagcgcccctacaggcacgacagcgccgtaactggcagaggatggcgaagccaccccgaaggggcggggccgccggaggcggggcaagtccggcgcagggcgtgggggccaagcggagcgcggagggcgaagcccggaggcgttagggattga

SEQ ID NO: 283898 - DNA, 444 bp, Morganella morganii; identical to SEQ ID NO: 28885

SEQ ID NO: 283899 - DNA, 315 bp, Morganella morganii; identical to SEQ ID NO: 28886

SEQ ID NO: 283900 - DNA, 258 bp, Morganella morganii; identical to SEQ ID NO: 233005

SEQ ID NO: 283901 - DNA, 543 bp, Morganella morganii; identical to SEQ ID NO: 104336

SEQ ID NO: 283902 - DNA, 423 bp, Morganella morganii; identical to SEQ ID NO: 28887

SEQ ID NO: 283903 - DNA, 180 bp, Morganella morganii; identical to SEQ ID NO: 14376

SEQ ID NO: 283904 - DNA, 378 bp, Morganella morganii; identical to SEQ ID NO: 14375

SEQ ID NO: 283905 - DNA, 300 bp, Morganella morganii; identical to SEQ ID NO: 14374

SEQ ID NO: 283906 - DNA, 264 bp, Morganella morganii; identical to SEQ ID NO: 14373

SEQ ID NO: 283907 - DNA, 420 bp, Morganella morganii; identical to SEQ ID NO: 14372

SEQ ID NO: 283908 - DNA, 1686 bp, Morganella morganii; identical to SEQ ID NO: 14371

SEQ ID NO: 283909 - DNA, 258 bp, Morganella morganii; identical to SEQ ID NO: 14370

SEQ ID NO: 283910 - DNA, 129 bp, Morganella morganii; identical to SEQ ID NO: 14369

SEQ ID NO: 283911 - DNA, 1965 bp, Morganella morganii
atgtttaatacggattcgcttgcctggaagtggcacattccggagctggcccggcagatttatccgtgggtcagctggctgtaccaggagtattacggtctggccggggctttcctagttatcggcctgtttttcggtctggctgaactttgggccggacggatgcgttttgtggggctgagtcataaggagcgacgggagtatgccgatcgctataagcgcgataataaacggccagcgccattttcggtgctggcctcgctggattcgcccgggcggatggtcagggcacgtcgacatgtctggaactacgcgtactggctgaccggcgcggccggtctggcccttctgggggggctggttgtcgccgtgtttatcgagagctggggagaaaccgtcctgcgtccggacctctacgcaaacgcagattattacctgctgcagccggctaacctgttcgggattgcctggtgcgcgggcgggctggctgtcgggattgtgttggcgcggctgctggcgttcctgctgcttgacggtcattttgcggctgctgacgaggcggtgaacgcgaaactgaatcaggagagccggcgcagcagccagcggacaggagagatgaccgacgtgcgccacctgcatttcggggagccggtaccggttaatgcgctggccgatttttcctcggagcaggcccggcaggagcaggcggtgtttctgggtaaggatgagcagggcaagccggtgctggttccgcgtgatacctggcgcaagaccaacattcagatcctcggcctgcccgggagcggcaagagcgtgatggccaccaacgcgctcattcgctgcgtacgcgatttcggggacgcggtggtgtacttcgaccccaaaggggacgcatgggcgccgcacgtcttccgggcgcactgtccggacttcaccctgctggatctgcggccggggaaaccggcgcagctgaatctgttccgcgatctcgaccagtacgcgctgaaaaacctgctgattgccgggcttaacctgggcgagaccggcgacgtggcggaccactaccgcatcagcgagcagaaagcggcgaagctgattgcggagcagtttccgcagggggcaaacattcagcaggtgctggcggcggcgtacgcgctgccggaggccctgaaaaaggacgtgaaggggttgatcactaggctggaaaacgtcgctgacctgagcgtcctgcagacggacagtggcatcgatgtggcggggattatcaacggcggcggctgcctgtacgttatcggctcgatggacgacgaggcggtgatccgtgtgcaaaaaatgctgtttgcccgctgcgcgcaaatcatcattgcgcgggacgagttccgggagtggtcacacgtcagcgtgatgctcgatgaaattaaatatctgctgtcgaagtatgtactgaacgcactggggacgctgcgcagccgggactgcaatctgttgctcgcgcaccagtcgctgggcgatttcgggcagtgcgggcaggatctgcccgctgaatttgtgaaaaccacggtactggataacacgccgatccgctggttttaccgggcggccagcctggagtccgcgcagtgggcggcggggcagaccggggaaatcagggtggacgtggagcgccgccgtgccagccgggaggcggggaacgtggagcatatcagcggggacagcttcatccagaaggaggcgcggccgctgtttgacgtgaacaccctgcaacacctgccggacgggttcgcggtcatgaccgggctgggtgtggcccggatggcgttcagcagtccgctgcgggttgagcgccgggaaatcccgttgcagcgtttcccggtgctggcgaaaaccgatcccctggcggagttccggcccccggccgacggcggcgggccgaaagcggatgatgattttgcggggatttactga

SEQ ID NO: 283912 - DNA, 732 bp, Morganella morganii; identical to SEQ ID NO: 75878

SEQ ID NO: 283913 - DNA, 531 bp, Morganella morganii; identical to SEQ ID NO: 14377

SEQ ID NO: 283914 - DNA, 3168 bp, Morganella morganii
  misc_feature (3113)..(3122): n is a, c, g, or t
atgaaaacagacaatcgaccattaatttcattatctaaagacaatcaaaatacatttattgaagcttggcaacattctgattattctggtattgatatcattagagaccttcgtaaaaatggcacccatccttatgggtgtcctgttgtctttactagccatattaatcaaccacttattgataaaaatatagaatctgtattaggttctataggatggggaatatcacaaaccccacaagtttggcttgatcacatggcaattaacaaaagtggaaatattgttttacagtgggattataacaatgacttgttccggaatgatgttataacaacaatatttgatgtttatatttctcgtatacgccaacttgccaacgatcctaatgcctggattgaaacccaacctgatttaattcctaaaaaacaattaaaaaatagaatatcagttatcaaaaaagataattcactattaccacatacactgcataagtctattttccataattattcaaattcatcaaaaattgctgtcattgatatcgactctcaggaatggagctacaaaaaattattatctaaagcaacaatactcagtgatcaaataatacaacaaggttataaaccagaagacagaattggtgtatgtatgccaaaaggagtagggcaaatcattagcgttctggctattttattaatggggggaacttatgttccgattgatgtactacaaccagaagaacgtataaaccgcattgctaaaaatgctcagctttcattactcatcgtatctgatagcgatccatcctattcaatctatgctacattttgtaacaggattgtttggcaaaaagttcaaccctccgagaataaaccactacacaatatagatatatctcctcatcaagcagcttatgttatttatacttcaggttctactggagagcctaaaggtgttgttgtatcccatgccagcgcaatgaatacctgccttgatctcaatcggcgatataacatttcagacaaagatcgggtacttgccatatcagcactacattttgatctgtctgtttatgatattttcggtgttttaaatgccggagggactcttgtattagttaaagaagatgagcgccgtaatcctgatgcatggttacgacttattaaccaacataaaataacactttggaacagcgtacctgcactgtttgatatgttactaacctatgcagaaggaatagggtcatccattccacaatcgctgctattaatctatctctctggagattggattgggcttgatctcccgacacgttactataatttctgccctgatggacaaatagtcgccatgggaggtgccacagaagccgctatttggtctaactattttaatgtcacaacattagacccatcctggagctcgataccttatggatatcctttatccaaccaacgttatcgtattgttaatgctagaggagaagattgccctgattgggtatcaggagaactttggattggtggtgcaggcgttgcgttaggctacctaaacgatcccgaaaaaacagcacaacagtttgtaaaacaaaatggtgaaaattggtataaaacaggtgatatgggaagatatctccctggcggtatacttgaatttttaggaagacgtgaccgccaagttaagattggcggataccgtatagaaccaggggaaattgatgccgcattcaataagcttcagggtgtgcaaaatgcgattacactatgccttggtaatggtaataaagaaaaagcattacactcttttgtgatactaaattcgggtaattaccagaatattatcagttcaaatagcgccttttctcccctctactatctgcgctcaaccccaataaatgtacaacaacaatcccaagaaacggcaatcatagctggatttttatatgattatcttactgaacaaaatattgatttcgacaacctcttgtcagaaaaaaaatcagcagatgaccatggcattatcgctagctatcagtcattaatggctaattggctaaatttaatagcacaatatccacaaactacactcaattcccccccaactaatagtacccagcgaacgctaatagaaaatttgcagcgccacaaaaacaatttaacagacatactcaaaggtaaaaaatcagctctaacactatttgatgatccctattggtcaccagaacaagtcactatgcgtattgatggaatgcactactccttagaaaatttactacaacaaataagagaacttcatcattcactaaaaaggccaataaaaatcattcaattaggtgctagaagcggtatttcagcaaattatattctgcaacgattacccaataatatggttaccctactgctaactgatgagtctctttcaatggtaacgcaagctaaccaaaatttatcagattatcaaaatagttatgctgagcctcttacagaagtatttcttcataaaaatcgatatagtgcagatatcatttggatgaacaattatcttcatcgattagacagcccacaaaaagagatacaaaaattcgtttcactctgtgctccgagtggaatgatttttatacaagaagtgttacatgcccctgcacaatcactgataagcatctctttattacaacaaaatggtagtgatcctgctgatgaattattaacagcaaaaaaatgcaaagatatctttagcgcttctactgcgacttataaaagtgaaggagttaacggcgaaatattgacacagttataccaagcaccagaaaaaatttatttaccagataaaaataagctagagcatgatttgcgccaatttttaccagactatatgatcccaaaacatatttattttctaactgagttccccttaaccgcaaatggcaaaatagataaccaatcattaaaattgtattgtcaggaataccaagaagaatacctaaatcaacaacctatcaatggtaaagaacagatcatcataacaatatggcaaaagctccttggcaccaacaagatacaccgtcacagtcatttctttcgtgaagggggagatagcctagttgctattcgatnnnnnnnnnncatatctttgcttatccgatcctttctgattttgcacaaaatataa

SEQ ID NO: 283915 - DNA, 1512 bp, Morganella morganii
atgttacgtggtgtcattattaatggacaacaacaagtacttaaaaaagttccttattattccgttaaaacgcattatatccctacagaaaaaagtgacgcttttctagtattacgagctcaacttgctaacattgtttatgatccagaaaattggcctttatttgctattcaagttatcaagaccaaagaacaaccagatcatatttttattagccttgataacttattccttgatggaatgagtatgcagatatttttcagtgagctaaaaacgctatatatggagccaaatcaccaatttatccctctagatattacttttcgagattatattgattgtgatgcctatccgattaacacacaaaatgattgggaatattggttaacgcgtttaccacaattaccaccagccccacaattgccactaataaaagatccagcacagattgtgcaacctcgcttctcgcgtttacaaacatcattatctacttctgtttggcaagcactacaacaagttgctcaacaaaataatgttacgccagcagcacttttgattgctgcttattgcgccacattatccgcatggagtaaaagccctgagttaacaattaatttgacattatttaatcggcatcctgtacatcctcaaataaatgaagtacttggtgattttacctcattacaattactcgattggtatacctgtgatctttggtcaaacagtatctcaatgatgcaaaaacgtttacataaagatatgcaacatcgtagtgtttcagccattaaagtaatgcgtgaaatggcaattcaacgacagatgtctcatatagagatacctgtcgtttttacctgtgcattgggctataaacatgatgaaggttttctttctcatcattcatggctaaaacctgtttggggaatatcacaaacaccacaaacatggctagatcatcaagtatatgagtcagacggtgaattatatttaaactgggattttgtcgaacaattatttgactacacaaccattttttccatgttccagcaatatgaacatatactcactaaactggctactgaaccacaatcttggcaattgccactaaataaacttataccaagatgcaataatctcgtcatcaccccagttttcaatgccaaaaataatcaaaacacacattataaacaatctactgatacacaaaaaacaggtcagacaatacaaaaactacaacaacttgttaagcaagttattggaataacgttagcacctgaaacaaattttttcgaagcaggtgccagctctttacaattggttcaacttcatgcagcactacaaaaaaatggctatagccatattacaattactgatctgttcgctagtccaaatctaagtacattagcgcaattgctttggcaaaacacttcaccaacatgtgagcaatattccgaccgagacaaacacaaaaacaagagaaagaaacggttacaactacgaactcatagtagataa

SEQ ID NO: 283916 - DNA, 435 bp, Morganella morganii; identical to SEQ ID NO: 280473

SEQ ID NO: 283917 - DNA, 435 bp, Morganella morganii; identical to SEQ ID NO: 280473

SEQ ID NO: 283918 - DNA, 1866 bp, Morganella morganii
atgaatgatgacaataataaaaacaaatggaaaaatatcagtaataccttatcgagaaacataaattcactgaaaagtgagtttactgtcggtaatctgtattcatcatcacagttatttgattctgttaaatttcgtggtattcgtctgacaacagacagaaccatggatccggtcagtaaaacaaactatgttccgtcaatttccggcatggcaaattcagaagccgttgtcactgttgttcagaatggtgaaattatcctgagacaaagtgttcctgccggtccgtttaatctcaccgaatattacccgatgagtaatggcggaaacctgtatgttaatgttaaagaaactgatggtagtgagaaaaatttcatcgttcctttctcttcaatttccacactggaaaagaaaggaaatatgcgttacagcatttccggcggaacctatgacagcaataacaaaggtaacggaaagaaaatcgatcaggcagaaatattttatggcctgaccgattttgtcaccgttttcggcggagcatttgttgccaaagattatcaatccggcggtatcggtgctgcatttaactttggtgcttttggtgcaatcacagccgatatcctgcatgcaaaagcaactcttaatcacgataaagcctctgccgggaatgcgtttcgcgttaactactcgaagagaatagaagcaacaaataccagcgtatccctggtgggttaccgtcactttgatgctaaattttatcgtttcgaggatgcaatgtcatatgatgaaaaccggaacgaccataataaacttaaaaatgaatacactttatcactgaatcagcctgttttttccggcaattcatcgcttaatctgtcgactgttatttatgaatatacatccggtaaaagacaaaaatcctataatgccgggttcaacagctcatttaacaaaatgaactacggtatatattataattattatcagggcacaagaactgagaatggtaaaaataatacctataatgtcagtatgaaccttaatattccgctcaatattaaagataataccatctgggcaaattataatatttcttccgatgccgatcatcagacgttacagactgccgggctcagcgggaattatggtgagaaccagcaaggcagctgggatatttatcagagtcagggtaataaaggcaccggtaattcaggcggtctgagcagttcctatcgctcacaatatgcgtctgttaatgccggttattcatacagtaaaaataataaaaatctcagctatggtatgaatggttcattgctggccacacaatatggcgtagttaccgctcccgcattgcagaataccaatgcactggtactgaccaaagatactgccggtgtgggtatcattaacggtcagtctgctcagacaaataattcgggccttgctgttgtttccggtatgacgccataccggaaaaataatattgtgattgatactcagaccatccccggtgataccgagatcgaaaataatattattaacgatattgttccgacaaaaggcgcgctgattctggccgatttcaatgtgaagaaaggctacaaactgctgatcacactgaaaacacctgataataaagaaataccgttaggcgcaaaagcaacgatgggtggtgatactgaatacctggtatctaattttaatacgctctatttcattgcggataaagaaaaaggtgatatccgcgtgacctggaagcaggacggaaatatgcagcaatgcattatccggtatgacattaccggcactttacccacgaacggaatatatattacaaagctgaattgtcagcgggagatttga

SEQ ID NO: 283919 - DNA, 648 bp, Morganella morganii
  misc_feature (577)..(586): n is a, c, g, or t
atgatgatgaaaaaatatcataataaaaaccattttatgtcattatccgtgatgcctgtccttatggcagggacatctttctccgttatggccgatgattattatccggccagtttatttaacattcccggcagtaactcacaactgactaatgaagatgtcaatgttttcaaagaaaatgataatgcgcccggaaaatacaaagtaactcttgttattaacaataataaaattaccacaaaagagattgattttgttttgaaaaaaaacaaagctggtaatgaaaagctcattccctgtttttcaagagaagaatgggaaaacacaggactcgattttccgtcatcagataatgatgataccggtggctgttttaatatcaatgacattgaatatacgcatggctatctcgaccttaacacccggatttatgcactgacaacaccacagtcatacattaataaagataaactggaagcattagagcaggaaaactgggataatggtatccctgcactttttgttaactatttattttcggcagtaaatcgtcaacacaatggcgaaacaaaagacnnnnnnnnnnatccagaccagagtcaatctgggtgcatggcgttatcagaattattccacctggatgaatga

SEQ ID NO: 283920 - DNA, 180 bp, Morganella morganii
gtgatcacagaaacgtatccgaacaaagccgggcactatggccgctattacgcggaagtggcagaggcgattatcaataacggtccgaacccggtgactgcgcaggaaggggcagaagttatccgtattatagaggccggtatggaatcgcataaaaccggacggactgtgacactgtaa

SEQ ID NO: 283921 - DNA, 906 bp, Morganella morganii
atgttcgcaattctgatgacattatggccgctgtttgcgctgattttgctcggctgcattctgaagcggcggccggttttcgatgccgggttctggaacggcgcggaaaagctgaactactatatcttatttccggcgctgcttatcaacagcctcgccgttgctccgctggataacccgcaactgccgaaactggcaatcgcactggtaattatgctcgggctggccaccgcagcatttgcggtggtaaaacgtctgcgcggaataccaacggcagaattcggcgtactgctgcagggcgcgatccgctttaatacctatctcgggctatccatcgtcaatgatttttacggcccgtccggtgtggcggtggcggcggtgatcctcgcggtactggttccgctgtgtaatatcatttccgtggttgcgttatctgaatttcggcagttatcgctgcgccgcctgttgttacccattctgacaaacccgctgattatttcctgtattatcgggatgctcctgaatgtcaccggtgccggtcttccgtataacaccggtcagtttgccagattgctggccggtgccagtctgccgctggggctgctctgtgtcggggcggcattgcaggtggcgactatccgctattccgcactgaaaatcagccttaacagccttgtccgcctgtgtgttatgccattgctggcgattgctgtggcgaccgtgatgggattaacccaactggaatatcagctgtttgtgatcttttttgctattccgaccgcaccgaccgcctatattttatcgcgtcagctcggtggtgacagccagctgatggccgggattatcacgtttcagaccatggtggcggtgctgactctgccggtggttctgaccatgatcacctga

SEQ ID NO: 283922 - DNA, 393 bp, Morganella morganii
atgcaaaaaatactctccggactgctattcctgacgctgcctgcgttttccgcaccggcggaagatttggatttgctgccggttcaggatcgcaaccaattatttgcggacgcggggaaccgtaccggtgttgcccgtaaaaccagagacgttctcgcccgtccggcggtgcccggtgaaatcgtagtgacccttatccggggtgaaggggaagaaacccgttcaaaaccggcgaaagccggggattgggtggtacagaacatctgtgacgctaccggcaatgaagaaattctggtgaaaaaaacggcgtttacacgccgttacggcagtgcactgacagcggcaaccggcagcgtttccggccgcagggagagccgatggattatctggtga

SEQ ID NO: 283923 - DNA, 1617 bp, Morganella morganii
atgagtagccaaccaaaacaaaaagtcacgctctgggagtttttccagggacttggcaaaacctttatgctgcctgtcgcgctgctctcgttctgcgggatcatcctcggcatcggcagttccctcagcagccgggatgtactgacactgctgccgtttctggatcacaccgtcttccagttactgttcacctggatgagcaaaatcggctcatttgccttcagtttcctgccggtgatgtttgctatcgccattccgctggggctggcgcgtgaaaacaagggcgtggctgcatttgccgggtttgtcggctttgcggtatttaacctcgccactaacttctacctcactgctgctgatattttaccgactaccgaccctgctattctgaaagcccataacatccgtgatgtgctgggtattcagtcaatcgacagcgggatcctcggtgcggttattgtcggtattattgtgtatatgctgcatgaacgcttcaataccatccgtctgccggatgccctggcgttcttcggtggtacccgttttgtgccgattatcaccactctggtactcggcctgtgcggcctgctggttccgctgatctggccgtggtttgcgatgggtatcaacggattaggtaagctgattcagagcgccggagcattcggaccaatgattttcggctccggtgagcggctgttactgccgtttggcctgcatcatatactggtggcgctgatccgctttactgaagcgggcggcactatggaagtgtgcggtaataccgttaacggcgcactgaccattttccaggcgcagctctcctgcccggaaacccagggctttgcggccagtgccacacagttcctgtctcagggtaaaatgccggcgttcctcggcggcctgccgggtgcggcattagcgatgtatcactgtgctcatcctgaaaatcgtcataaaattaagggattactgatttccggtgtggttgcctgtgttatcggcggcacaactgaaccgctggaattcctgttcctgtttgtcgcgccgttcctgtatctgatccacgcaattctgaccggcctgggcttcaccgtaatggcgattaccggtgtcactatcggtaacaccgacggtaacctgattgactttgtggtcttcgggatcctccacggtatccagaccaagtggtatatggtgccggtggtggcctttatctggttcgcttcttactatgcgattttccgtttcgccattacccgcttcaatatcaaaaccccgggccgcgatacagacaccaaagaaagcgcaccggcaaccggcagttccgcaggaaaatccggctatgatgttccggctattctggcggcgctgggcggtaaagagaacattatttcactggataactgtatcacccgtctgcggatgtccgtgcaggacatgagcaaagtggatgacgcacagcttaaagcattgcgggcgatcggggttgtccatctgaatgaacataacttacaggtggttatcggcccgcaggttcagtctgtcaaagatgaactggaaaagctgatgaaatccgcgcctgattccgctcagccggaaccgcaaaacgcctga

SEQ ID NO: 283924 - DNA, 7419 bp, Morganella morganii
atggatcaaataacccgaattcttgaaaaactgaatcagcaacgcagcggtgaaacaaccgtgacactggcagattttatgccgatgtcccttgcagagatccgcagccaaaacacaggccggttatcgcgtgaagaagcacagttactacaccgtgcagcgcaaaaagaaaagcaaaacaacattctctataccgcccggatgctgacccgcgctaacccgctgctgaaaaaagaaatgaatactgcccgttattacggcgccaccccatatggctatgatgatattattccgccgcgtgcagagaaatttgtcgcacccggcgccgtctcttccatgttttcccctgccggttatctgactgagctgtaccgtgaagcacggggactgcatccaaaagacagtgaccgtaatctggataagcgccgtccggacctagcaaaactggtgctctctcaggacaatctggataacgaaatctctgctctgtcactggctaatgagcaactggaaacggcgctgatggcgcaaaccggtaagacagacaaaaacaaatattatgaaaccctggcgacctcccgccgcagtggtgtaaccccgtataacgcgccgtttgagggaatacataatgccctggcacagcggaattttgtcctgccggataatattctcagcaaccctgcgaagtttgccatactggcggcatacgacgccggtatctcaccaaagttatataacatactgacagaagacacagagtcattaaccggctccgatctggaaaactctctcaaaagaaacttcccgaaggttaagattaaagacctgatgactctggatgcgctggccaattattatgagcttccggcagatgacattcaggcccttattgctgccgaaataacaggccggttaccaacaccggatgtatataacgacgataataaactggtaataccggcaataaacactggcggaaaaattacattcagtgaactggccaaaacacagagtgatgaaaaacaggctgactatattgatttaattccgcagggcggtaatcagtttttagttaattttagtgtaaagaaaaccaaaaaatacgcgacgcattttagtataggctataataaatcgtttaataatctggcagataaaaatggttttgttcctctggccggggagcactacagtatccccgtcacactggatgctaaaattttagaaaaaaaaactaaaatcggcatcaccagaaaaaaaccagaacctgccagcgacgaaaatcattacacctcagccaccttcaccatccatcccaatgcagaaccgggtatatggctcctcagactcaacaaaacactgcgtctggcaaaagtcagcggtatgaccccgcacgaaacacaacatgcattaatccacgtaagaaatgattcaagcgaatacgaattacgccgtttcaccgaaacgctgctttaccgtaaacgttacggtattgatactgaaacagcattaatgctgtgtaacgccggtatcagcagaatcagctatgacgggcagctcagccattttgaccgcctgtttaataatccgccgctgaatggtgtaacttacactttaggtggtgatgatattccgatggaaccggatgccggagacccgcgtcgtgaagtcctgaaacgcgctttccgggtagataataccggcttgtggcaactgcttgttatcacaaatcgtgaaaacaaatccaaaactatcgaaaacaagacagaaaaacttcgtggtctgttatttgttcgtctgctggcggatgtgcacaacctgacagtagcacaactggatgccctgctgcagatttccccttacaattcaatgaacgtttacgctttagatggcaaaacacgccagaaaatgctctcttttctgtcccggatcacccaatggctgaatacacaaaatatcacggttgaacaactgatgctgctgctggataaaatatctccggcggcgccgaccaaagagatgcaggtcctgctggatctcctgcgcaatggtggtattgacaaaaccaatacaaaaacgctgtataccaccatggcaccggtgattactgcggctatgcaactggacatcacggaatcaggggaagctctgctgcgctggctggataacaatcatcccgcagggatactcaccaccagtgaggcctggaagcttattatcaaaaaagggcagacggccggcgacaaggaaaaattggcggcatggtgtcaggcactggcacagcgtgtattggtcattcgcacctttacactcagtaatgccgaacttcagacattgtcacagggtgcaccggccggaaccattactgaactgtataacatcagtgatttccataacctgattaaccgctgcggtgaacaggccggtacggtactggatgcactgcaaagcgggacactgacagttaaaattctggcacaagcactgaatctgtcagaagaggtgattactcaagcactgacactggccggacaaaaaccggaactgaccacatgggcacagctggccgtattgccgccacggctggatttggcagataccctgcatatcaccccgaaagatatcaccactctgctgacagtgtctgaaaatgcgaaaccttcttatacagacctctccgcactggccggattgttacaggccggtctgagcgaacaacagaccaaacaactgcaaaatcagtctgagccgcgccgcaatgaagccctcagcggggagtaccgctctctggttatgaacaacccggtggcagaccgtgatgatatctggcgtaatctgctggtggacggaaaagtcagcgctgaaatcaccaccaccctgctggcagatgccatcgccggtattcagctctatattaaccgcactattgccggtgatgagccgggtgctgacagtgacgctcttgagcgtcagttctttaaagactgggatgcctgtaataaacgctacagtacctgggcgggtgtgtctcagttagtctattaccctgaaaacttcgttgatccgaccctccgtaccggtcagaccgggatgatgaacaccatgctggagcagctttcacaaagtgagctcaacaaagataccctggaaaacggcttccgccagtacctgaccgcctttgagcaggtcgctgacctgaaagtggtcagcggttatcatgatacggttcatattaatcagggtaacacctggtttatcggtaccagccagactgagccgaaaaaatattactggcgcaaagccgatcacagtaaatgtcagaatggccgttttgccgccaatgcctggagtgactggaaagaaattacctgtgcggtgaatccttatggggatatggtgcgtccggtgattttccattcacgtctttatttgttatggattgaaaaacaagtacagaaagataacgccggtaaagatacggcatcttttaccctgaaactgactcatattaaatatgacggcagttgggcttcgccgttcagttatgatgtgactgacgacttcacagccggcggagaaaagaatggtctgtactgtgccgccaaccgggaagataattcgctgcttattgcctgctataaaaaagaaaaaaaagataacacagcaccggctgatagcttcggactgcgtattcagccggacatgagctgtaaaaaagaaccggagataaaaactatattaaccacggttacccatcaattagatacagaaactaccgtcagggtaaacaccttcctgaatcgtatgtcctcttccaaatttaccctggaaaaacaagagggaaataaagaaattgatctggtcatctcccatggtggctatactgtcaaaactgaaaatagtatatctgcactgatattgaaccctactgcttatattaacatcaccccctataaattatttaattatattcctgatttttatcgcaagaaatatattactcatcttaactctcattccggtacggtttatgctccggaatcaaaaaaaatggagcctgccgataattctatatccgataagattaacgcttgtgccatatatacttataataaccagccaccgaaaaaacatatttctctttccattggtagaatttatccgctaattactcctcttgagctggtaggccgtaaactcgcgagtttctttataaagcacgcagaaacatcaatgttgtattttacatatggagatgttaccgacgataggttaacgttggaggaagataaatatactatcagcactggtggaaaaaaactgggcacgcttagcttgggcaaaatgatagcacaagtcaaaacaatcagttcagatgatatctccattgagattgaactaaatagtacgaaatttgaaacaataacaggtagtgacgtcggactccggccaccattatacccgacagtctcaagagaaacactggcattcccgtttgggaaactgtctataaccattcccgctggtgcagatattaataacctggattgtactataaaagtcaggttcaagaatacagatgttcttgcagctactaccacttataaactggttataaaaaaaactgatccagttcaaaaagtcatctccctgtacaccacgccggacggcgctcaatatatggaatgggatggttaccgtacccggttaaacacactgttcacccgccagttaattgagcgtgccaataacggaattgacgcaatattatcccctgaaacccagtatctgcctgaaccgaaaccgggacagggcacctatgtcacactgacactgaaaccgtatgacaagaatacccacggcactaaccgggcatttacgatttattacagcaatgatgccacaggctccggcaaatttcctgtttacagtggctcactcagtgttaccgataatacagaagtaaaattatttattccgctgattaaacccggaaaaaatgcggtgagtcagtctgctggtgcgcagcaggatactttatatctcaatgctacataccagaaagaagcaacaaaacaaatcctgctgttccgtaccgataataatcctgaaggctggacattggatacaagcgttaacaacggtaccttcgccggcctggcagaaaacggggtctccggtttattacaatccggtgaaccgatggatttcagcggtgccaatgcactctatttctgggaattgttctattacactccgatgatggtagcaacacgtctgttgcaggagcaaaactttaccgaagctaaccgctggttaagctatatctggcagcctgctgcaagcggtgccggtgactggcgcgtgcgtccgctgaaagaagacacgtcctggaacgccgacccgctggattcggttgatcccgatgcggtcgcccagaatgatccgatgcattacaaagtcagcaccctgatgaaactgctggatctgctgattgcccgtggtgacaaagcttaccgcatgcaggaacgcgatacccttaatgaagccaaaatgtggtatatgcaggcgctggggctgctcggggataaacctgtcagcattttcagtaatggttgggaaaatccgtcactaagtaatgcagcagataaaactcaggcaaaacagtttcatgacgaaatcagccgtatccgcagcggcggtctgctgcctgacgtccgcactgctaataccctgaccggattgttccggccacagcaaaacgaaaaactgctcggctactggcagatgctggaaatgcgcctgtttaacttgcgtaataatctctccattgatggtcagccgttatcactgccaatttttgccgcaccggcagacccggccgcactgctcagtgccgcagccgcagcctccggtggcagcaaacctttaccgtctgctgacatcccggcaatgcgcttcccgcaggcactggacagtgcacgttcactgaccgggcagctgatgcagttcggttccaccctcctggggctgattgagcgccgggatgcggaggcgatgagtgaactgctgcaaaaccaggccggtgagctgatgctctcttccctgcgtatgcaggaacaggctctcaccgaactggatgccgagaagaaaacactggaacagagccgtgccggtgcacagtcccgcgttgacagctaccgcgccctgtatgatgaaaatgtcagtgcggaagaaaaacggaccatggatctgtacctctcttccgcaatactgagcacctccattggcgtgctggatatggccgccgccgctgccgatatggctccgaacatcttcggcgtggccgtggggggcagccgctggggcggtatcccgaaagcaattggtgcaggtatgagcctggcagcctccgccaccaaaattactgcggataatatcagccagtctgaagcatggcgccgccgccgtcaggaatgggaaatccagaaaaataatgccgaatctgaaatcagacagattgatgcccaactggaagccctggctgtccgccgtaccgccacagagatgcagcgcgaacacatggaaatccagcaggcgcagactcaggcacaactggaattcctgcagcgcaaattcagtaataaagcgctctacagctggctgcgcggccgtctggcatccatctattaccgcttctatgacctgacagcggcacgctgcatgatggcggaaaaagcttacgcatggcagaccaatgatacggctacccgctacatcaaatcaggcgcatggcagagcaataacgccgggctgatggccggggagtctttgctgctgaacctggcagagatggaacaggcatggctgaaacgggatagtcgctcactggaggtcacccgtactgtttctctggcggcagtgtaccgtactgacaatgtgactctggcagaaggaattgctgacctcctgaaaggtaatggcagcgggaatataccggcatcaaccgggctttcaatgaccgccgataaccaattgcatgccgcgttcaatctgaaagcactgaacattaaagatgactaccccgaggctctgggcacaacacgccgtatcaaacagatcagtgtgacattaccggcactcgtagagccctatcaggatatgcgggccatattccgctatggtggtaactcgttgccggccggctgcaaagccattgcgctatcccacggtatcaatgatgacggcctgttccggcttgatttcaatgacggccgctggctgccgtttgaaggtatcccggtggatgatgataacagcctgaccctgagcttcccggacgcaaccggtgagaagcagaaaccactgctactcagcctgaccgacatcatcattcatatccgttacaccatttgttaa

SEQ ID NO: 283925 - DNA, 909 bp, Morganella morganii
atgtccagaagagcaaaagccctgtcccgtgaaatgcatatccttgcacgtcaggccggagggagctttaaaaccattgcagaccgggtcaaaattgcagaacgggttgcggcagagctggccgggttgaatattcagatacgatctgttgagcaactgaaatcccgccatattgaaatgtatatccatgcccgcagagaacagaatatcagtttacgcagctgtcaaaacgaaatgtcggctatccgggcgatatttcgtgttgccggacgtcataaactggctgaccctaaacatgagcgcctcagtaatgaggcgctggggctttcaggtgccagcagggctggcacccgtaccgcgatatcggacgagcgctttcacgaagcgctcgctcggattgagccttatgatcagggggtggcattaactatgcagttatcccgtagtctgggattgagaaatgaagaagccgtgcagtcagtaaaatcattacggacctggcaacagacgcttaaaaacggtaaagatcgcgttcatgtggtttttgggacaaaaggaggcagaccccgtgaagcgttagtgccggataaagcccgtgtattaacattaattaataaagccattgaatatgcggataaacataacggttatttaattaatcgtccgtcattacattctgccaaagatcgttatattaatgtgatgcgacggataggcggatttattcacgaagaatcaaatcatggtttacggtatgcctatgctcaggatgttgaaaaatattatctcagtcagggattcagtcaaaaggaagcctatgcattaacctccatggatttagggcatggtgacggtcgtggcgattatattaaacgggtttatagtcagaaaggggatattgaggaataa

SEQ ID NO: 283926 - DNA, 612 bp, Morganella morganii; identical to SEQ ID NO: 14549

SEQ ID NO: 283927 - DNA, 195 bp, Morganella morganii; identical to SEQ ID NO: 14548

SEQ ID NO: 283928 - DNA, 534 bp, Morganella morganii
gtggccacgctttgccacgtgtttggggttcaccgcagcagctataaataccggaaaaaccgtcctgacaagccggatagcaggctagctgtattacgcagtcaggttcaggatctacacggcctcagtcatggctccgagggtgcaagaagtatcgccacaatggccacacacaggggcttccggatggaacgatggcttgccggccatcttatgaggaagctggggctggtgagttgtcagcagcctgttcaccgatatagacgtgggggacacgaacatattgctatcccgaatcacctcggacgtcagtttgcagtgacagtgcctgaccaggtatggtgcggcgatgtgacgtatatctggacaggtaaacgccggacttaccttgctgtggtactcgatctatttgcgcggaaacccgtggggtgggcaatgtcgttctctccggacagcaggctgaccaccaaagcactgaaaatggcatgggaaagacgcggtaagccatccggggttatgttccacagtgattag

SEQ ID NO: 283929 - DNA, 207 bp, Morganella morganii
atggagcgctttttcaggagtctgaaaaacgagtggatgccggtgacaggctacaccagcttcagtgaagctgctcaagcgataacgggttatatcgtcgggtattacagcgaactcaggccgcacgaatataacggtggattaccaccaaatgaatcggaaaaccgataccgaaaaaactctaaaaccgtggccagttttagttga

SEQ ID NO: 283930 - DNA, 456 bp, Morganella morganii; identical to SEQ ID NO: 14596

SEQ ID NO: 283931 - DNA, 660 bp, Morganella morganii
  misc_feature (606)..(615): n is a, c, g, or t
atgacacagtttcctgaaaaagcaatttcaggtgccgtgacatttaatggtagcactaataatggtaacggtggatcagtaaatattaaattcagtaataaagaaaactggatttttaatctttccgtggatatgaaagtgtttactagccgtaaccctgaagcgtatccttacattagtgagttttggaaaaaatatcaggttgaatatgagttaagcgaggatgataaatatacctttaaagataaggactatttttcaggtattggttatgtagataatgaacctaacttacgatataaacctggtagccccacatctattgaacatgtcacacctccaaagcattatgttgaaaataataataacgaaattcccaatagctttttaaaaagccaaagtggtaacgcatcactctcttatatcggagatgacggttacttaggtttttctgtcactgattttcaaacatcgtatggagtgccaggctatgcttatctcacaactaaaacaactcgagaaaggtataaacctgtttcggtttcaaatagtaatcgaagaatagatatacaaggaaaacatgatcatttagcaccatttttaagnnnnnnnnnngtgctttttattactcttattctgaatctaaagatgaagagttag

SEQ ID NO: 283932 - DNA, 384 bp, Morganella morganii
atgtccaaacgattgcctccgctcaatgctttgcgtgtcttcgatgctgccgcccgccatttaagttttactaaggcggcggaagagctttttgtgactcaggccgcagtgagccatcagatgaaaagcctggaagatttcctcgggctgaaattattccgccgccggaaccgttcgttgttgctgacggaagaggggcagagttattatctcgatattaaggaaatcttctcagcgataaacgacgccacacgcaaactccaggcacgcagtgccaaaggggcgctgacagtcagtctgtcaccgagtttcgcgatccagtggctggtgccgcgtctgtccggctttcatcaggcctatccgggcattgatgtgcggatctag

SEQ ID NO: 283933 - DNA, 198 bp, Morganella morganii; identical to SEQ ID NO: 244514

SEQ ID NO: 283934 - DNA, 1791 bp, Morganella morganii; identical to SEQ ID NO: 106123

SEQ ID NO: 283935 - DNA, 1077 bp, Morganella morganii; identical to SEQ ID NO: 106122

SEQ ID NO: 283936 - DNA, 468 bp, Morganella morganii
atgctgccggactacaaggccgtggaaaaacgcattgaagcggttatccgtgaaaatttcggcctgccgccggtaatgacagttgatgttcactatgccgatctggtcatgctggcgaccgaaaaacgggactttgaaatagaccccggcggccactggccgatgctggattcagccccaccacatgatgacatcattatccggccactgacaccgccgcaggcatatcaccagtttatggcccggtttgaaatcctaacaagaggtgattcatttccagagatactagagcttggcctcagtgtgcgggctgcaaattgccttaaacaggcagggatagtaacaacagggctgttactgaaagaaacagaagtaaacctcttaagaataccaggaattgggagtcagatactcagagaaataattgaatcgataaaaccattcggacttaagttaaaaaaaggatag

SEQ ID NO: 283937 - DNA, 471 bp, Morganella morganii
atgccgggaccaccgaaaaccccgtcacacctgcgtttggtcaggggtaacccatcaaaacgcccgatcaataaaaaagaaccaaaaccgccgtcaggggtacccccaacaccgaaacattttaccaggcaggggaaatactggtttaagcggataggtgaagaactcaatgtgatgggcgtgatgagttcgatggatgccaaagcgctggagctgctgatcgaggcatacaccgaataccggcaacactgcgatacgctggacgaagaaggttacacctacacaacacagagtgatggcggtccactgataaaagcgcacccggtggcggcaatgaaagctgatgcatggaaacggatccgcgcgatgctctccgagttcggtatgaccccggcagcccgccagaaggtaacgattaacacaccagccgaagaagaccctttcgaggcatttctgaaacaaagaaaatga

SEQ ID NO: 283938 - DNA, 240 bp, Morganella morganii
atggattaccaactgattggcggccgctgtgagcatgccttaaaaaacctcccggataactcagtggattcaatcgtaaccgatcccccgtatggcatcgggtttatgtcgaataaatgggactactccagtccggcagatatggcagagcgcgggtttgtatatgcgcataaccggttgtttacggcactggcggcaaagcgctgggagatgaaacagagtagcggggtgatggcgtga

SEQ ID NO: 283939 - DNA, 786 bp, Morganella morganii
atgagcatgaaattagaatcagcactgaagcagtttcaccctaaatcccctatgttcagtgattcgtcacattcaacatcgcccgaccggcttaaagggatggatactgcagcggcactcggcatgacacagcaaaacgcccgtttcggcatgcatgcgttctttgcgaagaatgatgtcagcacagatgataaattcaaaaccgttgaagatctgactcagcacgcgatgaaagtggcacctaagctgatagtcaaagcatccggtaaccgtctggcgcagtgtatgagaattttgtccgcaatggcatttgaagattactcccggtctgcaggatcatcatgcacatgccagtcctgcgccggtacgggtatggtttatgctgtaaaagcagtggtcaaacacccgggcattaccagtaatgatggggttgtgattgtggcgccggatattcgtagtgagcgggttggagaagtgtgtgccgcgtgtgccggcaaaggggtggaatattaccgttgtcagtgtaaaggccggggaaaggtaccggatgaagagcaaacggcactgcagggcgttccggtaataaaagattgccctcgctgctcaggtcgcggttaccggcgtatgccatcatcgaaagcttataatgcaatacggcacctggtaccggatttgaatgaaagaacgtggcggcgcaactggaaacctttccatgaaaggctggtggagaaatgctacgttgaggaaagttgcgctgaggtattattcaacaaagtgactaattga

SEQ ID NO: 283940 - DNA, 789 bp, Morganella morganii
atggatgagtattttcgtagttatactataagaaatatgggtgaaattggttccggcggatttggctatgttgaaaaaatagagttatttaattcttttggagaaagtagaggattctgcgctagaaaaacattgtctccaagtagctctgaagcttctgaggaaatcaagagaagatttaaaagagaaattttgctacaggccaagtgtgtacatgagaacgttgttccaatatatatgtgtaatctgaatgcaaaaaatccatggtttattatggatctggctgaatgtgatctacagtatgaaattgataataatttattatcaacggaagataaaataaaagtaactgaaatgttacttaaaggtgttagtttcatccattcaaaggggctatatcacagagatataaaacctaaaaatattctgagattttcacactctaataggaatataaacaccagctacgctgcaaaaggtgaatataaaatatccgattttggtttggtgaaaaatacaaatactgataatgacagcactcaattaactaggattggtgttggtatgggaactccgtcatattgcgctcctgaaatagttttttttggagagtattcgatacaaggtgacatttattctataggtaaggttatttcagctttagatatagatattcccggtattgatgagatagtgcagaagtgcacacaaaaaattaaggaaaatcggtattcatctgtagatgaaatatccgatgctctccagaatataacaaatgggggtgtgtga

SEQ ID NO: 283941 - DNA, 738 bp, Morganella morganii
atgaatgtgattgctactgcatcattatcttatcctaagacagagtataggattaatcaggataaaatttttgccccactattgacaggtcgggggcttttgatggctgttgctgatggtgttggatcatactcgggcgcatcagaggcgtctagcattgcaatagatgtaatatcagagataaatgtaattgaaaattacatagattgcagagcaatatttgaagagattcttgaaagaataaagaaaaaaacaagtgaagatgcaacattaaaaaatgcagcgactacattaacattttgctatttgatggaaaatggttgctgggttgggcatataggtgactgtaggctatacgcgaagtttggctcaaaattaatacaattaacgaaagaccatactcagcaccaaatgctgttagatgagggcgtttttactaaaaaacaacttcaagataagccgggtaagaatatattaacaactgctatttccgctaatactgaaatgaagcacgatgtattttttataccgtcagatgagcttaaatgtgatgatgaaactattacactttatataatgtctgatggtgcgcattcatcgtgggaaaaacgccctcgattttcagtcagaacaatgagtgacccgattaaatttacaaatggtctcatgagaagaattgagaggcaggggccaactgatgattattctatagttggtattatgatagatttaaagtaa

SEQ ID NO: 283942 - DNA, 336 bp, Morganella morganii
atgaaagaatcaacgcagccgctaaatagtggcgagttgtgggactggtttggtttgtcatacgcatcattccttgttttgccgcgagtgctgatgcacgaaatgcctattgagtggcaggataaaatggctgctttactgaatgagtatgatgaaacattcgatacatcgtccgtttgtcattcagtggcagtgagagcaaaagacaaaaacaaccggtttatgaagatgccgaaatacatattgaattaccggcactcggacatggatgaggttgataagttgcgaaaaaatccaaatcgattgaaaattgaaaaaagtattcgaacaatctag

SEQ ID NO: 283943 - DNA, 519 bp, Morganella morganii
atgtctgatttaaataatttactatcattttctataggtgtggctgcccctttggtaacacaatttgtaatgtattacattactaacaaacataataatagaaaaataaaaatggaggatgctaattcggctatcaatataattatacaattgacagattttattaatgacggttatgagtttataaaatctcaatatgttacagataatgatggtcatacagtaagaattggtggggatgcgccggaatttaactatagcagtgatctggatttgaaatttcttgataaaaaaacagcatttagtatagcggttttacctacaaggataaaatatataaagaatatcatttccttacacttcgaatatacaaatcttgaagatgtggaatatatgcaatataacgaaaagttgtatggtgatttgttaaatgaagtgattgagataagaacgaaaatatgtaataaatttaatctccctaaggataaattatttgatctgagcaatgtttatccctag

SEQ ID NO: 283944 - DNA, 165 bp, Morganella morganii
atgccgatgtttaaagtaacgtgcaaatggaacggaaagccatgggaaaaggatatcgaggccgagaatgaggccgactgtacagagcacatgtatttgttcggtgttctgattggaaaagccgatatccaagaccttcagatcgccgaaatcacacagaagtaa

SEQ ID NO: 283945 - DNA, 588 bp, Morganella morganii
atggtggaaattgtactcggcggtgtgctgggtaaaacctttggcaaaatacatcagcgcctggtcagcacaacctccgaagcggtccgtgctttatgctgcacaattcccgggtttgaacgctatctgaataccagtaaatcccgcggcttaacgtatgcggtatttcgcggtaaaaaaaatatcggggtggatgacctcgtttttccggtgacggatgatgttatccggattgtgcctgttgtgatcggcagcaaacgcgggggattgctgcaggttattttcggcgcggtgatggtggctgctgcgttctggacaggcggtgcgtcagtggcggcatggggagcgatgcataccgggctggccatgaccggcgtatccatgatgctgggcggtataatccagatgttgtccccgcagccgggcggacttgctatgaaagaccagggcgaaaataaaccatcatatgcattcggtgcgccggtgaacaccgtttctcagggctatccggtaccgatcggttatggtaagcgccgcatcggcggcgcggttatctcagccggaatttacgtcgaagatcagcagtaa

SEQ ID NO: 283946 - DNA, 1269 bp, Morganella morganii
atgagtattcatagtgccgatacaaataaatcacccggactgaccagcggaaccatgcttgttatagcaacagtcgttggcggcggtatgttttctttgccgattgcgatggccggtgtctggttttccggtgccaccgttattttgattttagttgcaattatgatgttactgaccggtctgatgttagttgaagttaacctgcattttgaaccgggcgccagctttaataccttcaccaccgagttactgggcaaaaaatggaatattgtcgtgggtattgccttcgggtttgtactctatattctgacgtatgcctatatctccgggtcatccgctgttctggctcagacgatattaaaatataccggtgtcgccctgccgataaaagccgcggtcgtgattgtcgcctgtctggtggctgcgattgtctggtacagctcattatgggtcggacgtattaccaccattttaattttcggtaagtttatcgcgttctttgccaccttctccggactggttgcacacgtggaaattgccaatctgctggattccgcatcagtggcaatacccggaacgaaatatctgccttatgttctgatgacactgccgttctgtattatttcgttcggcttccacggtaacgtaccgagcctggtgaagttgtacggtaaaaccaaattccgctttattacccgttcaatcattatcgggacaatatttgcggtactgctgtatatcttctggctgggtgtcacgatgggcaatatcagccgcgccaacttctccccgattattgccaaaggcgggaacattgatgtgttcgttgaggctctcggcgggaggatgtcagggaaaaccatggatcttatcctgacattcttcggtaactttgcggtggccagttccctgctggcagcaacactcggcctgtttgactatattgccgacctgctgaactttaaaaatgacagcgccggtcgtttcaaaacagcagtagtgacgtatctgccaccggcggtggtgtgtttcttcttcccgaacggattcgtttatgccatcggttatgccggtctggcctttactatctggagtgtgattttaccgccgttcctggtaaaagcctcccgcaaacgctacagcgacagcgataccatttaccgttcgccgtgtaacagcgcggtactgaatctggtgattgtctgcggtgcgattgtgtatctgacggtcattctggatgtgttcggctggctgccggcatttaaataa

SEQ ID NO: 283947 - DNA, 1320 bp, Morganella morganii
atgatccctcgcgaagagcgtatcaaaagaatgaaagaggccgggtacaacactttcttgctgaattccaaagacgtttatatcgatttattgaccgacagcggcaccaacgccatgtccgataaacaatgggccggcatcatgctcggagacgaagcatatgcgggcagcgaaaacttctttcatctggaaagaactgttcaggaattattcggctttaaacacatcgttcctactcaccagggccgcggggcagagaacttactctctatattagctatcaaaccgggtcagtatgttgcaggtaacatgtatttcacaaccacccgttatcaccaggaaaaaaatggtgcaacttttgtcgatattatctgcgatgaagcacacgatgcgggcctggatgtaaaattcaaaggcaacatcgacattaaaaaactggaaaaactgattgctgagaaaggcgcggaaaatatcgcttatatctgtctggcggtaaccgtaaacctggcaggtggtcagccggtctctatggcaaacatgcgtgaagtccgccagttatgtgataaacacggcatcaaagtgttctacgatgcgacccgctgtgtggaaaacgcctacttcatcaaagagcaggaagaaggcttcgaagatgtctccattaaagacatcgttcacgaaatgttcagctacgctgacggttgtaccatgagtggtaagaaagactgtctggtgaacatcggtggtttcctgtgtatgaacgacgacgacatgttctctgctgcacgtgaactggttgtggtttatgaagggatgccttcttacggtggtctggccggtcgtgatatggaagcgatggctatcggtttacgcgaagcgatgcagttcgaatatatcgagcaccgcgtcaagcaggttcgttacctgggcgaaaaactgaaagcagccggtgtaccgattgttgagccggtcggcggccacgcagtattcctcgatgcacgccgtttctgcccgcatctgacccaggatgagttcccggcacagagcctggcagccagcatctacatggaaaccggtgtacgttctatggagcgcggtattatctccgcaggccgtaacaaagaaaccggcgaccatcaccgtccgaagctggaaaccgttcgtctgactattcctcgtcgtgtatacacctatgcacacatggatctggttgctgacggtattatcaaactgttcaaacacaaagaagacattaaagggctgaagttcgtatacgagccgaagcagttacgtttcttcactgcacgctttgattacgtgtaa

SEQ ID NO: 283948 - DNA, 363 bp, Morganella morganii
atgagcgagaataaccgcatgaccagtgtaccggactttctctccgagttagacgccggtgtgtttgaaaacaaactttctgctgcactgaatgaagtcgcttttggtaccaataagaacggcggtactggtgaagtacacgtgatttttaaattcactcagtcagatgaagaccgcgtgaaaatatctcacaaactgaaaatggttacaccgactaagcgcggtaaaaaatcggaagaggatacaaccgaaacaccgatgtgggtcggtaaaggcgggaaactcactattctaccggaagaccaagggcagttatttggtattgacggcagtatcgacgggaaattaaaagccattaattaa

SEQ ID NO: 283949 - DNA, 1356 bp, Morganella morganii
gtggtgcgtaacggtgccgccggtgactgtgaaagctaccgttatgatgcgggcagccagcgtattctgaaaaccaccgtgcagaagaccggtaacagctcactgacacagcaggtgatctatctgccggggctggagctgtaccgcggaaaagaaaactatcaggtgatctgcgccggtgttgccgggcgggcacaggtacggctgctgcactggcaggacggcaaaaaagatcaccagcggttcagttatgacaatctgatcggcagcagcggcctggaaacggacggcgacggtaacctgctgagtcaggaggaatattatccgttcggcggcacagctgtgctggtggccggtacggacagcggcattgactacaaaacccaccgttattccggtaaagagcgggatgcgaccgggctgtattactacggctaccgctattatcagccgtgggcagggcgctggctgagttcagatcctgcgggaaccgttgacgggctgaatctgttccggatggtgaggaataatccggtgacgttaagagatgatgacgggcggaaacccatcagtgaaaacttcagtgaagaaaaaggtgatatggtttatggccttgccggtttcagaggaaaatatatttcttctgcactgggacgtccgtttttacctgacagcaaagacgcacctgcatcgataattgatttatataataatacggtatccggtcaggtattgatgagcgttgatatgaaaatattacagaatttcatgaaatcaccggataaatatgagaaaaagttatcgccaccggctgatataaaggaccgtgtacagaaaagcagagcatatcctttgtgggacagttatttttctgctggtgaaaaaaatgagaaatttaatatacactctgtttataaagaggtcagaaaaaatcccggaagtacgcaatatcatgaatggcatatgtccggggcacaatctgtaccgaaacttctctggaaaagaggtagtaagctggggatagaaattgcggcatccggtggcggtaataaaatccactttgctcttgataatttaaatataaaggaaattatcagtaagtcaggaatgggcggacagtctatcactgccagcgaattgcgctatgcttacagaaacagagaacggcttggcggaaatatacatttttacaaggatgataatgaggttgacgctccgtgggtatcaaaccctgaacagtggaacacgtataaacctaaattattatcggtatcaggcggacaattagtccggcggcataccggatttatgggccgtttacgtgcatcattcagtcgtactttcaggagaaattaa

SEQ ID NO: 283950 - DNA, 132 bp, Morganella morganii
atgtataagaatattctggtaccgattgacacttctaataaagcactggttaaccatgtcatccctcacatcgaatctctttcaaagtttgatgacccgcacatacattttttattcttgacactccgatag

SEQ ID NO: 283951 - DNA, 324 bp, Morganella morganii
atggatgcagcaatcaagagccagacttcatttaccagcgaactgggtgtcaatgccggtaaagacttcagctttgataacagcctggtgttctctccgtatgtgaaagcggcgtggaatcatcagtatgaagacggtaacgaagttgaatttaaccgttacaacaccattaacctggatttatccggcagtaccggtaaattcggtgccggtttcaatgcccgctacaacaacgtgaatatgttcatgaaattacagcacattgccggtgatgcagtttattcaccaatcaacggacagattggtatccgttataacttctga

SEQ ID NO: 283952 - DNA, 255 bp, Morganella morganii
atgaagttaaaaggtgttgataaaacatcagttaaactccacacatatctagagcttggcgcctgtgacgatagaatgattaaccttataaactttgggttgtcgagagaaacagccaaagaaattcaggagtcggtccctaaaggcattgagatcaaatcaatctatgatctggtcactttactgggcaaaggtttgttatcaaatgtccatccagtgacacagaaagaggtaaggtctttactgagcctgtag

SEQ ID NO: 283953 - DNA, 639 bp, Morganella morganii
atgattggtttagtcggtaaaaaagtgggtatgacccgcatcttcactgaagaaggtgtgtcaatccctgttactgttatcgaaatcgaaaataaccgcgttactcaggttaaatctgacgaaactgacggttatcgtgctattcaggttaccaccggcagcaaaaaagctaaccgcgtgaacaaacctgaagcaggacatttcgcaaaagctggtgttgaagctggtcgcctgttacgtgaattccgcctgtcagaaggtgaagagtttactgttggccagaacatcagcgttgaaattttcgctgacgttaagaaagttgacgttactggtacatctaaaggtaagggcttcgccggtactgtaaagcgctggaatttccgtactcaggatgctactcatggtaactccttgtctcaccgtgttccgggttctatcggtcagaaccagactccgggtaaggtatttaaaggcaagaaaatggcaggtcagctgggtaacgaacgtgtaaccgttcagagcctggatgtcgttcgcgttgacgctgagcgtaacctgctgctggtaaaaggtgctgtcccgggtgcaaccggtagcaacctgattgttaaaccagctgcatacgcaacaactacttga

SEQ ID NO: 283954 - DNA, 225 bp, Morganella morganii
atgacacgtttaaccttaatcggtgccctgtacattacctttatctgcctaatcccggagttcatgcgtgacgcaatgaaagtacctttctactttggtggtacttccctcttaatcgtggttgtggtcatcatggactttatggctcaagtgcaaactctgatgatgtcaagtcagtacgagtctgcattgaaaaaagcaaacctcaaaggttataaccgttaa

SEQ ID NO: 283955 - DNA, 282 bp, Morganella morganii
gtggcccgtatagcaggcattaacattcctgatcataaacatgctgttattgcattaactgcaattttcggcatcggcttaacccgttcacaggctatctgtaaagcaacgggtattgctgaagatgttaagatcagtgagctgtctgaacaccataatcagacagacgcggtttacgggcgccgtgctggcctggtgcttgatctaatttacacttggtgtcaatcgcgcgaacaccagacttcaggaagaggtctgttccttcgcgacggctcagcttga

SEQ ID NO: 283956 - DNA, 273 bp, Morganella morganii
gtggctccgcaggatgagcccaaaattcagccgccgtggtgtgttttttcactttatgataccggcggcgatgtgctgtgcggtcgtgctgagacaatgaccaatatccagattgatgtgtatgcaaaaaccatcgatgaggcccgccggatccgtgaactgtctgttgctgctgtttctccgctttcaccggcggagttcacagagaggcagggctatgaagcggatacctcgctttaccgggccacgctggagtgtcaggtctggcaataa

SEQ ID NO: 283957 - DNA, 435 bp, Morganella morganii; identical to SEQ ID NO: 14621

SEQ ID NO: 283958 - DNA, 192 bp, Morganella morganii; identical to SEQ ID NO: 281667

SEQ ID NO: 283959 - DNA, 273 bp, Morganella morganii
gtggctccgcaggatgagcccaaaattcagccaccgtggtgtattttttcactttatgatgtgggcggtgatgtgctgtgcggtcgggctgagacgatgagcaatattcagattgatgtctatgcaaaaaccatcgatgaagcccgccggatcagggaactgtctgttgcttctatttctccgctttcaccggcggagttcacagagaagcagggctatgaagccgataccgcactttaccgtgccacgctggagtgccaggtctggcagtaa

SEQ ID NO: 283960 - DNA, 324 bp, Morganella morganii
gtgatccgcagggcgctggagattacaccggtagatttcatcgttatcgaaggtctgcgcacacaggctcgccaaaaagaattggtcgcagctggtaaatcacaaacaaataacagccgacatctgaccggccatgcagtggacattattccggttaacaccaagtggcagattgaagaattcaagccactgctgaaagccgttaagcaggcggctgacgagttaggcgtaaaactccgattcggtatcaactggaagaatgacccatcactgccgattgaaacccggttcattgatgcgcctcacgttgagattccggcatga

SEQ ID NO: 283961 - DNA, 237 bp, Morganella morganii
atgaatgaagctaaaccacaagacggaagcacggtaaaaggttatcgcactttgactgctggcgatattgaagtgatgaaccggtttaaagatgccagccgccattttattaatttattagatacggcaaaggaaaccggagctgaccctcgctgggtcgctatggcgaaaacagaaatgcagaaagcctgtatgtctgcctgccgctctgtcgcaaagcctgacgatgattgctga

SEQ ID NO: 283962 - DNA, 402 bp, Morganella morganii
atgaacagagaaagctttagtcttatcaaaatattcggctcaattcctgttaacccggaaagatttaaacaattagacaaaaaatttaaatggctgggtatctgcgaagagggtaagagtttttgtgtcagttgcggaacaacaacgccgtctgtccctcgctcccatcatcctgaatgcctttcttatagtgatatggattcatatccggaatatgaaaatgagataggtatttgtcctgactgcggctcagaagatggtttgtcgataaacagtaattgcgatcttggtatatcagagatcagttgctgcgactgtcagttcattttccagaaagaagtgagcgaagaagatttaacatccttatttgttaaaaaatacaaacaacgcctcgctaaatag

SEQ ID NO: 283963 - DNA, 1437 bp, Morganella morganii
atgatttacacagacggcaccatagccattaaagccggttcaccgattgtgaccggcaccggtacgcagtggaaaaagaatattcacggtgtggcaccgggccagcttatcagcatcgagaacggttcatcaccagtcagcatgatgatccgcgcggtaaacagtgataccgaactggtgttgtcattcaattccccggtaacactcagcggcgcgaaatactctatcgccaccacagtcccggataccatttcagatgcggcccgcaccatgtcaaccaatcagggctatatcgtttactttctccaggcaatgcagcagtggatgacagacaccggccaggtggaaattgaactgcctaacggccagaaggtgacactggacagcattaaagcgctgaatgatgccatcaaaaatatcaacgataaggttgatgatataaaaatacctgatgcgaccacagagcaaaaagggatcgtgcagctctctgcatcaatcggcacatcaacagcaacagtcccgcatgaaaaagcagtcagtgatgccttgggtaagaaagcggatgtcgacaaacttggcacggctgccggtaaaaatttcggggaaaatattggtgacgtcatgttggtgggagcttatggctggggagggcgtggagtgacctccgatgcaggcagagatcaattgcgctcagtaatggtcagcacttcaacaccgtcgcacatacgaagagaagactcagggaatagcgatatatcattcatgtattctacgatcgcttattttaaggcaggggatacttttacaggaatatcggggcaccattcaaccggtaatgtgcgcgtttatgccgggtatgaaaataacttatttgtaacaacgctttggtctgataaaaataccacagtagacggtaacggatttattaagagagcttcacccgtaattcaaatccacccggacggcaattacgaaaccaacgacgaatctgaaggtgccgaagtccgccgcaccggcaccggccaatatcacatcaccggtatcttgggttataactcagatggtgcctggggcgtaaacggtggtatctcggtaccgaaagacaataacggccttgagctggtttacgtcgcggaccgcgttctggaagacggcagtatcatcatcgaaacctgtcaccgtcagcatgcgcacttaccggaacgtttccagaactggcggctgaaagaagttaccccggaaggtgagcgtgatttctatcaggacggcgaaccgtgtgacctgccggaatacacccgcctcgatgtacgcgtcgaaatgccgcagggttcagtctggaatgtgaagcagcgtgaattggctgaacagatggagcgcgagcaggcagaacgtgaagcgcaggaagcagcagagcagggtgcagatacagaggaataa

SEQ ID NO: 283964 - DNA, 366 bp, Morganella morganii
gtgtgttgtcatctgatcaccggtctgccgggagaaaccgcagccgataatctcatcacacttgagcgtgtgctggagaccggcgttgaaggcatcaaactgcatccgctgcatattgtggaaggcagcaccatggcaaaagcctggcgcgcagggcgattacccaccatttccctcgaagagtatgtcgccaccgccggggagatgatccgccacacaccgccggacgttatttatcaccgcatctgcgccagcgcgcggcgtccgaccttactggcaccggactggtgcagcaaccgctggctcggcatgaacggcctgtggcagtatctgctggcaaacggtggccagggcagcgcaatctga

SEQ ID NO: 283965 - DNA, 1722 bp, Morganella morganii
atgaaaatttcaacatttaaaggattatctcttttttctgcattaattgactcgtgctggaaacagccttactccgtttcccgtctgataaaagataccattgcaggtatcaccgtcgggattattgctatcccgctggccatggcactggctatcggcagtggtgtggctccgcaatatggtctgtatacggcggctattgccggtattgtgattgcggtgaccggcggctcccgtttcagtgtctccgggccgaccgccgcatttgtggtaattctctaccccgtatcccagcagttcgggctcggtgggttactgatagccaccctgatgtccgggattatcctgctggcaatgggtctggcgcgtttcggtaaactcattgaatatattccgatttccgtggtgctcggcttcacctcagggattgcgatcaccatcgccaccatgcaggtgaaagactttttcggtctgaccatggcgcatgtaccggaaaactatgttgataaggtgattgcccttgtcagagccatgccgaccatcaatctgtcggataccctgattggcgtaaccacactgctggtgctgatctactggccgaaactgaaattacgcctgccgggacaccttcccgctgtgattgccgggatgctggtgatgctggtgctgtcgctgttcggcatggaagctgccaccatcggctcccgcttcagttatactctggcggacggtacacagggtgcggggatcccgccgattctgccgcagtttatcctgccgtggaatttaccgaccccggacggcaaagaatttgtgttcagctgggccaccattaccgccctgatgccggcagcgttttcgatggcaatgctcggcgcgattgaatcgctgctctgtgcagtggtgctcgacggaatgaccggcaaaaaacataactccaacggcgaattactgggtcaggggttgggtaatatcaccgcaccgttcttcggtggcattaccgccactgctgctatcgcccgttcggcggccaacgtacgtgccggtgccacatcgccggtctctgcgattattcactccctgctggtactgctgactctgctgatcctggcaccgctgctttcttatctgccgctggccgcgatgtccgccctgctgctgatggtggcatggaatatgagtgaagcagctaaagtcattgaacttatccgccgcgcgccgaaagacgatattatcgtgctgctgctgtgcctgagcctcactgtgctgtttgatatggtcattgctatcagtgtcgggattgtgctggcctcactgctgtttatgcgccgtatcgccaatatgacgcgcctgagtgagtcttcctataccgatcatgacaaagggcttctggttgtccgggttaacggcccgctgttctttgccgctgctgaacggatttttgatgatctgaaagtcaaaagcgcgggatatcacaccattgtgatgcagtgggatgcggtaccggtactggatgcgggcggattaaaagccttccgccgttttatcgacgaagccggtgtggatacacacatcgtggtcaccgatattccgttccagccgctgaaaaccctggcgcgggcacggattgtaccgattgagaataaaatcagcttttacccgtcagtcagtaaagctctgattgaactgggactaatggatggtgtgacatcggaggcatga

SEQ ID NO: 283966 - DNA, 822 bp, Morganella morganii
atgatgagaaaaaaacggggtattgataaaataagccacatttattacgaaaaacaggattatcttaaattttctgaatttgagcatgactgggggataagtcatacaccatacggagatatttatcattatgaccccggcaggttcggtggcggaagaaccggaggagactcattctctgatttgccaccgatatcgtattccccggatatttatccatacccggggaattcaattgatttaggagaaataacagtaaattcaggttatccggatacagaatcaacaggagaagatcctctgtatacggatgagccttatttgcatacggcacacgctggtcttgcaatatcaatgtatcctcagcaaaataccctgaaatttattcttgatatgcgtaatatctccgctattgttacaccaataaaaacctatttattactggcattagaaactgttcttccgattgcgggcagggtactgggaattgcgggcatattaatgccgtcatcaatcgcagaagagcctttggttatatactatcatgataatagttatggagatggtgatgatgatccttatattctgaccacgctaccggcaactcttgtcaccggtacttcaccagaaattttcgcaggggaaaaatcggtaccggcagacgttattgtatccctggccatcaatgagcaggaagggaagcatactacggtaattacacctgtaaaagataaaataattccggttattaaagcagagaaaacggatattcccagtgtgtatgatgtcaatataattccggatgcccccctgttcgaataa

SEQ ID NO: 283967 - DNA, 1212 bp, Morganella morganii
atgaaaaaaataatcataacagcaggttttattgcattaactggttgtggtgacagtgcggatattactctcgtcaaagacatggtgacgtacactgaccggactatcaccgtgggcaatgcgtttgatcatcgggagatgtgccagcaaacaacctggagtgaagaaaaagataaacgaaaccgaaatatcgtacgctaccgttgtgagattaatccagcggatgctaatactattctggcagggaatatcaactatgtcagggataaatcgctggaatacgctgaaaaatcaggtcaggattttccggaacaaagcaaagagattcagttgtccctgttttatttacggaatgcagaaaaagccttaaaggaattatcatcaacgccattatctgcagattacgctgtattaaaagctaacctggaagactatttggaacagaattatcagtctgaacatgttaagcattttaatttcagtgataggtttaatattaaagggaaaccgttactgactattaatcagcttgacacagataaatatcctgttctttatgattattaccgcattgaaaatatcgaaaaagaccctgttattatccggaaaacggaagaaatttatgaattgcagcaacaggttattcatctttttgccgagaataattccgcccttgataacctgtcctcagaaaacaccgaatgtggtaacagcaagacggggatgtacggggaaattacctttccctgctcctttaaatatcatgttaaacaggcatttgaggctatcatgtttcagcagcagccttacgcagcagtgcaggataatattcagaatacactgactgaatatgatgaaatcagagacaatctggataaaaaactggctgcttatgaaaatcttaaaaaggatatgaatgtaacgttttctgcgctggttaacgaattcagtattaaaaattttgagcaggttgtcgatttttcagtgattcaggggcagtctccggaagtcgccgggtgccgtttcaggatgacctttgtaaacggaactattgctgagattgaaaatgaaaactgtttcggtatggcttaccagactacgtttgatcagtcatatacgaatctgatccggcatttttatactaaagatataaaacaaaaaatgggtttccagatcagggagttcattgataaagaaaaaaagattcactga

SEQ ID NO: 283968 - DNA, 663 bp, Morganella morganii
atggtaataagtatggaaaaacgactggaatccttggtagaagtggctgagcgtacaattattgatatgattattacaggaaaattgaagcttggttcccgtattactgagtccgaactggctgaaatgctttctttaagtaccgcaccagtgcatcaggctctgcatattttaggaaggatggggattgttcgaatcaggccccgaaaaggaacttatatatttgattttactattgaagatatcagaaaaatgacaattgccaggtacatgattgaaagtgaagcactccgacgggcatgtagcaataaccttggtcgattttgtctggaaatgtcaagaattatatctaggtcagatatagaatttacaatggataatatgacacaatacttaaagcatgatgccgattttcatgaattattattcacttatgctgataatgaatttttgactatggcttcaaatgctattaccataaaagttatggtactttggtacttgtcaattcttgataactatacagtaaaagatatggaggactcctttaacgatcaccatgaaattttagaaaaaataatagccaatgatattgatggcgcatgttgcatattaaaaaagcacttggaacgacttgaaaatatctacctcagggataaataa

SEQ ID NO: 283969 - DNA, 1002 bp, Morganella morganii
atgcaaaacgttgcgcttattggtatcgatctcggtaaacattcctttcatgtacattgtcaggataaatccggcaacccattactgcggaaaaagttcacgcgaaccaaattgattgaatttttagccggatgttcatccgctaccgttgttatggaagcctgtgccggagcacattttatggctcggcggattgctgatttaggtcatgtaactaagctgatatctccgcagtttgtccgtccttttgtgaagagtaacaagaacgattttgtcgatgcggaagctatctgcgaagcggcatcccgtccttctatgcgatttgtgcaaccaagaactgaagctcaacaggccatgcgggcgcttcaccgagtcagggagtcgctggtcagagataaagtcaaaaccactaatcagatgcatgccttcttgctggagtttggcatcagcatgccgataggtacagtggtgatcaggcgtctttccgaagtattggctgagaatacgcttccgccgtatctggaacggttactgattcgccttcatgcacattatctttatctggttgaacagattactgagattgaagctgcgctggtaacactgagccgcgatgaaacagtacaacatcttcttaccattccctgtattgggtcgatcaccgccagcgttttatcttctcagttaggcgacggaaagcagtatgtatgcagcagagattttgctgcatcgaccggattggttcctcggcaatacagtaccgggggacgaactaccttattgggaataagtaagcgcggggataaaaacctgcgacggttactggttctgtgtgcccgtatttttattatgcggttagatcatcaatccggaaggctggccgactgggttagagcacaactgcaacgaaaacattctaatgttgtaacttgtgctcttgccaacaaattagcccggatagcctgggcaataacgacacaaaacagcgtgttcgaaaagtaa

SEQ ID NO: 283970 - DNA, 876 bp, Morganella morganii
atgtttctatcaagacagctcattcaattttttgctgttgctgaaaattccagcctggctgaagcagcagaaaaacttaatctgacaccttcagctctcagtcacggcattcatgaactggaatgtaaaaccggtatttcattaatcaggcggacagggcaaaaatcatcattaaccattgccggaaaagatctttatcagcaactactgccttactatatacgaataacaaatatctcagatagtttatccggaaataaaaacaacaaaaactcacttagcattaaaacggacaatctttgttattcaccgctgaaagataaaataatgtcattctgtaaggataaccctgatcttgccctgacgatagaatcacagaaagcagttgatattaaatatgaaatactgaataaaaacaccgatatcgtcatctcatcatactgtggtgcagatgcagataatgaagatattagtcatcttgatctcccgccggaagaagcaggtatcgtcgctcataatagtctgttaaacagacatgactcactgtcagctttaattatgaatgaaagaatcataaaaacagaagcccacaaatatatattaaacatatttcaatcaaaactaaaaaaagaattagatgagcataattcaattatcgtaccatctgaatataatattcttgattttatttcatctgctgtgggatttagtctgttaccagaaaacaaacatcttattgacaatcttaaaaataatgattgcagctttataaaactccctcaacattataatacattaattaagagacgtgtttatttcagaggaatgcacaaaaaaataacctccaattttatattaaaaatacgcagcaactaa

SEQ ID NO: 283971 - DNA, 207 bp, Morganella morganii
atgaccctgtttaatgacctgatgatatccggcagcaacttagaaaagcggaaattatatcgccgtgcagcagaacaatataacaaggcatttcatttagccacgcccggtaacggtgctgtattaagcaagcaggaaaaaacaagcaaacaggcaatggaacgttgcctgattaaatcaaaaattaaaatcgcagagggtttgtga

SEQ ID NO: 283972 - DNA, 222 bp, Morganella morganii
atgaaaatcgaatttatctcaaacggcaacatagccaaggtggttatccgttctttcatcaccgaacaccggaaactgaaccgcctggttgacgccgccctgctccgtgccccagttcagcaatcaaccaccggcctgttattccgcgtgactactctgtacggcaaacagaaccatgtccgccgggcacataagattatctgccgggaggtgtcacgatga

SEQ ID NO: 283973 - DNA, 594 bp, Morganella morganii
atgcgtcattatattgccggaatatgtgctgctttgctgtctgtcgccataatacccgccggttacggtgcgggatcgctgaatcaggcggctcagcagcttgacaggctggtgttgtatgatccgtcctatgaaaaaatcgcttatcccggcggggatgtttcaccccggaaaggggtatgttcggatgtggtgatccgcagttaccggaaaataggtaccgatctgcaaaaagaggtacatgaagatatcaaaacggcgttttctctctacccgggccgtaaattgtggggacagacacggccggatacaaatattgatcaccgccgggtgcccaatctgatggtttttttcagccggaaaggggaaaccaaaccgatcacacaaaacgcggcggattatgtggccggagatattgtgacctggcagctggataacggtcgtccgcatatcggtattgtgatcggtaaaaccgcgctgttcagcggaaatccgctggtcatgcataatatcggcggcgggcaggtcagtgaggatgtgctgttcagctggaaaattaccggacattaccggtataaagccgggaaagaatga

SEQ ID NO: 283974 - DNA, 978 bp, Morganella morganii
atggattacttcgtgcgatttctgcgcgtctggtgctgtgtgcccaggcgatcttttttgttggtatggccaaatccatgtttttaccaacgctgccgaccaggctacctttggccccgcgatgctgtaatcaccgtccactatctgctggacagcaccgaccagtcatgtggcggtatctggtgttcacttgaacgatatgtacttcccgctattggtgatatcagcgttacggatatcaaagcccatatattggttcaagcaatagcgaagctccgattagaaatagctattcaagaacagctggataagccagtatcagaattgtctgagcaagaaaaattttggaaaaaagaagtcgaacgtctttctggacaactcaacctatacgatgtcaagagtaaactttatctgttaggcgaaagcatcaatacaaaaatgtgcgaattaggcaataacttcgactttgaggatacttataaaccatcagcccttcgttttgatccagagaccttcgatctatggtaccaacaagatgcaaaaaaccgagtataccttcggtccatgggaagcggggcaaactggttgtactctcacttagcactattcatttcattgcactatcagtttgccgcgtactcggaaaagggttgcaaaattccaccaattcttttccaggagcaaccaacacaagtctacttcccttctattgatgatgcggatgaattcgatcctgaggacctcgcaaaacaagctaaacgcgaaagtattgttgatgacgatatgaaggctgtaactaatatgtttacccaacttgcgaaattttgtacggaaactggcaagactaccggggtaacgccacagattattgtatccgatcatgccgataaacttatcctgggcgaaggttataagtttcaggattacgttcgggcaacttggcgcacacgtgagagtggattcattgatgataactaa

SEQ ID NO: 283975 - DNA, 534 bp, Morganella morganii
gtggcttgttttgcctttcagtgtcagcgtatcctgcccgccgccgcctgctgtcagattaccgaacagcgcactgctctgtacggcagagacattttgcagaatcacattgttgcggccattaccggtcataccgtttttcagttgcgtaccaccgttcagagtgatggtattattcccgtgacccgtcatcagtgtgtcagtctgagccgtatccttcatttcaatcgtgttattaccgttaccggccgacaatgttccggttttcgcgctgccgtgcagcatcgcggtattgtcgccgtgaccggtgatcagctcactggttgtaccgctcagatcaatcctgttggtaccgttgcccagtatggattttccgctgatagtcccgctgttgccgaagctgatattgctgttctgacccgcatcaaccgcgatgccgttttttatatccgccgcagtaattttgccgctgttggtgaagctgaacgcatttttcagcgcagtcagatccaccacgctgtggtcagatgctga

SEQ ID NO: 283976 - DNA, 1953 bp, Morganella morganii
atgcagactataaaagtggaaacaacttccgaacatctaaagaaaatagccaaagaaacaccgattagagcactttctgaattggtatggaatggttttgatgccaaagcaactaacataaacataagtttcaaaagtagtgagttaggtggaattgatgaaattttagtcattgataatggtggcggtatcccatatgaaaaaataaataaattatttggtagcttaggaggatcatggaaaaaaaacgccaaaaaaatgcaaggcaatgaatatctccacggtgaaaatggacaaggaaggtttaaagcattttcgttaggtgagaaagtcgtgtggacaagtatagataaaaaaataggctgttttgatataaaatcaagtgctaataatttattgacgtttgatgtcgaaaactcaacaaaaacactaaataatggcacgatggttagtgtttcaaatattagtaaagattcgttttccttactaagaaattctgattttaaattagctgaaatattctttctctatctgtcaaaatataaaaataaaaacctttatctaaataatgagttaataagtccagagcttgttcaggagtgtgttactgaaataaatttaggtgattgtattattagtgatgagcttacaattcaaattaagttatcaatagttgagtggaaaaataacattaaaacaggcaagcaaattaactattgctgtttaaatggctttacgttatatgaagaaaaaatagataaaaaatttgatgctgtggattgtaagtttactgtatttgccgagtcaaactattttttaacctgtcatgataataatcaactcagccaaatagaaataagtaatgaattaaggactatccgagatataattgtcgattcaacacggaatcattttttagaaaaagataagcttaatcgcgctagggttgtaaataattggattgatgaagatatatacccatatgatgaaaaaaaatatcttgatcctacacgcgaggcagaaagaaaagtatttgatattctggcggttaacgttcaaacttatttaaagaaatttaataaatctgataaaaaaacaaaaaaattcacttttaaattattaaggcaggccatagaggctaaccctagttcagttcaaaaaataattaatgaagtattgggtttaactattactgaacaacaggacttggctgatttactcgagagaactacactttcatctattataagctcatcgaatattgtagcaaatagaattgactttcttaatgggttggaaagacaattatttagtgatgatagtaagaaaaaaaccttagaaagagatcatttacataaaatgctagatgaagaatcatggatctttaaagaggaattttatcttgctggaagtgaaatgtggcttgaacaactgctagaaaaacatctggatattttagataagggagatgaatttaaccctgaggatattgttgagttaccagatggtagaagaggtagaattgatttaatgctatctaaggttagaaaaccatccgatgatattacggagattttagttgttgaattaaaaagaccaaataaaaaaatagatgataaggtgctttcacagattgaaaaatatgcaatggcagtgagtgagcatgaaagctttaatcatgataaggttaaatggatttttgtagcgatatctaattcaatggataagtatgctaagaaaaaagtaaaccaaagaggcaaggccaaaggcttactttatgatgatgcggaatataatgtcgaggtttgggttcatacttgggcggaggtgattggtaacgctcgggccagattgaatttttttagtgaacaactgaaatatcaggcaagtatggattctgctgatagatacttaaagaaaatgcatgaaaaacacatacctatattagattga

SEQ ID NO: 283977 - DNA, 186 bp, Morganella morganii
atggcaacaatgaccattcaggcagagagcgaactgcgcagccactatccgttaacactggtggcatttgatatgaacgcactggaactgatgacctgccagaaagggagccagattgttgccactggtcggcatgaatggtttaacgggtatcagcttaccggggcgcagatagttacaaaatag

SEQ ID NO: 283978 - DNA, 678 bp, Morganella morganii
atggggatatttacgttgtcgcatctggtggggagccggaagaaaatgaaaaaacagaagaacgcagccgcacagagtttcgggcatctgaccgccggagccgaaagtgacaccacggacaatcagcaggagcagaacgccgctgtcctgatggtttcagacgaccagacggaagccccgaagaaacacagccgcgctcacaatgtggcggtatcagaagaagcggcagcgagtccggcactggcggttcatctgctgcgtgagacagacctgtcctcaaagaaaatccgtgcccgtctgcgtgatgaaccggaatacctgtcaaagttcaccattaagtacatggaagagaatgatccgacctgggaatttctcgacgatgaggaacgcgtcataaaggcatttcaggtatcggcacaacacggtgatatcaacggctacatgactgcacggcatcaggcagtacaggcactgaaaaagatggaagagccgatgactgaagatgaagtgcagaaaatgattgagcgcacccgtcaggcaatgaacgcgtccaatccggacacaccggacaataccgaggcccggcagaaagccgatgaggaataccagcgcgatatggcgaaagcggcagagaagctgagagccacctacaaagaaaccggcgttaatctgccgtaa

SEQ ID NO: 283979 - DNA, 549 bp, Morganella morganii
atgtttggcggtattgttaaagatattttaaaagcggtaaccaacgcattactggacagaaaaaaagaacaggatgccggatatcagaaggacgaagcttaccctgagcacgataaattagtttcggaactaaatgaagaaatgcgacttcataaaatgctgggtgtaaggaatccagattttcagcaatctgttttgtgggccgtgaataatggtaagcaacgagtgagaaaagataaggttaagttttttgaacgacatataaaaactgataacggaaaactttccgttgatgagagcaatataaaagcacagaacagagtgacactgtttatgattttttgtacagcactgatgctggtgttagcgcagatatgctggacaaaaggagatgtcattcttgcaggtgcaagtattggagcatttttcttatttattttattaacgatgttaagtgggttgactccaacaaaaacggaaatagccgacatgaaaaagcaactggatgattacaacaataggaagagtctggctgataataatgaataa

SEQ ID NO: 283980 - DNA, 195 bp, Morganella morganii
atgtcaactatcattaaacgggataaacaaccaaaaggaacaggaaaagcaccaccgttccatatgcgcatcactccagacctaaaagaacaatttgatttagaagcacaaaaagacggtgtaagccttgcaagttggttgaaagagttaggccgtgctgaactgcaaaggcgaggtatcgaccccaaaggctga

SEQ ID NO: 283981 - DNA, 795 bp, Morganella morganii
atgaaaaagaaaatgaccgtaatgggtcagggcttcgctcactctgaaatcaagattgacaatagttttaataacttaattccggttgctaacagcaatatcggtggtaaagaaattcagtctgtcagtaccagaaagttacattcgtttctcagggtaggccgtgattttacgacatggattaaggggcgaattaagcagtacggttttattgagaacgtcgattacatcattgtcgaaaatttgatctcccccgtttcggggaggtcaaaatcccgtcagcgcattgagtttgattacattgccagtatcaatatgggcaaagaattatcaatggtcgaacgtaacgaccagggccggttagctcgtcagtattttattgaatgcgaggaacgattacacaaaattgccccggaggagcaaaaagcggctctgcaaaactggcgtaaaaatcgtgtggccgcgtgtgaggatcataagaatatggctgaggctatgaaaggctatatcgaacgcacaggcgataaccagaaaggttttgcatacagcaacgagtcccgttttatcaataaactggtactgggcattgatcctgttcagtgggcgaaacgtaaaggaattaagagtaaagacatcagagataatatgaatgtcgggcagttaaaactgctggcgtatctggaagcccgtaactgtgcatttctcgatgtggataccatcacaccccaaagaaaagctcaactcactgagctggcgcagcgttggttagcacagtacgtggaggtaaaacaatga

SEQ ID NO: 283982 - DNA, 924 bp, Morganella morganii
gtgggaatactagataaacgcaagtggcttaatttaggtgaatgtgctaaatatttaagcaagaaacttagcgatgagatagatatatcagatattgctcgattaatcgcagatggtgatttaaagccgtctgtagtttttcactcctgctgctttgttagagaagttgagctaacaagtaaaccattgaaatatactcttggtgagccagaaacggcaatcatgtcaaatattcatcttcttagccaagaagctataatgcctgaaacattaataattcatgcaactccggtaggagagaatattatatttacagatggcttatggtctgcaatgcatattggtattattaaatatgaggctgaaaaaatatatagcgaagagcaggggctgccaaagcctaaaagatctttatatgaagcgaaaggaattattttaaatgatggagataaacgctttcaagttgttcaaaaaatcgactttgaaaaagagttatcttcattagtaaaactatcacagtctcaggaaggggagaagagtggtttttttaaagcacatattgaacgattcgaacaaataaggagagtagaagcgagtggaaatatgtataacagctttgttccatgtacatcccttcctgaaaactcatatttcgctataaaaagagaagatatagattcctttatcctgtcatgcatgcctaagtcagaacccacagcaaaaatctcaatgaaaacacagaacaagcaagcggaatttatatacagtcttattttggcacattatggacaagatgtggctgataaccctcgtccgcatcttgataatgccagaggaaaaataaaaatggatctggaaagaaatggattgccaaccccttcgggtaacactgtttcaggctggctacgaaatattaacccgtaa

SEQ ID NO: 283983 - DNA, 1212 bp, Morganella morganii
atgaagctgacagccagacaggtagagacatccaagcccaaagagaaatcatataaactttctgacggcgggggcatgtatttagaagtcgcgcctaacggatcaaaatactggagaatgaaatatcgctacgccggtaaagaaaaaagactggcgttcggcgtttatccgtccatcacattggcacaagccagagcaaaacgtgaagaagcaaagcgggtattagccctgggtgatgatccgtcactggtgaaaaaggctgaaaagcgggagagggaatctctggttaataacagctttgaaaaaatcacgctggaatggcatgagtataaaaagccgaactggtcgcagggttatgctgaggatctgctggaagcctttcagaaagatatattccctcatattggtaaagccagtattacagagttaaagccgctggatatgctggaggtactgcgtaagctggaaaaaagaggggtactggataagctgaagaaaatccggcaggcatgtaatcaggttttccgctatgcaattgtaacgggacgggctgagtacaatcctgcctctgaacttgccggggctttatctgcaccaaaggcaaaacacttccctcatttgaatgtggatgagttacctgattttttacaagcattgtcagcctgtagcggcagtaaaataacgcggatagccacgaagctactcatgataaccggagttcgcaccatcgaactaagagcggcaaaatggggtgagattgattttgataaagccatttgggagatcccggttgaacgaatgaaaatgcgccgtcctcacatggttccgctatcatctcaggcactggaactactgcgcgagattgaaacaattaccgggcgattcagttatattttccacggtcggaatgattcctctaagccgatgagtgaagcggcaatcaatcaggtaataaaacggattgggtatgatggtcgggcaaccggtcacggcttcaggcataccatgagcactatcctgcacgaacagggctataacactgcatggattgagacacagcttgcacacgtagataagaactcaatcaggggcacatacaatcacgcgcaatacatcgacgggcgcagggaaatgctccagtggtacgcggactatatggacgtactggagaacggtgataacgttgttcacggtaatttcaaacgggcatag

SEQ ID NO: 283984 - DNA, 1104 bp, Morganella morganii
atgaaacgcaatattcttgcagtggttatcccggctctgttagttgctggtgcagcaaacgcagctgaaatctacaacaaagacggcaacaaagtagacctgtacggtaaagttgacgttcgtcatatgttctctgatgccaatgacaatggcaaccgtcaggatggtgatgattcacgcattcgtttcggtatcaaaggtgaaactcagatcactgaccaactgaccggtttcggtcgtttcgaaaacgaaatcaaaaccaacggtactgaaggcggcgataccagcaaaaacaaagtacgtttagcttacgctggtttcaaattcgctgacttcggttcaatcgactacggccgtaactacggtgtggtatatgacactgcagcatggaccgacgttctgccactgttcggtggcgataccatggctcagaccgacgtttacatgactggtcgtaatgctaacctgctgacttaccgtaacagtgatttctttggttatgttgatggcctgaacttcgctctgcagtaccagggtgctaacgatgaaaactcaatcgctgcacgtaaagacattgataaagcaaatggcgacggttacggtttatcatcttcttatgatctgggctggggcgtgactctgggtgcgggttattctaactctgcacgtactgttgctcagcaaaatgatgcatttgctccgggtaaacgtgctgaagcatggaacgttggtgctaaatacgatgctaacaacctgtacctggcagctctgtacggtgaaacccgtaacatgacttactacggtaacggtgatgttgcaaacaaaactcagaactttgaattagtagcacagtatcagttcgatttcggtctgcgtccatccatcgcttacctgcagtctaaaggtaaagatctggaaaatggtgcagcaggcagccacgatctggttaaatacgtagatctgggcgcttactactacttcaacaaaaacatgtctgcggttgttgattacaaaatcaacctgctgaaagacaacgacttcaatcgtgatgcaggtatcccggttgacaacgttgttggtttaggtctgacctaccagttctaa

SEQ ID NO: 283985 - DNA, 576 bp, Morganella morganii
atggctacactgaaatataaaaatatgatgctcgaccttgaaactatgggtaacaaaccggattcagctatcgtggctattgccgctgtgccgttcgacatggtttccggtgtaaccgatgatgcacttttttatgaggtggtcgacctgcgtagcagtgcaaaacatggcggtagtatcgacgctgacaccgtactgtggtggcttaaacaagaaggtcctgcgcgtatggaaattacggatccggagaagcagaacgggttgagcgatacgctgtaccgactgagtaagttttcagagaagcattgtgataaggccgtccaggtatggggaaacgggtgtaatttcgataatgtagttttacgttacgcgtatgaacaatgcggaattcagccattctggaaattctggaatgaccgggatgtgcgcaccattgtcgaacttggccacaatgccggaatcgacccgaaaaaagatttcccgtttgttggtgaggcacacaatgcactggatgatgcattgcaccaggtgaattacgtggtcgcaatccaccagcatttatttaaaaacctctaa

SEQ ID NO: 283986 - DNA, 648 bp, Morganella morganii
atgtgctcagattacgtcattgaactggaagaactgcgtaataaacctgcccacatgctgaaagaggtcggcgatcagtggcggacgcctgatacgctgtattgggggctcaatgcgaagttcggcccgtttaccctcgacctgtttactgacggtaagaacagcaaatgcccgaactattacaccgccgaagataacgcactgacacaggactggtcagaaaagttgaaagagctgggcggtgcagcatatggcaacccgccatattcccgcagtagttatcacgataaacaggccgtaaccggtgttcgtaacattatggaatatgctcaggctatgcgtgagaaaggtggccggtatgttttcctgctgaaagcggcgacgagtgaaacatggtggcccgaatatgcagatcacgttgcattcatccgtggccgtatcgggtttgatttaccggactggtttgtaccggcgaatgaaaaacaaaaaccgtcaggtgctttctttgccggtgcggttgtcattctggataaggactggcggggagaaaaaatcagttatatcagccgcgatgaattgatcaccatcggcgaactgtttatgcggcaggcacgctggctggtggcgaaaacaggggaggccgcgtga

SEQ ID NO: 283987 - DNA, 1056 bp, Morganella morganii
atgaaaaacactgttaatttaaacagtattaatttggtcaacgacgactcactcagctacatcaaaacccttccggacaattgtattgatttaatcgccactgacccgccgtattttcaggtaaaaacatgtgcctgggataaccagtggccggatgtttctgcttacctttcctggctggacgaaatgctggctgaattctggcgggtactgaaaccaaacggcagtctgtacctgttttgtggttcacgcctggcctcagatacagaaatactgttacgggagaggttcagcgttctcagtcatatcatatgggcgaagccttccggcccgtggcggcggcaaaacaaagaaagcctgcgttgttttttcccgtctactgagcggatcctgtttgcagagcattatcaggggccggttaaaggaaaaggcagtgagtaccatcagcggcgggatgaactgaagaaaaatgtgtttaccccgctgattgagtatttccggcaggcgcgtgatgcattgggtatcacggcaaaagaaattgaccaggcaaccggcaagcagatgtcttcacactggttcgggtacagtcagtggcagttaccgaatgaagcggattaccggaaattacaggcacttttccagcggacagctgcagagtgtcagcgaaataacccgttataccgtgaacataacgatttgatcagtgagcaacatacactcaggcatgaatatcacgaactggcagatcagtattcgctgttacgtcgatacttcacggtatcagttgatgtgccttataccgatgtgtggacattcccgccggttcagtattaccccggaaagcacccctgtgaaaaaccggctgcaatgatggagcacatcataaaagccagcagccgcgaaggtgatttggtcgctgatttctttatgggatccggagcgacattgaaagccgcactgaagcacaaccgccgcgttctgggtgtagagatggaagcagagcggtttgagcagactgcagcggaactggcgtgtgctgaggtattattcaggtaa

SEQ ID NO: 283988 - DNA, 213 bp, Morganella morganii; identical to SEQ ID NO: 279049

SEQ ID NO: 283989 - DNA, 477 bp, Morganella morganii
atgaataagcgattggttaaaaaggtaatggccgcttgtactgccggggcaattgccggtgcgctggtgctgatccccgcatatgaaggtgttgagtatatgccttatcgtgatgtggccggagtgctcaccgtatgttatggccataccggcagtgacattcagcccggcaagttgtatacggatgctgaatgtaaagcgctactgcatgacgacctgacgaaagtccggcgtgcggttgatccgatgattaaggtgccgattgatgacaatacccgggcggccatctattcatttgtctacaacgtcggccccggcgcgttctcgcgctcgacgatgctgcggaaactcaatgccggtgatatcgcgggtgcctgtgacgaaatgaaacgctggacatttgccggtggtaagcagtggcagggtctgattaaccggcgcgaaacggagaaagcggtatgccacggaaccctttaa

SEQ ID NO: 283990 - DNA, 306 bp, Morganella morganii
atgacagaaaaaaactatgaagcaattggtcgctgtaaggttttgcttgaaaaaatcaaagcgatgcatattgaaagagcccgcgcggtaggcgatctgcgggcggctgtttactctcttcatcagaaaggcaacgccaatcatgttccgcctgaaattgttgtttttgatgctgaaaatctaaccagcctggttgataaagttgggcttgtggatggtgagttgatgcgcactgtcagtgaatataacaactggtgtcatgaggcaggtgaaaaacccgttaaattaattgagatagcacaataa

SEQ ID NO: 283991 - DNA, 405 bp, Morganella morganii
atgatcaggttaaatataacaatctttattgtgctgctactgagtgccactgccggaatgagtcaccccggcatgaataaagaaaataataaccatagattgcggcacactgttgatatccgcttcggagaaaagtattccggaaacaacatcacggaatatattaatcaggtaaaatttgccattaaaaaaaatttttatattaatgataaatggcagggaaaacgctgcacgattgccatcagctttacacgaatgaatgcaaccgtgattgaaaatggagacactgaattatgtaatgcaggcttatctgctgttgagcaggcatttttaccaaaaccttccggagatataagaaaagataactcattaaaaaaagatataatgatacatttcaccccataa

SEQ ID NO: 283992 - DNA, 1086 bp, Morganella morganii
atggagttgacgaaggaatctgcatatcaagcgattgcagagttttttactgagaagccgtttgttttatttggtacaggaacttcatgtgcacttgatctaaattttgggatgccagccctagagcatcaccttcgagccgagttgaccagtggtatgacagatactcaggcacaacaatggcagcaagttgtctccgttctcgatgagggtagccatgattttgaatccgctatggacttcatcaaggatgaggctctgactactcgaatagtcgaactaacagcaagctttgttgcgtatcatgataacgctcacgcccaccaaatcatttcaggattacgcgattggcctgctggctcactactgaaaaagctcgttgagactctgccacaggccgataagcaacttcacgtcgcaacccccaattacgatttattagctgagtacgcctttgttcgacacaagattccgtatattacaggattttatggaggattccttcagcgttatgactggaatgaagcaaaaaaaacagttcaatctatacataaaggtttagggaagccgagacaatcaccaagaatcgttgaatgcaaacatgtccgactacacaaaccacatggctcattaaatacatttgaatgggaagctcaccttattgagtgtaatagttggattctcaacaaacctgaaggcgtcgtacgggcgatgatcactcctggtacagccaaatatcagcgattacataaagatagggcacagttggctgaatatgataacgctgttgggaaccatacttgttttctgtttttaggatttggttttaacgattcccaactcgtgaataacgtatttagacaaaaacttgaacaagatcagtgtcgtgcgttagtgatcactagggattcaaacccaaggatcgaggaatggttagataaatgcccaaatatgtggcttatctgcaaacagataacttcagataaaagcagaatctacaattcaaagtttgaaaactggctgcatgttgatgacaaggaattatggcgttttgacgctttcactaacgagttcttaggggggtaa

SEQ ID NO: 283993 - DNA, 1740 bp, Morganella morganii
atggctctttttacttttaatgatgacagttacatacttggcaatattcgtgaagtagacacaagaaaagtaactattctggtaaacagtgacaaggacctgcgtaaggccagagttgggcagcttgtaacagtgcaactaagcggagcaacagaatgttggctcattggcatgattgataaggtaatcaaagcagtagttgctcagcctcttaccctggaggtgcaagaagatgatgctgacgagatagacgcttttgaagatagcgtagtcaacacggttaagattacgttaatgggtggggctagatgggatgcaattgatcaaaaatataagttttcgagatctctagaccacgttcctgaaatcgactcgacctgttacattcttaaagatgcccatctagaagaattcatgcgtgtaatttctgaatgtggcaatggagaggactcgcttgaattgggttcttacaagctcaatgaaaatgcacgcgcttatgttgatggaaataaattatttcagcgacatgctgctctacttggtagcacaggttcaggtaaatcgtggacggttgcttcaattcttgaaagaagttcacgactaccatcttcaaacctcgtggtattcgatttacacggtgaatataaagaactttcctatgcaaaacaattgagaataccagggccggatgaggttgatgcagatgatgattcactactattcctaccctattggttgctcaattcagaagagattcagtcattattcgttgatcgaagtgaattcagtgcacataaccaagttgtggttgttcaagatgcaattaccgagcaaaagaaagctttccttcaaacgaatggtagaaccgacctgctgcagtcttttacactcgacagtccaattccatattctctgaataatgtcatcggaaagctaaaacatttaaatgaagagaaggtcgatggctcaagaggtcctaaaaacggccctttcaacggcgaattctctaggctgctagttcgtatggcaagccgcttaaacgaccgacgctatggtttcctctttaatagtcctgataaatacaaccaatacgattcgttgagcatgatcgctgaaaaactgatggagtatggtgagcaaaagccaagcataaaagtaatcgacttttcagaggttccggctgatatattgccagtaataatcgggttggttgcacgtatcatctatcaggttcaattctggactgatccgaagagtcgcagaccagttgcctttgtctgtgatgaggctcatctatacttaccaagaaaagaaggtaacccagttgaacgcagagcggttgaagcatttgaaaaaattgctaaagaagggcgtaaatatggcgttgcattgatgattgtaagccagagaccttcagatgtaagtgccactattctcagccagtgtaacaacatcatttctttgcgtttaacgaatgcagatgatcaaacgacagtgcgtaaattactacccgaaagtttggaaagccttttagaggcactccctatcatggatgttggagaagctatggttgtgggtgattcagtgctcctaccaagcagaattaaaattgatcctccaacagaaaagccgttaagtgcaacaatagatttttggtctcgttggcaggaaaacgttaccaatacagactttgcattggcagtagaaaatatgcgtcgacaaaatagaacaaggttataa

SEQ ID NO: 283994 - DNA, 1038 bp, Morganella morganii
atgaacaaattaaaaccaacatggcagttattcgaggaactcgtttgtcgaattctggaggtaaacaactttcaaataaaaagaaatagttgcagaggggacgatggatttgatttgcttgctgattttggacaagaaaaatgggctattgaagttaagttctaccgcacagcgcgagctcagccttcacttattgatgcagccgcgactcgtatttcgagtaatggcatagctgcaggtgtaaacaaagggatgttagtcgtttcgtgctttctcacacctgagttacgagagactcttgaaaataaatttagtattacatttgtagatcaggctgacttaagaatttggtgcagttcatatcctgaattagcggagtcattggatgcactattagaaatcaatctaaatgaagcgctagcaacacacctttctcgtaaagagagtaactctatcattagagataagtctctttataagagtaaccaaattgaaaaacatgaaaataaaggtacagaactttgtcttgaactacagagtataaaaaaagggaaagcatcctggcatcagtatgaaaaaaaatgcgaggagatccttaagtatttgtttcctaatgacctccatggctggcattcacaaaaaagaaccgatgacggtctaaaccgttatgattatgtatgtcgtattagacccactactgaattttggaagtttgttattgaacacctcgatagccgttatgttctttttgagtttaaaaactattcagggaaaatcaaacaaggccagatactcaccacggaaaagtatcttttggaaaaaggactcaggcgtatggcaattattatgacaaggacaggagcagaggcacatgcaatagctatgacccaaggagctatgcgagagcaaggtaaacttatgctcatagtagacgatgataaagtatgtgaaatgcttcatatgaaggaacgcggggaagatccaaccgactgccttttcgaaattgccgataactttttattgacactccctcgttaa

SEQ ID NO: 283995 - DNA, 786 bp, Morganella morganii
atgataaatattatttcgattgaacatttcacttggttaaaagataattcttatgcatgtgcatattgttggggaattttatcagaaagagaacgtgatattttcacagccccaccatataaaatttttgatttagaccgtgacataaataaaaatacatcatggtatgattttctcggacttagcaagcaatgcatgaatcatgaagaaagatataacacaatcttaaatatatttgatggtgttttctttgaggatggtggtgataaacaaaacgccctggactcattaaaaaaactatggttgaaggtaaatgatgaaataaaaaatttcaaatttatcgatgataattccccggagcatgtaaattggttgttcgattactttaacaaatataaaagtcaagcaatttcacataaaactggctttataataagtgctaggaaagagaatgatttgcaacactatttatcgatataccctaaaactaaccttgtcgacaaaattacagcagcatattctgcacttagattatgggatacaccagattttatctacgaaagaaaagtattcatagacaatacaaaaaaagcatggaagcaacgaggggttcgtagaaatgatccatcaaaaacatcaataagtagtgttataggggttaacgaaaaagaaaaactcgacgaaatggcaaaacattatcgagtgaacaagaatacctttctggaaaaaatcatcaacaagcaatatgaaaaatatcagaaagaccctagtgacttaaatatctaa

SEQ ID NO: 283996 - DNA, 1569 bp, Morganella morganii
atggcctttactccttccacattatcgcgcagcctagcgctagccctgctggtgaagatctcccccgcgctggccgaaccgtgggcagagaaaacctataatccgaagccagatagcgatgacgtgattttgcctatgccctgcgaaggttcgatggtatttcgtcgggtagaaattccggtagccggtcctctggatgatattcccatcaccttaggggaagatggcggtgaatggggctttgtggaacacagttaccccacgtttatcgccggtagctttactaaaacgccccaaaataaaggccgttattatttaatggcgaaatatgagctgacggcattgcaatatcaggcattaacctccgatacttgcccaacgccatcgcgtaaacttagcctcccgcaaaccagcatcagttggtttgaggccgttaatttctccgatcaatataaccagtggttacgcgcaaacgcgctcgacaagctgccgaaagaagataacaagccaggttttttacgcctgcccaccgaagtggagtgggagtttgccgcgcgcggcggtctgaaagtggataccgcacagtttcgtgattcccgttatccgatggacgacatcaaaaattatgagtggtattccggttcgcagtcctcaaatgggaaagttcaactcgtcggtctgttaaatcctaacccactcggcctgtacgatatgttaggcaacgtctctgagatgatgtttacccccttctacctcaataaaattaatcgattacatggccaggctggcggttttgtggtacgtggcggcagcgtgatgtccagtgagtcggatatccgcagcgctatccgtaaagaaattaactattacgataatgcccagccttttaccagtaaaacaatgggcctgcggttggtgctggtttcccaggcaattacctcaacggaccgcgtcaaacttcttgagaaaaactggtcgactctcggtgataataaaacgcgcacagagagcaacaaatctgggtccaatgatgcggcgaaagcgttgggtagcctggcttctgatgttgaagacggcgagctgaagaaaaaactgaaagacctggaaaaccaacttcgtgccagcaaccagcagcagcaagaagagagagcacagtctatccgcgccagcctgaatctgggctcttttctctgtaccaaattacaggacgatggtcgtttccttgacttcctcaatcacaattatgagctgctgtgcaaagataaagacggcagcgacaccaactgcgccatccgcaaaaataagctggcggaacaaaccgatcgtctacagcagctaacgagctactacgccagcaacctggtggattccggcactctgtatgggcaagcagggctaaaaggtgaagttgacgtgttcaatcagatgctgacgctgaataaacgtctttccggtcttaagccgttcctcgacgctcattggcagaatcagcaaaaatacctagcgaacggcaaaattgatacagcaggctggctggatacctgcaaacaagtaaagaacggccactaa

SEQ ID NO: 283997 - DNA, 1215 bp, Morganella morganii
ttgtcttttaatcgtgcaagactgctcgttcgccttgcaatacaagacctgtggcacgatcgcatcatctctttttgtatcgtctcctctcttgttgcggtcatcgcccctttactgctcctttttggcctgcgctttggcattgtgaaccagttacaaaacgatctggccaacgatccccgcaatctggagatccgcatgttgagcagcggaagctacgatcagcactggattacgcggctacagcagcggtacgatgtcggcttcgccatcgggcaaacgcgctcgctcaatacgctgactgacttacagacggacagcacacattttattgaaaatgcggaagtcattccgacagaggctggcgatcctttgctcggcacgcaggtgctccatcatgaccatgaagttgttattactcaggaagcggcacgcaagctggcagtgaaaaccggtgatacgctcacgctacgcgtgagtcgtatgctcgatgaacgccgcgagtggggacgtaagcgcgtgaccgtggtggggattttgccagccacctattttaatcgccccgctatctttacccgccccgcgttattgctggcccttgaacattttcgcgatggctatgcggtaacagccttaggggtcgccagcggcgctcagcttaacggtaacgcgccgcgctacgcacgcgcaaggttgtacgcacgcgatattgaccatgtcgccagccttgaacacgatttgcgcgcacaacgcatcgaaaccaccagtcggctggcggatattgataatgtaaaaagcattaatcgtgtgttgggcatcatctttaacacgatcgccatcaccgcgctcattggctgtatcgcctcgttaatcggctcgtttatcgccaatgtcgatcgtaaacgtaagcatattgctgtacttcgtctgctgggcttcacgcgaccggcggtaggcgtttacgtcattagtcagggcgctttgctcagcctgatggcctatgtcggcggttttggcatctattttttagccagccagatatttaaccgggcgctgtccacaagccaggccaccggtcagatgatttgcaagataacgcccttacactgccttatcgcccttttactgacgctggttgtggcgatgctagttgccggtatcggtgcctggcgcgcgattcatattgaacctgcgcagagcctgcgcgaggcataa

SEQ ID NO: 283998 - DNA, 726 bp, Morganella morganii
atgctgcatattgaagacttgtgcgtggttcgtggtcaggaccatcaggctcaccgggtttacctgccgcagctttcgctgcggccaggcgaggtggtggcggtaacgggtgaaagcggctgcggtaaaagcacgcttctggaagccattggtttagtattgcatcccagaaaaattgggcgtttcacgctcagcaaagggacacagcagcaggatattgccgcgttgcttctgggcgagcgacataatagactcgctgcgattagggcacgagaacttggctttgtattacaaaacggtggcctccttccctacctgaacgtcaaagataatattctcttgccgtgccagctgctgggagcccgccctgacagcaccatactggacagggtcatcgacacgctaaaactatctccactgctggcaaaatatcctacccagctttcctttggcgaacggcagcgcaccgcttttgcgcgcgcgatattacatcgcccggcgctggtactggcagatgaaccgacggcggcgctcgatccctacaatgcccagaaattatttagtctgtttatcgaactagtccgtcaggaaggcatgatggcgctggtcgtttgccatgactggcctctggtcaaacgcttcaatttaccctgtttagctgctcaacctgaatcgctgacggcgtcatcacagaacaaacggggaggtacttactttgtcttttaa

SEQ ID NO: 283999 - DNA, 1968 bp, Morganella morganii
atgacccagatttttttttgccgcctggcgctgcctttatgcagcctgttgttcagcgggcacctctttgccgccgagggcgataaaccgctgcttcaggaagggaagaaaacgctataccagcgcatcctgacgacgccaggctgtaagcttagcgacaacgccggggatgaaaatgggcagcttcagcctgcctttagcagcctttatgtttatcaaaaggaagaggcgaagggacaaagctggcttaaagtcgggccggatagctatggcaaaacccttggctggttgccgaaatcctgtaccgtagactggaaaatgcagctgacgctggcatttaccaacccagccaaccgcgatcggttactctttttcaaagagaaagaaagtctggataacattctatctgcccccgatccggtctctctggtggcgccgctgcgcgccaaattgaagcgtgacggccacgctgaaggtattcaggcacaggagccggaatattttgtcgatctgcaaaagcaattttatctgctgccgatcctgagcggtgaagaggtcatgaccgaagatggcttctatacgcgcctgctcaacgtggcctccgtcagcaaggccgatgataacgcagcggcaaaacaagataacgacgtaaaccagttgaaaggctttaacgcttcggtggtgttcgttatcgattcaaccatttcaatggggccgtatattgagcgcaccaaagagacggtcaacaagatctacgacaaaattaaacaagagcatctggatgggcaggtcaagtttggtttggtctcttatcgttcaaataccaaagccgtaccgggccttgaatacaacacccgcattttcgctgaccctaaccaggtcaaggacggcgcggattttctgcagaaagtcgccgatcttaaagaagcgaaggtctcaagctctttatacgacgaggatgcctattccggcgtgttatcagctattgatgacattgactggagtccattcggcgcccgctatatggtgctgattaccgatgctggcgcgattgagggcagcaataaactttcaggaaccggccttgatgccagccagctccgtctggaagcaggtaaccgcggcattgctatttatacgttgcacttgaaaaccgccagcggcaaagcaaaccatgccaaagccgagagccagtaccgcgatctctcaaattttgatagcacacaatctaacctttatcaggcggtgaatgcaggcgatatcaaaatgttcggtcagcaggttgatgccctagcgtcggccattacggaacaggtgaaagccgcctatatgggagatgccgccattggcagcgcgctgtatgccaaagatgaggggcaaaagctcacggcggagcagaaattgctccaggatacagcgttaatcgggcatgcgatgcagttagcctatttgggcaaacgcaacagcacccaagccccgctggtgttccaggcctggattagcgatcgtgatctgattaagcagaacatccccacaacagatgttcgcgtgctcttaaccaagggacagctgagcgatttaagcgatgctgtcagccagattctgaaagccgcgaatgaagggatgatctcgcccactaagatgtttgaacaactgcgcaccgttgcggcaacaatggggaccgatcctaaccagttgaaacagcaagacagcgcgagcatcggcgatcttggcgtgctgggcgagtatctggccgatcttccctacaaaagcgatgtgctgaatctcgatgaagaaacgtggaaaagctgggatgggctgtcacaggagaaattcatccgcacactgtcatctaagctgcgtcactatcaaaaatataatgcggatgtcgaccgctgggtcgagctgtcgcaaggcagcgatccgcgcgatcgagtgtatcccatcccactggaaatgatgccctga

SEQ ID NO: 284000 - DNA, 1005 bp, Morganella morganii
atgctagctaaaatcatcgcctgccaaccggcagagccgggtaccgcacaattgatggttcgcctgcgcggcgaaactgcggtgctgcccgatctgacctttacgctttgcaataacgagcagaactatctgcagcccgacggcagctggagtcctgcacagcactggtttactgtcaacggcggttactctctggccaacggcagcggctttcgtatcggccctactctacttgaccctttgctggcaaacgcaagtcaggtccagattcagatcaagctggcttcaggggaagtgcgcaataccaccctccaattggtgcgtgatgagctgctctcttcggaagccaggggcgcgacgggtaattacagcagcagcagtatgctggcgaccccagaaaccgactccgcatcagcgcccatcgcagaacctgaaaccattgcgccgatcattcacgccgagccgcagccgcaacaaaaaccagcggcttcccacctccccctcatcatcgccgccatcctaattttagtggtgattgctggcgcgctttggtggttcataggccgggacaaggggcaggaggtggtccctacggtacaagctcagcaagcaatccccgccaccgcccctgaagcgacgaccgccgagccgaaaacctcggctggttgttccgcacagagtttagacacgctgagcgagcttgaattcgtgcagacgtgcgttcaggaaaaactcgatagcgataaactgctggccattatccagtcagcgaaagaagcgaagaaatgcggcgtcgcccagcgcctgtacgcgaaccgcgcgcagggcggcgataccaaaatcgcactgatttacgccggtgagtacgatccgaaataccatcgggcaagcgaatgtttcaaagaagcggataaagatactgcggcctattggtacgaaacggtgctacaatcagaacccgagaaccaaacggctaaacagcgccttgaggagctagcaaaatga

SEQ ID NO: 284001 - DNA, 2715 bp, Morganella morganii
atgaatagcgatcaaaaatctctcactcatggttgggcagctatcgctcagggctgtcaggacgcacttggctgggtcgatgcagtgcgttccggttcacgtcgcctcgacaacgaggcggataaactgaaccttagcttgctccgcacgcgtaaccatgccaatagcctgacgctggtcgccaaaacgccaatgaccgtcggttttttcggcatttctcaggccgggaaatcctatctcatttccgcgctggcagctggcagcaacggttcactggaagcccgttatggcgaacggcgtgtcgactttatcaaagaagtgaatcccgtcggcggcggtaaagaggccaccggcttggtcacccgcttcacccgccaggcccccgccgcgcctgctggctatcctgtgcctctgcgcctgttcagtgaaatcgatctggccaaaattctggcaaacgcctggtttaatgatttcaaccacgagcagctgagctttcaacttgatggagccaaggttgaagagcgactgcgcccctttctgcaacgcgccacacaagcaaaaagctataacggcgtgagccaggaagatgtggttgccttatgggattacctgaacgcctcgttcagaaaatcggttgaaaaacttgaacacgcctattggccgcaggtgttgaaaattgcccctgcgctgagtcctggtgaacgcgcagagctattttctttattgtggggagaactgccagccctcaccgagacctatcgttcattagccaatgtgctgaccaaactcaatcatgcccggacagtgttcgccccactggagacgctgatcgatcacagtaatggcagcattatgaacgtcgacagccttaaccgtctaggctccagccaggatcgccatgttgagatccgctactggaaagaggagcagcaaatcggcagcgctagcttaacccaagcggaactggcagcgttaaccaccgagcttatcttcccgttagcggaagtcgaaaccgacagcgtcgtggagcaggtcgatctgcttgacttccctgggtatcgcgggcgtcttaaaattactgcactggaagaggctggtagagaggggcttaatcccatttgccagcttctgctgcgcggtaaagtcgcctatctgtttgaacgttacaccgataatcaggagatgaacgcgctggtcgtgtgcgccagctccgccaaacagagcgatgttgctgacgttggtccggtattaaaccgctgggtagaaaaaacgcagggtaaaagcgccgaagaacgtcagggccgtaaccctgggctgttctgggccatcaccatgtgcgatatgcgcatcaacagcagtctgcaactcaccaccgaacagttaaaagaaggctgggaaggtatgctgcacatgaccttgctggagcgtttcgcccaatatgattggctgcagcaatgggcgcccggccaggcgtttaataactgtttcctggtacgaaaaccggggctggataacccgttcatcgacctaaaagacggtacagaccaggagcgaaacaaggaagcgtgcatcaccgagcgctatcgccagaagctcgacgaaatgggcagcaccttcatcagcgctaaaaacgtgctgcaacacgtcaccgagccgagcaaagcctggcacgcgatgctcgaactcaacgatggcggcatgggacgcttaaccaaagcgctgcgcggcgtcgcgcatctgaaattcaagctagtgcgtttgcagcaacaacttgagcagtgtcgcgaagagaccggcgatcgccgccttggccgctggtacgaaaaaaacggcgacgggcagctcgtgaaaaagcaggctatcgcgaaagagctatggcaggggctgtccgcctgttcccacagtatgggagagctaattaatcgtctggagctgccgacgcaggagcttaataacatctatttaagcattcgcgaccgcaacccggaaccgtcaagcgatggcgacagcccagcggcaagcgcgtttaccgccagcccatttggcagcaaccccttcggtgataacccgtttggcagcgatccattcgccgcagcgccggctgaaatcgccgtggttgacgcgccagcgtcaactgcccaggaaagagtcggccaggacgatgatttcgcccatcaggcgtttaaagcctgggtcgcgcatctgcgtgaactgccgcagcaagcgccgcagtggcgtcagttggggatgagcagcgaactgattaatcatctcagcgaagaattgatcaccgcagccacgcgcctcgatctggaaagcacgctgaaacgcgcgctggcgggtcaggagcaagcgggtacgcggcgtgaacatcttatggcacgccaagttctgcgcgcccagctaacgatgcgtgattttatcgcttggtttggttatctcactctaccgcctgaaaaggtgcccaacagctacgttggcgagaaaaataaagtcttcctgcgccagaaaccgctgatgaacgacgagctgccgcaactcgccgccgttgcgccgcagccgggcgtctcttatctgggagactggctatcagccctgatgagcgtcgtacttgataacgcaggtcatagcgccacgcgcgatatttccgtcgaacataatcgccaacttggtcagattatcagtcaattgaaacaagagaacatgccatgctag

SEQ ID NO: 284002 - DNA, 3069 bp, Morganella morganii
atgttgcccgagattgtatcttttgaccgtcaagtaaccttggtaggcgactccgggatccagtttatggattttggtttgtctcccggacgtttgcctgccggtgaatttgttaaattagccaatggcgtactgacccgtttaatctacaacgagcagcgcgattactatttttatcagcccagcccaaaaaatatcgagaaggctaaaagccagtacgatatttccgttgagcagagtcttaagctatttgacgggatatggttgccgcttcccctactccgtttcagcccgcctgacgtctatcaggaagggccgcttaactgggcgcgttttcgtatcgtcaagctggacaagcctgatatggatgggcatagccatcgaatgacgttggctatcgatactcgtgtaatggccaaacagcaggccgccgccgacctcagcccgaaccaggaagatgtcaatgctggggcaacctttgctgtggcgacagccacctatgccctcaactggtatctcacgcaagagtggattgtcgactggctgaaagaggtatttaaagaggcgagcaaaggccgggatatcgacgaacgcgagcaggagcttaaccagcagtatccgctggcgcactaccttaaccttctttcactgatggctattccagtcgaaggtttgcaaaatcagaccgcccccatcattgaattgccgcagttcagggtcatcgccaatcgagaaactaacgctatcaagcctattcccgttgatttgatcctcgatgtcggtaactcacgcacctgcggtattctcattgaagatcatgggcaatctggttcaggtatgcagcacaactatgtgctcaaattgcgcgatcttagcgcgccggaacatgtttataccgaaccctttgaaagcagggtcgaattttcacaggccttcttcggcaaagatcactgctcggtacgtagtggccgccacgatgccttccagtggccgacgatcgctcgtattggtggagaagcgggtcgtttagcggcgcggcgaaaaggcagcgaaggttcaaccggcctctccagtcctaaacgttatctttgggatgaaaaatattacggtcagggctggcgatttaacggtagctacgtgcaggacagtaatccgctcgccaccgctgcgccgttcgcgagtctgatcgatgaacggggcgaggcgttacacaccatcgaagatgagatggatcgcatcccggtctttacgccacgctattcccgcagttctctgatgacctttatgcttgctgaagtattaacccaggcaattagtcaaattaatagcccagaacagcgcatacgtcagggacatgcaggtattccgcgtcagttacgccatattattctgaccgtgccgcccggtatgccgatggctgaacgttgcgtactggatgaccgtatgcgtcaggcggtcggtttagtctggaaagcgctacgctggcacaacggcgaaaacgatccttacgaggatgagcaagaagatcatagtcagacaaacattaaaattccgctgccgaaaatcagggtcgagtgggatgaagcgtcctgcgcgcagttggtttatctctacaccgagattaaccaaaactttgccggtcaccctgagtcgtttttcgacgcccttagccgaccagacagcactcaacgtgaaagcatatccatcgcgtctatcgatattggcggcggcaccaccgatctggtcatcaccgattatcatcttgatcgcaatggtcatagtgggggcggcgctaacgtccatatcatcccgcagcagcgttttcgtgacagttttaaaattgccggcgatgatattctactggatgtcattcagtcctatgtgcttccagcctttgagcaggcgctgcgtgaaacgggggtcatatccgttgagacgctgatgtctcaactgtgcggctcgcaaaatattagcgcggcggaatccgtgctgcgccagcagctcaccctgcaactcttcgttcccctcgcgttgcacattctgggtaaatacgagcagttcgatccgctggacgagcaaacgcatgtcgtgattaaccaacgtatcggcgatctgctgccggtaggttctctgcgtgatgaagtcgagagctttgttcgccgcgaagtacagaaagctggcggcccaaccgatttcaaactggcggaggtaatgctcactatgccgctcgccagagtgcataacgatctgtgctcgggtaagttcaacattgataaagtgctaaccgcactgtgcgaagtgctgagctattatcattgcgacctgctactgctgacgggccgcccttcacagctgccgggcattcaggcaattatccgtcgcaacctgccgttgccgccgggccgtattttaccgctgcacggttatcagaccggcacctggtatccgttccataaaaatggccatatcgacgatccgaagagcaccgcctccgttggcgcgatgctcacacagctgtgcgcaaatcacagcattcctaacttccatttccgtacctcggcgctgaaaccttactcaacgattcgccatattggcaccattgatatggataacctgattcgcagtgccgatatcgtttatcgccatatcgaatcggagaacgggcagataaaactgccgacattcaccgacgaaaatggcgagaacaccacgcaaagtgtcatcatgcgtggcgatttgcggctgggttatcgtcaactggatgccgaacgttgggccgccgcaccgctttataccttacgttttagcgaagaaggccgtaagaagttttccgccgccctctccgtggataacggttcaccgtacctgaaagtgagactggctatcgacaaaggtaaacgggcgcgccaactgggcttaatcagcgatcggctgatgattgcggatatcaccagtaacaccgataagtcattcagcaagcgtgatgtagatctggaactcaataccatgcccgatacggggctcattgatagccgacactggctcgatagcgggagcgttaaaaaataa

SEQ ID NO: 284003 - DNA, 1449 bp, Morganella morganii
atgcgaaactcgattcagggaccactacttcgtaccggaaataactcttcattcaaggcgctgggggaaacgggctatcctgttttcaagatggccttccagctacgcgaagccatctatcgtcttgatgcagggcgcgatctggcccgtcatctggctatcccgcaaaacgatcagggcggtgacagaaccgactggtacagcagtttccccggcgatgttatcccgtggagcggcgcaagcgaagctgagcgagaatcggcgcgccagcaatttaatgcgtttcaaatggcagttcagtcactgagcgaacagttgctcaacgcggagcaaagcggaaccggcggcgatcgtcgggtctttgcccagttgcttaaatctgtgacccatttccccgattatgagtttgtctatctcgttaatggaacgctggtgatcaccttttgggggtttgtccacccggaaggggaacaacgtcacccgatgcattggctgagttcatcgtccgttcccgccgctgccctcgcggccgttccgccgcaggcctgcgccacggaaaaaaccgtcgaacccgctcccacgccctttgttgatattcgaacgcgtcgctggtgctggcgttggttgctatggctacttttggcgttactgctgctggcgctgttgttcgggctaccccacggctgcgctccttctctttccctgccggacctccctggtctttctgcggataaaactacggtcaccgctgagcctgtggttgcgcagcaggccaccagcccccatgacgtggcgctcagagggtcagaaaccgccgttggcgctcgcgccgtacccggcggcatcgtggaatggtcaaccgcggacgcgcattctgcgctggattcaacggtgcccgcgatgcctaccgacgcatctgacaacgcggtagacggcgatgcgacgccgccggctggcgcgaatgaagccagcgtagaacctccactgccacccagcgtgccggatacccacgacgagccgacgcgtcctggcgtgactacggtaaccgcccagccgctcgttgcgcctcagggcgaaccgttaaccctcccggccaccctgccggaaggcccggcgaagtttcttaacggcgaatggcgcgtgaatggaggtattcaggacaagcacaccggacgcccgctccagctgcaatataactttgaccagggccacggtaccgtcagcgtccgccagtccagcggtgtaatgtgtcgtggccccgccagcggtaacgtgcagcagggggcgctcaacattaccaaccctgagcaaatgacctgcagcgatggctcaaactttattgtgccgactatcgagtgcaaatcaccttctgcgggtcatgccgattgtattggcagcaacaatggggaaaaaaccttcccgattcgtatgcttcaacctaattcctga

SEQ ID NO: 284004 - DNA, 1146 bp, Morganella morganii
atgcatatcacccacaacaataatgatttgcttatgcaacgattaacaactgccgcgccgattgatgaagcaaccctgacaacctatgaagagacggtcggtatcatacatcgtcatcttcctccttcactggcactactgtatgccaccgcacgtcgcaacgtcgaaggacgcctggagtggtggacagcacgtcaggggctggctaaacctttttccgcgctgaatgacgcggaacggctgactattgagaataaacgtcagcaatatcaggacattctggcggggttaatcagccaactggccgcgcgcggcgaagataagtcagcacatgcattgcaaacgctgctcacccaatcacaccacctcgacggctatagtgtcggcggcgaaccggtgttagtcaattgggccaccgccagcacagcggcgcccacccatacggtggtggttatcccctggtggcgcggttttcttccttggctggcattatttctactgctgttcctgctcgtcggtgtctggtggtggtttacacatcgcacggccgtgacgcccgccgttattacgccaacccatactgaattaactgacgccaatcccagcgtgaagcttgagaaacgtcaggattttggccggataaaaatcaatttacagtggacacagggcgaccacaaagagcctgtcgatctcgatattgctgcctttgtgcgcttaaaaaacggtgaaatcagcggcgcggaggcgctgagtcatttgccaggcaactatgaccagccaccgtatctgttgctgcgggaagatctgcgtgaaggcaatgacgtggatggcgaatggcttttcgtgaacggcagccactggcaggacattgatgaggtgctgatttatagcttcatttacaccggcaccgataactggcaagggacaaacgcctccgtcaccctctatgtccccgaacagccgccgattacatccatgctcacagatggcgaccagcgtaataacgtcgccgccatcgcaaggctcaaaaatgtcgatggcaatattcaagttgaacgccttgaccgtttcttccctgaccgcaagtcgatggataagcactatggctggggtttcaaatggacgcccggcgcgaccaaaaattag

SEQ ID NO: 284005 - DNA, 483 bp, Morganella morganii
atgaaaaactacgcatttcttgccgcactcgtccttacaggttgtactacgtccccccaggactgtgatttacacgcacaagatccaagctttattaccaaactgagctgtgccacgtcgggcggttatcgtcagcaggttgatcaaaaagaacagcaggttcgcctgagccaatatcaaaatgaatcggccaggcaacagcagggttatacccaaaacagacagcagaccttaaatcaaaagctggcagatgaacaagcaaggttaaatgccgtgcgttcggatctgtcgcagactctcgcaaaactgaaatcaagcaagattcaaagccgcgaacgccagcaggaaattgccaaattgcaggagctgcagccccagtcacaaacggcaacgagcgctagcgaaattttagcgattgagaaaaaggtcgccgaagccaaacacaaaataaaagttctcgaagaagcaaatacgctgcgctaa

SEQ ID NO: 284006 - DNA, 738 bp, Morganella morganii
gtgaatatatttaacagaactaccacatgcctcgtaatttctgctgcattattactcggtggttgtgccaataccggcagctctctcctggcagggacaaaaccagacccacgccttaccaccaccgaacagtcacaattctttagtgcttctggtgcacaaggttgtggcgtaggcgccgtatcaggtgccgctctaggcgcattagtgggtgtgctatcaggagactctaagaaagcacttgctggcgctgcaattggtggcgctgctggctgtgctgcaggcatgaccgctaactactatcttgacggactgaaaaaagattatgcctccaccgccgatcgtctacaggcaatggataacgacatcagcaaagataccgcagcggttgaaaaatcgacgctggcgatgaaacaagttattagcgaaaatcaagccaccttaaccaaaatcagcatccaaaaagataaagctggatttgataaagcaggtgcgaaaacccagctggcgcaaattgatgccaacatcagcaagatgaaagagaccataaaaggcatgaaggataaagaatctgcctataaggtcgctttacaaggtcaaacgaccaccacaagtgcagagaaaagcaagctggcaaatttgaacaaagaatatgccaatctcaatagcaagattgctgctctggaacaagaaaccaacgagctgtatgaacagcgccaggctatctcccttggttaa

SEQ ID NO: 284007 - DNA, 1242 bp, Morganella morganii
atgagtgagctgaattatctggaaaagctgctggatggggctgatgttgagtggttgtcggtctctgaaatatttaatcttaaaaatgggtatacaccgtccagatccaataataaattttgggaaaatggtgatattccctggttcagaatggatgatatacgtgagaatggccgaattctggataactcacttcagaaaatttcacgctgtgctgtaaaaggtggaaaattatttgaagcaagctcgatactcatttctacatccgcaacaattggtgaacatgccttgattatggcaccgcatctggcaaatcaaaggtttactaatttagcattgaagcctcattatcgcgggcgttttgatattaagtttcttttttactattgctttgtgctggcggattggtgcaaaaagaatacaacaatgtccagctttgcatcagtagatatggatggattcaaaaaattccttatccccatcccttgccccggcaacccagaaaaatcccttgcgattcaatctgaaatcgtccggattctggatgcatttaccgcccttaccgctgagcttaccgctgagcttaccgctgagcttaccgcacgtaagaaacaatacaactactatcgtgaccagttgctgagttttaatgacggcaaggtggagtggaaaacactgggagagattgcaggatattccaaagcccgcattagcttcgataaactcaatgaaaacaattatgtgggtgttgataatcttctgcaaaatcgggcagggaaaacattgtcaaattatttacctacatcaggtaatcttacgaaatttgatattggtgacatattaattggtaacatcagaccatatctgaaaaaaatttggcaatctgactgtgttggtggaacaaatggtgatgtgttagttatccactgtagtgatagctcagtttgttcacgatatttgtaccaggtgctggctgatgatgctttttttgaatataacatgcagcacgctaaaggtgccaaaatgccacggggtaacaaagaagcaattttaaaatattcagtaccggttccctctgttacggagcagacaagaattgtcagtattctcgataagtttgatgcattaactaattccatcactgaaggcttaccccgtgaaatcgagttgcgccaaaagcagtacgaatattaccgtgatttactgttcagctttccggaaccggaatctgtgaacaactga

SEQ ID NO: 284008 - DNA, 1044 bp, Morganella morganii
atgacatcatcatttataattgaaagcaatagaataaaatgggttgactcgctaaaatttctagggatcttagcaatttacattgggcacttagggaaagggggaggtccatttactgatttcgtatggctatatcacgttccattattcttttttatttctggctttttttctgactataaaaataatactaattttaaagactttattaaatccagatttaagagattaatgctgccatattatgcatttactctcctgttattattcatcaatgcgtcaaataacaatcttgatttcatttccttatatacaccaattaaagaaatattatacggagtaaggaatgacaattatgttggtacagtttggttttttaattgcctgttctcactatcaatactagattatatattcatgagagcaataaagaacaaatatattatactcctcatttcaattctctcacttgcaatatttcaattattaattgggcacaaccctgcgagtacacccagttggtttttaaatatagataccgcaattggctactggtggcttttagccatggggcgatgcctttttccatgcttaaaaagcaatgcattatttaaaaaaaccatatcaggatacacattactattcattttattaatggtggcaacatatgaattgctgaatgggaagccaattataactacgataatgttaaaactatatccggactttcaagccggattagtttactctatcactgaaaatatgtttacaattctaaccctagtattactcaatgtgttcattgcaaaaataatatccgggtcgacttatatatattcaacaggaagaaataccattaatatatgtggttttgaaatgataacaaaaacaataatcccctctgtattttacactattggattgtcattttctttatctaatcacttcatggctatagtatattcattactttgcatttatatatcaaacacaatcggctattggctttcaaataatatcggcggcgttttttcaacaaaataa

SEQ ID NO: 284009 - DNA, 438 bp, Morganella morganii
atgaaaaactttggattcagtgtcaaaaaagcacagttttttatgatggataagcaggataattatgagataagcggtatctggcctgatgatataaaaccggtagatgacgatgttatggaaaaatttgccgacacgccaccgtcgggaatgagattaggagcagataaaaaagggaatccggcgtgggttgatatttcaccgctgactcacactgaattagtggaacaggccgaagcgaaaaagcgatatctgatatcggaggttgaaacagaaacagctatgctccggacgaaactggcgcttaagcgtattaaaccagacgaagaagccttgttaatctcctggcttgattatctcgacgaattggatacagtggacgtatctaccgccccggatattatctggcctgttaaaccagtagtgtatggtgtgtga

SEQ ID NO: 284010 - DNA, 498 bp, Morganella morganii
atgggaaagcttactcaaagcagactcagggaactgctcgactataaccctgatactggtgtatttacctggctgcctgatttaagttggggcagcaaacgcaggggcactgcagggtcagtgtcgaatgggtatatcactatcggcgtggatggtaataagcaccgagcgcacagattagcctggttatatgtttacggtcgttaccctgccggcatgctcgaccatatcaacagagtgaaaacagacaacaggatttctaatctgcgcgaggcatccaatgaagagaaccagagaaacgttgaagttggcaagaaaaacaaatcaggtttcaagggggtcttctgggaaccttcgcgacagaagtggaaggcaagagcgcagatgaataaaaagaaatacaccattgggcgattcgacaggattgaagatgcagttgctgcgtatgagggcttctgccgccagaattatggtgaattttatgttccgcagcagtga

SEQ ID NO: 284011 - DNA, 159 bp, Morganella morganii
atgccacggaaccctttaacactgatcatcattgctatcatcctgctgacggtcagtctgttggcaggttgttatctgtattcactcccgaatcactgtaagccgcttccgggtaatcctctggatggtgtgatccattatgagtgtgaagcgctatga

SEQ ID NO: 284012 - DNA, 276 bp, Morganella morganii
atgggaatactctcagaactggatagcttgttagaaaaaataccactctggaaaaaattaaaatcagtacctgacgaagttgaagcactcaaacaacgtatcgcggcgcttgaggaaaaaattaatagtaagccaggtgataaatgtccgaagtgcggagaaatgacctactctctcgacagaacagaacccgacccaatgtttggcgacatggggcttaacagggactgctacaaatgctcttcatgtgagtacgaaacattcaaacagcggtaa

SEQ ID NO: 284013 - DNA, 174 bp, Morganella morganii
atgaaactactaccgcttatttttactgcatttctgtttggatgcgcttctgcagataacagtcagttgagagacaagcctaaagatgatccctatgctgaaagtaccctgaatacaataaaggcaaaccaggacgtttacgtggaacagcatagatttaaagtgaagtattga

SEQ ID NO: 284014 - DNA, 207 bp, Morganella morganii
atggattattttttgacgttatcgggcagcgatatttgtcctgttctgcataaaaaggcatgcccgaaattacaacaggcaaaaagtacagtgtatgttggatactactggggagagcacgctgcgattcagcaggctgtagttgtggcaagaggaactgtggttttatgtccattatgcataaatcagcataatgaagaggcttag

SEQ ID NO: 284015 - DNA, 306 bp, Morganella morganii
atgaaagacagaaaaatcaagctacaacaggcaataaaagaacacaaagctttaacacagaaaatgaaagaggaagagattagcgggggcggttggccggaagagtggttgctggttcagcataatttagaaaatgaaatccgtgaactggcaggcgcaggcatggttattgagatgtacgacaagttgatcgaatgcagaaatgccattaagacactgtcaactgaaaatgaaaagctccgagctgccttggattaccttcaggggcaggggaaaaatatccatcacgatgaaataaagcactag

SEQ ID NO: 284016 - DNA, 252 bp, Morganella morganii
atgagcggatacgctttgcttcaggaatgttatttcactgatgcagacaaacacgcctggatggatgccatgagttatttactggataactacagtgagtttccggcagagatggatgtggatattcagcgaaaggctgagtttaaaaacttccggttcgtaaagtctccggatggcgcggttctgtttgcaaactgcatggtgccgggcattacggcagatgattttaatcagttcagagcgattaactga

SEQ ID NO: 284017 - DNA, 336 bp, Morganella morganii
atggcaaaagtaaatttactggagaaatgtgaacagcttaacagcgaaaactacaacctgagacagcagcgaactttagccaacaggcagataatcaaccaagcccaccaaattgcagaactggaacgccagttagcagcaaagaacttcgatatctcatgcataccgccgatccccatgaccagacaggtctatgaatgggtcgttgagtatcgcgtaccgtgggaaatcctttactgcgaaacctgcaaaagttggtacacagaacttgatagtttgttcccgtacggaattgatagccacgggtgcaaatgtgacgaacagaaggacttttga

SEQ ID NO: 284018 - DNA, 840 bp, Morganella morganii
atgaacagtaacgtggcacacgctgattttgtaacgaagcgatggcaaccagaggtgaaagtgaatgacagtgacgatttcattaaaaccccgcgtcaggtaaagaagttcatgatgcagattagcaaccagcacctaacttatcggcagtaccggatcattgatgcgctaatcgaaaaaacgtgtggctggcataaagattttgaccgcatcactaacacccagatagccgaaatgataaatcttcatcacacccatgtgagcacagaaataaagtctcttgttgaaagaaatattcttgttaaacaaggtaataaagtggggataaacaagaatatcgccgagtgggtattggatgttagccaaaccagcaaaccattagctaaaccagctaataaaaggttagctaaaccagctaatgaggataagccgaatcagctaaacacaatagatacttcttcaatagatataaaaaataataacccccatacccccgtcgggggtgaagtggaagggttggttaaacctaaaaagcgccgggcagtgaaaatcaattacgacgaatatctcattgcctacaacgaggaagtcggcgatcgcctgcctcacgccatcgatctcactgagaagcgaaaacgcaacctgaagaaaataattccgaaactggcaactccaaacgtcgacggctggcgagcctatgtacgggctttcgtcaggatggctaagccattttatttcggggaaggcgatcgcggatggacagcggacattgagtatctgctgaaggaggacacactcacagcggtccgcgaaggaaaaccaagtctcacagggaggtag

SEQ ID NO: 284019 - DNA, 372 bp, Morganella morganii
atggagacaataccaactggagaggtgggaaatttttacagtgagggcgacgaattacttaataagcccaacaaagagatgttgcctgcaattttatcatcagcaaaagccaatcaaaaacgcgctgaccactttttacgggcaggagcggagtatggtaacgcagggttaatcatcaaggggcacttgcataacattacggccagggcgctatgcggcgtgcttgctttgtatgactgtgactcgtttgaactgggcgatgtagttgtgggtacgcaggactttcttgatgaaatcagcgatatcaacaatttcaatgaaaccataaaaacaatcattaaattcgcgcagttagctggcaatgatgagtga

SEQ ID NO: 284020 - DNA, 267 bp, Morganella morganii
atggaaattgaattacaacaaacgctcaaagctgagttaaaggaaatgcgactctgcatccacgtaagagacggatttacatgtagcctgcacaatcccgatggcggcgagttcgcatcacacgaagggtatgtgcctgatttcttccccggtgagcactatggtgattacctgatactcaatattgatgttgaaaccggacagataaccaactggaagaaacctaccccagaagacatcacgacgatgctcagcgacgacgattaa

SEQ ID NO: 284021 - DNA, 576 bp, Morganella morganii
gtgagcaaggaatttttccagaaaattgctggcatacagcaaaaactcaaggcaccaaagaacctgaataattcatttggtaactactcataccgcagttgtgaagggattcttgaggcggtaaagcccctgcttgatggactggtactcagcatcacggatgatgttgttgctgtcggtgaccggatttatatcaaatcaacggcaacgctgtccgacggagaaaacatacacagtgtatctgcaatggctcgcgaacctgcatcaaaaaagggaatggatgatgctcaagtcactggcgcaacaagctcatatgcgcgtaaatactgcctgaacggactgtttgcaattgatgattccaaggatgctgacaccaatgagcaccggcagcaggaaagcaatttcagcccagaaacagtgcttcatgagttcacagaaagcgccggtaacgctaaaagcgtgaagtcattacagggtgaatttaaaaaggcctggggtttactttccggaacccagcagcaggcgaaagcaaaagaagtctacgacattcgaaaatcagaactggaggccgcataa

SEQ ID NO: 284022 - DNA, 408 bp, Morganella morganii
atggcaattaacgtaattacgggcagcggcaatctcggaaaggattgtgaacaacgatggactccggcagggaaagctgttgcatcgttcagtctgccggttaggcagggatatggcgagcacgaaaagacatcgtgggttatctgcaaaatgttcggcgcgaaagctgaaaaattaccagagcacctgaaaaaaggaatgaaggtgacggttaccggtgagttcgtcatggaagaatggactgaccgtgagggaaataaacggtcaacaccggtgattatcgtgaatcagttggatttcggcggcaatcaggcggtaagtcagaatctgccgcagcagcaacggacacagcaaccaccagtgcaaaatgagccaccaatggatttcgacgacgatatccccttctga

SEQ ID NO: 284023 - DNA, 261 bp, Morganella morganii
atgaaaactgaatatatctatatctgtgctcaggcgtactgcaatgaccagggtagtggcatcgaatattacaccgactatgagcgctttgataatcgaaatgacgccattaaaaacggctggaagcaacgggaatcagacgatttcaatatcggtgttttggttaacggccgccttgtttcggtcgactggatggctaaaccaattgataccgaaccagaaacattacggaaaatcgaagaccagcttgagctgtattaa

SEQ ID NO: 284024 - DNA, 300 bp, Morganella morganii
atggatagcaaaattttaaataaacttcgtaagattaaggaatcatatttagaagaagacggattgcgctctgttcttctagaagacatatcctttattgatgaagtgattaacgaactcgaacggttttataatgtgaaaccggtagcgtttacaatacgtgatgattcagggtatttatatctaaaccggatgacgacacaggaatgtgacgaattgaatcaccagttaaacctattgcagaaatactgccctgaaaaacagtattcaattatcccactttaccgcctagacaaataa

SEQ ID NO: 284025 - DNA, 387 bp, Morganella morganii
atgaacaaatatcgtgacaaatcagactttgagattaattgccaagttctggaaacatttgaaccagatattaaacacatgtgcttaagccatgatgaaaagtcattttatcattgcggctttgatggtaatggattctatgaaactaccattccagactattgcaacaacccagcggacgcaatgccgattgttattgagaataaaataacggtcgcgtatgacaaactgtatgaaacctggtgcgctcatgtagggtctgtaatgagtggtgattgtggctgggattataaaataacgcctgcgcactatgcagacagtgataattattatcgcgccgctatggaagtattcctgatgatgaaggatgcggagaatgaaaaatga

SEQ ID NO: 284026 - DNA, 1161 bp, Morganella morganii
gtgagtcacagcatccgcacgccgcgtcctgacagtgtgttaatccctgtcgccggtctgacgttatttgcgattgcatccggttatctgatgagcctgatcccgttatcgctgggtcattttgccatcggtaccgattacgcaggctggttagccagtgcttactatattggtttattgctcggttcgatgctgattgagccggtaattgcccgtatcggtcaccgccgttcctttattctctttgtgctggcgctggcggcaaccgtggcggttctgccgttttataccgatctcagcgcatggctggcatcccgtatgctggccggggtggcggttgccggtatttttgtggtgattgaatcctggttactgattggcgataacccggctgtccgtgccaaacgtctgagcttctacatgactgcactgtacggcggcaccacactgggtcagctggcgatcggcgtgttcggaaccgcaggtgtcgtgccgtttgcggtggtgatggtgctgctgtttgccgctgtgctgccgccgctgttctccaaagcacaaccggtgtgtcacggcggacataaaagcctatccctgaaacagatcctgcgtctgagcaaaccggcgatggtcggctgtatgacttccggcattgtgatgggcaccatttacgggctgatgccgctggcattgcaggaaaagcattacaataccgaacaggtcggcggcctgatggcggccattatcctcggcgggatgattatccagccggtgatcagcaaattatcttcccgcatgagcaaagtattattgctggcgatggtctcactcgccggggtatttgcgatgggaatgatttatctctccggtcactatctggtgatggtggtggcgctgacactgctggggatgtcttcctttgccctgtatccggtggcaatcacactggcgtgtgacacactcaccgcgaatgtgattgtggcggcaacacaggtgatgctgttctgctacagcgtgggttcggcggcgggcccgctggtggccggacagtttatgaaacagccggacggtattatgagtttcttctttattgtgctgctctccaccgcgatttatatgctgctttctgcggtgcgccgcaaatcccggattctggcaagctga

SEQ ID NO: 284027 - DNA, 447 bp, Morganella morganii
atgacgcagattcggttcgcgccatccccggaaaaaataaaaccattttctttcaaacccgggcagcgggataaccggcaaagcggaaagacgctgacacatccttgttcgcgaaatctgctgaatcatccgttctgtggcaaggcggcaagggaaggattccgggggcctgattctgccacggtgattcggctgataccacgcagaacgaaaagacgctgtcacatccttgttcgctcggatcgcgccatccctggcgctctacgcttttcgtttttctgcgcagcatctgccgtctacataacgtattgtgtaaacagaatattgacctggtttcctgagagcagccaacgccgccacaaaacaaagagacgcgttacgctaaatcattcgctctgtggcaaggcggcaagcgaaggaaaccggggagcatacaatggtatgtga

SEQ ID NO: 284028 - DNA, 237 bp, Morganella morganii
atgaacgaattaatcagcaccaaagcatcaatgaccagtattgatatcgcagagctcgtcggtagtcgtcacgataaggtgaaacaatctattgaacgccttgcagagcgtggaattataactttacccccaatgggggaaaagcccacatccggtcgccctgtaacttattacattttcgaggggggaagaaggaaagcgcgacagcatcattgtagtggcgcaattatcccctga

SEQ ID NO: 284029 - DNA, 222 bp, Morganella morganii
atgaaaatcgaatttatctcaaacggcaacatagccaaggtggtgatccattccttcatcaccgaaaaccggaaactgtatcgcctgatcgatgcagccctgctacgtgaagaagtgcaggagtcaactaccggcttctttttccgggtaacaacgatttacggcaagcagaaccatgtccgccgggcacataagattatctgccgggaggtgtcacgatga

SEQ ID NO: 284030 - DNA, 213 bp, Morganella morganii
atgtctgtttttaaattaatcgccaccacgctcggcgtggcaacggtggcgttagccacgtactgtgcctggcaggctgcggctgaggcggcagacaaagaggatgccacttcagcggaaaaactggcggcagggctcagtgcggcgctggcctgctcagccgtgctgggcggtacccttgaccgccttctgggccggctctttccccgctga

SEQ ID NO: 284031 - DNA, 234 bp, Morganella morganii
atgaatacattattcagtaaggtattactggcagcggtgatgactttcgtcatccacgggagtgtgcttgcggagaatacaccgaaaccgccggtaacagcacaggtgaatgaggctgattttcagcatcactatacggatgtggcggggcagcggatacattatgtgacggcgggaaaaggcgagccggtgttgctgatcccgggctattccgcagaccatcgcgcagaataa

SEQ ID NO: 284032 - DNA, 2034 bp, Morganella morganii
atgaataggcgaagtgctatatttaaattaactacaggggctttagcttcaatatttggggctaaagcctttgcttttagcaaggccaaaagtatgactccaaatgttgtagtatccatgcctaatcagttgttcacacttgcacgcaaatttcaggcactaagtaacgggcgtgttttcattggtaaaattgacaccgaccccactatcccggaaaaccaaattcaggtgtatctggaaaatgaggacggaaccactgtaccggtgtcgcagccgctgatcatcaatcaggccggttatcctgtatataacgggcagattgccaaattcgttaccgtgcaaggccactcgatggctgtgtatgattcatacggtgcgcggcagttctattatcctaatgtgctgaagtatgaccccgatcagtttgagcagagatttagatctgagttattatcaaatgaaggagcttccttgattggtacctcaaacggggaaacggtagaggaaagaataagcggcattgaggaaagcacatctgaaagcataaaatctattagtttctataaaaagaatactgccgcaacattaaagaacagacttgctgacggtggaaacttaaaaattgaatgttacggcgacagtacaatgtacggatctaccgccaatgatacaactgttcaaaaccctgtgaatatgccagctatattacaggtaaccatgaatcagatatatggcggtggcagggtaacagtattgaataaggctattcctggaacagcgctggttgcaatgattgccgggacagatggtagcggtagtactttcgatgagaaaatgaaaaatagtgatgcagacattgtttactgcaatcatgctcaaaatgattgtaactctttctggagaaacgctgaagaatttaaaggcgacgtagttacatttgtgaatactgttagaaaatacggtaaggtgcctgttttggtaaccccaaacgtaacgtttatccttggtgggataacggataaaatgacaatgcgtttaccagcatttgttgatgtgatccgctccgtgtcaaaatcaatgaatgttgatattgttgataatttctattacacaagcaaggcaacaagattactcagtggatcggaaattgtacctgacggagttcacctcagcactgtgatggcctatcagtgcggagcaaatttatccattcctctgatagcagcaaaaactctatcaatgccaggggatttaaccggactgagtaatgtaacttataatcatgatattacatcaggtttaaatatagggaatatagataatattttctctaaacagatttcatggaaggcagagagcaaacagcaggggatttggttcccgtttattcttgataacccaactgatgatactacattatcaatatcagggtatcagtgggcagacggagggaaaacgattatagagtataaagggtcttttgatgatgagatgcttggcgggtggtttaatcaaaaaagagaagatattgcagaccctatagcgacatactcaccaaatagatgccgacttctcccaggtcttcatgtattacggttggttaaccactctggtaatgacggggtttacagcagtttttcaggtgttaagttaattagaagaaatcaattggcaatgtctggtgatcgttcggtgcttattaatgcaggcactaaaatttcagccaacatttacgtggtatcagataatattattcaggattcagtaattgaggttcgcgctgcgaatggaaaccagcaaaatgtaatgatttataatgacaaaggtgttatttctataattaactcagattcagtaaaaactgaaattggcagtttcaatacaggaatgcacaagttagacattgcattaaacagcgataaaacaataacagcttcacttgatggaacggtagtcacatcgccagcaacattatctccagtatcaacttgttttataagtaaaagcaataacacatcaattgtgtcatcgtaa

SEQ ID NO: 284033 - DNA, 420 bp, Morganella morganii
atgaatgagcaggctgaaaaggtgctggtcgatttattggaaaaagtatcagacggaattgattcgacgactgtctttagtcagtctcaactgcctgacgttatcaaccaactactgacatggaatatggtgttgggggtgttttgttttgtcatcggaatatgctgtctttcgcttggggtatacatcccatcctgggctggcaaagcaagggctagaggggagtcatggacatttcatgataaagataagagatataacattacctctggtacatatgatgcctgccgctccctggctccggtagtatttattttatttggcctgcttatggctgtggggggagcaatagaatttctaaaaatacttttagttcctaagctatatctaattgaatacgcagcgtctcttatcaaataa

SEQ ID NO: 284034 - DNA, 807 bp, Morganella morganii
atggcgaaaaggccaaaaccgtgcttactggatcaaaatttactattgcgaaatcttgttctggaaaagctggagatgaaatggtctccagagcaaatatcaggatggttaaggcgaacaaagccacgtcaaaaaacgctgcgaatatcacctgagacaatttataaaacgctgtactttcgtagccgtgaagcgctacaccacctgaatatacagcatctgcgacggtcacatagccttcgccatggtaggcgtcatacccggaaaggcgaaagaggtacgattaacatagtgaacggaacaccaattcacgaacgttcccgaaatatcgataacagacgctctctggggcattgggagggcgatttagtctcaggtacaaaaaactctcatatagccacacttgtagaccgaaaatcacgttatacgatcatccttagactcaggggcaaagattctgtctcagtaaatcaggctcttaccgacaaattcctgagtttaccgtcagaactcagaaaatcactgacatgggacagagggatggaactagccagacatctagaatttactgtcagcaccggcgttaaagtttacttctgcgatcctcagagtccttggcagcggggaacaaatgagaacacaaatgggctaattcggcagtactttcctaaaaagacatgtcttgcccaatatactcaacatgaactagatctggttgccgctcagctaaacagcagaccgagaaagacactgaagttcaaaacaccgaaagagataattgaaaggggtgttgcattgacagattga

SEQ ID NO: 284035 - DNA, 222 bp, Morganella morganii
atgaaagccatgtgccgggtgcttcgggttgcccgcagcggctggtatgcctggcgcctgcgtcgccatcaactgaatcaccggcagcagttccggttaatttgtgatgccgcagtcctccgggccttcgctgaagcaaaacagcggtatggtgcaccgcgactggcggatgaactgccggaatacaacattaaaaccattgctggcagactgcgtcgttag

SEQ ID NO: 284036 - DNA, 837 bp, Morganella morganii
atgacccgtttagcctcccgcttcggcagggcgaatatcattcgtcgtgaccgcccgttaaccaccgaagaattatactgcaccgtacccagtgtcttttcagcagaaaaacatgaatcccgcagtgaccgttatacctatattcccaccattaccctgcttgagagcctgcagaaagaaggcttttatccgttctttgcctgtcagacccgtgtccgcgatgacagccgccgggagcacaccaaacatatgctgcgccttcgccgtcataaccagatcaccggcgtgcaggtaccggaaattattctgttaaacagccacgacggtaccagcagttatcagatgctgccggggttattccgtgctgtctgtcagaacgggctggtctgcggtgatacctttggtgaagtacgtgtacctcataaaggtaatgtcgtcgataaagtgattgaaggggcatatgaagtactggaaacgtttgatgcggtggctgaaaaacgggaacagatgcagtcgctgttgttaccaccaccggcacagcaggcgctggcgcatgccgctatcacgtaccggttcggggatgaccaccagccggtcacggaagagcaggtgctgcaaccccgccggtgggaagataagaaggatgacctgtggacggtgtaccagcgtttgcaggagaacctgattaaaggcggactgtccggacgtaccactaaggggaaacgatcacgtaccagagcagtgaccgctattgatggtgatatccgtctgaataaagcgttatgggtgatgacagagaaaatgtatgagcatttcggaagccgtcaaccaatctga

SEQ ID NO: 284037 - DNA, 2832 bp, Morganella morganii
atgactgaaaaatatagccagcatgaggttaaaggccataattttatatctgatccttattttgaagaatggggtaatggtgattgggaaaaaggtgaacccaataaatatacaaagaaaaaagacggcgacagaacctatctctttatcagcggtaaaggcagtgtttcacaatctgttatttttccgaaaaaaagttccggaaagtcagatgagccgcctttttattcactgacctttgattactcagttaaaaataaagcttctgtttcattaattctgatatatctgagcggggagaatgagcgggataaaaaagaaatcccgctgccggatgaaaaagagtggtctccgtatgaagtattgcttgatgtatccccggaagatactgaaatcaggcttaagttctatgccgggaaatcagcagggaataaagggattaacctgaccgccgttgatatgcaattgcatatcggtggattgagtcctgaatccattgtgtttgataatcaaaatattccggcagataaacctattctgcgttttaattacggacgcaaacacgtgcttaatatcaaaccagccgctggcagtgcatggtgtgatcttggctgcgcgctgaagtggggcagtgatattccggcatctaactatccgatcagttttatgcctgagctgaacactgcacagccgttgaataaagaaggcagcatctgggaaattacctgttccgcacaaaagatcggtaatattccggaaacattcagcgtaatgctggcatcggaatacagctcagtaccttttattttcgatgctgaaataggtgattatctctataaatttacggatccgaaaatcagcgggattgcggtaattgcgcagaaggtaccggctgaaatcagtattcgtgttgtcggtgactatgataaagagtatccggatatgccgggcgtgcctgatgttgatgttcgctgggaaattgacggcggagagattatcagtacgactaaaacagatactgatggtacggctgctcttacgtttttaccggaaaaaagcggggattataaacttgttgcattaataatggataaagcagggcgagaaagccgctatcagtttgacattaccgtttatgagcgttcgccgtggctggatgatatccggattgctgtcaacaatgccgatgttgacctgtcaggagaagccggatatctgatgaacggagaggttactgttcttcacctgacgtgtgataaaaaccgcaatattttcggccgggttaaactcgacaataaagagggaaatacaggtgtcagtatcacaccggcggaaggccgtgaaattccgccggaaggattgtcatgggatatcaatatcacaggcagcgacagcagagaactgacatttttattaaccagcgatcagttcggtatatcgcaggaaatccatgttattgcattacagaatgataccggaaaagaaattcagtcactgaaaattaatggcaaagtaccggcagagcttagtcaattatgtgccggtccgtcagaaagtatgatactgagttgtactgtcaataaattattgtcccgcttacaggtggagctgagcagtaaagacagtaaattactggcagcagaaccggctttcggacaattacagcctctgaaaaataatacagcggaatgggaattacacagtatcaacccgcaggggggcttctttgatcttgcactgaatatctcgccaatgaccctgccgctggtactctccggtcgtgtattgccgcaggaaatcgcatcagggattgaaaatattaccctgaataatgcaccggtaaccgctcaaggggatctcttacttgcgccggacaacatatatacgctgacaataaaaccgcatccgttgctgaaggatattccggtttcattggtctctgagaccggtgacggtgttgcggttatcagcaatccgccgtttggtcaggaagtcagtctggcagaaaacgggtcttcatggcagatctctgctgatcctgcctccgcacgcgggaaattctcactgcaaattcagggtcagtggggcggaaaaccggttaatctggacggcgttatattgtcttctgatctcagggatgaaggacttattcaggtcactgatggtgatatgggcgaaaaatacgatattgattttaatgtcggttttgcttttcaggcttttgagatttataagctgagcctgaaactcttgccggataatttaatcagcggacaagccgttttatggaaattgccggaggaggatgaacatcgggatagtgtttcattttctccggaagaagcaatagtattagaaccagacgatactgattgggagttcagctatgaagaagaagataatgcttattttcctgtgttattaagcagggagtgtttttttagttataaaatcccgtgccatatttttagtaatgaaaattacctggaaaacagccggtctgtttttatgtcaaacggtgtgggtattattcccggaggggagtataacgatgttgaatataagaaagatatattatttagcatagatttaatgacggaggctgcagaatttctggatgggatggagctggcattaatcgttcatacgatggatgctgagggtgataggcttattgtaacatcggataaaaccatcactattgataaaagtaaattacgttataaatggacagttgaaactgatgtggcgaccggtaaccggtttacactgactgttgttttacaaaatttaaaaagtatccgatctgtttttaaatttatctcagtgtaa

SEQ ID NO: 284038 - DNA, 4509 bp, Morganella morganii
atgcctcgtaatgtaaaacagattttaaatcatctcgccgagaaaaaacgggatgcgtatgttgattatttcactaactatatagtgggtgagaatgaaaatacagcaatgctcggaattactgatgcagatgacctgtatgattattttttgacggatgtgaaaacgaatgctgactttgaaaccagctatgtctcagatgcactggccagtattcagcagtatatcaacaatatttttgatcagaaagagccgggttactccggtgaattcagtgaggatgttcagcagttgtggtccggttatttcgggcatatttcactgtggaaagcctatcagaaaatggaggattacccggaagactataatatacctgattatgtcactgacaaaacaaaattattcagtgactttaccgcagacctgggaagtaacagcctgaatgatgccggaatacaaacagcatttctcaaatatctgcgcaattatgaagcagttaatgcgatcagtgttatctccggctatattgattattctgggggacgaaacgatacaaagacattcgcaggacatggctttctgaattctgactactattttatcggtaaaaacaattcatcacccgccggtttttactggcgtgaggctaatataagagtagataaatcctccggttatatttctccgcgggcatggcatgaatggcagccacttgttatcactgaagatgcaaaagatattttacaaatgcggattgtcaaagtgagcggatgtctttttattgtttacctgacggggaaggaagaggcggttgcggataaagaaaaaacagcggaagaaagccggagtgaaaataaaaaacaatataaggtcacgctgaaattaagcaggatgggactggacgaaaaatgggatgttcctgaacagttatatgaaaaaatatacgaaagtaagactgagggaaatccggatgcatttaagttaatatccgttgcatttactcaggatgaacaacgggatgattatctggttattacatggctggatggtcagggaaaaactattttttccgatgtattgaatgtgctcagacaaaaatcagcaactaacagttcagatatcctcgggaatgaatgggagattgcattaacaacccgattttttaatcccattgagacctgtcagcaccgtatctttggcgttaaaaatgatataaaaaatatcagttgtactaatactaatccttatttatccctggaggcattctattgccgcagaggtgaccgtcatcagctacgggtcagggggaattgccatcgttccgctaaaataccgaatcttgtttcgcttaacctgcaggctatcgtcagtgaatggcggaatggtcgtattattgtcagcggcgagcgggataacgttacggtcagagcagaggcaactgaaggggcggattatttagcattgtccctgcctgaaggtaaaaacgcagttatttttgataagagtgattttactgagcataacggctggctctcagcagagaagaaaatatcactttctcagcagcagtgtgatctgatagcggaaaaaaattataaagaaatacgcagtggtgccggtttttcttatcagatagcgtccgggggatctgtacactcactggcgcacgttaaaaacagtgtcagtacggtgatggaacccgttacggtctctgccgggctttctgtttttgatgacagtcttcagaatctgaaaaaagaagactggaaaggtgagctgatttatcagaagggcagtcatacaccgtggtgtactttcagctggaacggagatatggctgaaacctatgatgtacgttttaaattcgggctggcagatgaaagcgtcaagggtgaatttacggttgcaatcggatcgttatcaaaagatattccttacattgaaacgttttcagaacatcagcagtttttgaaatttaatcaatcgggcgcgacacttaaacatgttcgtcttaactctgttcaggttcgtgatcttatctatcgtgctcagattgcagtcagacatatttttgactgggatgcacaaattacggaagagccgggatatggcgacgataaaaaagagacacttgatttatacggcgctaacagccgctatttatgggaactgtttttttatttaccgtatctggtagcaaatcgtttttcacaaaaccggctttattatcaggcccgtcagtggctgcactatattttctcaccttatgacggacaccgtttatctgtaaaagatggcagcgaattattacctcagccatattggaattgccgtgtattgacacaacctgatctgaaatatcagaataatgataatgcattacccgatcctttcacgatatccgaagatgcgccttctcattatcgtaaatcagtctatttaatgtatgtcgataccctgatttctgaggcggatttatattaccgccagctcagccgtgacagcattacccgggcctggggattatatcaccaggctcagggaatgctgggccgtataccaaaggaacgcagtttacctaaatggcagccatgtaccgtcagcgagctgctggataatgaaacggatactgtacaggaaaatacctttactgaattatgctcagggatatatccggaaaatatccccaaacagctcagcggcttttgctggtacggcagcctgggcaatgcgcgattccgtctgccggtacagagcagtttactgggcagacaatcagttttagatcagcgcttatttaatttgcgtcattatctcgatattgaaggcaatatgatgcaattgccattatatgctgctgcatttgatccgtttgatctgctgcgttcccggctgggcggtacttctgaactgacgtatttacagtcagggtcattaagtattccgtcctgttgtttccgggtcatgctggaaaaagcaaaagaacaggcagcggcgctgattacattaggggataaacgtctcagttattacgagcagaaagaacgctatcacaccgaaagtatgcaattaaaggatgccactgagattgcacaaatcagtattgatattcagaaacagctgcaaagtcagcaaaatgccacactgaactccctgaaagccgccaaaacgatggcggagaacaaacaaaaacattacgaccaattggcgaaagacggtacgagtgcaaaagaatgcagggcccggaatctgttgttgggttcatccctgttccagggggttattgcgggagctgcgactgccgcaggtattgtggcggcggttccgcgtatatatggtgtggcgcaggataccggtgatcacggggtacaagcattgggaggcgtggggtttgtggcagctttcagtgcggatatgatgcgcggtacttcggactatattcagctggatgaacagtaccggcgtcgtcaggaagaatgggatttttctgctgcacaggcaaaaaatgaagttacggtactggatgcacaaataaaagcccaggaagtggcagtcaccgccgctgaaagcagtgttaaatatacagaatcgattcataaccaggcaaaagcgctgtatgactatttcagccagacccgccaggttaatgaaagtctgtacgaaaaaatggtccttattatcgggtcattgcatgaccagttatgttcactggtcagaacattttgtgcattaacagaagcatcctggcgttatgaaacagatgactataaacgacagacgtttattccggctgacctgtggagtgatgataatttaggtgttctggttggtattaaattacagaaagcactgctggaaatggaaatggcgtatacacagcaaaatacacgccgcctgaatatcacaaaaacgatttcactgaaatcactggtcagtaacaatcaggttaaaacagatgaaacaccgctgacaacatgggatgacgttaaagcagcgttaaaaggcgcgaaaaaactgtcatttgatttttcccaccaattctttgatacggatttcccggggcattatgcccggaaaattcactctctgtccgtaacgtttccgacattattaccgccatatcagaatatgcgggtattgctggagcaaacatcgaataccttattggtttcaccggatattgacgcagttaaatcactctatacaccaactgaacagataaacagtgaatccattatccgcaatctgcggataaaccagaaaattatactgtcccgcggcagtgatgacagcggcgaatttccggaggatagcttcgccggcgggcaataccacagctttgaacatacaggtgctgtttcacactggcggttatccgttccacggccgcaaaattgcccggaactgattgataatcttaatgacattattattaagcttaattatacagcgaagagtggtgatgatgtatttgaaacggcagtaaatgaattgctggaaaataattaa

SEQ ID NO: 284039 - DNA, 693 bp, Morganella morganii
atggaaagcctggcacagcaggatgtatcactgtacagcaatgatgaatccagtcagggtgatctgactgtcagtgtttcagctgcacggacaacactgctggtttacagtgaaaatcaaaaagaagaagaggtcgctgaggatgaaacacaactgacggtgaccttacagacgctggaaagtatgccgctggagggaattccggttatatgggaaaaaatatctgaacagggtgaattatccggaacagaaagtaaaaccgataaatcaggccgggcatcggtgatattaaaagcggggatacagcaaggggttgcattagttaaagcacattatggtgtgaagagtattccgttaccgctggtcaggattgactgtgatatcacgacactgggtgcaaccggtgttcagactgtaccggaaaacccggttgatatcccggctgacggaaaaacacaggtcaaaattaccgcatttttccgcgacagctatgacaacccgggaattgataagactattcgctgggaaacaaccggaggccgttttatttacaagggtgccatcacagatattaacggagattgttctgccatcctggtcagtgatgagccggccgatattacggtacgtgtattctatgaggatataccggaagaatacactgaagttgatatctcttttatttcagcatag

SEQ ID NO: 284040 - DNA, 3135 bp, Morganella morganii
atgttttcagacaaagaaaaaaataatgagtatgctgaatggttgaggatctgtaataataaagaatggtatgactgtgcagtcagttattctatagcgagaattaatcctgtaatagttatggatgacgggaatatagctgattcagttgtgtttctttttaatgaaacgaattctgtttactctgcatttttatatacttttaattccaagaaaagagtttctttaaatttatcaggtgtgactagtgttaaagtgatgtcctctgacagttacataaaaaatgaaatagaagagcttcatttaggtagtcctatcaaaacaaatgatattgtttccatcaatgattttttggatagaagcccatcattggaaaacgtaaagatatcagtgcaatgtggtgataatcctgtaacagtatatagtgaaaatgaatggtgtgacggtaagtactatcaaaatagtacagaggaatattatccatataagaaaaaatctgtgagtatttttcttggggctgaagaaattaaatcatttgacaagaaaccaatcaaagtctcagttcaggggagttccaagcttgaagatgtttttgttttaacgcgagagtttattatcaatgttaatgatgaaaatgatactccgtttgatatcaagaaaaataagcaaggtgcgcagtatattaaggtaaatgatcctgctgattcgagaatcagacttaatactttattcgcaagtaaacttgtttctttagctgaacaaggtattgaatatatattcagactgagtagtcaaggggtatttgagccggatattaacagtgagagtgtatctaaaaaagtaaaaatggactttaacggcgccaatgcactctatttttgggagctgttctattatgcacccatgatgattactgatattttacttcagcatcaaagttacaatgaagcagaacgctggttacagtatatttttaatcctgccggctatattgaggatgatatatacacaaaacggtactggaatgtcagaccgctggaggaggatatgcaatggaatgagtcactgccggatgataccgaccctgatgcaatagcactggcagacccgatgcattataaaatggccacatttatgaagacactggagctgattattgccagaggagataaggcttatcgtgaactggagcgggattctctgaatgaagctaaatcctggtatatacaggccttatcgctgctcggagaagatcaggttacattactgaataaaaactggtcttcccctagcctggaggaggctgcaaataagacagttcagtcaacaatacaacgtttattaatgcaggtaaataatcagggcgatccatcagttatctccgtaaacagtgctaatacgctggctaacctttttaaacctcagttaaatgagaaacttatctcctgcagaaacacgataaaccagcgactttttaatttacgtaacggactgtctattaatggtcagcgcctttatttaccaatattttcatcaccggcagatccgcggaatatgctggagtcacaggtcaataatataaatagtgaaaaagaatttacaaataaaaacgcgttaatgtatcgttttccggtagttatcgaaaatgcaaagaccctggtgtctcagttgattgagtttggtgataaactactgagttttaatgaaagcagggatgatgagcagttttatgaattaattattcgtcagggagataacttgttttcacaaagcatcaggctccaggatatggaaattaataatcttctggcagaaaaaaaatcattattggcccggcagactgaaattattaaccggtacactcactatagtcagttatattctgagggaatatcagatgctgaaaaagcagtaatggctctggatgggtattcagcggcaatgctggcttctgcctcaataattgaagggggtggtaagtatttggatctcccgccaaatatattcggtgtagcgtcaggtggtatgcaatggagtgcaccctctgaggctacagccaaacttattgaagggggggggttatatatacagatgattgcagatgttgttgaaaaaagtgaggaatatcgcaggcgatcacaggagtggcagctggaatcagaatcagccgaagaagaaaaaaaacaaattgccgcagagctggaagcaatggatatccaaataaccgcagcgaagatgcagaaacgttatattacgacagagcagcggcaaaaccagcagcaattacagtttttacagcgaaaatttacccgcgctgaattatacggctggctgcgcggccggctgatggccatttattctcctttttacgatctggcggtttcacgctgctttatggcagagagtgcctatcgctatgagatgaatattaatgcggcagaccgttcatttattaacacctcggcatggaagggggcatattccgggctgatagccggtgaaagtctgatgctgaatctggctcagttggaagaggcctatctggaaaaagataaacgggttctggaaatcacccgtaccgtctcactggctgaggtgtacagctctgagagaatgggtgatagaaaattcagcttttctgatgtcacagagctggtcagtcagggagaactgaaaaaaataggcactgaaaataactatgttgagttgagtaagagtaaagatcagaccagcaataaggagctacaggcggttattcagttgaacgaactggatatttatgcggattatcctcagagtttaggcgttcaccggctgattatgcaaatcagtgtgaccttacctgcgcttattgaaccctatcagaatgtccgtgcgctgcttgaatatgaaggtgaaggcgataaccaattgccggaggggtgcaaatcaatcgcggtctcccacggcatgaatgacagcggtctttttcacctgcaattcggggacagtacttatctgccgtttgagggactgtcagtcagcagtaacggtaaatttaaactgcggttttttgatgtcggcggcggggaccagaaacggttattacagaccctgactgatatcgtgcttcatatccgttacaccatttactga

SEQ ID NO: 284041 - DNA, 2343 bp, Morganella morganii
atgattaaagtcgccctcgcgggtcagcctaactgtgggaaatccactatatttaccatgttaagtggcattaatcagcatgtagctaattaccctggggtaactattgataaaaaggtaggttatttcaaagctggtcatgaacatgaaaaagttcagcttgtagatctaccaggaacctattcgtttaactcattctcgttagaggagcgagtaaccaaaaattatcttattaaagagtctcccgatattatcattaatgttgttgatgcttcatgcttaaagcgcagtcttccgtttacatttgagcttcttgaagcaggcaaacccgttattttagtattgaacatgattgatgtggcaaaaagacggggtttaaaaattgatattgaagcacttagcagtgagcttggaatacaggttatagcgacaaacggattaaaagggcaagggaaaaaagaagtcacagcggcgataataaatcaaagtaagtgtacgaacgcacaaacttcattaaaaatagattatcctcgtttagaaaccgtcatttcgacgctggcctctaaattggatgagtcatcattatcgggacgctggatttctttaaaggctcttggtggagatagtgacactctatctctaatttcatccaataaagatgcaatgaagattattaatgatttccggcgtgacgcaaatagtcctgatgttgagttgattatcgcaacagaacgaagaaaactatcagccagactttatgaactggttgtaaatgaaagcgaaaataaaaaaacatattcagatatgattgataaagtcatactgaatcgatggtgttcatttgctattttattattcgtaatatatgtaacatacgaattatctattgttaaaggttatgagctaacaaactatacgtggccataccttgcaaaacttaaaaattttattttttcaatgctaccatctcctgagtttataacgacaccactaataacagaatttggtgtttggttgataaacagtgctatggctctgcttaattacattcctatatttgtaatattatttgcattaattgcaataatggaagatataggctacatgcctcgtattgcatttattcttgatcgtattttcaggcattacggattacacggacagtccacccttccattagtattaggtggagcatttgttggtggctgcgcagtgccaggtataatggcgacaaagggaattgcagatgagcgggcgagaattgcaacagccttaactgtaccatacatgaactgccttgccaaagttcccttctacacattaattttgggtgctttttttgccgttgatatgacgttagttatgttttttatttccactgtaactatattcatagcccttagtatggcgcgattattaacatctacttttttgaaacagaaggaaacttcaccgtttataatggcattgccagcatataattttcctaattttaaaaatgtagcctttcaggtaatgcaaaaaatctggctttatatttataaagtcggaaccattgtaatggctgtcgccgttgtattattcgttttacttcaataccctggtgtttctgaaaaggcacaggaaagaattaatagtaaggccatgacagcattagaacatttccataagcaagtagaactgacgccttttaaagatgagttggcttcaaatgaagctgtctttgccttgctgaatttatataacacttaccgctctgaacgaatggtggcatcatccgatgatatcattaatatggaaaaaaaatactccgaggaaaaccctgtattatttaaatttgtaaaaccttctgacagtgatgagcggaagattaataaagctgtgcgtaatttatcgaagcaggctcagttattgcagaatgaaattaaaaatgaaagagtatctaattcatttttaggtatatttggtagagccattgagcctgtaacgcagttcgcaggatttgactggagaataaacgttgcatttctgagttcatttgcagcaagagaaagcgctgttgcaacgattggttctatatatacatcaggtcaggatgagcgggtggaaaaatcactggagaatgacggctattatacgccgttacatgcagcagcaatgttgatttttatgatattcacaccaccatgtattgcttcaatggttgttgttaaactgaatgttaattcatataaattaatgtttcttgctatgctgatgccttttgcaatcggaataataatagcttctgcattctttatgaccggaatgaggttgaattgtctcacctttcgccaaagctga

SEQ ID NO: 284042 - DNA, 249 bp, Morganella morganii
atggtgcaactaaaaaaacaaacactagaaaatataactcgcaataagccaagcgttatatgctctgtaaattgccctgatcataaactcaggaataaactattcaatatggggtttattcccggagagacagttgaagttattcgctctgcccctcttcttgatccgatggaagtaaaattattaggttatcatgttgtattacgaaaagatgaagcctgcatgatagaggtcgaatacgatgattaa

SEQ ID NO: 284043 - DNA, 1086 bp, Morganella morganii
atgaaattaaataaaatactgaattgcatgttagccgcactgctgattaccccttttgccggtattgcctgttcaagtctggcgattacggacagccagaatcaggtttatcagggcagaacgctggaattatctgaatcactaccttcatggataacgtattaccccaaaaatactgtttttcagaaaaaaacaccggatggtaaaaacgggatccgttatcagtctgagtacgaaattttggctgtttcgacagatatttactttgatggtgatgaccacaatatttttcaggggcttaacagcggaggactctctttcagcgccaatatgatggatgaagctgagctgctgccgctcaaaccggctgactatgataaggcgatcccggttaccgcactcggagagtgggcgctcgctaatttctcagacgtcggggaagttaaaaaagcggtcagtgaaggttatttctgggctccggaattaaaaaatttcggcaacctgaaatcacctttccactatgcattttatgacaaaaatggcggtagtattgtggtggaagccagtgaaggaaagctgcatgtttatgataacccgaccaggattatgaccaacggacccgattttccgtggcatctgaaaaatctcaacaattatacacaactgactaatgtggatcgctcggtggcaacactgggtaacattaaggtatcgcagccggacagtggtattgcaacatctgctttgccttcatctgatacttcagtgggacgttttatccggggggtttattattcaacttatgctcagaaagccggcaactcttctgaggctatgaatacactggcacatattatgaaccgtttcgatcgtactaaagatattaccgccgatacgatgactgagagtggcgatagtgccggaattgtcacgtctgaatacacggtctggaccagtctgtctgatttgagtaatggcgtaatgatggtcagaggctataaggatattaactatacgtcctattcatttgaacaatttaaaggtacagacaaaccggtctttaagaaaatcaatgtgagtaattga

SEQ ID NO: 284044 - DNA, 435 bp, Morganella morganii
atgcctagtaagtttttaatcatcattctgtgtcttgtatctttttttgcgcgatcggattcattattaattagcttaagctgcgttactgaatctgatttcaatagcgataaaaacatacacggggtagtgatgattgaagtgaaatcgtcagacgaaggtattggatatgcaacaactaaaaccctatcaaatggtggagatattaagccgggaatgacttactttaaggcatcaagccgtaatgacttcgtattatttagcacacggcaaaacccagatgacctaggtaaggatgctgatttccttggccttagtctcaacaatcaaggttcagatgacatgccgatatacggagttgtaattggtcgtggacatgattccataagcaaatataacgaaaaatatttttgctttcccccaaaagaattgtaa

SEQ ID NO: 284045 - DNA, 537 bp, Morganella morganii
atggataatattgaagacaacattccgtttggtatacagcagttccttgattctgaaagcgacgggaagatttggctaaatagtattccggttgtgaactcgttgttgaatgatttgcagcgcgttgcgtggcatgcgggcattcagctggcaaaaaatgaaataacagcagacaaaagtcagtatttagtgaacgccaaaatcagcgaactggtacagatttttgagggccgggattccacctataccgttctgccgtggaatattgatccgcatcagatgaaagaatatattataaaacagatcgactactggggagacgatgcagaccttacctatgatgatgtcctgccaagattactcgattgctgtgctgctccggcaatttttggcgttaagtcgctgttgcctgattgcccaaagatatttcgtcaaaaccaaaagcaggttctcgcggacctgtctaagcagcgctatctggctggtgcactcctgatggggataccagcagaattgtttacccagatggcggaatga

SEQ ID NO: 284046 - DNA, 1173 bp, Morganella morganii
atgagtgagctgagttatctggaaacgctcctggacggggctgaggttgagtggaaaccattggccgatgtttgcagatttataaacggcagagcttataaacaagaggagttgttgtccaaggggaaataccctgttttaagagtgggtaatttcttttccaaccagagttggtattactcagatttggagttaagcccagacaaatattgtaataacggagatcttctatatgcttggtctgcgtcttttgggcctcgaatttggaaagatggtaaatctatttatcattatcatatctggaaagtaattccggactctaggcttatttgtaagcaatttttgtattatctattacagtgggatactaaagcgctgcaaggttcacatagtacaggttccacaatgatgcacgttagcaaaacctcgattgagaagagattagtccctatcccatgccccaacaaccctgaaaaatccctggcaatccagtctgaaatcgtccggatactggatgcatttaccgcacttaccgctgagcttaccgatgagcttaccgcacgtaagaaacaatacaactactatcgtgatcagttgctgagttttaaagatggagaggttgagtggaaagctttagggaaggtagttgatattaatactggttcaaaaccaccggaaatttatgaaaatgtgacagactatgattacatcaatgctggaacatccagatccggatatagcgaagaaagtaattgttcaggggataccgtgactaccccttcccgagggcagggaggaattggttatgtcggatatcaaaaagaaccattttggttaggccctttatgctataagtttcgagcaatagatgaagccattcttgttaataagtatcttttttatttttttcaatcaagaaatgatctgctgttaagcttgaagaaagcaggcggtgtgcccgctgtcaacaagtctgacctggcaaaattaaaaatacctataccatcactaattaaacaacagaaaattgtagatgttctcgacaatttttatactctaatcacatctgtaaccgaaggcttaccctgtgaaatcgaattacgccaaaagcagtacgaatattaccgtgacttactgttcagctttccgaaaccggaatctgtgaacaactga

SEQ ID NO: 284047 - DNA, 567 bp, Morganella morganii
atgaaaatgaaacttaaccctgagttaaaaaaaataataaaacaccaacaatccaaactctttgaaagctactctaaaatactcatggtaagaacggattttcactggtctgctggtactgaccgatataaatatggcgatgaacatcaattcagttttgaactcagtatggtcatgctacgaatatctgaagacccgagtgtaataggttactgctgggcattagaagagggattagaccgaggattacatgcacatgccattctttacgtgaatggtcagcagcatcgaaaaaagtggcctttttatatcgaacaggaacgtctgtgggacgaggtaacgcaaggcgaggggcatgttcatcgttgcattgataatcgcggctaccgctattctatacgttatcccatccaccattctgatacccgtggacaaaaagccatgcgctacgttgccaattacttagccaaagacgagcagaaaccttttggactggtttacgggatctcttgcttaccgaaatctgataatcaggtttccggtcgtccccgttctcgttatcgataa

SEQ ID NO: 284048 - DNA, 369 bp, Morganella morganii
atgaaagaggctttagcgttggtgttgtttgcattatctgcggctgccacagcagatacctttgaatgtgatgcggtatctcagcttaatcgccctgcgccccatggtgctcgttccgtactgcctatcacctttgaattcagcaaatacggcgcgtttgagcaagacagtaataatgggtctgagatccgctatggcgaagcggaatatgacggtatcgggtattatcatacctctgaggatggacgggttaatctgcgtcaggaagtcgatcccagtaacaaccgtccgattattattgcctataccgttggaactgaccatgcgatggtttacagcaactgtaaacttactgtccgagaagagtaa

SEQ ID NO: 284049 - DNA, 573 bp, Morganella morganii
atgaacacttacaacctaaatgaactggaactcggtatcgctgaattacctgatggccgcctgacaaatgcgtttaaagagcaggagcgttggcaaccggcactgccattaccctttaactgtccacactgccacttaccggtgtatttgaaccgacgtaaacgctattttttctttgcacatcccgttgataatgaatacctcggctgccctgaagtcaaagcggctatcagctatctgacgcgacaatcccaacaggctgagcaattcatgggacttgagtcactcaaacccataacggagtggtattgcgtctggtgccaacggttctacaccagcccacatcgcccggtcaggaagtgctgtccgaagtgtaaggaggggatttacagcataccgacttataaggtcaccgaagaccacaactattttcattacgggatgaataatcagcgtaccgaacctttggaacacattccgctgttacggttgacgaggcctgctgagcgagatgttgtcgatgaggagaaagaaaaaaatacagcagcccgttattgtctgaaggacgactga

SEQ ID NO: 284050 - DNA, 195 bp, Morganella morganii
atgagtgagcaaataatgaccgtcaaggatgttgcgtcgtatcttaagctcaatgagcgtactgtctatcgtatggccacagcagcaaagatcccagcgttcaaagtgggaacctcgtggcgttttaagaaagaagagatagatacctggataacacagcaacataaccaaatatcaagtaataaagagagctaa

SEQ ID NO: 284051 - DNA, 2682 bp, Morganella morganii
atgttgggactgaagttacgtgaggagttttccggtcgtcgtatcaaaggaacgatgatcgaaatgcataaccggaatggcacgggtgcgctggataagtctgcaagtgaatttctgaagatcacttacccttcaatcgacatgctcaaaactgtggaagctgtacaagcaggcagggctgagcctgttgtaattatcggtgcgcgaggccaaggtaaatcacatcttatggccgcgctgtcacatatgcatcaggataagaatgcaacagtaaactggttgaatgactggtctgaccgacttaaaaatcctgacattgcaggccttaagttacagtatggcatgcatgtcattaccgaaagcttgcatttgcaacgctataaacatgtatgggatgttctgttcgatcagcatccacatggcaatatcatcaaagccaagtgggaggtacacggtactgaggtgccgggttatgacctgattctggagatggcagaaaataaaccattcatccttattctggatgagttccagacatggtttgaaggcttaacaaactccagccagtacaaacgcaaggcatgggcgtttaactttattcaaattctttccgaaatatctgaaaagtatcctgagcttctgacgcttgtcgtatcagtgcgcgaaggtaactccgatgctgcacagcagctgttccgcgtaaatccggttcgaattgattttaaagggccggaagccaagcgagacaggcagcgcttgttactctatcggatcttcgaaaatcggatgaatatcccagagtctgatattacctctctgattaaaacccacgtagatgagtttctgcgtttaagtaatatctcaggctctgaacatgaaaaacataggcagcaatttattggggcttggccttactcgccacgtcttctgcaattactggatgaccaagtattaatagctaccgaaactcaagaaacacgtgatctattacgtatccttgtggatgtgtttaaggagtctggtgacaacactgctataatcacacctgcaaatttcaacttaaccagtgacaaatcaggtattacctcattactagattctgtagcaagccagctgcatcgcgatttgcgtgagaatgcactgcgtaatctcgatgctgttaaaaataatgtgccagctgatcaggtgccacatcttgggcccattctttccgctctctggcttcgctctttgtcattggagaatcatgccggtgctgaaccttcagaattgcagctagatattaccgagcgcaaagcgatagatgacaacctgtttgctgctgagcttgcggttattgaggacaacagcttcaacattcaccgccaagccaaccgcttggtgttcaaaaatgaggtcaatccacaggctaagctgttagctcatgctaaaaatgataagctttttcaaaaagatgaagatgtagaacatcttgctaaagagattcgttacgccctggttggcgatggcaatcagtcgaatatctatcgaaccatcgtgttgaagaaacaatggcgcactgcgccattgttagagattgaagaaaaagaccatcctcagaactgggataaccggattccagtaattgttatgcctaaagcgtcgctggacaacaaagagcttggcgaatggctaaggacacatgttgccaaagcaagaaacactgtgcgcttcctgctgccacgtgtgggtactggcgatattttttacgacaagtctttgttggtattagcccgtgcggtttatctcgctagcgattggaaaaactcagaacgtgagtacgctcaattgcatctgaggtaccagaaggaactgcgtgagcagttgcaatcccgctttgatcgttttgcagtcttggtcgtatggaatttcgcagactcatctaagtgcgagtttgagatttcacaacacggcgccgaagggttacaaattctcgataagctggatgagaaaatccgcagcgagcttttcattcccgaagaattcgacaccatgctacttgatgctgcgaccaatagccgcagcgtggccgacctcatcgaacagttgaaagagccagccccgaaaggtgcagaaagtattccttggctgggtgaaacagcagttaaagagcgcattggcagagcctgtgcagaaggtaaaattgccatcaacgccaaaggcagtctgtacgagaaaatgccgtcagaaaccacagaagatgcttgggtgcgagtacgtggaaaactgggtagtggtaaagatttggatgatacaacactgcacctgcccggaggctctgttggttcaggcggttctgtccctattcatcctattcccaatgtgacagaggagttcaccaccggtggtgttaacaagccatccgtaggctcaggctatggcagcatagcatccgatacaacaccaacgctaggatcgctttttggtggttccagagatggcttcgttactcaccacagcgcccagaacacatccacattaagcttgctcggtaagcttgaacaatggggcattaacaaaggcagtaagatgaaagacgttaaattgtctacctcacaactcactggcgcacagttggagaatctgctgaaaaacttaccggatggtgttacttactctctggatctggataaagaacaataa

SEQ ID NO: 284052 - DNA, 999 bp, Morganella morganii
atggataagtcactgatcgctgatatacacagactgcccgcacaagaagcgtggatgaaaattttttcggctctctggcccctgtttgcagaaccgatcagacaggatctggcggatgcaaaaacaaccgaacgggatagagccatcaaaccattggatgatgtgttggcaggcagtgcctgggatttgtgggtatcattcgagagcgcttcaccaaaaacggctaatgctctgaaagcattctggcaacgccagacaacaccgaaagccattctgattctggatgcgctatcgctgcgtgaagcgccttggattctcgaaagtgcacagcagcgggattacatcgtccatagcgccggtgcgaccgcctctgagctacccggtgataccacgccatttgctcgggcaatggggtttgggcagcgaactagaatgcaaaacaaccagggcagtagtgctgctttccctgaagcgttcactgaatccaccgacttgccatgggtggattgcgcatctctgatcaaggcagacccgaatattattttctggcatcactggcctgatgagcgcatgcatcatttggcagaacagggagcaggttatcgggtgttggctaaagaagctgcagccgtattaaccagtgatgatttctggaccttcatcgataaactggccacaggccgtcgtctggttattactgccgaccatgggtattcaaaccctgcgttatttcctgatgtttacccggaagaccaaaaagcctatttgaaagggcaattcaagtctggtcgcaacagcgaagtgaaagactcaaaagcagaacagcattgggtaccgccattatctcaggtactgacgacgcagcatggtaactggaatatagtgttgggccgcaagaaatggcgttcacaagggggctacccaagcttggcccatggtgggctgagtctgttagaagtggcagtcccctttatcgagctgtcgaaatcaaataattaa

SEQ ID NO: 284053 - DNA, 3267 bp, Morganella morganii
atggcatctaacaaaacgaaagcagaactgacagaaaaattggtggcagaggccgttagtgctggtaaaaaagcacaactggaatctgtcgatttttctgatcccaatcgccccttaacctgtcttgaggttgattttcctattctgccaattaaccagattgcgcaaatagaaggtaatgcgggcaagcccatctaccagatgagtaagtggtgggcgcgtcgtcgctcaagcgtgttccgttctatgctgattgcagctgctactaaagcccctgatgagctatccgagtctgccaaattggtttgggacaactattacaccaatcaccaagacaaccaagcattcagaaaattgaaagtggctgacattttcatggggggcggcaccacattggtggaaggtacgcggctcgggatgcagatgataggcaacgatctcaacccagttgcttggttggttgtaaagaatgaattggctgactttgacctagaggaagtgaacaaactgtttgatcacatcgaacgcgaagtaaaacctcaggtcatgccgttttatgcttgttcaggccctaatggcgaaaaaggcaaatggacacagcgtgctaccggtaaggttatgggtgatgattttgatccgctggctctgacacctgaagaacgcaaaaactacgcatacgaaggcccagaggtaatttataccttctgggcaaagcatggtccctgtgctgcaccaggctgcggtcatcgcaccccactgatgtcttcacctgtggtatcagtgaaatcactttcagtcagtgcgtggttagattttgaatgtccaaattgccaccatagttttgatgtcgaattgaaagctgcccgaatggctcctgaggccaaacttattgtttcagagaccgaaaaacctttttcgattatcggaaaaaatggagagtttacctgtccccattgcgaacatcgaatagtagatactgtagttattaaaaaaggtgaatcgacactgttacctaaagtattgaggaagacaaagaagatcaatcttacattgctggtatcacctacttggttaaagggaagtggttcttttgattcgaatggtcgtttgggtggaacaaatctatctgaccccgaaagtaattctcgatggtttgataagcggctcgaaaccatagaattgatagaggtccgcggtagtgtaggcgaccaagttgtagacccatatacaggagaaatatttcctaccaaaaaggcaacgataccaaagaaatcaacatttacttgccaagaggaaacttgtggtaaacaacaggacgtattaacagccatgagtgcttcgggtgaatccggtgccatcgctccttttgctgaacattgtttgtctcctctttataaggatgatagtggcgtatatggagggcgtttttttcgagctcctacacaaaaatctatcgacatattgaagaaggcttttaacgagtgggaaaagcgcaaggattcagatcttaaagattgctggccaaaaacggagcttgcatttgggttgaagacaaccaaacagagcattgccgaacatggcttcccaacatatgcagatatgttcaattctaggcagctattggttctcgctacttttgtgaaagaaataaaatcacttcgagaaaaagggtattcggaaacgtcgattgacttattaataggtgtttttcaatcatattcccgaaaccagaatatgttctgcttctggaatccacagcgagatactcctgagcctttgtttagtaacaacaattatcaccctaaatacgtatcgatagaaaatagtgttttctctgatttaggccgagggaattgggcgtcttgtgtggccaatacattaaaggggctggaatggacaaaaaatccttgggagacggtagttaattcagcactcattcaatttgataataaatttaagaaaattgtaacaggaacaggatctaaggtagccacacttgacccagttataccacaaaatactatcacttgtggttcttcaacagagttgactcatattgaatctggttcactggatttggttatcacagaccctccatttgggaataatattcagtatgctgaactagccgattttttttatgtctggatgcagctattttataaagagtcaaacccaatttttgcagttaaacatacgcctaagacgcttgaggctgttacgaatcctgcgagaaaccctcaagagcccgaagctttttttcaaaaactgctaggagagtgctggaaggaagccgctagaactttaaagccaggtggaatattagcttttacttttcatcacagtcaggatgcgccttggatatcagtcctaaatagtttgtttgaggctggtttctatcttgaagcaacttatccaatacgtagtgatgaaacgaagggggagggtgggaagcctggtacttttggttcacagttaattgagtacgatatcattcatgtctgccgaaagagactagtagaacctgaaaaagttagttgggcgcgactaagacgcaagatactggctgatgtaagacagctccaaaatattcttgagaaccatcaaaataaaggccttcctgaagcagatgttcaggtgataaggcgtggtaaagcattagagtatttctcgaagcactacggtagggtgtatgtcgaggatgggcgagatttttcagtgaaggaggctttggtaggcattaatcagttgttggaggatcaaggtgagactgatgggttgtcaacaccagttgtctgcgaacctttcactagacaatttatgagaatttttggtggtaaagaagaagttcctcgtgatcacatgcaaaagatccttaaagggacaggcattagccctggtgactttattggtcgtggttgggcagaagaaagaaagaagattttctactggggatctccaacagaaattgcaaaagatagattaacaagtaggcgaaatgttagtcgcgactttgatcaggcaatgttgcttgttggtgcctgctatccggaaagtggtatcaatatcaagaaaattctggatgaaagctttaagcctcatcctgcactggggcatttgttagattggcttgttcataacggagctgactcttctatgcgcagtgcatgtattttggcaaggcaattgtttaatagatgggaagccgatcatcaacaagttatgcaggagcaaatatcattgtttgatatggaaggtgaagtatga

SEQ ID NO: 284054 - DNA, 507 bp, Morganella morganii
atgagtggtgtgctgaccaacgataaatggaaacgacgcggtatctcagtgctctggtgtggcaaaactttggctgaactaaatgctgccagccaggttatcagcctgcgtcaattcatcggctactatgaagcgggctggccggatgatatgccactgctgaatgacgatggtttatatgtcgcagggttggacgtagccgtagatgctctatcaccagaagatgcactcgaatggctggagtctgagatttacgaaatgatctatgactttcagaaccatgctgatgcggcgttaattttctggatgccagatcagggccgctggaaggaagacctgaccaccagcacctacaactggtgcttggctggtaaatacaatgctcagatgtttccgttagggcaatgcatctggaacggtgcacagaaagatgtgcgccgtattgaatcctcctctggtggaaaaactaacgaatggctgggtttatacctagagcggatcagctaa

SEQ ID NO: 284055 - DNA, 2724 bp, Morganella morganii
atgaattttcaacctggtgaacgtgtcagtcattatgaatttggccaaggtgttgttatctcagttgggggcggttacgctcgtgtctttttcccccaaggtgagcggcaggtgcctttcagcaccttggtggcagcactcagtcataatgagcgcgtggtggccagtattggcaaacatgcagatagcgacgcgaaagcgtggctttcctggaaggcgcatgaattaccgcttcaggattcagccagctcattgacttcggccaagattgatttgctaccccatcaggtagtgctgactcatagggttgcctgtgcgagcccgcgtcgttttctgattgccgatgaagtgggattaggaaaaactattgaaaccgcattggttctgagggagttggccagtcgtggtgagctgaaccgagcgttgatggttgttccggcgggtctggttaacaactggcaccgcgagctgaatgaagttttcaatttaaactttgaagtcttcgggcacgaaggcgatgtcagcgatcgccgcagtaatgcgtttgcgaagcataatctgctgattgccagtatcgacaccttaaagcgcccggcgagaatcaagaaaatactcgaggcaccccgttgggacttaatcgtttttgatgaagcgcatcactgtactgcatataagcaaggtggcaaaatgcgcaaaacccagaactacaaactggcggaagccttgcgcgaccacagtagagatatgattctgctgtcagccacaccacaccagggcgatcatttccgtttctggaagttgattgatttacttgaccccacgttgttttctagtgaaaccgagatggtggaagaacgtcaccgcttgaatccgattatttttcgccgcaccaaagccgatgcctgcaaagctgatggttccacgctgtttgctaggcgctgggttcatactgaagctttttcgatgtcagagcaagagcgctatttctataacgccttgaatgaatacttgcgcgacggttttgctctggccaagaagcagggcgggaaaggaactgcgttgggctttgtaatgacgatcttccaaaagattgcagcgtccagctttgctgccgtgcatcgcaccttgaggcgaagacttttggccctgactgttcatgagggcttaatgcacgatgagaatctcgatatcgacgccagagacattgcgtttaacgaggcaaaagaacaaattcgcgtcgaatttgattttggtaatgatcgtctgtctgaccttgaaatcgaccgcatactgaatgacatcaagcgtcgtctgctcaaaaagattaatgaagagcagttggccgctgtatccgatactttttccgatgagctggaaactgccgccgctgaagatgcggccatggatgcagtgacttacgcgctaccagaagagcggttccgcattaaagaactactggggctgttcccttcagcccgagaaactaaaatagataagctcattggagctttgggtgtgctgtggcagcaaaatccagaggaacgcattgtgatatttgccacctatctgggtacggtggaaatgttgggtgagcagattgaaaaggcatacccaggccaaggcgttgttgtgctgaaaggtggcgatcacggaagtaagctcgcggcggaaaagcgcttcaagcaagcaaatggccctcgtgtgatgatctgtacagcagccggtcgggaaggtatcaacctgcaacatgcacgggtgttgtttaactttgacctgccgtggaacccaatggatatggaacagcgcattggccgtattcaccgctatgggcagcgtgatacggcacaggtttataacctcgttctgggtgacaccattgaaggccgcattttcttgctgcttgatgaaaagctgaaggagattgccaaggcgcttggcaaagtggatgagaagggtcaggtggaagaagatcttcgatcacagatcctcggccaattatcggagcaggttaactatcagcaactttactcgcaggcactgcaagaccctgagctgaagcgtacccggctggagcttgaggcggccatggataatgcccgctatgccaaggatgcggtattcgaactattccaggatctggatggtttcagtttggatgactatgcactactttcagataccgggaaatccatagatgatctgattaggtttatgcagatggcgttaccatacgaaggtgaaaccattgagattcgcggacaaaagcaatttgcattggtaaaagatggtttcgagcaaatgctatttaccacggatcgggaagaagcaaccaattcagaaaaattgcatttggttggtttggatcacccagtgattgcagtactgctcgataaataccgcaatcttgatcctgaataccttagtttctcttccagtgagctgaattctggtgaaaccgtttcagtgtgggaagtaagggctgccaacaaaaaaggatacgatattcactctatcatgaaacttgctgtcgatggagatggtaaccgactacctcatttagaaaagcaaatagatatcgtgtttaaggccaaagggaagaacggtgcttacggagtagatttgcataaaattgaagccgtcttagagcgggaacttcatcaccggaatatcgtgaaacctgagcagtctttctctgctaagctgatctgcttagcgtgtggttga

SEQ ID NO: 284056 - DNA, 222 bp, Morganella morganii
atgacaaatcaaatgaccccttccaccaacctgctgaatgaccaaatggttgatatgaagtttattacccactataccgagctcactgataaatggttctacaaacagatacagaacgggaaattccccaaaccgattaaattaggtagtagctcccgctggttaaaaagtgaagtggaagcctggttgctggtcagaattactgaatcacggggagaatga

SEQ ID NO: 284057 - DNA, 459 bp, Morganella morganii
atgctaaagctggataaagttgaccgaaatattcttcggcttttacaagaggatgggcgtttaaacaatgcggagttagccaagcgcgtttttttatcctcccctgcatgttggaaaagattaaaagccttagaagaaaatgctataaaaaaatatcaggccattattgatccaaaaagcttaggatataacttttatgcatttatgaatatcacgttagatttacactcaaaagaatcaatggagcgatttgagaaagaagttttaaacatcgatagcgttattttttgccataatatatctggaagatatgattacttattgcagttagtagttaaggatatggatgattttcaccatatatcaatggaaacaattcgtactatagggaatataaaggaaatgaatacaagctttggtataagggaaattaagtcattcacaggtataccaatctaa

SEQ ID NO: 284058 - DNA, 372 bp, Morganella morganii
gtgctgctcagtccggaaaacggtgccccctgtctggtctaccatgagccaccgcaatccgccccgacgctgttcggcggcttttatgtggtgacgcaggcgatagtccgcaggcggctgctcagcttccgctgtgacggtcaggactatgagggcatggctccctacaagctgatatactttcagcgggactggtatctgtgcggggaatggcagtcagccctgcgggtgttccggttcagtcagctgcagaacattgccgtgtccggacgccgtttccgtcaggatgcggttatcgcacggacagtcacccgtcccgaatttatcaccgcattaccccattatcagtttatccgttcattaatcacataa

SEQ ID NO: 284059 - DNA, 1092 bp, Morganella morganii
atgatgaaaactcggcttaccgtcgtcctgctgtcagcactgttgctgtcggcctgtgacggcagcgatagcaaacccgcacctgacccgcgtcagcagcaggatattcagtcagtaaaacaactgatttatccgtatgaccgtaccgtcacgctcggcggtattctcgataaccgctctgaatgtaccgaaacagagtgggataccctgactgacgataaagggcgggaactggtcaggtaccgctgtcactacaacacatcggctgtcagtaaccacattaatacctggctggaaaagcgttataacacgctgataaatgagtacactcagcgttttaatacgctgggttcaccggaatatatcaaatcacggactgattatgaggagagggatgttgccactgcagaagaatcgctggcaaaaattaaagcgctctcgcagcatgactggtcggcactgcgcgatgatgtcagtattactggtcccgccgctgaatatgacaacacaaccggtaatctgaaggatgccgggcgtaaaatcacactcagtaacggggtcatgtccggccgtattacggaaagtttatcagaagagcaacgcaatctgataactcagtggaacaggattactgagagcaacaatatgggcagtcttcctgattactggttcagggacccatccggaatcacaaaagaattcagtcaggaactggcatcgcgaaaagcagagctgaaccaaaaacgtcagaaacttcaggacgaaagtaataagaataaagccgttttgtcacaggtactgtcagcactgaaagacgcacaacaggaatcaaaagactggcagattacccaggaactgtactggagtgtgaccggtccggaccctgtctttatggggggcatgtttctggtggatgaccgtaacggacagtacgagctgaaacgctatttatccggactcggcaccatcagtaatgacaacgatatccttactcatatctaccgggatataaccggttcagcgccttacatgagtactgtggctgacggtcttttccgtcatcagaccagccacatttcgctgccgaaataa

SEQ ID NO: 284060 - DNA, 213 bp, Morganella morganii
atgtctgtttttaaattaatggccactacgctcggtgtggcaacggtggcgttagcgacttactgtgcctggcaggccgcggctgaggcggcagataatgaggatgccaccacagccgaaaaagtggcggcaggcctcagtgccgcgctggcctgctcagccgtgctgggcggtacccttgaccgtctgctgggccggctctttccccgctga

SEQ ID NO: 284061 - DNA, 450 bp, Morganella morganii
gtggacagtcgtcgtaaaggtcagcgtggcagaggtgctgctgggaaagtgcccgttttcgggcttctcaagcttggtggtaaggtgtataccaaggtcatacccgatgccaaatcacggacattactgccgataattgagtcaaaaatttaccctgacagcatcgtctataccgataatttcgccagctacgatgtattggatgtgagcgattttaagcattacagaattaaccacagcactcagtttgttgacaaaaaagaccggcaaaatcacatcaatggcattgagaatttttggaaccaggcgaagcgtcacatgcgtaaatttaacggtattccgaaggctcattttgagctgtatttgaaggaatgtgagtggcgatttaacacacctagcgctaaacaacaattaactatgctaaaacagatagttaaaggtaaaatttaa

SEQ ID NO: 284062 - DNA, 210 bp, Morganella morganii
atggatctcctgatatttaatgtgagtcataacacatcaggagtgagtgtcatattcaccgggataatacatacagtattcataatgtattcaaaaggtgtgaatgaaatagttaaataccttaatgataacatcgaagtctttaatgagatggcggtatgtcattttacttgtgaattgctcaggggtacccggggtgatttattttaa

SEQ ID NO: 284063 - DNA, 729 bp, Morganella morganii
atggcaacctaccgtatcgaccctgatctcgcgtttatcggtcagtgcagcaatgaggatctcggtctgctggtctctgttctgacacacgacagcaaagacggcaaaaaacggctggcggagtctctgaccacctcaccggaatatcagctcttttaccctgaccatcagaagtactggcccgccatctgtgccgaactgcaggccttcggggccaacagcctggtcacgctgctgcgcggtaacaaaggcgtgctttaccgtgaaatcctgcacgatgtctgcgacaagctgaaagtgaaccacaacaaagaaagtccggtggaaaccaccgagcttaacctgctgatgaaagtactggagaaaagcctgcgggagatgtcacaggacgaactgatccgttttgcggacgggctgaaactgaatctgtccgcaccgaccccgcagcttattctgctcgcggtgcaggcggctgtcgccagctccggagttgcagccctgcagtttgccactgttgctgctgtcggggtgattgaggccatgggcggtattgccacctggggtacactctttgccgccaaccgggcgctgggggtactggccggtccgatagggattgcactgagctccgcctggctgatagctgatatcgccggtcccgcttaccgagtcaccattccggcctgcattattgtggcgtacctgcgccagaaggccctggcggcctga

SEQ ID NO: 284064 - DNA, 1992 bp, Morganella morganii
atgacatttaataattcagtgctgattgcactgttttccgcttctttcagcgcttatgccacggaaccaccaccaccttatcaatcagaggttgaagtccctgatattaataccattctcagcagtgccaccgatggctggccgaccgcaaaagataagtgggataataaatatcagtcaattatcaccggcaaccaatatattaatggtcagacattaaccagaacctggttcccggaacaatttctttatgttgagaataattcttacagcctgaataacaccattgattccttccagaccacattccggagcggcagtgtcgctatcggaaatatagtcaaaggcggaattaccaatccgtccgacccttccaaagtctatcgcggctttatgtcgatgatggaagactccgtcgcgtataacactattgttgaagataacggcagcctcagcctgggaaatgacgccaaagcgtataacaccacagtgaatgccggcggcagaatggttgtcggtacacggggctatgcgcaggcaattctgatcgacggcggttatctggagcaatccgttaccagcacctcaaataccaaagatgtcattgtcgtgaatggcggccagcacattatctacggcggtacggcaaccaacagccatatcggcagcggcagctatcagatgagcagcggcaacacgatagataccgtgctgtatgacggtgcggttcagcagatttatgccgggaaagatggtgtgactgaccgcaataccatcgttaaccacggtgcattacagtttgtgacccacggtaatacagaagatacccgtgtttacggtacccagattattaccggtgttgacggggaatgggaaaacggcgagtggacatccgacggttctttccggattgatgatcagacagccaaaaatgccaccatttatgccggcggtgttcagcgtattcagaccggcgaagccattgatacccaagtttacggacagcagattgtcagcggcaaaaaaggcggctggaccggcggacaatgggttgagcaggacgcctggattggcaaagatcaggttgccaccggctcagtgatccaccagggcggtgagcagattgttgaatactatgccgatgcggttggtacactggttaacggcggtacacagctggtcaaagagtttggtcatattcaggatactaccattgagaacggaggttcatcctttattgcttacggcgcctactccaccggtgacctgaatgttaatgacggttcagtaacgatggaaggcggtagtcttcacagctggaccggagctctggacggcaaaggcgcttatgttacccgccttaatctgaccggtgacaatgcgtttatgtatcttaagcataatgacaccaccagcgaatccgaagcaacgattgaaacactggctaacaacggcaccgtggtattcggcagcagtgacggcagtgatgccggtaaatacagccgtttacagatttcagatctgaccggttccggtacctttgtgatgaacactaatattaacggcggtaccggtgatttcctgaatatcagcaacagtatcagcggtgagtttaatgtcagagtaatggattccggtcaggagctgaaaagccgcggcggtgtgaatcctcatcatctgatctttgccaacggcagtgacagcaacagctttgcgctggtgaacggcagtgttgacctgggtgcttataaatattacctggtacagggtgatgagcaggacagcgataactggtatttatcgccgaaagcaaatgaaccggcaccaaacccggatccggagccgggccctgatcctgatccgaaacctgaaatctctgaaagcgggaaaaacgctatcgctatggccaacgtgacaccaactatctggaacagcgaattatccacactgagaacccggctgggcgatcttcgtgataaccagacggcatag

SEQ ID NO: 284065 - DNA, 780 bp, Morganella morganii
gtgtggggcaaatatatcggcagccgtaaccgcatctcaaccagtaatgtcggttacacccaggatatgaatgggctgatgctgggcggcgaccacgcgattgcgctggaaaacggccgcctgctggtcgggggaatgttctcctacacccattcagaactggatgcccgcaccagtgacggtaaggtggacagcttaggtcttggtgtctataccacctggatgcacaacagcggttactatgtggatggcgtgctgaaagccaaccatttcagaaccaaaaacagcgcacagtttaatgacggaaaaaccacggccaaagataacaccaacggcatcggtttctctgtggaaggcggtaaacacatcaccgcaggcagttactttatcgagccttatgtgctgggatcttacttccgcggcgaaaaaacagcctaccgtttcagcagcgatatgaaagtgaaagcggatgctgcagaatccgtgaaaggtgaaatcggtaccaccttcggtaagacgtttgtcactgaaagcggcggactgattaaaccttatgcccgcctggcggtcagccacgagttcaaaaagaacaatgatgtggtgattaacgacacggaatcattcagcaatgatatgtccggaaccgtcggtaagtacggcgtgggtctgacagcacagatgaataaccagtggtccgcctatgcagagttcaactatgccaaaggcagccatgtggaaaccccttacagcggcaacctgggtatccgttacagtttctga

SEQ ID NO: 284066 - DNA, 2811 bp, Morganella morganii
atgaatttatctgacattggtgagctgtgtgcagacaccccccggatgacggtatttgatccgcgcgggctgacagcgcgggtggttgattttaaccgtaataatagtacggagacacccgaagcattcacaacctgctatcagtacggcacaagaggtgaaatgcagatgtgtgccgacccgcgtttcagtgcctctgcacagggaaatgaacacagatatcagaatctcgtttctgccactgatttactgcaacgccccgttcagcaggtcagtatcgacagcggggaatcattaagtctgttacatgcagacgggcagccggaatggacaacaaaaaacccgggagaagcgtctgtcagccagcattttacttatgatcgtaccggtcgcctgttgtcacaacgaactctgaatggcacaaaggagatcttattgcagaccaggcgttacagtgatggaattgataatgctgaagaatataattgccgtggtcagtgtaccgaaatacagaatggcgccgggattgaaacatttacggagtttgatatcaccggcaaaaataaatcattcagccgccgtttctggtctgtacgggaccggagtgcggatttgaatcatccgcctgaagcggagacacggacgtgggtcagccgcaatgatttatctgcctcaggtgcagtccggcagttatcgttgtcctgtcatgaagcggagcaggagcgttctgtttatacacgccgcaacgggtataaccggcgcggacagcttatcagcagccatctgaccgatgagggcgggaaccagcatgcgttgctgatatccgccggttatcatgcgaatggtgcgtgtcagcaggagatgctgggtaatggtgtgacccgttattatgcgcaggaacatttcacaaaacggctgctgcgtatttcaacatggcgtcaggcggagaataaaacacgttatcctattcaggatatttcctatcagtatgatcctgccggcaatgttacagaacgttatgatcagggccgggaagatcagtatttcgataacctgcggatcaccgcgcataatcagtatcattacgattcctgttaccggttacgttatgctgcgggccgtgaagcgctgaatagcggcaaaaatacaataacgccgcttatcagcgggtcacagcagttagtgaattatcagcgatggtatgactatgataatgcgggcaatatgacgcaactgcgtcacagtgccgggcaaaacaactggactcagattttttctgtctcaccggagagtaaccgcagtttaccgcagccggtttccccgtctgaagtggagcagttttttgatagttttggtcatcttaaagaaagtaacggtgtacgtttttcccgcgactcacaacagcagcttgtccgcgcagatggcgtacggcgggcaaacggtgcgaccgattatgagttttatcagtatgacagcagcggtcagcgttgcagtaaactcagcagccggattgccgacggtattactcaggcccgccgccgggaaaccgtgacgtatatttccggtatgcgtttgtgtgagtatgactatgacggtaaaccacagggcagccattattccctgagttttccgctggccggtcattcggcggtggtatgcctttctgagcgggagccggaaaagaaagaaacacctctttcactgatgcgttataactgccttgatgcacagggctcggtcgcgctggagctgagtgcagagggcgatattattacgcaggaggaatattatccgttcggcggcacctcgctgttcagttcgcggagtgagagtgaggcagactataaatatcaccgttacagcaataaagaacgggataatctcaccggactttatgactacgggttccgttattatgcgccgtggttatgccgctggatctcgccggatccgctggggatcgcggatggcatgaatgcctattgtatggtgcataataacccggtgacatacagggatagtgcaggtttgatggccggggggcaagaatttgagatgcaggaattgcggactccatccggatatcaaagaatagcatcacgggcatatagctccgccaccgtaccgatacagcagaggagtattggtgaccggttacgtggcgcaggcagagtgctgagccgtcctttaacttctatcacacagggaatcgcccggatagggcgggcaatcagaagtgttgtcagcgggatccgttctgcattacagcgtttcagaggtacaggtaatggcgctgaagatctggaaatggagccattgctggctgaggagataagcgatccttccggtgaaactgaaacatcatttgtcagccggaagacgaacgaaggggatattatcaataatcctttagtcaaaaaaccagaatatatgaaagatgaagtagataactggcgtattcgtattgataaaagtgtgcttatggatgctgaaggttatgtcaatccggatgaatttgccagacttgggttagttgagagggaaataaaccgaaatcagtatacagagccggaagaagatcctgattataaagatcatcccctgtttgcagaattaaaacggaatttacagggaatctttgataatgatgctgaaacatctgattttgacgaatttactcatgacacaacaccacttctgtccggcataaataatgcagcagtgccggcagcaatttcatcactggcattatccgccacgatattcagcttgctgtggtggtatcagtctcagcatacttaccgccgctga

SEQ ID NO: 284067 - DNA, 2487 bp, Morganella morganii
atggaggatttgacggcaataaagtataactatgataattttggcagaataaaaggaagtataaaatcacaaccaagtgacaagattgaatataaaacagactatgaatatgatagtgtagccggtattatttcatgtacagaatatgaccgacctgatattactaaagtgatgaagtataatcgccttggaaagctgttttcagtgatattgaaaaccaggagtggggaagaattacaaaaagaagtcaataaatatgatcgactgatgcgtgtagttaaacatactgattttgattatttttttgatggttcgttaaaaaaatatgtttattcttcacaaaaagaaagtaaatacgaatggaattttaatgatgatatgacatcgtacaccggaaattatttttccggtaataagattgatgttattcatataaaaagaagtaagttaataaaaagtaatgacggaaagaaaacaaaaatagtaatggattcagccggaagggttattaagaaggtagtcattttaaataaaaatgtcattaatgatgattattattacaatggttacggtcagtgttcaaaacagataacaactgacagccagggtgatagtataacgaaagagtggctatataatatcagagggtgggtatcagaagaaaaaatcagtacgcacaatgatagccggactcaaaagtattactatgatgatcgtttcggagataaaaaattaacggaacatcattttaataatcaattgattgaagttaacagctatgatgtgttaggcagattaatttcagcagaaaagaatcaggtaaaaaaaatactgacctatagttctgccctgccatcggcccggccagatacggaaaaaacagaacaaggacgtaactggaaatatacacagacacctgacagtaattttatcgctgaaggtaaagagctcatgtcttcatcatcgccccatgattcatggcagctgactctcagctataataacgctgataaattattggtgagtggaatgaatacattttcgtttaacaactcagatggccaatatattttaaatgagacaataagatactcaggaatttttcatcatgtttacaataaaaaattacaatattggtatcgtaatgaaataaataaaaaagttagttatatatctgtaaattataaattcagcacggagaataacttaatttacattgaaaataatcaatatagggaaaaatatcaatacaggcaagagggagggcaattagaggaagtcttgtatatggttaataaaataccacaatgccattgcttgttgaaatataataaaaatcatcggctaagtgatattcttcttaatgtgcgtatcaatggtcgcaacgaacaggaaacatctttattttcatctgttcgtcaccactatgaatatgataaatgcggacgtatacgggaagtgattttttcatcagatgatgcaacaggagataaattaacacctcattgggatacgctggtaaaaagtaatttttcatatgacagccgggataatataaccaaaaacagtatttatctgtttatgccggtgatttttaatcagcataaaggtataaacagtgaacgcagttatagagagttacgctcttttaatggctttaatgaactgacagattgtaagtatgatggagatttacggctgactaacaatatgagaagaatactatccggtcagagttataaatataatgacaacggattaatcattctcagtacccggcgttttagttcgggtgtcagtgatattgtcagctatgattatgatgataaatcagccacactgaatacactgacacattgcccttttaaagccgggtggccggaaacagaaaagtatgcgtggaatgtggagggcatgctgatttcccgtacccgttctgatggttataaagaagagtatgagtatggcggggaacaaaatgttgtcagaatgacaataaccgccccggataacggaaaaaccataaaaacgtttctttatgattgtcacggacatttggttattcagattattcagtctccgccgctatattccggcggaccggctgttttccggcagattcaggatacttacaataatgaccatcttatgatccggaaaatttttgatcgggaggttgttgatacttccgttattcctgaagaaacacattattatcactggctgcaaaatcaggttattgctgtatcggtgcaggataacgccggcaatataaaaacgcatttcaattttaatcgcccggatggcacgacaatatgcaggtgctcaccaacaaatcagctccggtatttaaaaccgggtgttttcgattatcgtctgaaaatggagtgggttgcacaggatcagcagggattattttatcagccggaaatcattgagttgcagcaggtatgttttgaaatgaacctgactccgccgacagtataa

SEQ ID NO: 284068 - DNA, 627 bp, Morganella morganii
atgttgatagctgactccctgtgcgcggactgggactttactgacatattgacacgatcggagcagctttacggcacaactcctcctgaagcactacaccgaataaaagaatggcagacattactgtattctcagcataatatagaagtaaaaaaacaattggatatcgtaaaccgtttttttaaccaccgattgcgatttcgggatgatatcgttatctggaaccaggaagattactgggcaagcccagtagaggctctgcgtaaaggcgcagcagactgtgaagactatgcgattgccaaatattttaccctacggcgcttaggggtacctggcgagaaattgcgcattacttatgttaaggcgttgcgccttaataaagcccatatggtactcacctattatccgacacccacatccattccattggtactggataatctgacggataagattcaaccggcgactcagcgcaatgatttattaccggtttactcctttaatggcgaaggattatggctgccgggcgcaaccggcaataaacgagtgagtgacagtaaacgactctcacgctggcaagatttattaactaaaatgcgtaccgaaggattttcaattgaggattag

SEQ ID NO: 284069 - DNA, 1947 bp, Morganella morganii
atgtctttatataaacaattactgatagccatctgcctgtttgtgctgattattttcagcgggagtttttttgttagtctggagaactcgcgtgagcaatataataaccagcttcgctcccacgcccaggacgcagcaaccgcactcggcctgtctctgacaccgaatattgacgatccggcgatggtggaactgatggtcagttctatttttgacagcggttatttctccagcatccgggttcgagatttaaaaaccgacaaaatcacgttggaacgcaccgcttccccggaaatccccaatgtaccagcctggtttgtccgcttggtcaatcttcagcctggcgctggcgaggccatcgttatgcggggatgggaacaaaccgccaaggttgaggttatcagccacccgatgtttgccattacccggctctggaaaagcagctcggccacgctcctctggctgctcggctgtgggacgttgggcgtgctaattggcgccctactgctgcgccgtcagctacagccgctggattacattgttgagcaatcgctggccattacgcgccgggagtttctcagccagcctgatttacctaatacaccggaattccgccgcgtcgctcaggcgatgaacttaatggtcagcaagcttaaaaccttgtttgaagatgaagcggaacgaagcgaacgcctacgtcaggaagcctatcaagatccgcaaaccgggctggctaatcgccgcgctttcgatatgcagctcaaagacaaacttgctgatgaggaaaccgcgccgggtttcctcatcctgctccgtgtacaggatctctctgggatgaaccagcgtctgggcggtctgcgtaccgataccttactgacgtcgattggcgacatgatgcgtaaaactcaaaagcagtatacgaaaaccgagagtatcctggcccgtatccgcgggggagaatttgccatgttatgccccggtctggtcgatagagaagcctatgcattgattggtgaactgacacgcggcgccgaaaccttgtatcttacgggagaaacggatgtatcgccggtagcccggttcggcatggtgcccttccgcgccggtgattcggcacaatcgttgctgattcagggcgatcaggcgctgactaaagccgaaagtcattcggataccactattctcgacgactcccaacctgcatcatcccagatcgaaaccgatcggcatagatggtttaatttgctggctcccattctggaacaagagcgcctgcaactgtttctgcaaccggtagtggattgtcttgatcccgaacggatactgcaccacaaggtgctggcgagaatcgaagatgaccaaggcaacagtattgcggcaggacgcttccttccctgggttcaacgttttggttggaacacccggttggatcaggtcatgatgaagcaggtattggattatctacgccatcaccccggcaatctggccctcagtctgtccggcaataccgttcttgatctatcactaatggcacagctgattgcgccactaaaacagcagccggcgttggcaaagcgcctgattctggaactggatgaaaatcagctaccagataccactcacattgaggcattaatcaaactgctcaatgaatatggctgcacgctggggcttcagcacttcggtggtcggttcaatatgattggcaatttatcccaatggggattggcctacctgaaagtcgatggcagctatatccgcaacattgatcaggaagacgataaaaaaatgtttatcgaagccttatatcgcgccactaacagcattgcgctaccgcttatcgctgaacgcgtcgagaccattggcgaactcactgttcttcaggaaatggggttacaaggcgcgatgggacgcttactgggtgaaccggcacccgccgttcaatag

SEQ ID NO: 284070 - DNA, 324 bp, Morganella morganii
atgctttacatccagcgcaatagcgatggtcatttaattcgggccgaggatgcgccttttccagagatgactgaggagttgtctcgagattctcctgaagttatcgcatggcaaaaaagcttacaacagttgcgtcaaagcgatctggatatggtccgtgttcttgaggacttaattcaggttttaatgcagaaaggcttaattaatatcaccgatttcccgcaagcagcacaactcaaactgattggtcgtgcacaagcgcgtgaagcgttgaatggcggtttaaacaaactcattggtgatgatgaggataagatgttttga

SEQ ID NO: 284071 - DNA, 3216 bp, Morganella morganii
gtgccggccggggtgaccgagtttgccgtcagcgtaccgacggtggatgatttcatcaaggaattcaatgagactgttattctgacggtcggtggtgaatccgctactggtatcatcaccgataatgattttgatcctgttattcagccgggcgctgctcgtgtttctgaagaagggctgccaggaggtattcccgatacgaaaggagagagcgacacgacggattcccgcactagtcatggacaaatcagtattgaacatgcccatggcaccgttgtgacgctggtgacaccggatacggtgttgacagccggtggcgaaaccgttcagtggtcgctgtctcaggatggtaaaaccctgacggggtcagttgctgaaggcgatgtccttacggtatcgatcaacgataaaggcgaatatgacgttgcgttgcaccgtccgatcgatcacgcggacgctacaacagaggatacgcttgatttcaatgttggcgttaacgtggccgaccagtatggcaattccagcagtacgacgctaaatattacggttgaagatgattcgcctgatgctaagaatatagcccagacgcttgaggttccggtcagcaatattgttgtctcaggcttgagtggcggtttcgccaatcctcaatatctgaatgaaggtggagcatccaagaatttcaataaagacgacgatcgctactttgaggagctacgctggggggcggcgcttgataggagaggaaatctaactagcaatatagcagataagccatccggctatgattattatgataacgaagtttatcgtaataattcggataacctgctgggttcgacatttaaactcggtgagtttaagcatgtcaacctgccggtttatgggaaatcattagcttctaccgatctagttgtgaaattcagtgtggtgatcgatggtgagagtcacgacattgagcacaccatcaagctgaagcatacggaaaccacaaattctgaaacggtcaaagaatggtctccatggtcgggatggcagaatgttacacgcgacttatctcccgaacagcaacgcgatatcgttgaaattgatcaatcgacgttgacaaaaacctttaccgtcggcgatcgcacgtttgaattcactattgatggattcaaaaacaatgagtatggcgaaccggtttccaaagtctatacgtgggaaaatgcgactaacacgtttgacttatacgccacgatttcagctgttgatgatatgcctaaagtaaagggaacactggatggcgaagtattcagcgttggcgcggatggcgcagcggcgtcaggagcgattgagtggaacaatgccgttaagaactctgatgggtcttattctatcgtcaatgagttcggtaagttcaccggatggtctgatggttcctaccagtttgagatgagccgcgatgcgcgtgacgggatgatcgtgaacgatgtgaaagatatgcatttttcttacacggtcaaggactctgatggcgatcgcgctacggcggatgtgatcattacgctgcaagggaagccgaatgtgccagtatcggcgttgggtaaggcaccggaagtcagttttgaacttaccactgaaggtaaagagatttctgagggcggcgatctgaatagcggtaaggatggagattggcgcggcgtttggcaaaccaatgaaagcccgttctggcgcggcggcgaggggcaattcttctcgaccaaaagtatcgataagggcataatttcaatggactacgactatctgggagagcggatagctgaggccagaaatgataaaaatgttcattgggttcaggatgagaacggaacctgggaacccaagacttacacgttggggcagaatgagctgccaaaagtctggcaacaggtgaatggcgtgacgtccggtgcggaaatccagatcgcgctggggtggaataacggcatttcaggcgaccctagcgcgaatggcgaaccgttagcggccatcgtctcttttaacggcatcgcgttgctgaaggtaacgacgccggatacgacgaaatccgatgggcagacgaacgggaaatgggagaatggcaaatgggtgaattacttctccgacggcgagttgaacgcctcggttgaggtgctacattccggcgtgacttttgtattggatggcgtcacctatggtgaagggtatgttgccaaattggaaacctgggcgaaaacctatcaggaaacggacaatcgtaacgatgctaactatctggatgacaaactcagcctgattaagatctcattacctgatgatgtactgccggcagacggtagcggagaacttgcggtgacgttcgatccattgaataacagaggttcctcaatggacgacatccagatcggttccttcaaactggttggctccggtgatatcaccacgccgccgcaagacggagagagtaccgttttcacaacaaatgtggcgattagtgatgcggactcaaccgatttacaacaggttgtcatcaaatccaatgggatggaagcatcgttggacggtaatgatcggtttaacgtcgcacaaaatggcgatgtgatgacggtaacctcgaagaacgcctcgggtgaaaacgtcaatgactggaatacgttcctgtctaagctggaatttaccgcatcaggtaatggtgccaagtctgtcagtatgcaggtaaccgatgcggaaggtaatgtgagtaagccgactgagatatcaattggcggttcaggcaacgatacccttaacggcggcgcggggaatgataaactctatggaggggctggcaacgacacgctgcttggcggagaaggcgacgatatcctaatcggcggcaaagggaatgatgtgctgactggcggtaaaggcgcggatacctttatctggcagaaaggggatgtcgggcatgatgtgatgaaagacttcaacccagagcagggcgataagctcgatctgagcggcttgctcaatgagctcaatggcactgcggatatctctcactatattcgtaccagtattgttgatggttctcaggtgattgaagtcagtacgaaaggggatttcatcggcgctgttgccgagaagggcggaacagtcgatgtttcgattacgctggaaggctattctggtaacgttatggataacctgattgctaagccggagaaccattcgtaa

SEQ ID NO: 284072 - DNA, 1353 bp, Morganella morganii
atgacattgatgtaccgctctgttcttatctcgttagggattatcattgcacattcttctgccgccgccacactccgggatacgattcaacaaacagtcaaaacccatcctgaagttaatgcggccctgaacagccgtttatctgctgaccaggacttaaacgcagccaaaggaggatacttaccgtcagtgacactcaacgccggcaccggtcatgaggaaacagacagtccggcaacccgggctggcggtaatcaccgtattggcctgcatcgcagtgaagctggtatccgcatggagcaaatggtttttgatggttttgcaacccccgcagaaatcgggagacaaacagcgactgtcaactcacgtgtattcagggtacttaatgtggctgaaaatgttgcactggataccgtgaaagtttactttgatgtattgcagcgcagagaattggtaacgcttgctgaaaataatcttgccagtcatgaacgtatttatgaccagataaaattacgcagtgagagaggtgtcggacgccttgcggatatggagcaggctgaagcccgcctggcgcaggccagaaataatctgatcacagaacaaacaaatcttgatgatgccgaaacaaattttttcagcgtaaccggcacggaaccaagtgacctcacattgccggatgatcagattttaattctgccggattcgctccagaatgcccgagccgcgatggttacaaacagcccgatactcaaatcagccgaatccgatattgaagcaaccgaacagcaatacgaagcatccaaagcggccttttatcccagagtagacgtggaattatcccgtaatatggataataatattgatggtgccagagggcacaataatgaatggcaggctatgctcagaatgcgttacaatatttatgctggcggcagtgataaagccggagccgaagcaaaggcttttcagataaaagaagctcaggagataaggaacaacacactccgtcaattgaatgaagaactcaggctcgcctggtcagctttgggtaatgcgcgtaaacaacttcctgttgcaacagaatatgcgaaccgcagtatgaaagtcagaactgcttatcagaaacaattcagtattggagaaagaaccttactggatgtcctggacagcgaaaatgaactgttcaccgcacagcgcaggctggttgaaatacaatatactgaacgtttttcaagatacaggattaaagcccgaatgggggaaatactgcgggatctatctgtttctgtgccgttaacagaacaagacgaaaataatgcggtgatagcatcacaactaccttcactgaactga

SEQ ID NO: 284073 - DNA, 2190 bp, Morganella morganii
atgtctctgaataatactgatgatgtaaccagcacatataactggtattccgctcaaaaaaataatgacccacgtcgtcttaatgacgatcccctgcttgattgtctgatgatcatatgttcgctgcaggggaaatcggtcagccgcatgacactgacgtcaggattacctctggaaaatcagaatatcaccattaaattacttcccagagcggctgcccgtgcaggtttacagggacgggtactgaaaaaaggactggataaaatatcatcaatatcactccctgctatattattactgcgcaataaaaaagccgccgttttactgggacgaaacgctgatggccgaatgagaattatgccaagcgaaaccgaaggcggagaaatagtgattgatgaggaaacgctggccggggaatataccggcttggttttttttgcgcaaccccgccattcctttgatatcagggataacttattcatcccgacgacaaaatcctggttcagagacacactccggctttcacggtttctttatacagatgccatattggccagcctgctgattaatatcattgccctggcaacacctttatttgttatgaatgtatatgacagggttgtcccaaatcaggcgatttcgacactctgggtacttgctactggtatcaccggggcatttatttttgatttaatacttaaaacacttcgtggagcatgccttgacattgcaggaaaaaaaacagacctaattatatcggcgacactcttcgagcgaattgcaggtatgtctataaaggcaagacctgctcgagttggtagtttcgcccagaatatccatgaattccagtcacttagggatttcctttcatcactgacattaacaactctgattgatttccctttcacactgttgctgatgctggtaattgggattataggtggtcaactggtctgggtacctctccttgcctatcctgttgcattattaagtagctggatattacaaaaaccattaacttcgacaattgaaaagactatgcagttggcatcagaacgtcaggcaactctgattgagacattgagctctctggatgccataaaaataaataatgccgaaagtgagcgccaactcaagtgggaacaaactaccggcagcctgagtcggctggaattaaaagcaaaaacattatccacttttgccgttaatctgacgctatggtttcagcaattttctggtgttgtcgtaattgtggctggtgtatatatgctgatagccggaaaaatcagcatgggcggactgatagcctgttatatgttaaacagccgggcgcttatgccgttgggccagttatcaggactggtcagccgctatcgacaggccagactaactatgaaaactactgaccagataatgcagttacctcaggagcgtagtaataatgaacatccgctgagcagagaaaatatacacggtgatattgaatttcgtaatgtcacgtttaattacccggagcaaaaaaatagttcattacaaaatgctactttaaatatccgccagggtgaaaaagttggtattataggcaggagtggttcaggtaaaaccacactgcaaaaattaattttaaatctataccaaccatcagccggcaatattcttattgatggaattgatattcatcaactggatgtaaacgacctgagacacaatattggttatgttcctcaggatatccagttattcagtggttctctgtatgacaaccttgtcagtggtgcccactatgctgaagatagtgctgtacttgcagcagctgaaattgccggcgtcagtgaattcgcacatttgcacccggacggatataatcagcaggtcggggaacggggtcaattactgtccggcggacaacgacaggctgtggttcttgcaagagccctgttactcagccctcccatacttatttttgatgagccaaccagctctatggataacaccagtgaagacaggttgaaacaagcgttaaaacctgtgttatccgacaaaactctgttgctggtaacacaccgggtatcaatgcttgaactggttgacaggctggttattattgataaaggccggattattgctgatggtcccaaatccattgtgatggatgctcttaaaaaaggacaaatcaatgcgtccagctaa

SEQ ID NO: 284074 - DNA, 1365 bp, Morganella morganii
atgcgtccagctaatattataaatttcctgcgccattattttacccgtaagaataatcaggaagatgtcaaaaatatgccatatattaatggcgcaatatcagaagattcctctgttgctgctcggatcacgttatgggcaatcttggcatttattcttttttttattctgtgggccggattaactgatattgatgaagtcaccagaggtgatggaaaagcgatcccgtcaacaagactacaaaaaattcagaaccttgaaggtggaattattactgaagtattcattcatgaagggcaaatagttaatgccggacaaccattaatacggcttgatgatacccgttttgcctcaaatgtaggtgaaactgaagctgaacgcctcgctctcatgtctaaaattgaacggctgaatgccgagattaacaatcacaatcttgtattatcagaaaatataattaaacaggctcctgacgttgctaatgcagagaaacagctgttcaacagccgacttaagcagcttcataacgaaatttccggtctgaatgagcaattaattcagcgcagacaggaattgcgggaactttctgcaaaaaaattacagtttagcaacagtctgggattactgcggcaggaaataacgatgtcagaaccacttattgcagaaggtgctatttctaaagttgaagttttgcgcttaaagcgagctgaagttgaaacaaaaggtcagttggaatctgtaacaatatcgatacccaaagctgaatcagcaataaaagaaatagaaagtaaaatagaagaaacacgtaaccgttataaaagtgatgctctcgcacaattaaatgatgctcaggccacactaaataaaatatctgccacaggaaaggcattagaagacagggttaacagaacattggttgtttcacctgtacggggaattgtacagcaggtcttggtcaacacaataggtggggtaattcagcccggaagcgaccttgttgaaatagtaccactggatgatactcttcttgttgaagcacggatccgccctcaggatatagcatttctgcatcctggacaggaagccattataaaattaacagcttatgattatacaatatatggtggactaaaagggaaactggaacaaataagcccggatacagttacagataaggagggtaatagcttttatataataagattacgaacagataaaaaccatcttggtacggctgaaaacccactactaataattccgggcatggtagcatcggtagatattattaccgggaaaaaaagcattctcagttatctgcttaaacctattcttcgtgcaaaagcagaagctctaagagaaagatga

SEQ ID NO: 284075 - DNA, 822 bp, Morganella morganii
atgaggccttctgatctgttgttggattttggcaggccggtggcgtattacccaggactggttaaatctatgggtagcccccacgctgttattttcttcagtcagattttttactggcaggataaagcgttctctgagtttggtgttcataaaacacgggaagcgattgagcaggaaacaggcttgagctttgagcagcaagctacagcgcggaagcaactggtttcccgtgggattttgattgaaacaaaccgccgtcttgagcacaaaatttattaccgtattgactgtgaaaaactggatgaaattatcaccggaaatgcatctgtttcgcgaaacaaggaaagcacttttcccgaaacagggaaacccgttttcggggaatcgggaaacccttcgtcgggagacggggaaacccctcgtcgcgggtcggtagatcccgatttcgatccttcagagattactacagagattactacagagattaataatggccgcgaaaacgcgggcaataaaaaatctcagcctgcaccaacaaaaaataaaaccaaaaaacacgccatgccagaggacttttccccgacagaaaaacatcgtgagttatctcaggagatcggggtggatttgcaggatgaatttcagaagtttaccgactaccacctgagcaaggggtcgttgtttgccgactggggtcgggcactgaattcctggctccgcaatgcaaaggcattccgtggtggatatcagcggcagcaacagccgccgcaaacgcgtggtggcctctgtcagctccctgacggaacgttcatcgtagacaggtga

SEQ ID NO: 284076 - DNA, 459 bp, Morganella morganii
atgataacactaggaattagagctgaaccaaaacaaatttcatttgttgtttattgcagcaataaacatgaactactttgcgtggataaagtaactgtccctcaaacactagatacacctgagcaacttaaatatatacgtaatagcattttggatgtgctgagggagtataaggtagaaagagcggcactgagggtagcggaaggtatagctaaaaataaaagccttcctagatactatcttgaggcagttattcaagaggctttctctagtagcaatctatccgcattttctataatgagatcaagcacgataataaaagcactaggaattaataaaaaacaatacgacttaattttagattcatcacaaaaaattaacgatatagataattctaaatttaaaaaagcaactaatgaagctttaatggttgccatagcggtggctagtcatgattga

SEQ ID NO: 284077 - DNA, 1014 bp, Morganella morganii
atgattgatgcacgtatatcctttaaagaaattagagagttagatgagcaaggtaaaaactcacgcgtattccttgcttatgataataaccttgacagcaacttagttataaaagaaataaagaaagataaatttgactgcgatgagtactttaatgaagccagaaagctatatcaaagcagtcaccccaatattgttcagatacaatatgctgcacaaaatgatgattttatttacctcggacttcctttttatgaaagggggtctatcaaaggtttaatgagtaaaaacaacctcacatgccatgaaattataagatactcaatccaatttttaagtggtttatatcatatacataccaaagggttaattcactttgatataaaaccggataatatcttactctctgaaagaaatgaggctcttttatctgattttggtctggctgaaaaaatagatatcgatgggtttgctactccatcaaagatatacacaaaatttcaggctcctgaggcatttgggacttatgaattagattttactttcgatatctatcaagctggcgtaacaatgtatgtgatggctgttggtctacaccaatttaacaatgaagttactaaaatttgcgctaatggagatcctgttcgtgaaataattaatgggaattttccgtttaagaattatcctcaccacgtaccattatcagtaagaaaaattataaacagatgcatcgataaggataaaaacaaacgatatcaatcagttcagttgatattgaacgacctgtcaaagatagagcgatcagatgctcttcactggagaatgtaccatgagccagacaggactatctggattaatgatgtgaacggtgctaatcttaaggtagaatttgatcacattggaggtaaatgttatggaagtaaattgctttccaatggcaaaagacaaaaaatatcaagctattgcatggatgcagtaaaagagagtgacctacgggcgatcctaacaaaataa

SEQ ID NO: 284078 - DNA, 168 bp, Morganella morganii
atgaaaatccgcgaggttgataaattccctcgtagacatgatcttgcgacggcattaaattgcaaaagggaagccagagcactttcaaatgaagcgagagaagagagaatcaagtcatcaacgaatgcatttatgaacatggaaagttacgtgcaattcaaaaaatag

SEQ ID NO: 284079 - DNA, 228 bp, Morganella morganii
atgccgattatacattgtatgtcaaatttcgatgtgtcagaagtggatatccgtacaggctttgctgtgagtgcgttcctgttccgctttatcgacagcgcctctcatgaaattaaacaagtcacagcaacagatgaggaacaggcgcgagacgttttaggcggtactctggtattcgcagcacgttttcgccaggacgataattgccgagttacgggaggggcgtga

SEQ ID NO: 284080 - DNA, 303 bp, Morganella morganii
atgtcacaggttaaaacatcaaaaaacgatgttgtagatttagaacaatataacgatatatgcgaccaggcatatgacgtaattaaaaacatcgatacatcgagggctaaaaatcactctcagcgccgtctactggaattcgatgcactattaactcacattcgctgcgaagctatgccgcaaattattcaggatagtaatgttttatttttagttcaatcatggttagaacaattgcatcgacccgcgcgattagaacatagcgatacaaataataaggttgcgagcaatggccaaatatag

SEQ ID NO: 284081 - DNA, 216 bp, Morganella morganii
atggccaaatatagtgttttaccagcgcaccgccagtacattgatgatgcattgaaaataaatgaagaattacaggctttattagcaccgttacttaccgcagtagaaaacgaagctgatactgacactcacttaatgttgcgggctgtgcaaagaatcacgcttgttcagttagacaaattaaccagattagacgcagtttttaaaaaggactga

SEQ ID NO: 284082 - DNA, 309 bp, Morganella morganii
atgaacattggtgaattactcgaaattgacaaaccatccgacttagaaataaagaaacttaaaaatattgctatttacagcagtgatgccgcagtgaacttaattgaaggcataggggctgttggaacgttaatgtttcaaaattcatgcggtgataatgacaatttaaataaggatattattgggaagcttgggctgttaattcaggaatcaataattattgccaacgctcttactggtaatgcaggtttggccgaagatgaaataaagtctcgatcagcccccccccctgcgcaatcaaaagcctga

SEQ ID NO: 284083 - DNA, 267 bp, Morganella morganii
atgaatgaacatatcaaaaaagctattgatattctaggtggtcaggccgcattagctcgcgcctgtggtgttactcagcctgctgttttccgctggttaaatggtcgtagggttaaagctgactatgttatggcgattgtcaacgccacttgcgggcacgtaaaaccacacgaaattcgccctgatcttcctgatcttttccctcacccggagggttattcccatgcatccgaaccaaaacacactgatgaggtggatcatgcttaa

SEQ ID NO: 284084 - DNA, 720 bp, Morganella morganii
atgaaaactttctctgatagactaaattttgctatggaaaaggctggattttctcaggccggattagcacaagctattaatgtttcccagccatccatctggaaattaaccaccggaaaatctcaatcaagtagaaaaatccttgagatagcagaggctctagaggtagacccggtatggctgacaacgggtgccggtgagccgtaccctcaattagccccctctgaaacacaagtaagaacaagtaatgtgggtaaagaaattccagtaagtacatgggactcaggcacccccatggatgatgatgaggttgaagtaccgtttcttaaagatatagagttcgcatgtggagatggcgcatacagtgatgctgactacaacgggtataaattaagattttcgaaatcaaccttaagaaggatcggcgcaaaatctgatggttctgatgtgatatgtttcccagcacgaggaaacagcatggaaccaattctacctgacggctcaactgttggcgtaatcaccagtgacaaaagaattgatgacgggaagatatacgctataaatcaagacggatggaaaagaatcaagttactgtacaggacaggacccgagacattaacgattaagagttacaacgcagaagaataccctgacgaaacggccgccctgtcgaatgttgaggtcatagggcgagttttctggtggtcagttcttttgtaa

SEQ ID NO: 284085 - DNA, 174 bp, Morganella morganii
atggtcctgaccgtcacagcggaagctgagcagccgtctgcggacaatcgcctgcgtcaccacataaaagccgccgaacagtgtcggggcggactgcggtggttcgtggtagaccaggcagggagcaccgttttccggactgagcagcacggacagcagcctgcggtcaagtga

SEQ ID NO: 284086 - DNA, 729 bp, Morganella morganii
atggcaacctaccgtatcgaccccgacctcacatttatcggtcagtgcagcaatgaggacctcggcctgctggtctccgttctgacacacgacagtaaagacggcaaaaagcgtctggcggagtctctgaccacctcaccggaatatcagctcttttaccccgaccatcagaagtactggcctgccatctgtgccgaactgcaggccttcggggccaacagtctggtcacgctgctgcgcggtaacaaaggcgtgctttaccgtgaaatcctgcacgatgtctgcgacaagctgaaagtgaattacaacaaagaaagtccggtggaaaccactgaactgaacctgctgatgaaagtgctggaaaagagtctacgggaaatgtcacaggacgagctggtccgctttgcggacggactgaaactgaatctgtccgcaccgaccccgcaacttatcctgctcgcggttcaagccgccgtgaccagctccggtgtcgcggcactgcagtttgccacgattgccgctgtcggggtgattgaggcgatgggcggtattgccacgtgggggacgctctttgccgccaaccgggcgctgggggtactggccggtcccgtcgggattgcgctgagctccgcctggctgatagccgatatcgccggtcccgcttaccgggtcaccgttccggcctgcatcattgtggcgtacctgcgccagaagaccctggcggcctga

SEQ ID NO: 284087 - DNA, 417 bp, Morganella morganii
atggcaaccgataacaactgggagttttctggattatttgctagggaattcaaaaacttcccattagatcaacaggataagattctagattttgttgatgtatacgagaacaatgggttgtctgatttttcctgctatgaaggaaaaatagcatgttcttggcgagggttagatacaaccgatgccaagtatacctacgctcgtcagaatgaattatggcattatcatataggcatccctgagtttcgttcccagaatggtaaatacaaaacatctgattgggttttgcattttcaatgggatagaaaaaataatacaatatcgttagtcgatatgtataaacactatactcgagacggaattttttacttgccagatcctgcatacctagcatggtcaacagaaaaagcctcctaa

SEQ ID NO: 284088 - DNA, 630 bp, Morganella morganii
atgaaaacattaacatacgcgggcttggctatattgccacttttttgttcagctcaagttcagttaagccaaacgacgactccaattgttaagattgtaaaaaaagccacatcaccttctggtcgaaatgtggtgaagagtcgtgaaaataaaaatgttttcgatggtttttaccaagagataaatgataagatttctcgattagagcaagcgagaatactattggagcgtgaagttagtcaaactatggacaacatagattgcgtttatttctctgatgatgagcttggcaggacggctaaactcattgataaaacaacggatggcattattagagccaaagctgttatatcaaaatcttttgagagcatactcaatgatccccgattaaaggatttaacgttcgctgccgatttaagaaatcgagccttgaaagggatggacaatcttatgctaacaataaacaaagtggttgatttgaaagaagcgcttgagaacaggcagaagacagtagtagtgttcgatgtcgacagaatgaatactgcaatcaactctactaggtatcgcgcaccaaatggtttgagcagagaagaacgaagaaagtttattttagatcgtgcaactgcgtaa

SEQ ID NO: 284089 - DNA, 780 bp, Morganella morganii
atgaaactcgaaagcgcattaaaacaatttcatccgaagtcaccgacattcagtgacagctccaattccacggctcctgacagactgaaaggcatggattcggcagcggcaatgggtatggcgtcacagcgggccgcgttcggcatgcatgcgttctttggtaaaaatgatgtcagtattgaagataaattcaggactgttgaagcactgacgcagtacgccctgcgcacggtaccaaagctggtggccaaagcggccggtaatcgcgttgctcagtgtatgaggattctgtctgcaatggcatttgaggattacgcccgttcagcgggttcagtctgccagtgtcaggactgcggcggaaaagggctgatttatcgccggaaagaggtggtgaagcatccgggtatcaccaatatggaaggcaccgtgattgttgagccggtagtccgtactgagcgtgttggtgaattgtgcacgacctgcaacgggaaagggcagttaacccaccggtgccgctgcaaaggccgaggtaaagtgtacgacgaagagcagagcgaattacagggtgcgccggtattcaaagactgcccgaaatgctcggggcgtgggtataagcgtgtgccgtcgtcagtggcttatcaggcgataaaacatctggttcctgatttaaacgagagaacatggcgcagaaactggaaaccgttttacgaaggtctgacggggaaatgtcatattgaggaaagtcaggcagaacagctatttggctgcataaccagatag

SEQ ID NO: 284090 - DNA, 183 bp, Morganella morganii
atgttattactggagaagcagcgtaacggggaaggctgggagggcggtacagggctgtaccttgatttcgcatcgcatcagttcctgaccaaagaggatgcatcaccttataactatttcgccaacatgccatcttcagattatgacgaagtgtggaaaatgcagaatgtaactgaatactga

SEQ ID NO: 284091 - DNA, 294 bp, Morganella morganii
atgcttcatactaacaatcctatcatcaaacacaaagccagtttgcttaatctcgtggaggaactcggtaacgtatcaaaagcctgcaaaactatgagtgtgtcacgtgacacgttttaccgttatcaggaactggctgaagaaggctgtattggtgcgctgattaatcaaagccgcagagtaccaaacctgaagaatcgcgccgatgaggccactgaacgcgcggttgttaattacgctgtcgagttcccagctcatggtcagcaggtaaatcttttttacacagtatcctaa

SEQ ID NO: 284092 - DNA, 2286 bp, Morganella morganii
gtgttagggaatacgcagttactggatctggcatccggtactgcggttgaactgaccagcaccgccggtgccggtacagagcagaccgccgggaaactcacgtctgcggcaaacagcctggtggcgctgggtaacggtaaactgaccgtgaaaaacggcggtgaggtaaacggttctctgagcggtactcaggcgggtcaactggtgatgaataatgacacactgactgtcaccggggcgaacagcgggatgcattccgcagtgactatcgatcagcctgcacaggtcactatccgtaatatcgcgggtctgggcgacagcctggtcgccgtggcgggtaccctgcgcacggaaggcgcacagggtctgctgcgtaatcagctgaccggcagcggcaccaccgaaatcgcacagaaatcggatgctcagctgacagcggataacagcgggttcagcggacgtttcaccacggatgcagacagtacactgcgtgcctcacaggcagagcatatcggcagcgcggccattgaaaacgccggtacactggtgctgacgtacaatgacggtaaacagccgtgggatctgaccaacagtgtcaccgggacagggacactggtgaagcagggcgcgggtcgtatcacgctgacagataaatcggcgcagtacaccggtgcaacggagattcagaacggcacattacaggcggggagctatgattccgcgctggtgatgaacagccgtcaggtgaatatcggcactcagggaacatttgccggacagggcacactgaaaggcagcgtgaataacgccggtcagttctatgtcggtgaattggataagaaagatctgggacaggcaacggattaccgcgttgacggcaactttgtcaacaacggcggcagcatctggcttgcgagtcagaaagagactgaaagccgtctgaatgtcggcggggatttcactgcgaacggcggttcaatcacactgaatactgtgctgaacagaggtcacgaagacacaatgactgaccagctggtggttgacggtaatgtgtacaccgggaaaaacggcgcgaccacactgaatattaataatgttggtggcgaaggtgcagataccctgaaacagccggatgcgattaaagtggttcatgtcggcggaaaatccgataaaaatgcctttaaactgggcggaccggtcgctatcggggtatacgaatacctgttacacaaaggatataaagatgacagctggtatctcgactctttcgataccaatgtctatccgccggatgaaaacaaggaagatccgaaccgtaacgtgaacccggaaatcggcggacacatggctaaccgcacggcggcactgggcatgttctccatgaccctgcatgatcgtctgggcgagccgcattatgccgacagctttaaaggggatgaaaacgcctcttctgtctggctgcgtatcaccggggatcgtcagcgtcaggatgcggtcagccgttcactgcgtctgaaaggggatacctacaccacccaactgggcggcgatattatcaactggaacaatgatgcacaggacaccacgatccgcggcggtatcatgggcgcaatcggtaagtctgattacaccagcagtgccaaacggaccggtacaaaagccgatgcaaaaattgatcgtgcttacagcgtcggtttatacggcacctggtatcagaaccgcgaagatgaaaacaatgcttatgcggatgtctgggcacagtattcctggtttgataataaagtctccatggccggcagctcatcggattataagagccgcttagtcagtgcttctgctgaaaccggctacagcatggcggtgtacaaaccggatgcggataaacagtggctgttaacaccgcaggcacaggttatctttaattcgtatgattccgatgacagcagcagcggcaccggtctggtgatgaaaggcgggcgcagtaacagtgtggatacccgtctgggtgcccgtctgacctacgcaaaccagaaacagtcagataaatccgcgcagccgtttgttgaggtgaactggctgcacagtacagcgaagaatgatatgacctttaataaacactacaccttcagtgatgatcgtccggcgaaccgggttgaaatcaaggccggtgtggaagggcagatttcaccaaactggacagtctggggtaacgtttctcatcagatgggcgcggatgattactccggtgaccgtgcgatgatcggtgtgaaataccagtggaaataa

SEQ ID NO: 284093 - DNA, 222 bp, Morganella morganii
atgaaacgtatttcacctgagcgaaaagccgccatactggctaaattactgccgccttataacagacggtttccgcagttgtacaagccgaagctacgctctacaactggcgaagccaaggtaaatcagaaggaaaacctgtgctcggagcagataaaaagacagaacaaggccggcggaagctcgttttgccgctatcgtggaaactgccacactcagtga

SEQ ID NO: 284094 - DNA, 426 bp, Morganella morganii
atgaaacgtaagtcagttctcccgccggtagctacgacgatcactgttatttttctgatgactatctcatttattcttggcgctgcgcttactaagacgacagactttgatcctatagagcaaacgaaagtaaatgtttccaatttcctctcatatcccagtacagcagaatttaaaaatatggtctatttcttcaataagaaaaccgaggctggagggaacttgggttacatttgcggtgaagttttcacgttcagtaaggaagagctacccgcaggattcaagcgattcgtagtaaaagtatatgagccgcccgaaggactgacacttctctctttccctgttattgaagatggagatgatatgtttttatctgatgagataggagaaatttgggagatattctgccgtaacaatcaaaactaa

SEQ ID NO: 284095 - DNA, 1413 bp, Morganella morganii
gtgttgttgggtggtaatattgttaaggataaaataaatacagatatatcgcagtttgatcgtatttttagcacccctcttttgggtgataaagaatttactgataacgggaaagatataaatttattttcagggaactatcttgataacagtgaagagcgatttatcatcaactgtcttaaaagggcatttggtgttaatgaatcaatactggctgaactgtgtgagtttatctatggtcaaaagcaaactatcaggaataatatagaattcctgtcattatgttacagaacaatattaatagccagaataaatcatatttctgtcagtgaacttattatgttatttcgtcttcttcctgatgtatttaagagtaatattgaaatctattacacttcgtggtttaataaaaacaaattatttataccaaaatgttattttttactgcgtaagagtgatgaggttgttgtttcacaaggtgtcaacaatattatttctgaaatcaggaatgggctgagtaaagaagacttcatcgataaaccattaaatactgatgagataataaaaaaaatatctccggcattagcatctgtgctggatatcaggtcagtgaatacgatggaatcgattttacagtggatgagtaaattaaaacccgaagggtatattctcaggactatgtttttttatattcatgaaaaacataaatttctggagcaaaaagataaaaaatatatcatttttatgattaagatgtctgtgatgattaatatgatcgctatagatgatagcctgttatcttcatgggtagaaaattgtgctcttcttgattcatcgctgactgagttaaagtatgattttgcaacaattaagatgatgacagatgcaaattctgtcattaaacgtgcgggtgaaacaacagatttagttatcagtgagctgaaagacagtaagttatcatataaaacgatagcaggtgtattcaaccaaaatgagaaaattgtacagcaggcatttaagtatcttgataaaactgaaaatatcacagattatcgttcattaactgatgtggtaacagtattagatttatttacagaagcgggaatatctccggatgattttacgaagttgttcggagatagtgccaagaggaaaagctatacctattattataacctgagtaaaactgcagaatcaatattagagcaggataaactcgcagacttaaaagtagcgattaataaaccaagaagcaaggcgctttgttccttatatattttggataaattaaggaattcaaagtataaaaatgacagttctgaggtgtataagtatttattaattgacgctgaagtttcggaagaaataaaaacaaccagaatcgcggaagcaattgccagtattcaactttaa

SEQ ID NO: 284096 - DNA, 219 bp, Morganella morganii
atgggaatatcgggaagttgtttggctaagcgtgtcggtgtaagccagcaacaaatatctcgttatgaatcagggcaaactctgatgacaatagatatgctgattatgatttcacatgtattaaattgtccgataacagaattgttatcggaaataatttctgtttatgaatcagataatctgatggactttgagaaaaataaaaaaattaattattaa

SEQ ID NO: 284097 - DNA, 282 bp, Morganella morganii
atgacaaaaaaagatattattctccagccgaaggcgaaagcttcaccatattctttatgtgaaaatatagggcacctaatacgagagttgagagtgactaataaaatgagtggcagagatctaggcaatatcattggtgttagtcaacaacaggtttcgcgttatgaaaatggaatgtcagaactgactatgaaacaaatttgtaggatttctgaggtttttgatatgactatttggcagtttatggatgcgctatattatatttgttttgatgatggatga

SEQ ID NO: 284098 - DNA, 699 bp, Morganella morganii
atgaagaaaaaatcattacccatattaacaatatgcttatttattagtaacgcccaagccgaatgggaatttgaggcatcaccttatttgtatcttttaaataccaacgcaaatattaactctgacatttattctggcacactaaccagatcatttggccagatcttaaaaaatttagataatgcttatttttttagtttttccgcaaagaataaccattggatttcttcattcagcattacacatgctaagctaacccacaatggtattattgactccattcctttttctgcaatggcaaagtatacatctttgtatggcgctactggttatcaatttaatataaccccagaccttaatatcgatcttatggcaggggttagacattgggcatttaaatccagtctttcagttggtgataaaaatgagagcccaagtaaatattgggtagagccactaattatcgcaaaaactaaatatcagctaacacctaaagtatctatggaactgaataccgagataagtatacattcaaataatcacagccgacaattggggactaatattagttatggcatatcaaagaactggagcgccactataggttataaatgggaatatctgaaaccagatattgatggcattgatttaaaaataaagactaatggtgcagtactgggaggaacttatcgcttttag

SEQ ID NO: 284099 - DNA, 180 bp, Morganella morganii
atgttcataattactgatggtacccagtttatagacccgctgttcctccggggtagcctcaaagtggctcttaaaaaagttgctgatagtgtcctgttcaatatcattgaccaccagattattggtaaagtgatcgccctctttaatatcaaactgcacctcaccaatctcactgactga

SEQ ID NO: 284100 - DNA, 381 bp, Morganella morganii
atgagtaatggatgtaaaataagtaaagcgaaaaaacgcataaagagtacaaagattaaacttactgggcctctgtccctgcaggttgctgccggaattttgataaaaaagcttcgttgtgagttaggtatcagcggtgcaaagcttggacatcttattggtataagtcaacagcaagtttcccgctatgagagcggaacctgcgacttgtcattgtcacatacggaagcttttgctaatgcgttgggactgacattatggcagtttatggatgagttgtttgagattatttatgcagaaaatgaggtttcagcattatttaaaccctgcgatgctgcaatggaaaaggaaattaccgacagattgttaaaaacaaactaa

SEQ ID NO: 284101 - DNA, 774 bp, Morganella morganii
gtgaaatggagcatctctgattccgaaaaagacaataccggtgctgatttagggcatattgatgccgcaaccgggaaatataccgcaccgcaggctgctgctgttacggaaggtgtacgccatgtggtggtttgtgccgaaaaaggggataccaaagtgtatgccctggcctctgttcttgctcatagtgtgaatatttcaccggcgtatcaggttattttaccgggcaaatcctccgcgttaacggcgcaatcattgaacggcgggaaactgacctggacactggccgataatccgcaggggtcagcactgacaaaagtcagcaacaacgaatatacctataaagccggtaaaaagaataagaaattaaaactgaatctcgaacgtgtttcagtgacggatgaaacgggtacaacgacggaagcaatgattttagtccggaacgtgctgttaaccggatatatccgggtatcatatgacaatgtgccggaaaacagtgtgcagctcgcctatttctctgatccggaagatccggaaacggcaatgccggcagatgaagttgaatggacgctgctggaatccggtggtgcaacgcttgatactgagaccggtattttatcctgcaaacaggcgacagataacggttttgcggttatcagtacaaaatatctcgacgaggatgaaggtgcgctttattgcgcgattgcgatcccgttaccgctgaatacctataaaaaaacaatactggctgcctattctccggaacaggtataa

SEQ ID NO: 284102 - DNA, 420 bp, Morganella morganii
atgactaataaatttgaggcaatcgaaaaagcatcaaagggtgaaatcactatcgaaatgcgcccggtgtatgttgtatcaggtgccaatcatgcttacctcagtcagggtggcgcactgaataaactggcctacattatcactgaaaagcaatttcgtgacgaaggtaagccaaccaatttcccggacgaagaaacagcgcttgaagacggcacaccggctcacaaaacaggagaaataacacctgaataccttgaacggaagaacgaagtgctaaacgaattaaaagcggcactgcgccgtgaaaacgaaattatgaaattaaaagttgagcataaaaaagctattaaaaaagcaactgacgcacaagaagctttatcaattgcatcatggaaattaaagtcagctattaataaataa

SEQ ID NO: 284103 - DNA, 459 bp, Morganella morganii
atgataaaacgagtcaaccaacttaacgatgaaacaatgatcgatactcttaccggactttataataggaaaggtttttattttttagttaataaatgctctttgaatgatgaacatagtattattgctattgatatagataattttaaaggcattaatgataagtatggacacgcatccggagatgaagtacttattaggctgagtaaagagttcatcatatttctagctgatacaaatctgaaagatgcagcaatagccgcagaaagaattagattaaacatagatgaaactatttttcctcatgtgaaccatgtaacaatctcattaggggtatccagtataaaggataatgatggtgacatattaaaagcactccatcatgcagataaagcactttatgatgctaaaagttcgggaagaaataaagttgttgttagtggtaatattgattattaa

SEQ ID NO: 284104 - DNA, 255 bp, Morganella morganii
atgtcgttattatcattctgcccccctccggcaagttgggtcggatatattaaaccaaacatacttgatttatttatgaccatatcaggaaatgatgtggtctttttttcatccgggccggactcctgtcttaacctgtactacacggattttctgcgtcagtgttacttccagattaatgtagtcagtaaaattatggcactggctagctacttaggttggggcgtccatcgcatcactacaattcaggattaa

SEQ ID NO: 284105 - DNA, 402 bp, Morganella morganii
atgccagttgccacaggagagcgaagctacacccgctgggggtatcgtgagttgtttgaaaaacaagctgtggcagttatccagcccgatgcatgcttggttggtggtatcacggaagcgaaaaagatttgtgattatgcaaacgtgtatcatgcaacagttcaggttcacgtttgtggtggcccggtttcaacggcggcagcactgcatattgaaacagctattcctaacttcattattcatgaacatcatacgcttgctttgaagaaagatatcattgatctgtgtaaatatgactatcaacctgaaaatggtttcttccaggctccggatcttcctgggctgggtcaggaactcaatgacgatgtagttcaggaatatctggttactgttatcgaataa

SEQ ID NO: 284106 - DNA, 177 bp, Morganella morganii
atgctccatgaactgattatagtattaaatagttattgtaattatatcatagtcgaaggcgttgagacgaaacaggaatgggatgttgttcggagatctggtgcacatgcagcccaaggatactatctatcaaaaccacaagactttgataaaatcaatacattgttttctaattga

SEQ ID NO: 284107 - DNA, 141 bp, Morganella morganii
atgtttaatcatgcattaattgcattatattatgcatatttactgtttatcagaatgacagcagaagaatgtagtgaaagtgttaataccccggacaaaagccataaaaaaagcgtatcagagatacgctttttccggtga

SEQ ID NO: 284108 - DNA, 198 bp, Morganella morganii
atgcgggaaaccgtctggcgctggctggagcagggcgcgtacgtatatgtgtgcggggatgctttccggatggcaaaagacacggatgccgcattactggatattatccgcagtgaaggggcgatgtccgcagaagaggcacaggtttttctgaacggattacggacagcaaaacgttatcagcgggatgtttactga

SEQ ID NO: 284109 - DNA, 192 bp, Morganella morganii
atgcttaaagaaacagctgacaatctgaaccggtattacaccgacagccgcgggcggaaagtccacgttgtcaggtttgaccggcaaaacagccgggtgattttcatgcgtgagggctatgaacatccgtgttttgaaccactgaagacctttcaggaacggtatacacgcgtggatgaggtgaaaccatga

SEQ ID NO: 284110 - DNA, 828 bp, Morganella morganii
atgtctaatttagacggagccgctatttctcagattcagaatatggctgtcgctgcattaagtctggatgctgtagaaaaatctctctgccctgctgtggttttaccgggtgatttcaatgttaaaagcctggagcacttacaggaaggtcgctaccgcttccgtggcgcgatggacacaaccagtatcgctgattttgtgaaatattctctgcaacacggtattgaagaaggtgtcagctgttttattgatgctgatgagatggctgctaaaaccatcttcaacatcggttccatcggtgagccggggcatgctgataacacagccatggtatcactgaaaaagaccgcgccgttcgcttctctgcttaacgtgaacggtcgcaagtccggtcagaaagaactggcggaatggctggaagactggcgcgataacctgatggcgtttgatgcagaaggtaatgttatcgatattaagcaggcaattaatgctgtgcgcaaaatcaccatcgaagcaagccgttccgcagatcatgaagacagtgatttcggcgctaagcgctcagtaatggaaagcgtggaagcaaaaagccgtgacattatgcctgcagtattccagtttacctgcacaccatacgatgaactgtctgaacgtactatcaaactgcgttacagcgttctgaccggtggtgaagtgcctgtgctggtactgcgtattgttcagctggaaaaactggaagaacaaatcgctcaggaattccgtgatctgctggctgataaattcgaagaaactgaaatccagacgtatatcggtaaattcaaagcttaa

SEQ ID NO: 284111 - DNA, 228 bp, Morganella morganii
atgtctgaacaagaaagaacaagcattaaaattagtgttaccgtgatattaggtgagccacccgccattaacattgatgtgcggagggagtttcatatcaatgaagatcaacctctcacaaaatatttcttagaaagagttggtgaatatatttccggcagcgaagcaactgcggacgcagtaaaaaaagccgcgcaagataccctgataaaaagagacatgcactaa

SEQ ID NO: 284112 - DNA, 387 bp, Morganella morganii; identical to SEQ ID NO: 283642

SEQ ID NO: 284113 - DNA, 402 bp, Morganella morganii
atgcttaaaatatttacactttctgctttaactgtactttcattttcagccttttctgttcctgagttaactaaaagcgatctgaatatacacgcacaaaaaaccacgaattccacctcagtaattaatggggacccattttatgtttcaaagtttgacgtcataatttcaggccctgatgataacaaggtaaaagggataacatgggtaagagatgggtgtttttttgccgttagtgatgacggagataggtttcctgcaggtcaaatggatggtgatatgctcgggtttattatacaaaaatcctcattttcgtatggcaaaatggaatttaagagtaaaaataaaaaaatatatgatgcaatattcattgattggactccggaagagtgtccaaaataa

SEQ ID NO: 284114 - DNA, 372 bp, Morganella morganii
atgccctggaggataataagaggggaagaaagttatgcctcccgcttcatcgggctgatgtgtgaaaaagaaccacagctgaaaatagcacagcaactggtgttggacttttaccggatcttgaaaacgaaaaacaagccacagctaagcaggtggttcactcatgtcagcgaaagcggtctggttgagcttcaacgtgttgaagccgggatggaagctgatgcagcagcaatatgtgaagccattaccagcaaatggagtaacggtgtagtcgaggggcatgtgaatcgcctgaaaatgctgaagcggcagatgtacggacgtgcagggttcgagttactgaggcgtagggtgatgagccctctggcttga

SEQ ID NO: 284115 - DNA, 957 bp, Morganella morganii
atgaatacattattcggtaaggtattactggcagcggtaatgactttcgcaatccacaataatgtgcttgcggagaatacaccgaaaccgccggtaacagcacaggtgaatgaggcggattttcagcatcactatacggatgtggcggggcagcggatacattatgtgacggcgggaaaaggcgaaccggtgttgctgatccccggctggccgcagacctggtacacatggcgttatgtgatgacagggctggcagcacagggatatatggcgatagcggtggatccgccgggaaccggtttttctgcccggccggacagtggctatgataccggtgcggtggccacaacgttacataccatgatgaatcagctgggttataaaacctattcggtagttggtcatgatatcgggatgtgggtcggttatgcgctggccggtgactatccggcagatattaaaaaaatcgtcctgaccgaggctgttattccgggtctggcaccggctccgggtatttttgttgatccggaggagaatattttcctctggcactttatgtttaatcaggttcaggatttaccggaaacgctggccgccggtaaagagcgggagtatctgaattttatttttgaccactgggcatactgccgtgaccgcgttgccgcacagacgtatatcgatgcctattcttctccgggcggactgcgtgccgggtttgcctattaccgggctattccgcagaccatcgcgcagaataagcggcgggcagagaaaaaactgactatgccggttctggccatcggtgctgatcacgcgacccgtgatgccccgcagctgacaatgcagggaagagcggtgaatttgcagggcgcgatactcagtgaatgcggtcattttgtgacggaagagtgtcctgaacaactgatggatgtagtactgccgtttttacgccaataa

SEQ ID NO: 284116 - DNA, 480 bp, Morganella morganii
atgttccgcgtcccaaactcgtcccaatatcccttcccctgctatactcccatcatcacccaccactccgaaaccaacatgcacaatatcgccaaccagccacaagacgaaaaagacaaaattaatgccgatttagccgcatccggtatcgcgtacaaagaaagactcggactgcccatgatctgtacgaaacaaaaaaccagcagcccgagcatttacggccgtacttcagagagaggctggagcactacagggagatcgggaaaaggtttccgcgcgggttcgagtatgagaagaactaattattttcctgcgcttcacgttctgcctgctcacgttctatctgctcggccagttcacgctgcttcacattccacactgagccctgcggcatttccacacgcacatcgagacgggtggattccggcaggtcacacggttcgccgtcccggtagaaaatacgctcaccttccggggtaa

SEQ ID NO: 284117 - DNA, 594 bp, Morganella morganii
atggattttaatactattgatttcgaatctatgctagcagctaaagaagcagcttactggtctttttggacgatgattggaacttggattgcaggtttggcaacactgagtgccgttattgtatcactttatttatcaatacgtgcagttaaaattaatatttctgggacggtaggcattaaggatttagttacaccaggaatttcgaatataaaaagagtattgagtatcaatatattaaataaaggaatacctactgctcatatcgtgaatataggatggaaaaccccaacagggaatttatttgaaagaattttttttaataagaataaatactatatccaaacatttaaacttagtgatgttattccaagtaaatggccggcgaaaatagatcatggcgaaacggtttctataataatagaaattaatgatcaggaatggataaaaaaatgggcaggattattatctttatccgaaataaaaaagttacggtttgctataactaattcattcggaaaaactaattatataaagccagatagttttttgattgatgaaattattcagatgaaaaatgaaagtactgattaa

SEQ ID NO: 284118 - DNA, 522 bp, Morganella morganii
atgaaaagggcaatcacagtattactcaacggctggatatgggctgttgtgttcttcggtctgtgggtgttcagcctgctgtcagcagaacaagcggaaggccagcacaaagacaaggttatcactgaccagcaaaaggtgattgataatgcttacaccagtattgatatttttaattatgcggcctcggcaaacgccagccggaatatgcaggcagaagccaaatcacaggagaagcagattgaataccgtaccattatccggaaagagcctacctgtaatctgtatattcctcagcctgtttctgatgggttgctcagccacgtctacgccatccgtgaatcagcaatgcgttccgctcccggcatcattgacacaaccggtactggcaccactgccacccgccgactgacatattgccaggcggttgagtggatagaaccactgctggtggcgctggatcaggcgaacgggcagctgatagagataaaaatgttgaagtctgaagggatgaaagggtag

SEQ ID NO: 284119 - DNA, 492 bp, Morganella morganii
atgaaagatttattggagaagaaattaaaaggcatgatcacgacatacaagggatgcgaatgcgatatgagcgagtgtatggtggacatgctgaacgatctggatgttgttggcgagatactaaggtcgaatggcgttgagtcagtctggttcttaaaactactagcccacaatggaattgttagtatgtttgacagggagtcagagcgaaaacactccgccgaagatagttttgtctacatcctgagttcagaaaaaacaaaactcacaaagatagggtattcgtctaatgtgagacagagaataaaagcattgcagaattcagggccggacggattaatactcaaatgcctgatacgtggtggcatcgaaacggaaagcatgctgcataaaaaatacgcatcgaaacgtaagcatggtgagtggttttctttgagcgaggaagatatccaatcacttcaatccatttcggtaaatcaaaaatccgaatag

SEQ ID NO: 284120 - DNA, 297 bp, Morganella morganii
atgtattgtgaaagcaataaaaaatatgtcactgaacttgacgtttttttcgatggaatttcggttttgggcagcagcaagcaagacaataactcaatggaaacatttatgtttagccggattgatcagaaatcaaatatgattgggtcatcgctatatgttaaaaatgtcaccattgaaaaaccagggtcttatgatgtttccttcaaactttatgaagacattaatggagagctcagtgatgtcttagacgagaaaacgtgttcatttatctccgctacaccgatgagggattga

SEQ ID NO: 284121 - DNA, 306 bp, Morganella morganii
atggtgaccagaagactttatattgttccaacagacggaagcgctgttgaaaaaaaagtaagttcacctcataattcatttagcgatggagatgacgggggtagtgatatgcttgaaagagttaaaaaacttgaatctcaggttgcctctttagtgactgatgttgcagtaataaagtcaaattatgcaacaaaagctgatgtatccacatcagcaaacaaaattattttatgggtggttggtgcggtaattttttcccagttactacccgcaatgccacacataatttccgccctaaccaaatag

SEQ ID NO: 284122 - DNA, 336 bp, Morganella morganii
atgagcaaatacccgagccaaactcaggacaaattcaccgtcagatttccagatggcatgcgagatgaaatagcaaaaagagcagagaaaaatggccggtcgatgaactctgaaatcattgaaatgcttaagtatatattggagataaacccgttatggctggatgagggagagttgtttattcagcatgatataatgacatcaccaataagagaaagaaatccaaacattgatagcggattacttctcacagaaataaaagccaagatagatgagttatcggccaaaattgaagctggaaatacaaaagaaaatgataattcagacaaaaaataa

SEQ ID NO: 284123 - DNA, 177 bp, Morganella morganii
atgaaagatgcactttatacacagagagaaattgagaagctgaccttgcggttaccaaagaatgtgaaggtagcggtagaggaaaaagccaaaaaggaagggttgtctcttaactctgcaatcattcagcggttggtgtggagcattaataatgataagcgcatgcagtgccaataa

SEQ ID NO: 284124 - DNA, 765 bp, Morganella morganii
atgtctaatttagcagttacgaaccaaaatgtcactatgtcaagccgtgagatcgcaaaaatcaccggaaaacgtcatgaccacgtgtgccgcgatatccgcaccattcttgttgcgctgattggcggaaaagatgctgattatatccgtaacccagatttgggttatcttacaaatcatcatgttacgtgcaaccagtatgacgataaaagccctaatgcatgggaatacaatattacccgtcgctacactgagatcctgattactggttacgatatcaagcgtcgcaccgctgttatcgaccgcctgtacgaattggagtcagagagacgcagtgcagcccccgccctgcctggtgcgaaagagttagcgttgatggtcattcaggcagaggaagaaaaagagcgcctcttgctggaaaacaaagggttggaatcgcaggttgaagaaatgaagcccgatgttgaagccctgacacgcattgccaaatctcatggatcaatgtgtgtgacggatgcagccaagcagttgcaggttaagccgaagtctctttttgacatcatgagccagtgcaaatggatttaccgacgcctcggtactccgtggattggttatcaggacaaaatccaacaggggcttattgagcacaaagtaacagtgatcactaaaccggatggcgaagataaatctatcccacaggttcgtgtcactccgaaagggctttctaaactggcaaaactgttaactcagggggcggcggcatga

SEQ ID NO: 284125 - DNA, 615 bp, Morganella morganii
atgtctattatgaccaaggaagatgcttacgcagctctgtcaccatactttcctttatttaccaaagcggttgggtctgcatgggatatgtggattaatggtgatgttgcatcaagaatgcaacataaaagagtgcgcgccaatgttatatggaatgattacttctactctatgcatagagcgatagaagatggcgattttggtgatgttagatttgccaaaattccctacaaccaaggttttgctattgatggacggttttttattaagttcaaaaaaggtgattctaacctcctgtcgtcaaatctacctacacaaaatgcattgaattttcacgaccctgaaattgacatgtttggagcagaggttagacttgaattactttatgttcttgataagagtgatatttttatagaaaaaattgtacttgttcagagaaaagaaaaatttattgcctgggcgatcgatttaacagaacataatgttgttgatttacctgaagcagttgagttaccaatgccacaagaatccaaaagaagtaccgctaagaaagttattcagtccaaaaaggcgaaccagaagaaattgaaggctcaaaatgaccaacatgactga

SEQ ID NO: 284126 - DNA, 1086 bp, Morganella morganii
atgaccaacatgactgatttaaagtcaatggtacggcctgaactgattgagttaagacgcaaaatgatgggaatgagccagaaagagttagctgcgaaagcggtgattactcagggcactctgtcaaaaattgaacaaggactcagggctgtatcagacgaacagttaatgaacttggctggcgcattagattgcccagtcaatttttttacacaacctgagcgcctgtatggtgggccgataagtgcaaatccgatgtataggaaaaaggcatctgtaggcatgagggtattagataaactggttgcagaaatcaatgtaagaatcatccatataaggaagttattacagtttattgatttcgaacctgaataccagttgccacactatgatcctgatgactatgaggagtctatcgaggaaatagcgaacaatgtccgcagagcctggtacattcccagagggccgataaagaatctggttgatgtgatggaacgggcaggtattgtgattattgactgtgatatggaagatactggtttatctggtgtcagttacaatattcatgggctacctccgttggtattcatcaataaaaatcagccaatggatcgatatagattcacgttggcgcatgaacttgggcatttagtgatgcataaatctcctagcccaacaatggaaagcgaagcggatagatttgcatcagagtttctattacccacacaggacataaaacaagaccttaaagatataacgttagaaaaggcggcatatctaaaaccatattggcgagcatcaatggcagctttgttttataaagcaaagcaaattggagcaatcactccaggccaaagtgactggatatggcgacagatgtcggcaagaaactaccggaaaaacgaaccaatacgattggacgttaatgatgaaaaaccaacactattaagtgaaatctttgattatgttaaagcagatttaggttatgaaaatagtgagctgacttcagtcctatgtttgcatccacaagaaattgatgctttgtattttgataaagtcagacatggtttacgtttagtgagatga

SEQ ID NO: 284127 - DNA, 1731 bp, Morganella morganii
atggcaaccgtagcagacgggatccggtacgccgagcaggtggttgccggagaaatagttacgggcgaactgatacgcctggcgtgtcagcggtttcttgatgatctggaatacggccctgagcgcggtatttatttcatggaggaacgcgcccggcatattctggatttttaccggttcgtcccgcatgtcaaaggggcgctggcaggtaagccgatcgagctgatgccgtggcatacctttattctgattaatatctttggtttcgtgatcccgctggttgatgaactcagcggtgaggctcagtacgatgatgacgggaacccggtactggttcgccggttccggacggcctataacgaagttgcgcgtaaaaacgccaaatccaccctctcatccggtatcggtctgtacatgaccggcgctgacggtgagggtggcgccgaggtttactcggcggccaccacccgtgaccaggcccgtatcgtgtttgaagatgcgaaaaacatggtcaaaaaggccaaaagctcactcggccgcctgtttgaatttaataagctggcgatttaccaggaacggtctgcatccaagtttgagccgctgtccagtgacgcaaataacctcgacggcctgaatattcactgcggcattgtggacgaacttcatgcccacaaaacccgtgatgtgtgggatgtgctggaaaccgcgaccggtgcccgtcttcaatccctgctgtttgcgatcaccacagcgggatttaaccgcgagggcatctgctacgaactgcgggattacgccatcaaggtgctgcggggcgtggtggaggatgacacctttttcgcggcaatttacacaccggatgaggatgatgacccgttcgatgaaagcatctggataaaagccaatccggggctgggtgtctgtaagcgttttgacgatatgcgccgcctggcgaaaaaggcaaaagagcagattgcggctcggcctaatttcctgaccaagcacctcaatatgtgggtgaatgccgaatccgcctggatggataccggtaagtgggacagctgccctgaaaatgcgccggatgatgagctgaaaaattacccggtctgggttggtgtggatctgtcaaacaaaatcgatgtgaccgcagccgttaaagtgtatgaggatccgcgcggacaactgcatatgaagtgcaaattctggctgccggaggacagagtagtgactgcaccgaagcatatcgctgacctgtaccggaaatggggagctgccggttatcttgaactgacggacggtgaggttgtcgatcacgacatcatcaaagccgacattctggcatggtgcgaaggtgaggatttacgtgaactcggttttgacccgtggagtgccgttcagttctcccgccgcctggcggaagaaggtattccgctggtggaggtggcgcagacggtgaaaaacctgtctgaatcgatgaaaaccgttcaggccgatgtatattccggcaaatttcaccatgaccacaacccggtaatgtcctggatgatgtctaacgtgacggtaaaaccggacagaaatgacaacattttcccgaacaaatcgacaccggaaaacaaaattgacgggccgtttgccctgtttactgccaaatcacgccagatggtgaacggcggggacagcagcgacttcctttcctctctggatcctgacgaagaaattctattcctatga

SEQ ID NO: 284128 - DNA, 714 bp, Morganella morganii
atgcgtaaaaacattcaggcggccatttttgcccatgcagaacgtgaatacccccgcgaatgctgcggggtgatcgcgcaaaaatcccgtgtggtgaaatactttccctgctgcaatatcgcggctacgccggaagagcattttgtcttatcgccggaggattacgctgctgcggaggattggggcaccgtgaccggcattgtgcacagtcacccggatgccactacccggccgtcagaacttgataaagcacagtgtgatgctcttggtgtgccgtggtacatcgtcagctggccggagggtgatctgcggaccgttcagccgcgcggtgaattgccattacttggtcggccgtttgtgctcgggtttacggattgttgggggctggtgatgagctggttcaggcaggaacacagcattgaactgccggattaccgggtggattatccctggtgggagcagggtgagaaccggtacgccgataactggcgggaagcgggatttattcaggttgatgatccgcaacccggcgatataataatcatgcaggtacaggctaaggtagctaaccatgctggtgttctgctcaatgataatatgttgttgcatcatttatacgggcatttgagccagcgtgttccatatggaggctattggcgtgaacgaactatcatggtcattagatataattggccgaaattaagagaattataa

SEQ ID NO: 284129 - DNA, 2973 bp, Morganella morganii
atgaaaaaacaatataatataattatgaaaaaagataactgtcgactgaaatgtatctttttcatggcttttgtttttttgccaaactcatatgcagttagcgatgaacaaattgtatatattgatgatgaaagctcaacaaaagattgggccgtaactatttatgacagaggtgattttcttgttaagggcaaagatggaaaacaagaaataaccattaatcgcaatgccgcaaatattggaggggttggaaggcgatacgcatcaaaaaatatggataaaataatttttgatttagataaacttaatataaaccttataaataaaggcgataatgtttcagctataggaggtggagcctcacaattagatgcatcaaaaacagatatttttattaatataaatcaaaaaaaaacagattggctaggtaggggcgagatatatggtgttttagctggaagttcagttacgatgggtattaatggagataacgataactttaattctagtcaatatgctattgcggagtttaaaaacttagatattaaacaaaactcagacgcatctactttaacactaaataacgcattaagggctatccaaggtgcttacagggattcaggtactggtccagcaggtaaaataattgttaatggtgatacatctatttatctaaatggtgcaagacaagaggctatttatgtatcaggtaaaggtaaaggttataacggtaatgaaggtgtaattagttctgttatattaaaaggcaataccaatatcatcctgaataatgccgcaggaagtgataatagtgctattaaaattggaaagacaagacaagtaggtacaggacaaggatattttgaatctatgggtaatttatctatagatatgaaaaattcgaaaggatctgctgtgaaattagctgtttctggttctgaattaaaagcagattttgatagcagctcaactaatattaaaactaatggtaatgcaataaatatagggcaaaatgattggggaactcaattatcagctaatggcattaaagcatctttcaaaaatgctaattttgagacaacatcaacaaatgattcattattgaaagtatttcaaaatcagggaagggtattgtttaattttaatggtgaaagaacaaatctagtcatgagagatgatcaaagttggttaattgatatagataactcaaaagaaaatgggtatgaaaataaagtaacccttaacttaaatgattcgtctaagattatggggttgtcaaatattgatgggaatagtgaactaatcttgaacctgagcgattcattatggcatcttaatgaaaataaatatggaagcatatcttcatttactactttgaacttgaatgattcctcaaagcttattgctgaaaataataacttcactttaaatggaactgtcaataatacatcaggcatcattgatttggtaaatcataaagatatcaatgataaaactaagttagttatattaaccattaatggaaattatactggtggtaatattaaaccaacggatgcaattccttttccagacggaaatagtcagttaattgttaacactatctggaataatgataatgactctgtaactgatcttctgcatatcaaaggtactgctaccggatacactcaggttcagacccaaaatagtattatcggtaatgtgactcgcggggatgctgaaaaatattctgttcctgttgtcacggtagacaaccacaaggaaggggctaatgccttctacggttttgcggataccaccggcgcggctcaggcccttctggtgcagaaagatgccaataattacacttggtatctggctaaaaatgatacacctgtagaccctgtagaccctgtagaccctgtagaccctgtagaccctgtaggtcctgtaaacccagtgaagccggaagtttccggatttattcgtatgccgacggcgaatatggaaatggggtataaccttatccgtacattgcatgaacgggtgagtgagcaacaaacaatggcctgggatgattgcacccagtgccagtcaactcaccgcgatgatcaggtctggggtaaaatgctgggtaacttagcacgggctgacggtgataaccgctatggttaccgttctaaaatgtggggggggcagtttggctatgactttaacgttaactataacgagaataccggctcacgtcgtcattccggcatgatggtgacatatgcacacgacacgttgaaatttaatgatcgtcgttctgtattctttgatactggtaacggacagtatgctgaaaaggataagcgtacgggtaccggtaaaagtgatatggtggcgcttggggcttatactacgttctacgataagaatggcagttacttagatttagttggtaatctggattacattcataacaaatatgagtctgtccgcggctctgaatcaagcaatgattcttacggtgtcgcagtatccggggaagtaggccggccttttgcgctgaccgataatggtatcagtaacggtgactgggaaattgagcctcaggctcagcttatctaccagtatcgtaccttcagtaatttcaaaaccgagcatgatgtcagtgttaatcaaaaagaccgtcatggattaagaggtcgtgcaggggtaagactggcgtataacaccggaacgccggaactgaaaaccaacacgatctattttgtgagtaacgttgtgcatgatttcattgataatgaccagacggtgaaaatcggttcagacagtatcaaagaaaaaactgcctctacctttggtgaagtgggcggagggattcagttaccggttggtgaaacctcctacctatatatggatgcccgctacagccattccctgagtaacagtgatggtaaggctgataatatgcgcggtaaccttggttttaaataccacttttaa

SEQ ID NO: 284130 - DNA, 1017 bp, Morganella morganii
atgaattacctgttaaccggctttgttcagaaagatgccaggatcctgatgtttaatcccggtgctgagatttgtaacttccggaacggtgcccgttatgttgtcagtgcggctccccgttcaatggatggcattccgtccggccgcgttccggcagatgcacatccgctgctgacagatgagcgggtactgcgtttcctggacaatcctgccgtggtaaaagctgccggtggtttacagggggttcgtcattacgtttcatcggtaagtcattgccagattggcgatgaagcagatccgtatcatcaccacgaactgaccatgacacgccataaagacggttttatcaggacgtgctggcatcatgacaacatcttccgggaggggaatatccaccagcagcaggcggatgaaatactgttgcgtaaccaacgggcatttgtggcgcagagcatatttattgatctgcggctgccggtcggccatcttctgaatccttccgatttgttcacgtggtctgtgatgcgccgcgtcagtgattatcttccggcctttatcagttcttacatcctgatgcagccaccggaagaagaaataaccggcaccatgacggagcattccattgttcaccggacacgctcacaccaccggattgttcaggacatcgtagagcagataaagccggtcgttgttcctgagatagagccggagcctcctgccagttttatgcggatcccgaagttaaaacgctgggagtgtcagaaatacctcttatgggtgaaaagccagccatgttgtgtgtgtgggcagcaggcggatgacccgcatcacattatcggccacggcaccggtggtaccggtacaaaagcacacgacatttttaccatcccactgtgtcgggttcaccacgacgagttacaccgggatccggcagcatgggaagcaaagcacggcagccaactggagttgttatttaagtttatgaaccggtcatacgggatcggcgtttttggttaa

SEQ ID NO: 284131 - DNA, 168 bp, Morganella morganii
atgcagaatggcagcctgtatctcacggccataatcttccaagctgaatgtcttggtcatgccggtaaaatcgagaaaggcctcatcgatagagtaagttcctgtggcggggcgaatgatgatagcaatgtcatcacactgctgctcatatcgccgtacaacgcataa

SEQ ID NO: 284132 - DNA, 288 bp, Morganella morganii
atggaacttgtcaagatcaacgatgatgtaatcctgacactgcttctgttcctagagcttgtccccgccgggtttccatcaccggcggcggactatatcgaggatcgcataaacctgaacagtgaactgaacctacatcctgaaagtacctatttactaaggagtgagagtagttcaatgattgatgccaatatctttgatggagatgtggttatcgtggacagctcggtaacagtggctgaaggtggtattgtgatagccagttttgatagtaattttaatgtctaa

SEQ ID NO: 284133 - DNA, 1104 bp, Morganella morganii
atggcacatgttatctcgcttttcaatcataaaggtggagtaagtaaaacaacaacggtataccatcttggatggaaattagcatctaaggggaaaaaagtactcattgttgatgctgatcctcagtgtaatttaacaggattaacacttggtcttgatgattatgaggcattaagaaaattttatgaaaataaaaataatacagatatatttaatagtttagcccctgtgttctcattggataatggttataagttaccatctgaaaaaacgacgataactaaaactaaaaatgacaatttatatatattagccggtaacattagattctctgaacttgatacacaaatagcaacagcattaacaagcagtacaactcttccggtgttgagacaatttgttggtgcattcaataatcttattcgaaagatatcagaagaacataacattgactacgttattgttgatatgagccctagcgtatcagcaacaaaccaatgtatattaatgagctccgattattttatagttccgatttcccctgatttttattgttatcaggccattgactcactgagtaatgtgttgccaagatgggtgaaagatattgatagctttaaacatgggacagatagtcctcttccaggaaaaagtcctaagatgttgggatttattactcagaattacagaatatatactaccgactcattagatagtgaaacaccaaaaagaatgtcgaaagcatatagtgagtggttggatagaataaaaaatgtatctaataaaaaattaattccgtcactaagtaaagaaaatatggtgattgattcagatatttttaaagaatcttgtaactatgatgcaccatttcatttggctggtgtgcaaaatttcagtggattaacgcctgtatctcaaagtttatcaaaaccaatttttgagttaacaaaggaagatggtaactggactggtgctagatgggttcatatgaaaaataataaggagtatggcatcaaagttaatatagaagatgcagacagagtatatgataaactagctgattcggtaatgaatatgattagaatggatgtaaacaaagtttaa

SEQ ID NO: 284134 - DNA, 510 bp, Morganella morganii
gtgtttaattccctgtcagagccgatgtggggattccgcgaaattatcaaacccggcgcatttgacgatgtgctgaatgatgatgtgcgggcgctgttcaatcatgaccgcaattatatcctcggccggtctgcttccggaacgttatcgctgagtatcagcgaacagggactggcctacgatattacggtgccggatacacaaactatccgggaccttgtggttgctccgatgttacgcggggatgtcagtcagagttcgttcgcgttcagcgtggcggtgaacggcgatgactggtatcaggatgatgacggcatggttgtccgtgaaattcaccggatctcccgtctctatgatgtcagtccggtgacttatccggcctatctggccgcaaattcaaccgtgcggtcaatggaggcgtggaaagaagcacgcgacagcagcggtatagccaaagctgtcaatgaaaaactggcgcgtgagcgtcttctcactttaatgaatgcataa

SEQ ID NO: 284135 - DNA, 906 bp, Morganella morganii
atggatgatgcgctgaaagcgatgcgtgacggtgcccggaaattcagtgacgaagcggagcaaattgataaaacccggggaatgggcggaaaccggcgcagtctttacgatgagcgtcagcagattgatcgtgtttatgccaaatctgatcagggaaaaagtgcgaccgaagcttataaccgggagattgatgcgctcaacctgaaatatcagaaaataaaggaagttcagtctgactggaccagcggggtgacccgggggatggaagactgggttactgaggccggagattatgcggagcaaaccgcatcagcagtgcagagcgccatgggcggtatggtgaataacatcactgacatgctgaacggaaataaagccagctggcgcgactggtcaatagatgtccttaaatccatccagaaaatactggtcaacgctgccatcgtgaacagcctgaaatccatgtcagatgccggtggctggattggtgctgtcggtaacttcctgggaggtgctgcggcaaatgccaaaggcggggtttatgactccccgggcctgagtgcgtacagtaatcagatagtcagcactccgacttattttgcgtttgccaaaggtgccgggctgatgggtgaggccggaccggaagcgattatgccgttaacacgggcggcggatggctctctcggtgtccgggcgctcggcggaaatcagaacagcggttcagcggcaccacaggtgtttattaccatagacagtaacggcagcagccagacgcagtcgtcggctggttatgagcagtttggtaatgaaattgccgcattcgtcgatcagcgtttccgcgtactaatggacaaagacacccgccccggcggagccgtctggaatctgactaaggggaaaagatga

SEQ ID NO: 284136 - DNA, 519 bp, Morganella morganii
atgtcagcaaatgctcagcaagatattaaaatgagtagtggtaaagaaaaaaacattctcaattgggagttgaatcttgaactagcagagttggctaaagataaaggttctgttcatacctcacgctttattaaaattgcatctgagcttttagctgaaagtaataagcggctagttattcggaaagtaaaaggtatatacacatttgatacagtagataaattctgtaataaaagtattagaattgagaatttatcatcaggtgagcgacagcttttatatattctatctcgtgttgcaaatacaaaggataagcaagcatttcttttgatggatgagcctgaaatttctttacatcttaattggcaggagaaattaatttctagcataaaaaagcttaataaaaattgtcaaattgtcattgtaactcatagtccagctattgttatggatggatatatggatgcctacgttgatatggatgaaataacaacggagagtgataatgtcaggatttga

SEQ ID NO: 284137 - DNA, 384 bp, Morganella morganii
gtggcgaatccgaaactgtcattaaaagaactggcactcagtccaaaaaacgccttccgctcaaaaatggtgaaggtacctgaatggaacggtatcgccgttattctgcgggaaccgtcttcggcagcctggctcagatggcgtgagctgatgaataccggctcagacggtgacgaaaaattgtcggaggcagaacaggcgcagcgcaatctgcgtgcagatgtggtgatgttttctgatgtgctgctggatgaagataaagagcgggtgttcagtgatgacgacacggaaacggtgatggctgtttacgggccagttcatgcccgcttactgaaacaggcgcttgacctgatgaccacgccggatgaagcggaaaaaaagtag

SEQ ID NO: 284138 - DNA, 189 bp, Morganella morganii
atgtctgatgctatccgtattgataccgcgagatataaagcagatttagcgagttcactttacagcgtcattctggatcaggcgtccaaagaatgttcaacggatttactccacctgatttcaatagcctgtgatttaaaccagcagatcagccagtccttacgtgatgaagatgaggtgtcagcatga

SEQ ID NO: 284139 - DNA, 324 bp, Morganella morganii
atgaaagataaattaatcatcaaaagcctgtcacctgctatctctggctggtgggctaaatttgtcgatgacgacgagcagaaaacagtgtggtattcccccgtagctgcatgggcgttatgtgatgtgaaatatgagaaagagacaaacgtttatgctcatatcttacccgttttaacatcggagtcaggcatggagccgttacatcctgatgacggatattgtgaattactgtatctgcctgatgaaacatttatacacgcaaatgaaccttattgttttgcgtggcacttagtgaacccggaggttaaaaatgagcattaa

SEQ ID NO: 284140 - DNA, 198 bp, Morganella morganii
atgagcattaaagaatttgagtttgatgagatggaagacgaaatcgccacgttaaaatcggcgggtataccggaagaacattgctatcaggcactgaccattctggaattaaaacgggtgagaaaaagcctccgtaatttagaggatgcgggggagtcacaagtctttcatctgcaacttatacattcgagcctataa

SEQ ID NO: 284141 - DNA, 297 bp, Morganella morganii
atgattaaacctgaaatcagcctggaagatatcagactgcactgtcgtattgatgatgctgaagatgaagatattttaatggtgtactcagatgcggctctggaagtctgtcagaagcatataggtaaacgctttaatgaggggctggagtttactccggctattaaggtcggttgcctgatgtatatcagcctgctttatgagaacagagaaatggcaggtaatgagaatctgaaagaagttccgttaacgattgattccctgtggtctgtttaccgtgacccggggatttattaa

SEQ ID NO: 284142 - DNA, 447 bp, Morganella morganii
atgccgtggcaacccttaaagcgatgcagctatcccggctgtaataagcgggtgaaatcaggccgctgtgatgagcacaagagagagatgagacggcagcaggacagcagacgcggcacccgtaccgaacgtggctacagtaaccggtggggccgataccgcctgatgtacttaaaagcgaatccgttatgtgtctgttgtttcaggtcggatatctacaccccggcaactattgtcgatcatattatcccgatagagggcgagcaggatgtgctgttctggcctgaatggaatcaccagccgttatgtcacacctgccataacaggaagacgcagcagcaggatccggcaatcaaacagaagcggaaaaatggcgcataccgtgaacaggaagaaaaggccgcacaccataatgactggatacatgagcataaccgtaatgcgtga

SEQ ID NO: 284143 - DNA, 156 bp, Morganella morganii
atgcgtgaagatgaaataaatcaactgattaaagggttactgaaacacagtgaaccctacagacaacagcaatggaaacgtgctgaaaagcccgtggcgaagcgcatatcacagcgtgacagggagataacagaatgtttccgcaatcgtcagtga

SEQ ID NO: 284144 - DNA, 309 bp, Morganella morganii
atgactgataaatgggctgattaccttatttctaaagtccgatataacgataaacacactcacattacccatgtgtatgtgtacgtcgataatggagatactgttggtggagggaaatcagaaacacggcagtgggtagtgaatcagctcgacagcggctatacgttttacaccattttcaaaggtgatgacggtaagtggactagaggtcaaaaagtggttaaggtctctgttaacggtactgattatattaccaccagatctaatggtatatccaaggataacttagaaaaccttcctgagtactaa

SEQ ID NO: 284145 - DNA, 891 bp, Morganella morganii
atggaacatactcttttttttggtaatggaataaatagactttctgaaaatcatgtcacttggaatgatttactagatcgtataaaaggcatcaacaattttaagaatggacaattgcccaatactatggtgtatgaacgaatttttttggaaaaacagatagtagatagcaccgaaaaaaaagatgagcttgaaataaaaaatgttattgctgagggattgcgagagcaagaaccaaataaagttcttgtagagttagcatcactacccattgaacattaccttactactaattacgattatgccttcgaaaaggcacttcacatctcaccagaaaagcatagcccagaggatatctatagtcttcgaagaaaaagaatatacacgttagacaactatacgaaaattttatggaatatacatggtgaaatagataaccctaaatccatcatgcttggattagatcattactgtggctcagtgagtaaaatagatacatatgttaagggtaaatattcatatacggctaatggaaccaattttcttattaaatccataatacataaacttagaaataattgtttttgccatacatcttgggttgatctttttttctctactaatgtccatatcctagggttttcattagactacagcgaaactgatatctggtggttattaaataaacgtgctcgcttttcatctgaggaaaaaataaataataaaatctatttttatactcataatatctgtgatgaaaaaaaagagttacttaaagcatttaatgtcaaagttattacaattgacaaaataggtgacagcttcgaggatatatattttgaagctatcaataaaataaaagcatccctcaatgaaaatccagttttataa

SEQ ID NO: 284146 - DNA, 258 bp, Morganella morganii
atgaaacttgttaagatcaaggatgatgcaattctgacattgtctctattcctggagcatgttcccgctgggtttccgccaccggcggcggactatatcgaggaccacataaacctgaacagcgaactgatcaggcaccctgaaaatacctatctgctcagagttgagggtagttcgatgattgatgacaatatttttaacggtgacgtgattatcgtggacagcgcggtaatggcagtgacagcgggtacaagatga

SEQ ID NO: 284147 - DNA, 525 bp, Morganella morganii
atgagcacagcaagcgagcattactggactgaaaattatcatttatctcttgaagaaatgaataaagaggatgcaatacaagacgttgaatctatgagtcatgacgagattgaatggaaagttaacatgagacgatatcagcaagattacatcgctgattatcttgaatatttgtgggaaatcagcccaaaatcattctgggctcatattttagttatgttctctagtgaaacggagttattgctttcagataatatgaaatttgtttccatattatgcaatgaagttgctccaaaagaagttattagcgctattgtaaaatatactatcgatgaaaattcacaagtaccgatggattctttacatgaagacatcctttcagaaataatacaagagcaaaataaactaggcgatagtgaaatagatttgcatgatatctacggtgatgaaattagtgatgaattaaaaataaaattttcagaaatattaaactcgcagattacaaacacatataaagactggtga

SEQ ID NO: 284148 - DNA, 1098 bp, Morganella morganii
atgactaactataatcacttcactatagattacatatctataataataactacacttgagattgaaatatcaacggatggtaaagcaaccatcctcccagagagaatatcaacatcaaaactagctactttaaaagatagaatgaaatacctatggaaggactctgaaacagcagttaatatatgcaaaaataagcacgatgctaaaattcaatcaggactatttgggctaattgacgactttaataaagccatgcaaattggttttttaatttcagaccgtgttattttaatagattatttattttgtcgtcttctgcatcagtcggattttacaagagtaaatattcctcatatttgtactatagctagtgaattggcaaatttactaccattggcaaaaagaggcagagtagtaattattcctaatccattctcttggcatgatgaatctaagcaactaattcgtaaatgcattgaagacagtgatagaacattcacaccttccatgatggctatggtcaacatgttttcaattattaatttatgtaaattacatccctataccattgctgaatctgatgctaattataatgaaataacatctgttaatataagcactgggaatgtcatatcaaaaccaagtttagatcatgctcaaaaaagactactcggttctcttttcactgaaaaaagtctaatgcgagaaggatttttcacctctcaaaaaatcaccatatctaaatttcaacaaatcatccagggaaataaaaaattccataacgaatatcttaataaaatattatccggaggtgaaatagatctatctataataggtgatgaacttgaagcttccattgcagaggaaataaataaacttgaccaaagaaaactaaaaaaactcatcccggcaggaacaattttatcctccgctggtggctatagtttagcatatttttgttcagcatcacctacactatctgtatttggttcgttgttaggtttttcatctactgtactaggtttactacttgacaaaaataagaataaagacccaattattcaagtttttgttgaattacaaaaaaatggattgtaa

SEQ ID NO: 284149 - DNA, 183 bp, Morganella morganii
gtgccgggcaatgattttgcggaatctgatccggaagaaattaacgataccctgggcaagcaggtggatctggtgatccacggcggttatatcggccagcagccgaccacggttatcgatttgactgacgacgtgccggttgtggtgcgtgaaggaaccggagatgtaacgccgttcctgtga

SEQ ID NO: 284150 - DNA, 450 bp, Morganella morganii
atgagcggtaaaaccgccgtcagaccgggactgaaacgggcattaaaggccattcagccgggcgatacactggcagtgtggaaactggacaggctcgggcgtagtgtcaaaaacctgatagccctaatatctgatctgcacgaacgcggcgcacacttccggtcattgacggacagtatcgacaccagtactgctatggggcgttttttctttcacgtcatgtcagcactggcagaaatggaacgcgagctaatagtagagcgcacactggccggattggccgcagcgagagcacagggcagagtcggaggacgaccggctgcactgacacagaatgaccgggagcaaatcggccgcctgctggataagggacattcccggcagcagctggcaattatttatggtgtgggggtatcgacgatttaccggtattttccggccacagtgtaa

SEQ ID NO: 284151 - DNA, 159 bp, Morganella morganii
atgacgaattcgaaggattctaaatatccggccagagcggatgctgccaaagcaccgccctatactgaacgcgacaagttatcagaagaagaacaggcggaacggagccgaaagttcaatgcggctctactttttggtaatgggtatttcgagctataa

SEQ ID NO: 284152 - DNA, 189 bp, Morganella morganii
atgatggagcacatcataaaagccagcagccgtgaaggtgacctggtagccgatttctttatgggatccggggcgacactgaaagccgcactgaagcacaatcgccgcgttctgggtgtggagatggaagcggaacggtttgaacagactaaggcagaaataactcaactctccggaatttccggatag

SEQ ID NO: 284153 - DNA, 216 bp, Morganella morganii
atggatattcaggatggctggctgaccacagcgcgccgggtgatttcaccgcatcacgatacccggccggaacaggtgactccccgtttactggtgatccacaatatcagtctgccgccgggacagttcggtggtccgtatattgaccagctttttcagggcacgctggacccggatgcgcatccgttttttgctgaaatacaggcgctgcgctga

SEQ ID NO: 284154 - DNA, 321 bp, Morganella morganii
atggccggataccggataccggataatgaaattaacggcaatcaggccagtcagtatctgagaatgaaatgcagcaaagatgccactgtccggatctactccgtgagtgatacggaatcccggctgagactgaaaaacaatctctacagcagactgacactgaacggctatccgctgaactcatccggcggtggtgtaccggtttatgtacgcggggattatgaagcaaacgcactgctgaaaagcacactggaaaccaccgggccggtggaagccgggccttttatcggtaatatatccattgttatgaccattgactga

SEQ ID NO: 284155 - DNA, 153 bp, Morganella morganii
atgacactgaccatgcttttccgtaccggctgcgcggcactgttgtgcctgccgctgatggtctccggcggttcttacacctatatcgatgtgtatgtccgggggagatatttatcgcaccctgcaaaattaatcagggcaataatatcctga

SEQ ID NO: 284156 - DNA, 1731 bp, Morganella morganii
atggcagaacgaaaatttataagtgaactatttttagagaataatcaattcatcttggtcggattaaccggacgaactggttcaggctgtactacaacagcaaatattttagaaagtaaacatatatcctttccggaattaaatagcctaaataacttttatactggattagatgcaaggcgatacactatagttaaaaattttgcagaagagcattgggagaatttttattctataaaggtcagtgaccttatatcaatatatctacttcttctcccgaccaaaaaaatgagtgacttcattcattcttgcggagaaaacttcactaagactgctagtactcatttagttaaaaatggagttttatcaaaaagctttttaaaagataaatatagtaatgttatcaagcaacttttagatcatcaatctgaaattgattttagcgatccaaaaataacacggtcgttcattagaatactacagttagttagaaaattcactagagatcttaaagcagagttaaatgaacttgaatctggtctatatgtctcagtatatcaatccgctggtaaatcaattagacgaattggtaaggttgatgctgactatgaaagtaaaaattttataccaagctctgtatttcatttgccagaaaccattaatagagttattaaatcaattagaaaagtaaaaaatgagagggcatacattgttattgatgcaataagaaacccttatgaagctaaattttttaaagatcgctacgccgcgtttcatttagtttcaattaacgccccagatgaacatagaactagatatttacaaaagctgcataaattttcagctgatcagatcaaaaaaattgataatgaagaatcgggtaaaggagatagcgaatataaacacttaacgaatccaaacgtaaaaaaatgcatagaaatttctgatatacatttgtttaatccaaaaaatgagtacgacaatagcaatgtgttaaaagcacaaattgcatggtatattgcattgatgcaacaccctggattaatttctccgacatcgatggaaagggtcatgcaagttgcatatacagtcaaattaaactcaggctgtatttcaaggcaagttggtgcagttgttactgacaaagataattcaattaaatcagttggatggaatgatgtagccaaagggcaaattccttgtgcaatgagatcaattgaaggattaatagatgactttaactccgaaacatacagtcactatgaaaggaatgatgagatatttagaggagcggcgcgagaattttatgaaaaatttaagcctgtaattctacaatcaaattcctttaaaggaagaaatatttcatattgttttaaggatatacataatagcatagacaataaaagtaaccaagtccatactcgtgcgttacatgctgaagaaaatgcttttttgcaattagttaaatatggtgggattggtattgttggaggtaagctatataccacagcaagtccatgtgaattatgtgcaaaaaaagcgtatcaactcggggtttcagaagtaatatttatagatccttacccagggattacgcaagatcatattttgaacattggttccatgccgccaaaactaatacaatttagaggtgctataggtaaagcataccatcgactttatgaacaggttattccaataaaggacgagttggattatttattgaaataa

SEQ ID NO: 284157 - DNA, 1281 bp, Morganella morganii
ttgctggatttaacgctgaatacgacggcctggtgtatgcggatgtcccagaaagagatgctgccccggggactaccgtcggaagagcagagccgtcagttcagtgcctggaatgtgtgcgtgttttataccgggctgttttactggttgccgttaaccgcacagtttgaggggcaactgaacagtctgtcaccgtggcagccggggatcagtccgccatcagagccgtatcgttttcgctttcatgagccggttccggatatagctcattttcgccggacaacaggggccatgatggctttcagactattaccggagaaggttattcactggttgtcggggacaccaaaggtgcttcaggcgttgtctgacgtggtgaccgggcaggtaaacggtgataatgatttacagcgcgtgctgaatgaggcactggctgcatttcccgccggtacactgccggcatgttctcccgttgtgtctgtgcctgatgcttcgtcttcagtgccatcaggactgccggagagtagtatcgtgtcattggcgcctgctgaattggcgcaaaagccacaacctgaaactccccctgtaacatcggtattaccttcggagtctgttacttcagaaaaaacagagaacggaatttactgcgatataccgccgatggcagacgcagaagcggaaggcgtggttgctccggagacacctgattctgccgatgaaaaaacggtctcagatacgtctcttccgttatctgaggatatgaaatatgcacttgaattatcaggtttaatgccggacgtcttatctgatactcagacgggcaatagtaatgagaaggatgaacagttcaaaaactgcctgagtacaaaaaatgaaggcgaagctttctgggtgtggtttgagtccggattattgggcggaaaaatggcaataaatacgccggatgcgaaggttcactgtgtcatggagtatttgttttgccagagtccggctattttttatcagtacatacaggagacgggtaaaaatccggatgatatcggccatattatttcttcttttgaatcccttaaacttcaccggatcattcgtcgcgatacccggcaatcggggcatttcagagcacggatttatggtgaaaaactgaatccgctgagtgataacaaaacattaattacgttatcccataaaaaaattaatggttacatgattaaaggaagtcagatttttggcatgaatatgcctgaagaatcattgtttattcgaattgtcagtagttag

SEQ ID NO: 284158 - DNA, 1371 bp, Morganella morganii
atgatgtatccagcagaaccgtatcgtattaaaagtgttgaaaccgtatccatgatccctcgcgaagagcgtatcaaaagaatgaaagaggccgggtacaacactttcttgttgaattccaaagacgtttatgtcgatttactgaccgatagcggcaccaacgccatgtccgataaacaatgggccggcatgatgatgggtgacgaagcatacgcgggcagcgaaaacttcttccatctggaaagaactgttcaggaattattcggctttaaacacatcgttcctactcaccagggccgcggtgcagagaacttactctcttcattagctatcaaaccgggtcagtatgttgcaggtaacatgtacttcaccaccacccgttatcaccaggaaaaaaatggtgcgacattcatcgatatcgtccgcgatgaagctcacgatgcgggcctggatgtgaaattcaaaggcaacatcgacattaaaaaactggaaaaactgattgctgagaaaggcgcggaaaatatcgcttatatctgtctggcggtaaccgtaaacctggcaggtggtcagccggtctctatggcaaacatgcgtgaagtccgccagttatgtgataagcacggcatcaaagtgttctacgatgcgacccgctgtgtggaaaacgcctacttcatcaaagagcaggaagaaggcttcgaagatgtctccattaaagacatcgttcacgaaatgttcagctacgctgacggttgtaccatgagtggtaaaaaagactgtctggtgaacatcggtggtttcctgtgtatgaacgacgacgacatgttctctgctgcacgtgaactggttgtggtttatgaagggatgccttcttacggtggtctggccggtcgtgatatggaagcgatggctattggtttacgcgaagcgatgcagttcgaatacatcgagcaccgcgtcaagcaggttcgttacctgggcgaaaaactgaaagctgccggtgtaccgattgttgagccggtcggcggccacgcagtattcctcgatgcacgccgtttctgcccgcatctgacccaggatgagttcccggcacagagcctggcagccagcatctacatggaaaccggtgtacgttctatggagcgcggtattatctccgcaggccgtaacaaagaaaccggcgaccatcaccgtccgaagctggaaaccgttcgtctgactattccgcgtcgtgtatacacctatgcacacatggatctggttgctgacggtattatcaaactgttcaaacacaaagaagacattaaagggctgaagttcgtatacgagccgaagcagttacgtttcttcactgcacgctttgattacgtgtaa

SEQ ID NO: 284159 - DNA, 333 bp, Morganella morganii
atgaacaaatatcgtgacaaatcagactttgagattaataaggctgtggctgttaatattaatggctctgacgctgttgtagagaagttcggtagaatatatatcagtgacagtgatgcgatggtgagcttcgacccctgcaacaatccatatgacgcaatgccgattattattgagaattgtatagggctgcttccatatagaaactcacaacctatcgcgtttgacttacggaaaggacttggtcgcggattttcgataaaaaataaaaatatataccgcgccgctatggaattattcctgatgatgaaggatgcggagaatgagaaatga

SEQ ID NO: 284160 - DNA, 222 bp, Morganella morganii
atgacagataaaaactacgccccatattacgcgaaagatggctctaatactgcggcatcattacgcgacaagttcgcaatgactgcaatgcaaggtgatttagcttcacaggatgagaatacgggctattacgaaaatagcactcctgatgaattcttgacggccagagctgaattttattaccgcatggcagacgcaatgctcagagcaagggagatatag

SEQ ID NO: 284161 - DNA, 456 bp, Morganella morganii
atgttctggtttctttcgtggatggtgcttttattgtttatcccggctggctgggctgaatttattgattccggaattgggaagtggggcgttccgtatattggaactgctatatttttgattccgatatcgtttttcatcagcttaatgataaaaaacacatgctattacatctcctttgtatcagaggctataaaagataaaaaacaggcccataacgccagagaggtactcttctctttaaatgacgaagaggcggatgctatcaaatatatttttgagaacggcaactctgattacatggataactgtacggccaccactcttttcagcttagtggaaaaaggcattatctatagctctggctatggttcaccactgtccagaacgtactatctgaacaaagagtatgaaaatgctttcatccgaattatctctgaagtagataataattag

SEQ ID NO: 284162 - DNA, 744 bp, Morganella morganii
atggttaaagcaaatgatgcaaaggctgagttcaccgctaggctgcaagaagcttgtttggatgctgggcttgctggtcgtggactagggaagagaattactgatgctctttctgaacaggggataaagatcagtgggccagccgtttggaagtggttgaatggtgagtctgttcctgactcaacaaacattctcgcactgagtaagtggcttggggttcgtcctgagtggcttgaatacgggaggggatctaaagtaaccgacggagttccgatatctgaaataaaacaaggtactgtagacgtatgggacagttcatcaccgctggatgatgatgaggtatttatcccatatttttctagcattgagcttgctgctggatgcgggcattgtaataacgaagattataacggacataaattgaaattctctcgcgctactttaaggcgatatggagctgacccagcaaatgttgtttcattcccagttcatggggatagtatgtctccggtgattcctgacggatcaacagtaactgtagacatgggtcataaaaatatcgttgatggcggaatatacgcaattgaacaagatgagcttttccgcgttaagttgctatatcgccaaccaggaaagatagtaatcaaaagctataacgctgatgagttcccggaagaagagaccgagactcacaaattaaaagtaattggtcgagtgattaactggtctgttatggcctggtga

SEQ ID NO: 284163 - DNA, 231 bp, Morganella morganii
atgaacccagtcgaatatgcagttaacgcagtaggtggacagactgccgctgcaaaaatctgcgggataaccaccgtagcaatccataaatgggtgaaaaacgggagcatcccgcgtactgagtacacgcagaaaaccaattattcagagcttttggctcaacattctaacggtgtattcaccgccgaatggttacttgaagcagctaaccctgaccggaaagtagcttaa

SEQ ID NO: 284164 - DNA, 186 bp, Morganella morganii
atgacagaaacacaacacatagcatttatcgccagtcgggtgtttgcggctagtgtgtggtacggatctgaatttttgttaccggccaggcgggcgctgtatgcgaaaacacgtgagctgatagcgggtgacagggtgcaggcaatatgccagcaggtgattgataaggagaatcataaatcatga

SEQ ID NO: 284165 - DNA, 423 bp, Morganella morganii
atgacagattatcaattcagcacatatgtggacatcatcaggcgatgcagagatatcgaccaactcaccaacactgagatagcgctgcgctgcggttcgtcaaaggaaagaatgtggccatacaccaaggaaatggtgaatatgggatgccttgtgaaagtcggcagtatccgtagcaaacagggacaccagtcaccgttatatgcggtatcgccacatgccgtcacccgcctgtatcagcaccggaatgaatcaagaagcaaaccaaaagcgccggtcatccgggaggttgctattcctgaagagccgccaaagcgcattgaattttgcgggaaggtggtcagcaaggcatacatcacttcggattttggcaggtcagaaataaccagaattgactcaatgctgcgggaggttcggacatga

SEQ ID NO: 284166 - DNA, 159 bp, Morganella morganii
atgagtaaggagtcgttacggaaggcactaaaaaataatccggcatgggtagagcgttatcttgatttgggtcgtccgtcaaagatacgtacgaggtatgtaatacttttcttctctgtcatcgctatcgttattggcatctatgaatactggtggtga

SEQ ID NO: 284167 - DNA, 237 bp, Morganella morganii
atgcgaagtaaagcaataagacgccatcacgagaagcgcctcaaatccaagcgcagcaaatattacaatgccggacgcgccactaagcgcaacatcgggatgtgttaccgcacccccgcattgtgtggttgctggatgtgcgctaaccacagaaaggtattcggcatgagcatcaaagaagttcgtgaccggcagcgctgcattgatactgagcaactgctgcaaaatatgcagtag

SEQ ID NO: 284168 - DNA, 363 bp, Morganella morganii
atgaataaattaatcaaaaaatcacacggccagccggtagtaacaactgacgtgatcgccaatgagtttggccggcagcataaaaacgttcttcaggatgtcaggagcctggtcgaaagcgggcatttaggagagcttgatttcaagccctcctcatatatctcaaagcagcggaaagaattaccttgttatgagctgactgagcgcggattccttatcgttatgccgtttattggcggtgagaaagcaaaagacgggcaggttcgcctggttgacagtttctccagtttcgtgaaaaggcagcgaaagaagcgcaggtgcagattgagcgtaatgttgccagagtggaatacaagcctatga

SEQ ID NO: 284169 - DNA, 1137 bp, Morganella morganii
atgactctgtctatcaatgatcaaaacaaacttgatgcattctgggcttattgcgtaaaaaaccagtatttcaacatcggctatcctgaatcagcggatttcgattacaccaacctggaacgtttcttacgtttctccatcaacaactgcggtgactggggcgaatattgcaactacctgctgaactctttcgatttcgagaaagaagtgatggagtatttcgcagacctgttcaaaattccgtttgaacaaagctggggttatgtgaccaacggcggtaccgaaggtaacatgttcggttgctacctgggccgtgaaatcttccctgacggtaccctgtactattcaaaagatactcactattccgttgcgaaaatcgttaaattactgcgtatcaaatctcaggttgttgaatctctgccaaacggcgaaatcgactatgacgatctgatgaaaaaaatcgctgacgataaagaagcgcatccgatcattttcgctaacatcggtaccactgtccgcggtgctattgatgatatcgctgaaatccagaaacgcctgaaagcagccggtatcaaacgtgaagattactacctgcacgctgatgcggcactgagcggcatgatcctgccattcgttgatgatgcacagccattcacttttgctgacggtatcgactcaatcggtgtttccggccacaaaatgattggttcgccaatcccttgcggtatcgttgttgcgaagaaagaaaacgtggatcgtatttctgttgaaatcgactacatctccgcacacgacaaaaccatcaccggttcacgtaacggtcacacaccactgatgctgtgggaagctatccgttcacattcaactgaggaatggaaacgccgcatcacccgcagtctggatatggctcagtacgctgttgaccgtatgcagaaagccggtatcaatgcatggcgcaacaaaaactccattactgttgtgttcccttgcccgtcagaacgcgtctggagagaacattgcctggcaacgtccggcgacgtggctcacctgatcaccaccgcgcaccatctggataccgcgcagatcgacaaactgatcgacgacgttatcgcagattttaacttacacgcggcataa

SEQ ID NO: 284170 - DNA, 213 bp, Morganella morganii
atgcaaaccgaaccaatcatcaccactaacaacatgtcagcagacgaagttgcggcgtggatcactgaaaaagcccgggcgcttcaaaaactgcaatcactccgtgctgagcaccaaagagagatacgtgaccacgagcgcacgatggcccgcctcgatgaagacattgccagatgggaagacttctgtgctttagcagtacaaccgcagtaa

SEQ ID NO: 284171 - DNA, 981 bp, Morganella morganii
atgggacagactccttttcttagagctattggtcgtattggacatgaaaatttccaaatccacaactttagactggatgcgttgaaccagttgtataagaagcatgaagttattgaacgcttggtcaacttatacaagaggaaaagaaacaaagttctctctgatcttgcagagaaagagtttgctgaacgtgttaaatcgtttaaagactgtgatattaatatgatgatgtactgtgttattgcgaaggttttttatccgttttcaaccccaacatctaatgctgaagatgtcagtttgtaccttacgaagttcaatgatattattaaaaaagacaaaaacatcatggactcattcgttaaggaactagttgaatctaaattcattttcaatcttcaagaggattgctttgagatttacccgagaatattagagctagagttagccctaagacctgcactatttttagactacgataaagattatgtcgatggacatgcgcaagttccttatcgtgtgtcttctcgtgaatttaaaaattataaggatctttataaagatatttcagagataatatctagacaaattgtgctcgtagcaggtgttaataatttattaaaacgtagtgaccacaataaattctcagatgagaatattaaaaatcttaacgactttgctaataagccatttggtaagaagctcgaatacattgatgatacttggctaccgatctcaacgagtgtcgctgataatcagttaagaaatgcggttgcacactataaagctgaatatgacgaagtttcgcaaaaaataacgtacttccctaggcaggaggggatgaagcaggaaaaaccaaacgaaatatattttttaggttttacacgaaaaatactagactcgtatcgtttaatgcattctctaaatcagttaattaaatgcttgttaaactacgagtatttcatgagaaataaaaattcataa

SEQ ID NO: 284172 - DNA, 1053 bp, Morganella morganii
atgcttgaaaaaataaccactttcctccgaaaaaatgccttaactatgatattggcatttcttccaccgatactaatttggttctttctccaaaaagaatctgctgcattgagtgtcagtgcaacctctgaaacatcagtgatctctgtgaattcagattactccagtgatatagaggtgttttataaaaagaagcccattgctggcctatttgtagcggacattcgtgttaaaaatgaaggaaaccgtccaatagaaaaatctgattttgataaaccactaacaattgatttcaatggggaggtaattagtcctgtaaaaatagtgtccactattccagatgggcttcctgtaaaggtcaaaacggctggtaattcagtagaaatagaacctctgcttattaatccaggcgacatatttagcatccaagtaaaggttatagatcctgcgcagagtaaactaggaataaaacctactgcaagaataaaggccataaaagacattgcctttagcccgtactctaaagaagacaacccttggtatccgttcgtccttggtgttatcgtttcattacttgtgggcatcagcttaatttcaggcataattctattcaaacagttcaagttggttagcatatccttaccaggaatcacgcttgatttaaccagagaaatagaggctaaccacgaaataagtcaaagaatggaaaagatggctgagaaattatcaatttctggtcacgattttaagggcaacattctctttttgagactaaagatcgaaagcttattgagggagcttgctggagcgcatgaattgaaggtcagaaatccaggttctgttagctttttaagtagagagttggctaataatgaagttatcgatctaaaggttgtatcacttattcgggatataatgccagctatgaatcgggagttacatgagtctgagagctacttgactgagagagaatttgaagtgcttcagcatgcagcattatcaataatcgcttcattggaagaaaatcttgagcacggtaaaaatcaaagataa

SEQ ID NO: 284173 - DNA, 1224 bp, Morganella morganii
atgaatgatggggaaaagttagaacaaaagcgtcatatctttcatgaaaacttaaaaaatactactgattgtatcgggagatgtagtagagacgagtttacgacagaggttgtcaataatctaaaaaatagtatcaatataaaagaaaatgtaattactatccttgataaggtatattttgatatcaagttagtcaatgaatacataaatgatcgtagtgatgttttgtttgatatgtgcaagaattcaagagggtttggacttgtcaaatacaatgatgaaaccgatggtgttaattatttattatatatgcatacgtacttcatgcgtgtaattatagagtataattacataagggttgatgataatttaataaccatgttcttgcgggcgataaataactaccatcagtgtgattttatatatgagaatattagaactgattattcattcagtgtgtatgactattttatttatacaaaaaacgattttccattagagttaattaagagtgactttcaatcattacaaaatgaaaataatgaactttatattattaaagaaagtgttaataacttatcagttagaagtaaccagataataaataaatttaatgaaattgatgagagtggtggggattatattttaaaatttaaaagtgagatgcaagaaataagtgaggagttacgaagtggcatttttgagaatgtaaaaataattaaagaattagagagtaatgttaatgaaataaatgctggattaacatttattggtcttgaaaaggcatatgaaaaatttgcaatccaaaaaggtagagagaaaaaaaatgcacggaatgttttaaaaatatcaatagcatttttattcttaccacttctgattaaagtgatttcatatttatttggtatcgtttataatttttatggatatgcgcttacagcaacggcaaccttgcttcttttatatttatttagagtgtcattgttaaattatcaatcattaaaggcagagcttacccagattaatttaaggagaagcttatgtatgtttattcagggttataccgaattttctactaagtataatgatcagtcatctctatcaaagtttgaaagtttagttttttcaaatgtgatacctgattctaaaaaaataccatctactcttgatggtttagagcagttagctaaattatttgaatcaataaagggaaagaatagttaa

SEQ ID NO: 284174 - DNA, 159 bp, Morganella morganii
atgtcacggaatcctttaacgctgatcatcattgctatcattctgctgacggcttgtctgctggcgggttgttatctgtattcactgctgaatcactgtaagtcgctggtgggtaacccgctggacggtgtgattcattatgagtgtgaagcgccatga

SEQ ID NO: 284175 - DNA, 204 bp, Morganella morganii
atgcgtggtgttatggctgctttcctttttattaccccccatggccagcgcactgcccatattggatatcagattgccccccacaccgccaccggtgctcaggctaccgccctggtgttccacccggtattctgctttattctcgatattcttaaagcccagtgtccccgtgtcaaggcggtttttctccgcatttccttctga

SEQ ID NO: 284176 - DNA, 1023 bp, Morganella morganii
atgcccgtccaggctaccgccggcaacaatctggctgtcatgattaaacagacgggcggtatcaaaccggatatttccccccgccagtattttccccgggtcagtggacgctatctgtgtctccgtgacggtcctggtatagttatattcataaaaacgatcattttcgctgccatccggcattcttgctgtatggacgccatatttattcttcttgctgagatcaacatctgcccagtcataacgggtggtactgccgttaagaacgccttcatgatgctgacttttctccaccaggaccgtatgtgtttccagtttccggttggtattattcaccgtctgcatgccgataaatgcatcgctgccggcctcaataaatgcaccgtcattattcaggacatcaccccggccggttgcacgataatcgttatccagatgacggccaaaaaccatattaccgagactggtgataagtgcatgcccacggttattaaccgttccggccgcaatatccagacgatcacgggatgcgattaccggggctttgtcaccatcccggtcattattcagaacgccggcttcgacagcgagatgatcaccaaaaatccgcccgctgccagtgttgttcagcacaccggtcgtcaggtgtgtcagttcaccgtcaatcagcccgcgattctccagtgtgccggccacgttcagatgcgtttctttcgccgtgatatcccccagaacagtattgaccagattatccgcacggatctccagcccctgctgtccggcaatcaccccgtcattaatcagccggcggtcggtcaggagcgtcagatcaccgttcgctttaaccgagccggtattacggaaatcgtcggccacatgaaccgtcaggcgatcccgggacaaaatctgtccgtcaccactcactgccagcgcagaaatatccgcactgtcatcggctatcagcatcccttcacggttgttcaccgtcagcgcctgtccctgaacagagagcgttttctgtga

SEQ ID NO: 284177 - DNA, 249 bp, Morganella morganii
atgcaacacggcattcccgtcagacacgatacgtccgctccggttatccgtctccccggtcgtaatgatcgcctcaccggcagcagagataccgccacgggaaaccgtatcacggttaatcaggcggttcccctgtgtgtcaatcgtcagtccggcgccggagagaatactgccggcggtattgtccagttgcccgccggtgattgccagcccccgcagggcagtgatcaacccggcagtgttatctga

SEQ ID NO: 284178 - DNA, 420 bp, Morganella morganii
atgaccggtggtgatccgcagttcaccgccgacctgcatccgggcgttcacattcaccgcccgggcaatcagcgcagtgtagtcactgtcctccgccagcagtccgcgcccttcaatactgagccgtcctttgtcaacatcgaaacctttcagtctgccgccgtccatcagcgctttcccggcggccagggtcgttctttccgcattgataaaaccacagccattgcaggtaataccggacggattagcgatcaccacttccgcacgacgcccggcaacctcaataaaaccattcagccggctgggatcacggctgttaacttcattgagaatgatcctggcctcaccctttgccagccagggattaccggtaatattgccggccagacgggtctgtgtattactgtgactgttatttaa

SEQ ID NO: 284179 - DNA, 528 bp, Morganella morganii
atgaaaaaaacttgcttacttatctcatgtttttctttatggcttttaaccggatgctctgtacaggaaatcactgagtggaatcagaaaatcagtgatctgggtcatcaggtcagtaataccatgaccggaggaaaacaggaacgaagtaaaaaagcgactgatatgacgattccggtggatattgataccgttgcatcccgactgcgacgctattatggttttacggatgtgaatactcagattgcaacacttcagagagggactgttaacgatcagtgggccgcagaagcaattgccgctgaaggacatacatttgaagcaacaccgggtagttattataaattcgggcgtaagctgggcaacaataatccactggatgaagtgattctggaactggaaaagaatggtgcagggacacgggtatatgtggtttatcactcctcgttcagcgggcatttaacggaggagtatgtggatccgctatttaagcagataagggatgtcgcctccggcaaaatcagataa

SEQ ID NO: 284180 - DNA, 1197 bp, Morganella morganii
gtggcgcgttctctgtatgaggaaacgctggggaaaaaattatcactccgggcattcgcccagcgcatgacggcggacggattacccgtcagcatttcacacatcagcaagatggaagatactgtttctgttttattaccttatatgccccgtttactggaaaacgggctgggaagaccccaaattgagcaattattatccgtgcgctcgacattaaaacgggtggcggattcgttactttttcagcatgacgatccggacccggtccatgactttctggggtgttttgaaagaacatgtacagaaatagataaccatgatgtttttgattatgacgtgtttctggatgaactgattggtcgtcttctgagggagtgttctgttgatggtgtggattatgaacgctgggtatttgaattgaaggtcaataaaggccggcgcagtacaaaaccggaatggcctgtaccggtggacagtgaggatgaaacaacaacggcccattcagaaagcggacataccggtattacttccggtttttcggcggaggatgtgttaacggagccactgtcttctgattcaggtcaggagacttcggtatcccctgttgttgaaaagaaaaaatcccgtccggttgtggagatccagacggatttatacgggggggcaccggtactgagcggagatagcgatgaagcggatattgatcctgacatcgtcggcgtcatgtctgtcccggataacgcagagcgtaccacaccggtagaggtaccggtcgctggttattctgcggctacactgacgtgtcaggatctctggccgatggcctcacatctggatgatattgaacatcttcagacgcaaatttatcgtactttgtttgaattagggaatgaactggatatctcccccgaatttatggccgcctccggggtgcattctccgggatttaccatcttgtcagagacttcggcgctgggacgtgtgatgactgttttctcagcggaaaacggcgctcatgatggtattccgggcgctctcagaaccctgctgaccggcggaaatcaatccgggatgccaccggttttgaatgatgtccagtttatgacatggatgaagctgatgtacttgttgcgttgtctgtatgccagacaaagagatgttgatccggatgtgaatgatgaagaggaatgggaataa

SEQ ID NO: 284181 - DNA, 321 bp, Morganella morganii
atgctttctctggaacgtgcaaaacagcaggtgagactggatcaggatttccatgatgaagatgagttgctgaaatcttacattattgccgccggccgcctggtggaaaatcataccaggcgcaccttaatcacggattctgatgaaagcccggatccggaaataaccctgatttataacggtgatattgaagtcgctatgctcctgctggtgggtaactggtatgcaaaccgcgaatcagttgtaaccggtgaatccgtgtcggtgttgccgatggcggttgatgcgctgctgcaaccttatgtgaggtacctggaatga

SEQ ID NO: 284182 - DNA, 324 bp, Morganella morganii
atgacgcagcaaccactgatgcacctgcctcccgtcctggcggatacagtgcaccccggcactgcccagactgctgaccagccggtcacacatctgattgagcatcgccaccggcggcatcggatcggcatagctgttccccagccggcggtaaaccaccatccgggtccggcgctgctgtccgcgccagggttgtccggtcacctccgtgtccttaaacagcccttccgggcgggcgatcccccgcaaatgacgtgccatttcggccagccaggcttcggtaaacgccgtgccccgggccgccggcaggatatagtcccgtaa

SEQ ID NO: 284183 - DNA, 279 bp, Morganella morganii
atgcaaagacgcaataacgaaagatatataaattacaacgaaaaaacaatcaatgaagttaacgaaacgccaaaagcaaaatacattcttgagtttgaacggacaagaaacccaagatggacatgtaatttatataaattagcatctaataattatgaattggttgattcattttctgattacagcaaaatttcaggtcaaagcaaggttatattcagccttcgccctgagcttggttatcgtgcatatgtcttttttaactttggaaaacaatcatga

SEQ ID NO: 284184 - DNA, 210 bp, Morganella morganii
atggctaaataccccttattagttggcgaattatctaatttcgaaacagttgtagaaattaatgaagaattacaagctcttcttattcctttattaacggctgttgaaaatgaagcacaaacagatacccatttaatgcttcgtactttacaacgcctggtgttttctcaaataaaatcactggatgagcttggtgaaattttaaagtaa

SEQ ID NO: 284185 - DNA, 438 bp, Morganella morganii
atgctcagtagcttctggagtgagttcgttctgattttcaacactaacccgcgcctgattactttggtctggactgcttgctgggctattacttctttcgctctcggtgtctgggctggtcattacctcgccaaaaaacgggacaaaaggaaggagttcaatcttatttctgaccccatggaactgacgctcagaaagaacctcaggcaatacaggaccggaaatattaatgtcagaaacgaccctgacttttacgctctcagcattcatttttccggcaaaaagcaggaaaaatataacgcagccatagaaagatactttgctgtttggcggcagggtcgcaaaattatggactccggctgttttgcctacgacatcagtattcctgacgtaattgacgcaactgaatgtcttctcacttttattaagcaccgttaa

SEQ ID NO: 284186 - DNA, 387 bp, Morganella morganii
atgattttattaaattttgccatgatgactcagatagttcatcagatgaaaataagcagcttgcatgcactaaaaggcttatgtcattcctacctgaaagtgacctaccattatctgatgatatcgcctgtttatggctggaagccaccaaccacccaacagaatggacatcacctgaaaaagagtggtaccaacgattaccgccacatacccaacatcactatttttcaggggagcactggtcaatactgcaagatcgcgctaccagcacacatctggccgaaatcattgatcagtgggtgcaacaaaaactttctaataacggatatccatccgaaggaggtaattaatgaaaccgacaaaaaaagtggtgattgtaggcagtaa

SEQ ID NO: 284187 - DNA, 588 bp, Morganella morganii
atggtgaaaattatactcggtggtgtgctgggtaagactttcggcaaaacacatcagcgcctggtcagcacaacctcggaagcggttcgtgcattgtgctgcacaattcccgggtttgaacgctatctgaataccagtaaatcccgcggcttaacgtatgcggtatttcgcgggaaaaagaatatcggggtggacgacctcggttttccggtgacggatgatgttatccggattgtgcctgttgtgatcggcagcaaacgcgggggattgctgcaggttattttcggcgcggtgatggtggcagctgcattctggacaggcggtgcgtcagtagcggcatggggagcgatgcataccgggctggccatgaccggcgtatccatgatgctgggcggtattatccagatgttgtccccgcagccgggcgggcttgccatgaaagaccagggcgaaaataagccatcatatgcattcggtgcgccggtgaacaccgtttctcagggctatccggtaccgatcggttacggtaaacgccgcatcgggggagccgttatctcagccggaatttacgtcgaagatcagcagtaa

SEQ ID NO: 284188 - DNA, 522 bp, Morganella morganii
atgaagacaataggctattggattttaggaatatgctcattatttataattatcgctttattaatgtggttgaaagtaaataatgagtatgattttgccagatctatttcaaccattattactttgtcgtctgtcggcagtttcggattaatagtggggtcaatattagctggctgcggagcaattgtgagtgaaatacggttattaagaaccggtaatgatactgcatcaacaagtgtttattctgtatcaggtaattccgggagcgcggattctgatgaggcgttttcatttaaaaaatggacggcatcaagctttgttattcgcgggaatgccggattactttttgatgcaggagctgtaacccgttttatttacgacatgcaaagatcaagaccggaaatgagtatgctgcaactgacggagtactataaaaatggtatcgactccattatcaatgggttgcctgacgcccttaaaaaagagtttgcggctgattttctgaagaaaaccagtaagtaa

SEQ ID NO: 284189 - DNA, 711 bp, Morganella morganii
atgaaaaagaaacctctcactgatgaacagatagccgatgctatccggttaaaggcgatttttgatgccaaaaaaaaggggcttgggttatcccaagagtctcttggtgatgccattggaatggggcaaagtgcagtagcccagctgctaaatggcgttaatgctcttaacgcagagaatgctgccaaattggctgttgctcttgatgtctcggttgatgattttagtccgtcactttccaaagaaataagaacgatgtttaacgcggtgtcctcacaaaaatcggcacctattggggatacatatgagtatccacttttcacaaaagtacaggctggcgctttcacggaaaatggcgactcgtacactgaaaaagatgctgtggcgtggatacctactgcaaaaaaagcgagcgaccattcattctggttagaagtagagggtcactcaatgacagccccacaaggtgggcggccgagcttcccagagggaatgttgatactgattgacccagaagaacctgttagtattggcgatttttgtatagccagactacatggttgcgagtttacatttaagaggctaatcagagagtcaggacaaacatttcttgaacctcttaatcctagatttgatttaatcccaataaatgaaaactgtgaaatcataggtaaagttataaagagtcaatggcctgatgacacattctga

SEQ ID NO: 284190 - DNA, 336 bp, Morganella morganii
atggcatttaatgacattgagttagcacagataaaccaatgtatggacttcttcatggagaaacgccgcccgccagagcacgtccgtgatgaatatgacctgatgtatgaaatcgtggggcaaacggtgtttatcaatgaaatccgtaacaccatgggacgaacgactgagacggaaatagcgaagatggtctttgatcgtccccaaaatggctggaagctgttttttatgggtaagtcaggacagtgggaaggattgttcaccgaccccataccgacgttctctgatgcgattaaagcgcttgaggatgatgaggcgggaattttcttcggctaa

SEQ ID NO: 284191 - DNA, 2226 bp, Morganella morganii
atgaaaacgacgggaattaaagtaacgcttttggcgctggctgtcagttattcctgcgctttgcaggctaaaaatgtgtcgctgggtgacactgccgtggccaccggacagcagagtacggcagtggggcagggcagtatggcgctggggaataatatgacggcggaacaggcacagacggcgatgaaagcccagaatgtcctgttgcagaaccgggcgcaggcgcatgagcagtacacgcagacacaggccctgtttgacagtaaatcactggcgaacagcaatattctggagcgtcaggaagcaatgaaaccgttgttgcagcaacaggagaccttagcgggtcagcgtaccgcgcaacagcagcaggtgacacaggcacagcaggccgctgaccggatggcacagatttatgaacgcaatctgggggcggtttcacagattgtggatgcagattttgtggagttgtggcagcaggggcaggctgaccgtctggctcaggaagtgaaaaaaagggttgagcaggatacgtcggtcaataatgacacgcagttttatgtcagttatgtcaatgcctatattgaagcgaaaacccgaagtgccctggttaatgaaaccatcaaagaaaaaaccggctcccagattacgaccaattatcagggcgtggccctgtccccggtactgagtgccggccacagtgacaaagcgatgctgtggtcggatgcggtcacggataatgaccagaagcagctgttatcccgtttacacctgaataccgcggccctgaagggtattgccggttatcaggaagagctggccaaaatcgccctgatcacctctgcggacgggaaaaagaatctgtatcaggcttatcagaaaaatgcccggcagcagattgagcaggggttaaccggggtgacagaggccgggaagcagatcctgtcagagctgtatctcgataacatcgatgaaggcacctttaatcagatggtcagcggtattttcacccgctatgagaatcagctgaactacctgatccagctggataaggtcaacagtttatcgccggacagcccggattatgccgaagaattacagcagctgctggtactggaaagcagtccccgggataacaccgtcgggctgaacaccaacccggaggcgctgaaacagaaagtggaacagtaccttcaggacaatgcgctcagtcacacacaggccatgtcgtcacaggccacacagctgaaacagcagttatcggcggaaaaagcggtggctgatcaggccctgaagcaggcggaaacacaactttcccggctggaaaacgatctcgccgatctggatacaaagttgtctgatttgcgtccgacgcaatccgagctggaaaacatccgggatctggagaaggtgaaagccgaactggcgcagaaacaggcggaatatcagacggcggacaaagcgctgaatgaggcgcagagtacgctgacgcagggacagcgtgcggtggctgtcggggataacagcctggcgctgggcgagaaatccgtggcactgggtgtggatgcccgggcgctggcgaaaaacagtgtggcactgggcgatggcagcctggccgaccgggataacagcgtgtccgtcggccgtgcagggcaggaacgttttctgacgcatgtggccgccggcattgcaaagaccgatgcggtcaataaagggcagctggatgaggagcgggatgcgcgtattgccggcgataagcagacgctgaaggatgctatgaactacaccgatgtgagcattcagtacagtgaggcgaaaacaaacaagcggattacggaagagcagcaggcccgtattgagggggatgaacagacgctggcggcagcaaaccgctataccgacgaaacgttcgggcgggcgacccacacggtgctggacaatgcccggcagtataccgatcagcgtttcagacaactcgacaataaaattaatcaggtggaaaaacgggccaatgcggggattgccggagtgacggcgatttcctccattccgtatgtgaacagtgaacgtttttcgttcgggatggcgctggggcattaccgtgatgcgcaggcgattgcttccggggtgcagtataaacccaccgcgaatacgaatgtgcgcctgaatgtgtcatggaataacggcggcgataccaatatcggtgccgggtttgccgtgggctggtag

SEQ ID NO: 284192 - DNA, 441 bp, Morganella morganii
atgaaaaaacgatttttatccctttccggattgctgatgctgtcgctgtcatgtctgccgttcactgccggggcggcagtggtgctgtataccacgcaggatgacgctctgccgcagacggatatcccgtttgaggtggtgtatctggatgcgcctgagcgtctgctggatgaggccctgcttcagccgggtacggaactgaatgaagcggatgccccgcaaatcaccgccctgttacaaagtccggcctggcaggccagagagacggcgttacggcaggcttatcagggcgtggttcaggcctggcaactgggtgtggtccgtctgccggcggtggtggtggatgcgcagtgggtggtttacggcaccaccgatattgaacaggctgtgacgcagatacagcagtaccgggaacagcaggataccggaggtgcatcatga

SEQ ID NO: 284193 - DNA, 807 bp, Morganella morganii
atgcacagtgaaacactctcccgttaccttgccctgaaagaacagggacatcttatccacgcccgtgatatcgccgctgagatgggcatatccgaggcagaactggcacactgccggaccggttatgatgcctgccgcctcaccccggatatccccgccattttccggatgctgggcaccgccggggagctgaaaggcatcacccgcaatgaccacgcggtacatgaacataccggcacctatgataatgctgaattcggggaacacgcctgcctgctgctgaacccgtacgggctggatttacgctttttcctgtctcagtggcagacggtatttgccttcgcggaaaataccccgcgcggcctgcgccacagccttcagttttttgatcgccgcggggatgctgtccacaaaatttataccactgctgataccgatatgggggtctggcatcacctgacagcacagttcgccgcgtatgataacccgccggttgttccggaaccggctgtcatcccggcctgcacatcactgacaccggagcagcaggctgaatttacccgtcactggcagcaaatgacggatgttcaccaattttttgttctgttaaaaagatttaatatcagtcgcttgcaggcattccgttgtgtggataacaccctggcacagcgggtggataacagcgcgttatcacgcctgctcactcagtgtacggaagaacagaatgacattatgatctttgtcgccaaccggggctgtgtactgagagatcccctcataatttccccaaagcgtaaccatgtgtga

SEQ ID NO: 284194 - DNA, 888 bp, Morganella morganii
atgaatttagttaacaaactatccggcactcaaagaataatctcggaagaaagcaacctgaaggacatgtcaaaaataccttttctgaaaaaactactggatcggttaagcgcaccgcaaaatacgaatgtcaaacttacaggaaactacgtcaatattgatgtcgacaccacaactctgagcaggcagatattatcctttgtttataaatcagaactctcaattcccggcgccggaaataaccacgaaaaatcagaaaacagacaaaaagaaattaatgatggtgtgaaaaaatggcttacccaggaaaaaagtatcataccggtaaatattatcaaacgggaagttgacctgatgtatgcagagaaaaagcttgtgacaacaccagaagaactggacaaaataattgatattgttaaagaaaaacatctcggaaacaaagagctggaaaaacccgggattaactgctccactccgtccgttcttaagcttaataatatcctgactaacgaaattaatgagccggggataaaaaaacagttaagtcacgactttactaaaaaaatgcctgaaatgtcagataatttaaaaaaagaactggccaaccatataaaaaaaacgttaagtaatgatgaaacaaaaaaattaattgaacaatactccgcatataaaactgacatacttaacagtcatgataaactcacaacaatgatgacggggaaaatccggtcagatatatactacgcactgactgagaatatttataatacactgttatgtgataaatacaccgaaatgcctctggatttcagtgccatcagagaagagacaagagcacaggtactccgtactgatgaatcccctaatgattttggtaaaaatcattaa

SEQ ID NO: 284195 - DNA, 843 bp, Morganella morganii
atgacaggggaagcaatagggatactggcggagtctgtttatcataaaaaagcgcatgaactgacagagcaggaaaaagagaatgtcagtgcctgggcaacgctggcgtcaggtcttgccggtggtctggcaggcggagatacacagagtgtggcgaacgcagccctggcagggaaaacaacgattgagaataacgggattagtgatggatttaaactctcgaaaggaatggcagaatatgggttgtcagcatcgacactagctacatcgatgtcagaggataataaattaccacaagaagttaccgccgcattatctaaacatgcgaaaggcgatctccctgaaggacaagatccagccagaggtttactggttgcatgggcaccagttcctgcgattgcagccagtacagttatagcaccggcaacagcgacatatggttttttgtttggcggcgcattaggtggcgcaacagatgcgacgcagcaacttatcacgatgaaaccgggcgaaacatatagttatacagatacgttgattgcaataggtacaggctctctgacacaaggtaaaggtgttatatttacaacggtagtgaatggaggaggagcctatttgggtagctcaattaagcatgaagatccaaccgcatcagtagcaggctcgatttttggttcagtgctgggaggaacaacgtcaaataaagttactaatagtttaatgaataatggccgtggaccagttaagtcagaaattataggagatgtgataggtagtggggtaggctccacaactgaatactctactaaaaaaataataaatgatgtaacagagggggaatga

SEQ ID NO: 284196 - DNA, 279 bp, Morganella morganii
atgaatagaaaatttatcatttcatttcttcaagctgtaattgtgattccaattttatccatcgcaatttgcatgttaggtatccctattgggattatagttgcattttttaaaactggagttttttcatttgagtcattacgtatggtgtccatatatgagtcttttatttatgcggttaaggtaggtggaactatagggttagttttggggattggactatgggtagctaacatagttattcctgaattgatgaataaatctaaaaataaaaaatag

SEQ ID NO: 284197 - DNA, 381 bp, Morganella morganii
gtgcagggtaagactcctaagcaggtcgcgaaagaacgcgttgaagcagaaaatgagctctataagaaggaaaattatgctgggatgagcacggaagcgtgctcggtgaagatgtacactcagcgtcaggaagaactgaaagatatcctgtcaacgagcgcagattttatgccggtagtcgggactatcaaaagcgtagcagaggcactcaccagcggagaaagctgggaggcggttaaagatacggttaataaagccgccaagggtaatcagaaagcactggaaaatttggctgatagtgctccggtttatttaagtcctgcattaaatatacccgttattgttttatttgaaaacaggccagagaagtatcttcgttag

SEQ ID NO: 284198 - DNA, 255 bp, Morganella morganii; identical to SEQ ID NO: 28990

SEQ ID NO: 284199 - DNA, 1278 bp, Morganella morganii
atgaaaacggtgcgtgaccgtcaggcggagctgattgcccaaaacgagaaattgctggaagagaacacgcagttgcgtaaccggcaacaaaatgtctccggccagatacagtccgcagtggcctccgtccgtcaggaagcggagagccggcaacgcgccatggagcaggagcagcagacgctgatgcaacgtctggataccctgggggcgtcgctgaccgctccgtcaggtggtcaggcagcacagggccacggacacggcgatattccattggggctggggctggatgcccagggcagtgggctgacagtgaaagacgggctgttgtgggctgagccgcaggatgcacagccggctgaaccggggcggatggttaacggacaaccggctaaaccggcgtttccgacgtcctttctggaggataacgccattacccgtcagaaagcggaactggatcgggtggccaaaaatcagcgcacgctgtccggtacggcggacggtgaggcacatactgaaccggcttataccctgccggagaatgccaccctggtggggagtcaggcgatgacggcgttgctgggccgggtacctatcgacggtaaagtgaccgatccgtatccgtttaaggtggtggtgggaaaagacaacctcacggcgaacggcattgagttaccggatgtggaaggggcggtgatcagtggcactgccaccggtgactggacgttgtcttgtgtgcggggggatatcacttcgatcacctttgtctttacggacggcacggtccgcacggtgccgaagccggctgaccggacggacggcggcagtcaggccggcagtggacagaatgcccgcaataacggcggatcgctcggctggatctcggatgagagcgggattccgtgtatcagcggtgagcgtaaaaccaatgccggcacctatctgccgaccctgtttgccctgacggcagccgcctcggccggggatgcgatgtcacagagtcagtataccgcgcagaacaccggttacggtatcacgtccacgctctccggggatgcggggaaagcggcactgggtagtgccatcggcggcgggtttaaggatgtggcggactgggtgaaatcccgctacgggcagacctttgatgcggtgtatgtgccaccggggcagaaagttgcggtgcatatcagccgtcagatcccgattgattatgaatcacagggacgccgggtgaactatggcttttcactgacagagggtgaggaaggaggtctggagtga

SEQ ID NO: 284200 - DNA, 486 bp, Morganella morganii; identical to SEQ ID NO: 27141

SEQ ID NO: 284201 - DNA, 792 bp, Morganella morganii
atggcaaacatgcgtgaagtccgccagttatgtgacaagcacggcatcaaagtgttctacgatgcgacccgctgtgtggaaaacgcctacttcatcaaagagcaggaagaaggcttcgaagatgtctccattaaagacatcgttcacgaaatgttcagctacgctgacggttgtaccatgagtggtaagaaagactgtctggtgaacatcggtggtttcctgtgtatgaacgacgacgacatgttctctgctgcacgtgaactggttgtggtttatgaagggatgccttcttacggtggtctggccggtcgtgatatggaagcgatggctattggtttacgcgaagcgatgcagttcgaatacatcgagcaccgcgtcaagcaggttcgttacctgggcgaaaaactgaaagctgccggtgtaccgattgttgagccggtcggcggccacgcagtattcctcgatgcacgccgtttctgcccgcatctgacccaggatgagttcccggcacagagcctggcagccagcatctacatggaaaccggtgtacgttctatggagcgcggtattatctccgcaggccgtaacaaagaaaccggcgaccatcaccgtccgaagctggaaaccgttcgtctgactattcctcgtcgtgtatacacctatgcacacatggatctggttgctgacggtattatcaaactgttcaaacacaaagaagacattaaagggctgaagttcgtatacgagccgaagcagttacgtttcttcactgcacgctttgattacgtgtaa

SEQ ID NO: 284202 - DNA, 159 bp, Morganella morganii; identical to SEQ ID NO: 284151

SEQ ID NO: 284203 - DNA, 363 bp, Morganella morganii
atgagggtatctacatttccccaatcgtctttttttgacgatttgcactatctcacgcaattacatcacctgtcaggtgatctcgacatggttcttgcttttgtccgtctggatattggcgagtgtatggacgaagataattttccgctgaacttctggataatcagggcagttgcagagcaactgggcgcgttatctgtggaggctgattttacccgtccacatcttgagaaaatggtccgcgtagtctgggatgcggctgatcaaacgccttatgcgtctgattttcgccgcatttacaacgatgcggtcaaaaatgcacagtttgaagatccggttgaagcgctgatgtttggtgtttaa

SEQ ID NO: 284204 - DNA, 438 bp, Morganella morganii
atgacattatttaacctgatttattacattgcctgtggtgtgttttttataaccgatctcgtctgtcgtacttccaggattagggaaggtgcgaagtggttgcttgaagaagctcgtcggttgcaagacattgcgtccgaactgaaacaggttgaaagctatacccgatatcaacatatgccgggggcaaaagaactgatggagtatgtgcactatcataccggatttgcattcggtgaattagtgtactggcgtttgaatgggcggatgggacacttgccgtcatgtttacttcgccgtttagaggatatggggcatcacattgatgctgagatctggctgcggggctatgaagccggtttctatgatattgaacagcaaatgatggaaatagagattgcgggtgaatatccggaatatattgaactgagcaattaa

SEQ ID NO: 284205 - DNA, 663 bp, Morganella morganii
atgcgtatgaaaattctcccgatatgtcttgccctgacctcactgctgttggggggctgtgcagataaaccctcccggcctaccgaaccggtggctgacaccgcgatcccagtcaacaccactcatgttcagccggtgctcccggatctttatccgtcagcgccggaagttgtgcgttatgatcgttaccggctggttgatatttcgccttcacaggcacaacgttacccgctggaacaaattgttcacctgcgtattccggcttccgtttcacccacggtcggggatgcgctgcattatgccctgcgtgattccggatatcgtctgtgcacctctgatgatcaggcgaaccgcctttatcgtctgccgttacccgctgttcagtatcagatgggaccgatccgcctgaatgtggcgttacagctccttgccgggccggcctggcagttgttagtggatgatgtacagcgggaggtgtgttaccgacttcgtccggaatacacgccgtctgtgccggatgccggaaggggcagcacttcatccgtctctgtgggcactccactttctgcgggcagtacgccattgccagtgcctccggtgctgaatacctctgccggacatagcggtgtgaataaggttcatcgcggagggtggctgaaatga

SEQ ID NO: 284206 - DNA, 462 bp, Morganella morganii
atgaagcctgccggtgtctacgtttgcccgaaatgcggatttaaaccgctggctggcgaaaatgtgaaagtcgacacctcacgcagtattaaaaagatcggtaaaggtcagaagacctacacgatggcggataagcagagtttctattcccagctgctgtattaccggaatgcccgtgctgcacagggcaaggtgatgaatccgaaatgggtggataacacctaccgtgagaaattcggggtattcccgcgcggcatgcacaacacaccacaggagatcacaccggttgtcagtaacttcatacgtcacaaacagatccagtgggcgaaaatgtgccagaaacgggatgccgccgccaaagcagcagtacaggctggggcaaagcacacaccagaaagccgcactgacagcgtgcgccggttattggcggcgaaaccaactcagcaggggagtctgttatga

SEQ ID NO: 284207 - DNA, 423 bp, Morganella morganii
atgaagcctgccggtgtttacgtctgtccgaaatgcggctttaaaccgctggccggtgaagacgttgatgttgatacctcccgtaacatcaaaaaaatgggtaaatccgaaaaggtttacaccaaaaaagacaaacagagcttttactctcagctcaaatattaccagaacatccgcgccaccgaaggaaagccggtcagtgacgggtgggtctcaaatactttcagagataagttcggtgaatggccgcgcagcctgcatgccacaccgcaggaaatcaccccggaggtatccaatttcatcacacacaaacgtatccagtgggttaagcgtaaacggaaaaccgaagcactgatgccgcagggaatcgcagatttaaaacagcaactgaataaaaacgcacagcagggagaattattgtga

SEQ ID NO: 284208 - DNA, 987 bp, Morganella morganii
gtgaacacagtagacgccgcacaaggtcagtgggaaaagatttttgcacactacggactgccgccgatcaccgggaaacggcattttacaggaaagtgcccgatatgtgagaaaaagggaaaatttcgcatagacgatcaggacggtcggggaacgtacatctgcacctgcagttccggcacaggatttcagttgctggaaaaaacacagggtaagagctttaagcagctggcggatgagattgatcagctgctcggaaataaccgggaaaaagaggttctgaagccggtcagcagcaatacccgttcagaccgtgaaaaatttatcagttgctatgctcagatgccggatctgaaagacacctcagcggcgggctacctgcaaaaccggggcatatttacgttaccggcagaacatatccggttttgtgagagacagccaacccgtaaaggcatggcggttattaattatcaggccatgtgggcgctggccacggactcaaaaggtcagctgtgttatctgcaccgcacgtatctggacggtgaccggaaggccgatatcaacgtggtaaagcgcatgacaaagctgcaggaagataactatctggattatgccgaatcagtggcgatccgcatgttcccggtcgcatccacgctgggagtggcagagggaatagaaacagccctgtcctgtaaacaggtttacggggtaaacacctgggcaacgattaatgccggattcatggataagttcactgcaccgaaaggagtgactcacctgattgttttcgctgatgcagactggggcagcgcaaccggacatgctgcggcttttgcctgtgccaagcgtaaccttgttgcaaacaacgatgtggagaaggtcagcgttcgctggcctgataaaggtgattttaatgacctgatccgtgacggaagtgaagtccgggaactgacattttaccgggaaaaacaccaggaggccgcgtaa

SEQ ID NO: 284209 - DNA, 558 bp, Morganella morganii
atgacatcatcagacgtgttctggatcccgttcatattccactggctgtgcgtatcggaattatacagtgcctccatcatccagctgtctatccagcgtgccagctcccaccagaaggtcagaaagttcagcgcaaatatcacaaacgtcaccgttatcgccgtcttaaattcatacgccgaaaacagcagtatcatcgggatcatgatatacaccgccattaatatcagcccctgcatcatcggtaaggactggcgcatcgtatcaaaggcagggaatgcccccagtgacgccagcgaagtcccggctacccctcccattctggccagctcattcatcaccgtcatatccgcattacccccgtatccccggtatacccggccgccggagacatccagattcgccggactcaccagccggcggacgatggcctcctcaaactctttcgagtttttattaatcagcttcatcgctgcccgggcacgcagccacattccttcatcggtctgctctttgacaagtttcagtaagcccgcattcgcatcattccaccactga

SEQ ID NO: 284210 - DNA, 267 bp, Morganella morganii
atgaatatatcaaaattaatcacattagctgcaataaccacgctgacagcctgcagccataacgtatacaccaaaccagtggattgtaccgggcatatgtttgaggggctggataaccggcattactcagctaagctgacaaaatatgcgccggacagtaaacggtttttcagtacaggtgatcctgttctgggtttgcatggctggatccgcatggatgcatttgacaaaattacatgtgttaaaggcaagagtacagaggactga

SEQ ID NO: 284211 - DNA, 687 bp, Morganella morganii
atgaaacacggttttatatgttttggtgacaccggccggatgcaaattgacggtactaatatagcgttagggttaatcagaaagcagtcgtttcattgtccgaaagtgcaggatgccggacagggaaccatcaaagaggtttattttccggccagagttcatccgaacacacaaatgatcgcagccagagcatcattctgggtcagaataggcggtcaggcgtttgacaatacgaataacaatgcttttgtctcaatgcctttccgcgacggtcccggcggaaatatagaaatctgggagtttggcaacgctcctgttaaggtgcgtaatcaaagaacgggaatagttgtgataaacccggtaaccaatcaggtggtatataatactaactggggcgttgcaaatatacggcatgttcagaggcttaaactatggcctgatacaatgtggtctatgacaatgcctaataatggtaataactgtgcagttgtatttggcggtggtgctcagaaaagaacaaattatgatgaatatatggaattcgagtcttatttctggcgaatgaacggttctaaactggaagtacgtctgttggttgatacgtattctagaccgcatgcgtcacaatcttttgaatcatgtgatataccgctatatataatgataatagatacaacggggatataa

SEQ ID NO: 284212 - DNA, 444 bp, Morganella morganii
ttgatcagcagagagcagaaagcacgtattgacgcattaaatgcagaaaaaactgcccgtgaacagggggatgttaccacgctcaataatgcaaacaaatacaccgatcatcgtattcgctcattaggtttaaatgtttctgatgcgttaaatgattttcaacaaaaaacagatcagaaatttgctcatctcgataacaaaattggccgtgtggaaaaacgggccaatgccgggattgccggggtgaccgcgatttccaccattccgtatgtgaacagtgagcgtttttcgttcgggatggcgatggggcattaccgcgatgcacaggcgattgccaccgggatgcagtataagccaacggccagtacgaatgtccgcctgaatgcgtcatggaataccggtggcgataccagtattggtgccgggtttgcggtgggctggtag

SEQ ID NO: 284213 - DNA, 459 bp, Morganella morganii
gtgcacagatccggagtggtcgaaaataaggcatttatctttgccttgtgctttacgcagaccccgaccgagacattgaacccagcgaatttccgatttcgtcggacgggcgtaaatgatgcaccggacatcactgtcaaacccggcaaccagtgtgccgacgttcacgatgatttttgtcccgccctgctcaaagcggtggatgataagctgacgctcttcatgcggggtatctgcggtaataatctcagcattcacacccgcccggttaaacgctatcgtgacaaaatttgcatggctgacggtcacacaaaaacagatggtcggcaggttctgaccgttggccagccagttatcgaccacatcaccgaccagatccgcacccgacataatttcagcaatgtcagcctctttgtaatcgctgccatactctgcgctgctggtggatttaaccgatga

SEQ ID NO: 284214 - DNA, 606 bp, Morganella morganii
atgcaacgcttactcagtgatttgggaaatgtcccactgacagctatccgcagtgcatctcttgaagaaaatgactgggaatgtcttgggggcgccatgtcgcagattgccgaatggggtgagcgtctggtgattgatgataccagtaatatgacgccttccctgttacgtgcccgtgcacggcgttaccgccgtaaagtgggtacgccggggctgattattgtggattaccttcagctgatgcgaagtcctgaacaggaaaaccggacacaggaaatcagtgaaatctcccgcagtctgaaagcactggccaaagagctggggtgtccggtagtggctctttcccagttaaaccggcaactggagcaacgtgcggataagcgcccgacaaacggggatttacgggattccggctcactggagcaggatgcggatttgattttatttttgtaccgcgatgaggtgtatcacgaacactcaccggataaaggtgtggcagaaattatcatcggtaagcaacggcagggtccactagggacggtgaaagtgcagtttaacgggacgtatacacgtttcagtgatttttctcagggatattatttttaa

SEQ ID NO: 284215 - DNA, 273 bp, Morganella morganii
atgacactgacaatcactcaaaaatcagggcattttgcctggtgtgcactggttgcgctacatctggcagaacaggacggacaggtcaaatctgacatacaaaaaaacctgtttttaatacgctggctggcaacggccaaaaaacaacgccgttttgaccggactgttacggcagatattggctggttactgcggcagggacggacactgggtgtccgggcaaaactgccgcaaagctggactatctgtaccgctcctgcaccggtacgttaa

SEQ ID NO: 284216 - DNA, 780 bp, Morganella morganii
atgaaactcgaaagcgcattaaaacaatttcatccgaagtcaccgacattcagtgacagctcaaactccacagccccggacagactgaaaggtatggattcagcagcagcaatgggcatggcgtcacagcgggccgcgtttggtatgcatgcgttctttggtaagaatgacgtcagcattgaggacaaattcaggactgttgaagcactgacgcagtatgctctgcgcacggtaccaaagctggtggccaaagcggccggcaatcgcgttgctcagtgtatgaagattctgtccgcaatggcatttgaggattacgcccgttcagcgggttcggtatgtcagtgtcaggactgcggcggaaaagggctgatttaccgccggaaagaggtggtgaagtatccgggtatcaccaatatggaaggtactgtgattgttgagccggtagtacgtactgagctcgttggcgaactgtgcgtgacctgcaatggtaaagggcagttaacccaccggtgccggtgtaagggacggggtaaggtatacgacgaagagcagagcgaattacagggcgcaccggtattcaaagactgcccgaaatgctcagggcgcgggtataagcgtgtgccgtcgtcagtggcttatcaggcgataaagcacttggtaccggatttaaacgagagaacatggcgcagaaactggaaaccgttttacgaaggtctgacagggaaatgtcatattgaggaaagtcaggcagaacagctatttggctgtataaccagataa

SEQ ID NO: 284217 - DNA, 411 bp, Morganella morganii; identical to SEQ ID NO: 277239

SEQ ID NO: 284218 - DNA, 261 bp, Morganella morganii; identical to SEQ ID NO: 27108

SEQ ID NO: 284219 - DNA, 231 bp, Morganella morganii
atgcccgatatcatcaaagagaaaagcattaccttaacacttgaatctaatgtaaaaacaacacaagatttactggaggaactgacagcaataaaagccctcattgctcatatttatttcaagcttcctgagcgccagagaaaagaactactggttgagcttgagccatttaagggaaacagggctattgaaggcatgatgaaaaactttagtcttgctgataagaaatag

SEQ ID NO: 284220 - DNA, 189 bp, Morganella morganii
atgatggagcacatcataaaagccagcagccgtgaaggtgacctggtagccgatttctttatgggatccggggcgacactgaaagccgcactgaagcacaatcgccgcattctgggtgtggagatggaggcggaacggtttgagcagactaaggcagaaataactcaactctccggaaattccggatag

SEQ ID NO: 284221 - DNA, 141 bp, Morganella morganii; identical to SEQ ID NO: 278135

SEQ ID NO: 284222 - DNA, 186 bp, Morganella morganii
atgatcactcataacctacatactattattaacgcagataaaattattgtgcttgataatggaaagattattgatacaggtacacacacccatttattaaaccaatgcccaacctataaaaaattatggaatgattatagtcacactattcattggcaattaatccaggagaataataatgattaa

SEQ ID NO: 284223 - DNA, 261 bp, Morganella morganii
atggatttgcagggggtgctgatcccgacgcggcaactgcatgcaatgtgtacctggtgcatacgcggcaaatacagatccggtgacggctgtgattatgccggtcagaacgggtattttgacaaacacggcaaccgcgtggatgacccggcacaggatcagtgcagcggtatgctgaataccggttgcttcccccgtttcgggaaaaataatccgatcccgttcggcggctttccgggaacatcactactgaggaaatag

SEQ ID NO: 284224 - DNA, 315 bp, Morganella morganii
atggaaatgacgaaagaaagcaattcccgccagagtctgttccgcctgcaatggctgggtgactggctggatgaaatgtatggctggaaaatgctgaatcccgatatcacgcccctgaatgcgattcacagctatcttattcttcgcgataacctgccggtagctcaggtggcaggcatgacgacagaacagatgcatctggcgctgactgaagagtggagcacattcaaagctcgtagaggggcaaaagactttttgcgcagagtcgaaaaacgcctggactctcttgatgatcctttccgagaaatacattaa

SEQ ID NO: 284225 - DNA, 261 bp, Morganella morganii
atggatttgcagggggtgctgatcccgacgcggcaactgcatgcaatgtgtacctggtgcatacgcggcaaatacaaatccggtgacggttgtgattatgccggtcagaacgggtatttcgataagcacggcaaccgcgtggatgacccggcacaggatcagtgcagcggcatgctgaataccggctgctttccccgtttcgggaaaaataatccgatcccgttcggcggctttccgggaacatcattactgaggaaataa

SEQ ID NO: 284226 - DNA, 357 bp, Morganella morganii
atgtctgttttactgcctgaaaacaagccgttttcatttctgacactgatcatgcagtggctgtaccgtttttatgaccgtataccatttatctcgtcagggatacccgatgaattgccgtggataattaaccggaccggccggcgcgcttaccgtgcgacggtggtgaaagtgaatccccggcaattcagggttcgcattaccgtacgtttgggcacacattcgaaagaataccgctttcattcgttgatgacctcgctggacagcaggacattttgttccgcaaaagcggcatgccgtgccggctttggactgacataccagctggcgcaggtgcgttatgcctggtgtcgctga

SEQ ID NO: 284227 - DNA, 207 bp, Morganella morganii
atggcccggaatgaacagaatctggctgaacggggaggttattacctgacagaatgtcagttagtggaaagaaacagagatacgggcttctggtcagggcgggaaaatattctgcaatgcggggtgatccgggagcatgtgaatgcggatgcgtatgaaaaggcaattcaaacctggcagcagaaacaggcagggacaaaaaaatga

SEQ ID NO: 284228 - DNA, 306 bp, Morganella morganii
atgacaaatgatacatcaccaaatcaatatgtttcacgcttattaaataaaaatgaagacgatagactaaatgaactcaagattattctttccgagttagatataggtatcaggctaaggaaaataacgcaacaccaaaaacatgagatcattcatgaaataaagcgagccattgcggatgaaagaaacatttctttcgatgaaaaaaacgatcaatctgatgctattagtcgagggagtgctagtgccagcaatgatgacttggtggatttaatagcaatgcttaatagaggaagaattcaatga

SEQ ID NO: 284229 - DNA, 507 bp, Morganella morganii
atgagtgatagttattataatatgtattcattggccgtgtctagtgctgcattacttctctcattgtatacatttttcaaatcaagaaaagatgttaagtttgcgcaagagaatgcaagtgaagcattgaaattgcaatatggtgcaattgaacttcaaattcgaactggcataactaacgcaagaaatacaataaataatttgacaccaatcttgacaccatacttagcaaaaaaacaagcaggctcattgagcgctgaagagtcttattctcttgatttattatataaaacttatgattcttgcattgaagacctccttaaccaatatgatgaagcatgtaagaaatatattgatggtaaaattgacagagaaatgttcaaagaaatatacattcatgaaataaaaaatataacatcaagccaagatctttcttcctattataatttagaaacaacgaagtacacatctaccttaaaggtgcgtgatgaatggatacctgattga

SEQ ID NO: 284230 - DNA, 1752 bp, Morganella morganii
atgaaagattttcgttacttcctaaaggaaagttatatcaatagcagggctttagttattggtataaataaatataaaaatgtccctcctcttgcgtatgcagttaatgatgcatcagaaataaagagtttactcatcaatgaattcgatttcaaagaggaaaacatatcgtttcttcttgatgaaaatgctaccaaagaaaatatattaagagcattttccagacttacaagggatgatattgaactggatgagaggattttcattttttatgctgggcatggtgaaacacgaactggaatttatggcgaagtagggtttctcgtacctcatgacgcaatcactgatgatttatccacctttatacgctgggatgaacttaccaaaaatgcagagttgataagagcgaagcatatacttttcgttatggatgcctgttatggtggactggcattaacacggggaataggtccaggcagtacgcgcttcttaaatgatatgatgctacggtattccagacaagttctgacagccggtaaagccgatgaaactgtctcagattctggtgggcctttgccaaatcattcagtattcaccggacatctaattgaaggtttaaaaggaaaagcattaaccgaaaacggtgtattaaccgccaatggtttgatgacttatgtttacaataaagtatcaaatgataagtcttcaaatcaaagtccgcattatggctatattgatggtgatggggattttatttttaaatctccttcttggtcccatgacaatttagaggaaacaacggataatgataggttgatttcggttccctattttcagacggaattttctcctttaaacgctgaagataaaataagaaaaacaaaaaaattactggcaaatgattcatcctctatcgagctacatgattttgtgattgatgaagttaaaagttttctatctgaaaccagtgaggattttttctcagtaaatggtcagtttactaaagaagaacttcttgagaggatttctaaatatgaaagtatatctaaaactataatcctaataatttcttgtgtctcatattgggctcgaacaatccatattccattattaagtaaagcattagctcgttcaactgaccgactggaaagagggaatggtttaactgtatggttaaatctacgatggtatcccttaataatgcagttttatgcattagggatagcagcatttgaaaataaaaaatatgatgtactatttagtgttttttttataaaattagactcgtcactttcaaacaatggtaaacagctatattttgctgaagccatttcgaatgccattctggaattggctcaacaaggtgtatttaagcaactccctggatttgaaaggcattttgtaccaatgagtgagcatctctataccatcttgcaaccattaattgatgatactctatttattgggaagaattacgaaaatgtttttgataattttgaatgtttcttagcacttgtcatcgcagatctgcatcagcagcaagagcgaactccatggggacctgtaggccgttttggttggaaagaaagaaatttgtacaattccccattatctaatatgattaaggaagccaaagagcaaggtgttaactgggctccattaaaaagtggcttctttggaggggatatttccagattctctttagttgctgatgaatatttaaaaggaatatcaaaattaagttggtattaa

SEQ ID NO: 284231 - DNA, 588 bp, Morganella morganii
atggcaaaaattgaacttggtggtgtgctgggtaaaacctttggtaaaacgcatcagcggcttgtctgtaccacgtcagaagccgtccgtgcattgtgctgcactgttccaggctttgagcggttcctgaataccagtaaatcacgaggcttaacttacgcggtatttcgcggggaaaagaatatcggggtggatgacctgggttttccggtaactgatgatgtcatcaggattgtgcctgtggtgatcggcagcaaaagcggcgggttgctgcaggttatttttggcgcggtgctggtggctgccgcctttatttctggtggtacatcactggctgcatggggggctctggagacagggttagcaatgaccggtgcatccatgatattgggtggtgttattcagatgctgtccccgcagccaaacgggatcgccatgaaagaccagggcgaaaataaaccgtcctatgcgttcggtgccccaacgaatactgtttcccagggctacccggtaccgatcggttacggtaagcgccgcatcggcggggccgttatctctgccggtatttacgtcgaagatcagcagtaa

SEQ ID NO: 284232 - DNA, 708 bp, Morganella morganii
atgcaggaaaatattcaggcggctatttttgcacatgctgaacgtgaatatccccgcgagtgctgcggggtggtcgcgcagaaatcccgtgtagtgaaatattttccctgccgcaatatcgcggccacaccggaagatcatttcgtattatcgccggaggattacgcggctgcggaagactggggaacggtgaccggtattgttcacagtcaccctgacgccaccacccggccgtcagaactggataaagcgcagtgtgatgcccttggcgtgccgtggtacatcgttagctggccggaaggagatctgcggactgttcagccacgcggtgatcagccattactcggtcggccgtttgtgcttgggtttactgactgctgggggctgattatgagttggtttcggcaggagcgcggcatcgaactgccggattaccgggtcgactatccctggtgggagcagggcgaaaaccgttacgccgataactggcgggaagcgggatttattcaggttgatgatccgcagcccagcgatttgatagtgatgcaggtacaggcaccggtcgccaatcatgccggtattctgctggctgataatatgctgctgcatcatttatacgggcatttgagccagcgggtgccgtatggcggttattggcgtgatcgcacagttatggtactgagacacaaaatattcatgactgactga

SEQ ID NO: 284233 - DNA, 759 bp, Morganella morganii
atgatcacaaacgattaccagaagctggaaccgggtaatgccgtccggctttttgaggttgacggtactgcgttcggtgcgccggatgttttgcggttccatgcatacaatatccagcacgcagaggcagagattactgccgctggtggtgatccggaaaaattaccggcgaaatccatctggtggcagggcagtgaataccgcgcctggccggtacagattgaggggctggaggcatcgacaaccggctccggcgcacagccgaagttatcggtggcaaatctagatggctcaatcaccgctctgtgtctggcctacgatgacatgctgaaagcgaaagtcacgatacatgataccttggcgcactatctggatgcggcgaattttccggatggcaacccggcggcagatcctacccaggaaaaagtctcggtcttttatatcgacagcaaatcctcggaaaccaaagaggttattgagtttgatttagccagcccgatggatttgcagggggtgctgatcccgacgcggcaactgcatgcaatgtgtacctggtgcatccgcggcaaatataaatccggtgacggctgtgattatgccggacagaacggctggttcgataaacacggaaatccagttgacgaccccgcgcaggatcagtgcagcggtatgctgggcaacggctgtactttgcgctttggtcaagataacccactcccgttcggcggctttcccggaacatcattactgaggaaatag

SEQ ID NO: 284234 - DNA, 504 bp, Morganella morganii
atgtttgattggattagtctatctgtgaattcagttgttgcgttaattacgggtagtcttgctgcaattattacttcacgaattgccatgaataaattttacaaagaaaaatggtgggaaaggaagagtcagtcgtacaatacgttaattgatgcattaatagaaatggaatccatttacaaaaaggcgtcaaggcactttgaaattgtttatcaaattgaaaggtcagataatgaaattataccgaatattaattttgagtggagtcggtatgatgaattaagtattgttattcgccgaatttatatactgtcgccaatatctttaagcaaaaaagcaaaagaacttttagaagaatattttacaaaatcagaatcacttgaatactcagtacataaagaggggttccacaattttatcgcatatggtcaactaagtgaggcaataaattcaattattaatcctattatagatgacgcaaggaaagagctaaggtttaattaa

SEQ ID NO: 284235 - DNA, 123 bp, Morganella morganii
atgagagacgaacattggattaactctactcttcagggcaactatgcaggaagtatcatttccgttttatcggaagatattaaatctcatagcctacaaaataacgaggtgatgtatgcgtga

SEQ ID NO: 284236 - DNA, 441 bp, Morganella morganii
atgtataaaagtattctggtacctattgatacttctaacgaaaccctgattaaacacgtcattccacatatagagtcactttcaaaaattaatgaccctcatatccattttttagttgttatccccagttatacgatgtttatcggatttgcatatggcatcgagcaagaaaagttcatggatgataatcagcgtctggaacaagccaaacttaatcttaaaaacgaagtttctaaatttaatctcccggaagacaggcttcactttcatgctgttgtcgggatgccgagagatgggatcctgaatgttgccgaaagaattcaggccgatttgattgttgtcagttccagagcgccgaatatcacaacgaaatacctgcttggttccacagctgcatctgtagtccgctacgcaaaaacctcggttttagttgtccgttga

SEQ ID NO: 284237 - DNA, 450 bp, Morganella morganii
ttgacagatgatatctgtctccataaatccaatctcaaaggtattctcaaaactctctcagaagtagctgaaaccggtaaacggtatcgaatcaaaatcaccgaatggcgtgacctccggacaatcccgatgaacaagacatggcgcatgtggatggaaaccacgggcgactggctgcgtgcacgcggtgtggttattgatatccggaacggagctggagaggtggttatatcgaagccgataaccaatgaagaaactcacgaatactttgtcggttactggcttggccggaatgaaaacggagagcgtgaaaaaaccagcagaatggataaagtacggatgctctacatgatggagaaacatgaacagtggtgcattgagaaagggataccgatcatcattcccagagaatcagagtatatgaaattaaaaaataagcaggaaaaatag

SEQ ID NO: 284238 - DNA, 216 bp, Morganella morganii
atgacagagaaaacgcaggagttactgagctgtccgttttgtggatgtgctgatatcacgatacacagccccagcagtcacggacttacgttgtttggtattgcgtgtgacgaatgtggtgcgcggattaagcggtttgatgaattggaagcaatagctgcgtggaatcgaagagtcgcatttacaaagtacgaaaaaagcagggaggttaattga

SEQ ID NO: 284239 - DNA, 354 bp, Morganella morganii
atgaagtatttcaaaaaatacccggtaactctcaggcactttattgacaggccgatttatgctgccgccgccggttatgacttcaacctcttcgactgcatggcgtttacggcgcacacctacgttaagtttctgaaggattcaaaatggcttttttggcttgatacagaaatcagagagctaccattcactgcgataacactgtttaccatgattttcattgcagtgactacgccgttcatttatccgatctatggtgtggctacatacgttatgtgcaggagagcgcaaaaagtgcagcacaccgaaatcatcgacaggaacattaccggctggttaatgaggttcaaatga

SEQ ID NO: 284240 - DNA, 207 bp, Morganella morganii
atggaaccaacggattttgaaaagtggtgtgctggggaaatggggtacacagtcgaatacatcatgaataaacggagaaaagattttttcggcatcactgggtataaattgagcgagattgatatcagatatcgtgcatacatggccggagctcgcagcatacttccggatcagactcagacaccgccacaaccaccggaggagtga

SEQ ID NO: 284241 - DNA, 348 bp, Morganella morganii
atgtctgggaacacaaaagtagattatagagttatattaacatttgatgttgatgttaaaggtgagacaggtatttataaggaagtatccgacctacttgctaaaggtggactaactcagcaatttaataaaaatgacctaccttcaaatacatatacaggcgacagacgggctgatgttacatatgaaggtgcatctctgactatagatgatgtgaagaatagaggtgataagttaaataatcattactggaaggttgttaatgatttttttgattctaaaaaattaaagcattcaattttcgtttcaacatcctacttaaaaacaacatcaacaaagcatgagtag

SEQ ID NO: 284242 - DNA, 171 bp, Morganella morganii
atgccacggaaccctttagtgctgatcatcattgctatcatcctgctgacggcctgcctgctggctggctgttatctgtattcactcgatactcactgtaagccactgccgggtaacccgctggacggtgtgatccattatgagtgtgagaacccacgggggctgctgtga

SEQ ID NO: 284243 - DNA, 264 bp, Morganella morganii
atgaatttggaattcaagaaaattaaccctcgaatcggggccgcctattacattgttaagtggggtgatattcagatcggaaccatcactcgcgatatgtgcggcaaaggcatggtaattaataataacttaccaggatttaagacaattaaaaataaattcatcgacatagaatctgcatttgattattacgttggactggtcactctgtttgctaaaaaggtcggggtgcaggaagccgtcaacgagctaaaggaatcctga

SEQ ID NO: 284244 - DNA, 273 bp, Morganella morganii
atggaaaatgcaaattacagcaagaaagtaatggaaaccgaagcagaaatcatgaaccggattttgtacatggggaagagcaattttgctcgcaaagctggctggcatgaatcgaaagtgagtcggttaaacgtcaaggatatcgcagtagtcttttccattttggataaagcattcagcaatagttttattcaggaagtggcaaagcaagcagtggcaagcgtgatggaaaaagaaaacgccccggctgttggagcagcagaggcgcattaa

SEQ ID NO: 284245 - DNA, 360 bp, Morganella morganii
atggaacatacgattaaagtttataaaaactcaccggagcatggtgattacctcaaggcgcgctttccagacggttcacacggtaacagtacgtttgaatatgcgggtcatcggtggggttatcggtacacatcatttgacgataaaggtgattatgacctgctctatcgctttgatgatgaaccaggcgtgcaatcatttacagttaatgatgcaacgctgcgggattattttgcagccaaagcaatgcaggcatgggtatctcaaatacctccggaaatgatggaagatatgatgagcaggtggactgagaactcatatgagatggcagacgtaatgctcagagcaagggagaaataa

SEQ ID NO: 284246 - DNA, 321 bp, Morganella morganii
atgaaatttaagggtacgcctgggccgtggactatcactgatagtggcggctcaataatggatagtgaccaatttattatcgctacctgtagccggttagccgtcttgtgcagatggcatgaaaaaggatttgagcactttagcgacgaaggtgccagtaaggatattggaacaattgccgcgaaggcgaacgctaatttaatagcggcagcgccgggaatgctaggattcctgttggaaattaaaggtgcttattacctgtcagataaacatcaatctgaattaaatagcatcatcaaaaaagcacttggccgagaatag

SEQ ID NO: 284247 - DNA, 792 bp, Morganella morganii
atgactgcttactataacgaaatcgatccgttcgctgctcagtggttacggaatctcattgctgccggtcatatagctccgggtgtagtggacgaaaggagtattgaagatgtcacaccagatgacttacgcggattcacgcaatgccacttcttcgccggtgtcggggtgtggtcactcgccctgcgccgcgcaggatggccggatgataaaccagtctggacaggaagttgcccgtgccagcctttcagcgcggcaggcaaaggaaatggatttgctgacgagcggcacctttggccagcattcttccacctcatcagcgagtgcaaacctggcgttatctttggtgaacaggttgcaagcaaagacggactcggatggctcgaccttgttcagactgacttggaagcaacgaactacgccgtcggcgcggttgatttatgcgctgcgggcttcggtgcgccgcatatcagacagcgattgtattgggtgggcaacgccaacaaccagggaatggaaggaatgcggggatgtgagtcagtcattcttccggaaggacgggaagatgcggaacgacacgctgtaccgccagttatggctgcacatgtttgggatggatggcaggccgtcacgggagcagataaaaactctcgaatgctgccacctgactttggcgagagaactgatgatgctgccggacgggtgggaaaactccgcgcctacggaaatgccatcgtcgcgccggtcgcggaagagttcataagggcttacatgctgataacagaggaatga

SEQ ID NO: 284248 - DNA, 381 bp, Morganella morganii
atgaaagacagaatcaaattcagcgacgaaatgttggccgctgttattgctggaaggaagacgcagacgcggcgactgattgagccgcagccatcagcaggcactgaggtttcagttgtgagtaaaacatttccatacaaattaacaggcggcacgattcctttcgctgatagggatggttgcgaaaagggaatgctgaaagtgatatcagtacacattcacagcattcatgacatatcaactgcagatgctattgccgagggttttgataaaaagtcaccaaggcattcctttatgcaggagtggattaacatctatggcgctcataactggattgaaaatccgtgggtgtgggttatcgagtttcacaaaatcaaatga

SEQ ID NO: 284249 - DNA, 270 bp, Morganella morganii
atgtcagttgattatttagttttcggcggtgacatgcatggtgatatattaacaaaagaaaaatacatgaaaaaaataccaattttcaagaaagtaatatcatcaaataataaatcaccacagaatatagggtattcattagatgttattcctgtattttataaaggtagtacttacgcaatagttgccaatagcaattttgacacagatgaagctggtgcagctatagatgaatacaagccaaggcccatacctgccgaatttctttaa

SEQ ID NO: 284250 - DNA, 690 bp, Morganella morganii
gtgcggcgttttatcccggcaaacctggacatcattctgacctccgccatcaccctgctgattatgggtgcactgacctttattgtgattatgcctatcggcgtctggctgtttgacggcatgtcctggctgtttatgcaccttaacgctaacccgttcggcgctgcggttctcgccggtctgttcctgatagcggtgatgtttggtatccaccagggctttatcccggtgtataccgcgctggtcggcactcagggttttaactccctgttcccgatcctcgccatggcgggtgccggtcaggtcggtgctgcgctggcactgtatgtccgcgcgaaaaaagactcggtgctgcgtaatcaaatccggggagcaattatcccgggcttcctcggcatcggcgaaccgctaatctacggcgtgaccctgccgcgcgtgaagccgtttatcactgcctgctgcggtggtgcagccggcgggttctttatcgggcttgtcgcctggttcggctatccggtcgggctgaataccgttttcgggccatcggggattatcgccattccggtgatgacatccgacagtggtatcttcatggggatggcggtctataccggcgggttactcgtcgcctatctggccggattcctgtttaccctgctgttcggcagtaagaatgtggatttaagctga

SEQ ID NO: 284251 - DNA, 300 bp, Morganella morganii
atgaatgatgagaaaagcaagcaagagcaagagtatcgtatttttgtagataatttaaaaaatactactatgtgtattgactcattaagcagtgataattttatcaatggtatttctaataaattaaataatgataaaaataatatacatagtatagaattaattaaaaaactatatgatgatattgtagatgtaaataaatatataaatatccgtagtgatatgctatataactgtctcttatacacatctccgagcccacgagacgtagaggaatctcgtatgccgtcttctgcttga

SEQ ID NO: 284252 - DNA, 1065 bp, Morganella morganii
atgataaccattaagaataacagaatttcttttgtagagaagcatctttttgagcctaaaattgaaacatttgatggaataatagagcgttatcgtgactaccacatcgaattgtttttacatgtagtcagcgattcatcttgtagatatgagaaaggtgtgggttcggcacgagtactgagagatatagctgggctatctgctaaagaaagatttttgagcctgttggaaaacaaagaactgaccgctaacccaaaaggtttttatgccaataaaataaaaaatggagaagtattccctcaggaaatcaagtccgttagttttgcacattgcacgcaggaagaagtagctaagcattttgaagcgcgaaattcagagtatgggatcatcttctatcacgactttcttcaatctttggggatgatacctgtaaggtatattaatgaagaaaaaaaagagtcaattcgccagctagttttcaatgagcctttcgcattagaagcttacggaaaaacgtatgatatgcgctgggaaaatgagtggcgtatcaataaaaatgtttcttttgagccgaacgatattgcctttataattgtaccagatggagaatatgatgaatttgttaacttaatagtttacaaggactttgaatatttagctctcccagcctctgtatttacaaatcccttcaagttttttctaattgctaatagtatggagcatcacgcttgggatcaaattaggatatgtggtgattggaaagtggattttgatatgttccctgatttcactgcggctgaggaaaaaaagtttttaagtatatgtggtttacatgtggattgccttgcaaaggcagagatacaagatgtatatgaaaatagatatatctcgaaatttatcaatttcgcgtcgtgtttagatgttggatttttgaataaaacatcattcaaagatatagccctggttaatcaaaatgctggagagccttatcaaactcatagagatctcatgatgcactgttacacggaaaggtttaatatccaacgtgatcgcataagtctgtag

SEQ ID NO: 284253 - DNA, 1992 bp, Morganella morganii
atggcaaagcagattattcaaggtacaactgaaatcaacagctcgggtatcaagaatcattttgtgtcagttgaacctgtacaggcgatattggaactcgtatggaatggatttgatgctggcgctaagaatattaacatcaacatagtttatgaccattttaatacagtaaaaaacttgaccattcttgatgatggtgacgggataaactttactgatttaggcagcaactttaatcgatttaacgattcattaaaaaaaacaagcattgatcaacacggttctaaaggtcgagggcgtttatcatttcataagctttgtcatcaagctaactggtatactaaatatcaaggtagaaatgcttgtattaaaattaatgatgacgatattaaggtatatgaagctcaaattgatatcaatgctgaagagcaaaacagtttattgaatgtaatggataaggggacgtgtgttgaattaacattattacattcaagccttccagatagaaataaattaatttctattctgtccaatgagttttgttgtaaattggcattagatgatgaaaggaagatttttttaaatggtgctgaaattgatatccctgaacacgaaataaaagagatctcttttgagattgagaataatgattttatggtgaaaggaatacgctgggataaaaaaccggcgactgaaaaatcatttatttatttaactgatagttcagggaaaattgtccacaaagaatcgacaacattcaataaaaaaagagactttcatttaagcgtgtttgtttcatctatttgggctgatactttcagtgctaatggcgatgatattttctccacagctaaaagcaatcctgattcaaaagtatggaaatatttagttaaaaatattttgaagttctcaagatatatatatgatgatttccttagagtgcaggttgaaaaagccatacaaaaacttgaggaggatggtgcatttcctacatacaatgaatacgatataacatatgctaactggaaaagaaataatatcaagcaggttgtgagaagtatttatattgctgatcctcagtttttggtatcactgaatataaagcagaaaaaggtaatcatcagacttcttgataagatgcttgtgtcaaaccaaaatgaagatttatttgatatccttgaaagtgttttagatttaagtgatagtgatctttctagatttgcatcacaattgaaaaaaacaaaattagaaaatattataagttcaattgaggaattacaaagaaggcgttttgcagttgagaagttaaagctaataatgaatgagcattataaagaagttctagaaacgcctgacttacaaaaaatcattgaaaataatacatggttatttggtgaaagatacgaaactataggtgcggaggaagatacttttactaagattgcaaaatcattgagggatagcgtttactccattaataacatagatgcacaagatgtagaaaatggagaggatattgtaggtgccaagagacaaactgatttattcttagcgagaaggataccaaccttcgactctaatggtaataagattttcagatgcataattattgaaattaaaaggccaagtatagccctaaatgttaagcatttacgtcaactagaggattatgctgcgattattaaacggcaccctgagttttctagccaaaatttgcattttgaattaattcttataggtagaaaaatttctagtcaagatatagagattcctactcgcttgtcaaattatgctggccgtggtgatgttggtttagtatctgatgatgcaaatatgaagcgttatgttaagaattggtacacaatatttgatacttttgaattgacaaatagtttcatgcttgaaaaattacaaatggaaagagatgtaattgaaaataaatccagggaggagcttgttaaggaattacaagaagatagtgttgatgtttaa

SEQ ID NO: 284254 - DNA, 285 bp, Morganella morganii
atgctccgtattgatgttattttcagcagaagccaaaaagagatgatgccgcctggcacatttgaggcgttggaaaaggaaatagaccgaaagctacgggctcagtatccggatatgaacgttcgtattgcgtggggaaccaatgcggcaatgtcagtaaccggcgggaaaaatgataaagataataaaaaaataaaagagatagtgcaggagatttttgaggatggcagttgggtgcctgaaacggcagacgcttccgatgatgcagaatattttgataaataa

SEQ ID NO: 284255 - DNA, 282 bp, Morganella morganii; identical to SEQ ID NO: 281105

SEQ ID NO: 284256 - DNA, 1500 bp, Morganella morganii
atgaatattctttcatacacagataaagaactaagtgaaaaaaatttctatctttcttgtctgcttgttttttttatttatacattcccattgattatatcagatatttattatctggatgatcttggaagggcaatagatgggcacggatgggatcatgatgctcgatatttaacaaatatcatatattcagcattaacattcggtgggttggtgataaacatatctccatacccattgattatatctctattattcttttcattatcatcagtttatttgacaagaatattttccataaagaggaacatagtttctgtactattttgttcgttacttatgacaagtccgttttatatagagaatctatcttataaattcgattctttatctatgtctataagtatatttttatgtgtgtacgcaatatatttaacatcaatatgtaatataaaatctctactgctatcagccatcatattatcggcagtgatgtttttatatgaaccaagtttagggatattcataacgctttcaatatcactattcattagcaactcactgtttcaaacaaaaaaggtttcattatataaagtaactacacatcaagtaatctctgtttgcctagcattattttcatggaaaataggtagtaaaattttagactacccagtaagacagacaatatactcatcacctgataggttctccgcatttaaagaaaagctatctatattcttagataacatgaatgttgttttcagtgatagattcatggtcgcgtactctttactattattgctttcgtttatatcaatacttacacttgttgctaaattaataaaagaaagtaatattagaacatatgctccaataatcaccgtaattattatatcattgccagtattcattataatgattcagggtttttcattttttgctatgcggaaaacagacccttttggttatgctccacgcgtgtttattgggtttggcgcatcgatgttagccatagctgtttttttaatgaaatctgatttcatatcacaaaaaataaagctcatagcatttttaatgccatttatatattccctaacgctaatgtctacttactgcaattcatttggctctcagatgaggattcttgacattatttctgccaatttatcaagagacttggttgataatgacctcgttggtaaaaacatggttatctctggaaaaatgccaaactccaatgagttgaacttctcaggaaaggaaaacccaataatatttaagttagttcaaacaccaatgcataatgagtggagctggggatataggcaattaataactttatatagtcttccagcactataccctagtgaagatgaaatgaacatttcaaataaagaaaaatgctcatttaatgtagtcagtaaaaacatatactatactattttagtgcctaaaaatggtaacttttttgttttagatttcgataggaattgtaagtaa

SEQ ID NO: 284257 - DNA, 537 bp, Morganella morganii; identical to SEQ ID NO: 279689

SEQ ID NO: 284258 - DNA, 678 bp, Morganella morganii
atgattgagcacgatttgcagtacctgcgggatatggcgactatcgcaatgactgaccacagcagcagaaccaaaggccagcttgaagcatttgagggatttgtattgggaaacacaacgcgctacccacgtaaaaagccccgtgatattaccgtgaacggcagaaaggtaagccgggaaaccgaggcggtatcctgctggtcaacacactattccgtgttaccgatgccacctattgaccgggtggactatcagaactgttcctggcggcgggcaattatggaattggatgaggcagagcagtcctggctgctgtattgctatggtaaagaattgaagttctcacaccagacggctatcaccgcctatgtatggagcgaaatgcaggaacggattaaaggccgccgggtgtcaaagaaagtaaaagaacgactcagggcgctggtatggctggcagtgcaggattacaccatgaacaaagacgggtattactatcagtctgagctggccgagctggtgggggtagcttctgataactggtgcagaaactacaaaacacactggcaggaactgttgcttatctgtaaaaccctggactgcggggcattacggaaaatgagaaacaacaggctggaaatacggcgcaaaaatgtagttggaacttgcaaaagtcaataa

SEQ ID NO: 284259 - DNA, 306 bp, Morganella morganii
atgattaacatgaaagataaatttatgtgcatatctatccgtcaggatggctatgaaatgttctctaatggcgggtgggcgagctataacaaagacgggaaaattacagatagctgcggcgatgttaattcgtttccggcaatcctgaacgtttccgtcgctgggaagaaagaattcgataccgataaaacactggaacggcgggttgccgatctggaagaaaggctgaccgccgaacaggaagtagccagccttcaagatcgaattagtgaggttattcgttcttcatttcgaaagtttcaatag

SEQ ID NO: 284260 - DNA, 1017 bp, Morganella morganii
atgaattacctgttaaccggctttgttcagaaagatacccggatcctgatgtttaatcccggtgctgagatttgcaacttccggaacggtgcccgttatgttgtcagtgcagctccccgttcaatggatggcattccgtccggccgcgttccggcagatgcgcagccgctgctgacagatgagcgggtgcttcgtttcctggataatccagccgtgataaaagccgccggcggactatccggatcccgtcactacgttaaatcagttggctactgccagattaacgatccggaaaacccctatcaccaccacgaactgaccatgacccgccacaaagatggttttatccggacatgctggcaccatgacaacatcttgcgggcgggtgatgtccaccagcagcaggcggacgaaattctgttacacaaccaacgggcgtttgtggcacgcagcatctttaccgatctgcggctgccagctggtcattttcttaatccttccgatttgttcacctggtcggtgatgcgccgcgtcagtgatcatcttccggcctttatcagttcctacattctgatgcagaaaccggaggaagagataaccggcaccatgacagagcattccattgttcatcaaccgcgctcacacagccggattgttcatgacatcgttgagcagataaagccggtcgttgttcctgagatagaaccggagccgccagcaagttttatgcggatcccgaagttaaagcgctgggagagtctgaaatacctacagtgggtgaaaagccagccgtgttgtgtgtgcggccagcaggcggacgacccgcatcacatcatcggtcacggtaccggcggcacaggtacaaaagcacacgacatttttactatcccgctgtgccgggttcaccacgacgagttacaccgggatccggcagcatgggaagaaaagcacggcagtcagctggagttgttatttaagtttatgaaccggtcatacgggatcggtgtttttggttaa

SEQ ID NO: 284261 - DNA, 2154 bp, Morganella morganii
atggggatgagcaagttcacctactttggcggtatgggggcggtagtcggtggaatagctgcggttggtaaagcagcctggaatgctgagcaggaagtgacgctgctcaaccgtcagctgatcgccaccggtaattatgccggtaaaacatcggcacagcttcgcctgatggcagatcagatgtccggtggctggataaccaggtcggatatgactgctgcgcttacaagtgcagtcggttccggttatttcttcggtgaccaggtatcacttgtggccaaagcagctgcacagatgaaacaggccaccgggcagtcggtggatgaaacagttaatcagttcaaacggcttaaggatgatccggtcaacgcgattatggaaatggataaatccatgcacctgctgaccgcatccgagtatgaacatatagctgcattggaaagatccggaaaaacccgtgaggcgtcagaatatgccattaccaaactggcagaggttaccaaccgtcgcactattgagatgagtgaggatgtgggtatccttgaacgggcatggaataaccttacaacaagcataaaagaagccggtgatgaactggcgaaaatttggagggcacctactgaagcggaaaagttggctagtgtgaatgaacagatcgcatctcttgaaaacggtgatgggtggatgaccgactccgctcgtaagagtagtttggaaacattaagaaagaacaaggccgaacttgatttcgccgttaaatcccagcaggggtatctggataataaaaataaaattatccaggccaatgaccgagaaaagaaaagccagcaggatctcaataagtacattgaggcgagcctctctcaggcagaaaaaagaacgcgggagcacgaaaagttaaaccgtgaaattgctgccaatgcaaaggctgcaaaagataccgcctctgcatctgacagtgaaaaaatcaggctatggacacctgatgaaatagcgaaagccagagctggtattgataaaaaatatgccgaccctaagacgccaaataaacgcgattatcgtgttgatgaaggaacaaaagcagaagaaacggccttaaaagagcaaattgcacttgaatcaaaattgcgcgtgctcagagagcacaaatctgttacggatgtaatcagtgctgaacgtaaaaagctttgggaaaccgaggctcagattgccattactgaagaggccagaggtaagcgccagttaaccaaacaggagcagacgttgctggcaaataaagcggcagtactggctcagcatgagaaattggcactgcttggtgatgaagttgtcgcccaggaacgcctgaataaacttcaggatcaggctgataaatacgttaagcagcagactgaaaagcaaaatgcaatccgcgatactatcggcaaatcttcgcgcgaagcgcagcaggctctggagaggtcgcaaatcctctccgctcatcaggacaatccgcggctgaatgaaatgctggcggctcaggcagcaacgtatgcatcggaagaggaaaagcgagctaactggctggccggagcacaaaccgcctggggggattaccgtgatgccgcactggattcaaatgcgcagatccagaatgcgactatggcggcactgaacggattctcaactgagctgacatctgttctgacaaccggtaaggctaacttccgggagttcaccacatctatactgaaaatgctgacagagatttttgttaaaaaatcgattgttatgggaatggatgcgatggggtttaattttaccccaaatgccaaagggggcgtttatagctctccgtcactgagtgcgtacagtggccaggtggtacataccccgacaatgtttgcctttgcaaaaggtgctggtgttatgggggaagccggaccagaggggatttttccgctgcgccgtggtctggacggaaaactgggtgtagtggcgaaaatggctggtggaggtgatggtgtagttcagcattttaatatcaccattcaaaatgacggcagcaacgggcagatgggcccgcaggcgacacagcaaatcctgaagctggttgagcaaaaaaccaagcaggttattgcatctgaacgtcgtccgggcggagcaatggggtaa

SEQ ID NO: 284262 - DNA, 432 bp, Morganella morganii
atgatagcaaacaacctggtattcaattacctggactacttactctggtgccgtgacagacataaagctgaagtagtcaaacgtttcgaatttaccttccgaagctcggtagagcatttctatccccagcaccccatggatggctataggacattaccagatacatcgttgcataccttcggcaacctcagtctgattagccacaacaagaattcgcgattgagtaatttccagccaaaacaaaagcaagagcacttcgaagcgagtctggaacggaatgaaattgatagtctgaaactgctcgccatgatcgagctgatgaagaagaacaatcagtggggggaagaagaaatcgccactcacgaagcggaaatgctggcagtgttaaccagtgctggtggtagtgatagcgtattaagggaggtgttatga

SEQ ID NO: 284263 - DNA, 1056 bp, Morganella morganii
ttgagtcggtacggtatttatgttcagcctgaaaccgggtcaaagcctttttatctggatgatgagcagtgtcagccacttgcgaaactggggcagtttaaattttatttcccctatgaatctgcaaaattaaacagagtggagccacccggcgtgtgggaatacatccgtgaccgcaaagcatggcgtgctgtggttccgagtatgtcagactataactgttttattgtggtgaaaaaaggggcgcacgcggcgagaacaaacggtatgacaggagtaattcagttatggacagacagactatggctggaagaaccatacatatacgtttatgcagaatgcggggactactctgcctggggtgatgacccttacggcaagttttttgtgtacgatgtatatggcaccccaaaacccaaatccgctgcgggtaaatatggcatccagcttcgtggcatgaatggtgtcacaacgctgacagatttctctaagctgggatactgcgtgtgggccggtacggtttacagcgatggtaaaaagggaagcggcgctaaaatacccggatatgacatcagcaacgaaagtcgctatacaatttatgtcaggccaaaatctcaggcatgcacgatgctgaggcgtggtaattcaatctggactgacgtccctgcctatctgaatgtactgttgttcgatcacaaccctgatttatctgtgttgccaaaatacgggattcaaatctgtaaccagaatggaaagacaacctataccagcaaatattgcccgctgatgggagggcagctgttatctgcaatgtccggctattctcaatataagaatccttattttaatcttggtaactatggcacgttcgtctcttccatcaagaataaatactacgacctggcagcacttggcctgtatgtcagcggtaattattacgatgtccggtttctggcaacagtggactccggctggatgggggatatgtggacaaataacggtaatgtgcaggggatttacaatactcactgtatcgacggcgatttatatttataa

SEQ ID NO: 284264 - DNA, 477 bp, Morganella morganii
atggcatccggtcaggcatccgtggtccacgatatgaaagtccggatccgttataacggtgaggattattccgccggtatggtgatcggggctgagctgaaaggtggtcaggtgaacacccttatcggttttaacgctcagcagtttgcgttttataatccggtgaaaaaatcgatggacatgttcatgtacatgaaggacggacaggtctttatgcgtgaggcgttcattaatcaggcatggctcaacagcgtggttgttactgacaaaatgcagtcagaaaattatgtgccgggtaaaacaggcttccttattgatgccaaaggcgggaatgcagaatttaacagtgcgacatttcgcggaaacctcgatatccgcagcgcggcatcaggtggccggatggaaattaataacgcaaagatagatgtttttgatgaaaacaatgtgttgcgggtcaggatcgggaggttgtcttga

SEQ ID NO: 284265 - DNA, 411 bp, Morganella morganii
atgaaagtccggatccgttataacggtgaggattattccgccggtatggttatcggggctgagctgaaaggtggtcaggtgaacacgcttatcgggtttaacgcgcagcagtttgcgttttataacccggtaaacgggaaaatggatctgttcatgtatgccaaaggcgggcagatgtttattcgtgaggctttcatcggtgatgcgacaatcacatcagccaaaatagcggatgttcttcagaccgctaacttcagccatgaacagaaaatcggctggcagatgaacatgcgcaccggagaggagattaagtacgggaatgatgctcagggttattgggttgaaacaaacgtattaaaacgcctgtttgacaagaatggcacgatgcgtatcagaatggggatgtggtaa

SEQ ID NO: 284266 - DNA, 192 bp, Morganella morganii
atgcgcatgcctgacaaatattccagccctacagcatacgcctggggacttataacctctgcttttggcattttatctctggatcagtgggccattgttgccgggatcatctgtaccgtcggtacgttcctggtgaactggtattacaaacggaaggaattccagttgaaagcaggtgaacatcatgaataa

SEQ ID NO: 284267 - DNA, 579 bp, Morganella morganii
atgaatgcgctgaccgatatcccgaacaaactcggccgggctgcaaaagccaccattggtgacctggtgtatgccgtactgacagagaacgggaaactgagtgacggcaaagccctgttcagtgcagatcataaaaatacgctgtccggcggcatggatgtggagaccatcagcaaaggccgtactctgatgcgccagcagaaagagggtaaacgtacgctgaatatccgtccggcctttatgctggtaccggcagctctggaaacacatgcgcttcaggttgtcggctccggcagtgtgaaaggggcggatgtgaatgccaatatcatcaacccgatccgcaatattgcggaaattatcacggagccgcgtctggatgataacagtgaaaaagactggtacatggccgcttctcagggcagtgacaccatcgaagttgcctacctgaacggtatcgataccccgtatatcgatcagcaggaagggttcacctcagatggtgtaaccacgaaaatccgtattgatgccggtgtggcaccgctggattatcgcggaatgatccaggtgaaaggccagtaa

SEQ ID NO: 284268 - DNA, 126 bp, Morganella morganii; identical to SEQ ID NO: 279708

SEQ ID NO: 284269 - DNA, 993 bp, Morganella morganii
atgtggtgggttattggtttttttattttattagtattattccctgtggtcttgaagatattaccacctatcatcttcaaaaaattaaataattacacactattattaaatacaaatagtttacattcacaatacctctttcaagttgtaatcttacttcctttaattttaagtttatatcttatggtatggattggttcagaatatcccttccgactggacagcataggatttaactttttcttaaacatacaaaaacttccattagggattttagcattatctcctattcttggtgcttttattgtatatgcacaccgttcattgcaaactgaaaagcaaataaaaacagcagaaaatcagttagaagaagctcaaaagaaaaataaaattgatatatacttttcaaaaagaaaattcatcaatgagcaactagcattatttaaaacacaacatggagaagtaattagccagcccgtcactttatacaacaaggcattcttattaaagaaaaaccatgaggatttaataaatgaagattttttcaaagatttaaataatttactgcttaatatagggaattcattcactcatttaaaactatacgctttaaaaaacgggacagaagattttttatggaaagattcgataaaaaaattagataaaaaacttaataaaataaaaaaaacactatgcattgatgttattaatatcattaacaacacaagtgataataaagagccaccttccgacttagaagtgatggttaaagttgcaaagagaatagcgaatacggttattcctactgagttcctagttaacattggaagtatcagtactgtttccaatgaaattcgcatcttatttaaatcagtgaaagaagttatatctatattatcaatggatgataatatagatattcttcttccttgttttaatgaaaccttatctattattagaccttttaacccacttgataaaaatggcacttaa

SEQ ID NO: 284270 - DNA, 1338 bp, Morganella morganii
atggactctgtaatgtggatgatcggcacgctggttttcagtatcttgctgattattatttcaattattaaatttaagtttcacccgtttttagcactgctgctcaccagcttttttgtcggtatcgccatgaatatggaaccgcaggatatggtcagcgccatcgaaaacgggattggcgggacactcggatttttggcggccattatcggactgggaaccatactcgggaagatgatggaaatatccggcgctgctgagcgaatcgggatcacgctggaaaaatgccgctggttaagtcccgatgtcaccatgatattgatcggccttatttgtggtatcacactgtttgtcgaagtcggggttgtattactgatcccgctggcattttcgattgccaaaaaaacaaatacctcattattaaaactggcgattccgttatgtacggcgctgatggccgtacactgcattattccgccgcatcctgctgcgttatttgtcaccaatgaactcggcgcggatatcggaacggtgatagtggccgggttagtggtggggctggttgcatcgctgattggcgggccgctgttcctgaaatttttgggggatcgtttaccgttcaaagttgtaccggccgcgtttgctgacctgaaagtccgtgaagaaaaagatttaccctcattaggcgcggcgttatttacggttctgctgccgattgtgcttatgctgataaaaacaaccgctgatttaaacatgagcaaagatagcccgttattcatctttttattgtttatcggtaatccgataactgcgatgtttatcgccgcttttgccgcttattacgtattgggtatccgccggaatatgggaatgagcgtcctgctcagcaaaacagaagaaagttttagttcgattgcgaatatcttgttgattatcggggcgggaggtgcatttaacggcatcctgaaaggcagcgggctgagtgattctctggcactggtgctgtccggtatcgatatacacccgattttacttgcctggctggtggctatcattcttcatgccgcagtcggatcagcaacggtcgccatgatgggcgcgactgcaatcgtggctccgctgatgccgctgtacccgcacatcagccctgaaattatgacgctggctatcggctccggggcaatcggctgcaccattgtgactgattccttattctggctggtgaaacaatattgtaatgccacgctggcggaaacattccgttattacagtgtcgccacgctgattgcatccgttgtcgcgctggccggcacctttgcactttcctatgtgatttaa

SEQ ID NO: 284271 - DNA, 498 bp, Morganella morganii
gtgggtgatttaactcatgatgacctgtgtgaaatagcggtgagattcctgcaaaacaatggatttaacgttgcgttcggtgatcggtttcagtcaagcaacggaaccggagagcagcctgacgcaatcgggttcagaagcggaaccagttgcctgattgaagcgaaagtcagccgctctgattttcttgcagacaaaaagaagtggttcagacaacagccggaaaaaggaatgggtgactggcgcttcttcatatcgccgccggatattattaaaccggaagatttgcctacaggctgggggttgctccacgtcaaaggcaagcgggtgttcaaggttcacggatggcctcctaactcatactggcagagcaagaagccattttcagccaataaacaggcagagtgtgatcacatgtacagtgcgctgcgccggttacaaatacgcggacacctccatgagatatatgaaggtattccgaagggagctgccatatga

SEQ ID NO: 284272 - DNA, 294 bp, Morganella morganii
atgaaatatccaaaaatagatgatttccacaatggcattaaacctatgccgaagttgttccgtgttgtcagcgtggagcttgacgttttgcgctctcatttaggttctggtggtggcgttatatttgattgtgatgatgttgaaatcagaaaaataagacgggttaaacacaatggcggctggtgctggcagctggtcagagagcacaaagaccaggagctgtgggattactgtctcaatcaagacagggagtgcctggataacctaaattgggaatttggcctgttcagataa

SEQ ID NO: 284273 - DNA, 207 bp, Morganella morganii
atggaaccaacggattttgaaaagtggtgtgcgggtgagatggggcacacagtcgagtacatcatatcgcatcgaaaccaaagcattttcagaggggttgattacaaacatcacgaaataaacaccagataccgtgcatggaatgccggagttcgcagcagactgccgtaccagacaccgccaaaaggagatgaagatgaagggtaa

SEQ ID NO: 284274 - DNA, 219 bp, Morganella morganii
atggaatttaaaggtacgccggggccgtggaaattcatggatggcttcgtttttgataaagagcattcggcagtagcggaaatatatggatttgagtcagacggcaaggtgatggcggcagcgcctgacttactggaggcgctaatcgaactccggaaactggttactcaccacgaccaggcggacgcagcaatcaacaaagcacttggccgcgaatag

SEQ ID NO: 284275 - DNA, 942 bp, Morganella morganii
atggcaaacgaactggtcgttatcgaaccagcgacagcgctcgacctttttacagcgccggataaggttcaggtgctgctgtctggtatccgggagaaagcattagcagagcaggcattactcgatattgatttatcgaaggccaagaatcgcgatgctatcaaatcactggcctacaaagtaacgcagtcaaaaacatacatcgacaaagccggaaaggctgtcgttgatgagctgaaagaactgccgaaaaaagtggatgccagtcgaaagcagtgccgggatgaactcgacgcactgagcgaagaaatccgcaaaccggtaacagcttgggaagatgcagaaaaggcgcgtgtagcagcggaagaattagctcgccaaattgagcgtgaccacgaagaagcactgcagatgaatgagttgcatgacctgcgtaaagccgaagaagaacgcaaacgcattgagcatgaaaacgaaatcaagcgtcaggcagcagagcaggcacgaatcgaagctgaacaaaaagcacagcgtgagcgtgaagcggcggagctgaaagccaaacaggaacgtgaagctgcggaattaaaagcacgacaggaagtcgaggcggcagctaagcgcgaacgtgaggccagagaggcgcaggaacgcgcagaacgtgaaaagcaggaagctatcgcgaaggctgagcgtgaaaagctggccgcagttgaagcggagcggcgaaaggcagaggaagccgaacgcacacgactggcggagattgagcgccagaagcaggaagaattaaagcgccaggctgatactgcgcacagagctaaagtaaataaccaggcgatgcaggatttaatcgccacaggcatcccagaagattgtgcaaaggcatgcatcattgccatcgccaaaggatcggtatcatcagtaaaaatcaattactga

SEQ ID NO: 284276 - DNA, 246 bp, Morganella morganii
atgcagataacttgcgaccacttcagcgtttccagcagaaccggcgagtcggtaatcactacccacggacgggtatttatcaacggacttgattctgaagctataggaaatagcgatgccgacatacaggagttagtcggtaactggctgcagggcatggatgagcaatcagcagttgagacgctacggaaagcagggttcgacatggatgttatcgcacggcttgcaggaaggagcgcagcatga

SEQ ID NO: 284277 - DNA, 396 bp, Morganella morganii
atggcaattaacgtaattaccgtaagcggcaatctcggaaaggattgtgagcaacgatggactccggcagggaaagctgttgcatcgttcagtctgccggttaagcagggatatggcgagcacgaaaagacatcgtgggttatttgcaaaatgttcggcgcgaaagctgagaaattaccagagcatctgaaaaaaggaatgaaggtgacggttaccggtgagtttgtcatggaggaatggacaggtcaggatggcaataaacgatcagcgccggtgattatcgtgaaccagttggatttcagcaataatcaggcaggaagccagaagccgcagacgcagcaagctccagcacggaatgagccaccgatggattttgactatgatgttccgttttag

SEQ ID NO: 284278 - DNA, 678 bp, Morganella morganii
atgatgtcattaaagaaggcagctaaggaaatagaaagggatcaaatttatgcacggataaaacgtgtcaattggatattcatggctgaacgtattgaaactgaattaaaaaaaataaaaattgatacattatctgaaagtaaattaggtaatctatacctaagtaaatccgataatcacttaatggagcgtaggagattattaagttatcaatatattaattctattcatatttatacaggaaataggcttttagatctgtttattcctaacaaagatgagacagacgttatgatagctcgcgaaagaaatgcacagttgtggtattctcaagggccgtctggtgaggttatcgtgtttgtatcgccttatgaatctgatcttggtaaatttgatgaaaatgaaataattatcgggaaatatactaatccatatcaaataaatgaagccgttataatcaagcatttttcaatattttttaagtactgtgtatgcacatctcagcattcagcggcaaaatttactcattatttttacaggcaatatcttatttttaatgattttagatataggtcaacatatataaaaaaatttattagaaatggagagcgagtagttctggttgcttttactgtagcagcggtacttgtcgctatatatttaaaaggaagtaattga

SEQ ID NO: 284279 - DNA, 429 bp, Morganella morganii
atgaaacagtatctttttgctttacttataccgttcaccgtgtgtgctaacgcaatagaagaaaccctgatatttgaaatggagtgttcctgggtcaattactcccaagacggcacacccaaaaaaagtgaggatagccagacattttctgtttataaatcaaatgcaacacaaattctcaagataacgccagctaaaaacagtaatcatatgccacctccgacctacgtcatgaaggtaaaaggggcatactcgtctcaattcggggtgccttattacaaagaattctattggatgggtcacgatacaaggcttacattacttcgcggcagtgatacaaaagtaataattgaattcatatcatcccctggaatgtctgtgatggaagccacttgcaccaagccaatatatgcaggtaacagacagtaa

SEQ ID NO: 284280 - DNA, 198 bp, Morganella morganii
atgaccgaaaaatacgaagtcacagcaaccaaaaagaacggcacgacatatcacggattgatgacaacgaaagagccgaacattacaaatgggctgattggtattgccggtctggatggttcatgtacatatatcgcaccggatgcaatcagcgacatcagatacattccgatggttgaggaaaatagtaaggaataa

SEQ ID NO: 284281 - DNA, 210 bp, Morganella morganii
atgacaccacaggaagcagagaacggacgcagacgaatagcaagggaatgcctcacggaattaatgcagttcacatctgacgaacaacacaccgcaatactcgacaaatacacaccgaaatttaaaccacttaatcacctgcgctttccggcaaagagagtgctcgggtattacgtgcgtacgttacagaaggagatgaaggatggataa

SEQ ID NO: 284282 - DNA, 600 bp, Morganella morganii
atgaaaaagtatgacctaattctcgcagacccaccctggtcttacggcaacaaagcatccaacggcgcagcagataaccactacaacaccaccgatttttattccctcacccgcttacccatcgaaaaaatagcctctgataactccgtactctgcatgtggtacacgggtaactttgtccgtgaggcttacgatttggctgaggcgtggggatttaaagtgcgcaccggcttcgggttcgtgtgggtgaagctgaacaaaaacgcaggggatcggatagataaacatccgccggaggatttcttcgatttcatggaattgctgaactcagagacgcgcatcaacggcggcaactatacccgcgctaatgcagaggtgtgcctgattgctaccaggggaagtggacttgaacgtcagtcggccagcgtcaggcagatagtgtattcctgcctcggtgagcacagcgagaagccgaaggaagtacatcaccggctggaagagttatatggcgatgtcccgcgcatagaactgtttgccagggagaaatacggcgaatgggatgtgtatggggatcaggtgccgggaagtattgaattatga

SEQ ID NO: 284283 - DNA, 357 bp, Morganella morganii
atgaacaaatatcgtgacaaatcagactttgagattaataaggctattgctgaaattattcacccgggaaaggtattcactcatgcatattcattcggtgatgcctatggaaactcagtacagtggatacatggttatgctgaaaacctccatgttgattattgcaacaacccggctgacgcataccctattatctttgaaaacaaaataaacattaatttcagggagtcaataaagaccggggtaatggtggaattgtctggttggagtgaggtttattcaataaacgaaaacccactacgcgcagccatggaagtattcctgatgatgaaagaggcggagaatgaaaaagtatga

SEQ ID NO: 284284 - DNA, 855 bp, Morganella morganii
atggttttatttgacgaaaggccaccttttgaaaaggcatggctcgccacctcattccgcgtagttatggccggaatgggtgatgatacggtaatgctcattgctgaaatgtataaacgcggatatgagccggatgagattatattttgcgataccggctctgagttcgagcacacatatcattttattggctggctaagaagctggtgcaatgaaaggaagtggtcgaaagtcgttgtgctgcgtaagtgggataaagacggcgagccgctgagcgtcattgaaacggctgagaaaaacaacacgctgccacccgctgcgttcggcagtaaatcatgttctctgcgatttaaagtcgagacggccgacaagtattttcataatcacccggagtgtttaaaagcatggggggttgagaaaaaaggcgttccgctggattctcacaccggaagcattctgcgtgttatcgggattaatgccgatgagccgcaacgagccgaacgctggaagccagagcataaatgggtgcaagtgtttccgctggttgactgggatatcggagagaaagaatcatcggcggttgaagaagtcggcctgtattatcccggcaaatcatcctgcatctgctgccctcaccttaccggatctgaattgattatgttacgcgacagatacccggaagatttcgggcgcattatcgcgatggagaataattatattcgtcacgaactccgtccagactcaacaacaaaaggaatgtgccgcagaaaaacaataaatcagaaaatagatgaatatgagcgtgaccaactggatattgcagaaggtcagtgtcagttgtacttattgcagtga

SEQ ID NO: 284285 - DNA, 729 bp, Morganella morganii
atggaaactaaagaaataagacgcgcaaatttgcgtgcattaatcaaagaattcgctgacaagggcgtaaaccgagccaagtttgcagaaatgattggcataccagcggcgcagcttagccagatcggaagcgacaaccctacccgcaacattggggatataatcgctcgccgtatcgaggagtcacttaatctgagaaatggctggatggataatattcatgctgccgcaagcgaatccgactccataaaagacaacttcatactccataacatcggtgataataatactgtacaaacatacaggatttcacagttagaccttgagtatagttgtggcggagggcgcttgaattctgaatatccagatatcgtcaaagccgttgaaatcgaccctgattacgccaagaagatgtttggtggccgcaaggcttcttctcttggtttggttacagcggtaggagatagcatgttgggaaccatcgaccccggctctctcgttgttcttgacgttacagtcaggagctttctgagtgatggtatttatgccttcacttttggtgacaccatgcacataaaacgacttcagtccatgggaaacaaaatgatggttatcagtgataactccgtgtatgaaaaatgggagatcaatgaaaccaacgaaagcgaactccatattgaaggttttgttgtcggcaaatgggaaatgaattacaccagattaggataa

SEQ ID NO: 284286 - DNA, 225 bp, Morganella morganii
atgagcaatgatttactccgctggagaaaagaatccagccaagaagactggaagcgtcttgctcagctcgcagggacgtcagttggttatctcaaccaaattgcatacgggaatcgccgtgcgtcacctaaaaaagctgagttaatcgagactgcgtcaaagcaattcactatcacgcctgtaagcaaagaattgcttgttttcgcacagtctggcgctgcttaa

SEQ ID NO: 284287 - DNA, 435 bp, Morganella morganii
atgcacaaatggtcgcgcgtttttaacgcacgggagttttataagcgtttgtccggcatgtctccaaccgctaccgagctatacgggctaatcgttgatagttgcgactggaagtatggccgatatgtcgcgacgagagctgaggtggctgaaatcctcaatgtgactgagagaagcattcagcgggcgaacaaggaactcgagtcggcagggttaattaaattcaaacgcgggatttacgctgtgaatcctgagtttaactggggaggacgaagctggaatatttcaaaatcctgttactacacgatgggagtcaaaggcgctcaggtgattgattttaatcatgcagcagaggcgattaattcaaaaaagcttgaggagattggccgcagcgctctgaggggagcgcgcagccgtaaatcacaaggaaattaa

SEQ ID NO: 284288 - DNA, 1635 bp, Morganella morganii
atgctcagtataacgccaaaggcaaagcaagtcaccgctctgaacatgctcagacggaactggaaccaacaccggacgatgttactttccgcgagtgtggggtttggtaaaacggcaattgccgcgttcatgaccgccgggctggtgtctcacaatcagcgcgtgatgtttgtggctccgtacacggtgctgcttgaccagacggcatcccggtttgttgagtacggattaccggcagaggaaatcagcttcgtgtggcgggatcacccgttgtacgacccgacgaaactaattcaaattgcatcggctgatacgctgatacgccgccagtttccggacaacatcgacctgctgatcatcgacgaagcccacatgaagcggaaaaaaatactggaaattatccgtgacagcggcgtgagagttgtcggtctgtcaggtactccgtttgccggatggatgggggaatactacgaaacgctgattaaacctacgacgatgaaagagctgatcagcatcggagatctgagtcgttatgagttttatgcacctgataatccggatgtcagcggtgtgaaaacgaccaggctttccgcgttcgggaatgactacaacgaagatcagcttgctcagattatgggtgattctgacctggtgggaaacatcgtcaaattctggcttgaaaatggtgaggacaggccgacagtgtgcttctgcgtcaacgtcagccacgccaatttcgtcacgatggaatttaacagggcagggattaacgctgaggtgatgaccgcagacacgcctcatgacgaacgtcagttaattatcagccggtttgagacgggcgcgacgaaaattatcgtgaatgtcggtgttcttgttgcggggttcgatagtgatgtccgctgcataatctacgccagaccgacaaaatcggaaatcagatgggttcagtgtcttggccgtggtctgcgtaccgcgccgggtaaagacaaatgcctgatattcgaccattcaggttcggttcaccttctcggttttcctgatgaaattgaatacgacgacctgcaaaacaaaaacgacggcatgaagacccaaagcagttaccgtgatcagggcagggcagaaaaaaaaccgaaggaatgcccgtcatgccactacatgaaacccgccggtgtttacgtctgccctaagtgcggattcaagcccctgatgggggaaaacgttcaggtcgatgaaacccgggatctgaaaaaactgaatgccggtgagcagatattcacgaaggagcagaaacagagttggtggtcacagattaagttttaccagaaacagcgtgagatatccgggaaaccgatatcagacggctggtgtgcccacacgtacaagaagaaattcggagtatggccgcgtggtctgcatgactcgccgcaggagatgacaccggaggtcagtaattatatccggtcgaaaaatatcgccttcgcgaaaatgcaggagaaacagaaaaaatcagaggagccgaaaacagaagccgaaaaaaagcagatagcgcttaacggcatagctgaaatcaaaaaggttctgaataacggaggtcacagtgaggacagtcgaggcagtgcgagggcgatggcctga

SEQ ID NO: 284289 - DNA, 969 bp, Morganella morganii
gtgaggacagtcgaggcagtgcgagggcgatggcctgagatctttgagtattaccagctaccaccagtcacaggaaagaaacattaccagggagaatgcccggtctgcgggaaaaaggggaaattcaggatagacaacaaaaacgatgccggttcatggatatgctcatgcggcgccggtgacggatggaaattgctggaacttacccagcagaaagattttaaaatactggccggagaaatcgataagctgataggaaacagcttctcagaaggacagcgaaggccacagacacagtcagacaccaaatcaacccgctctaaagttatcgccaaattcggcacactcatcccgctaaaagatactgacgctcaccgctacctgatgagcaggggaattaacacgcttcccgccggtcacatccgttttaatccgcgtgaagttacaccgatgggcgttaagcaatctatctggtcgattgccacagatgatcgtggcaacggctgctatctccacaggacagtgctggaaggcgacaaaaaggccagctttgaaggcaataagcggctgctgaaattacaggaagataattacctggattttgccggttcgattgcgatcaggatgacgccggtagcatcgacccttggcattgcggagggcatagaaacggcgctgtcatgccagcagatatacggctgcaacacatggtcaacgctgaatgcaaattttatgcggaaattcagggcaccaaagggtgtaactcacctgataattttcgcggacgcagacagtaacggcaccggacttgcagcagcttttgagtgcggaaacaggaacattctcagccctaatgatgttgaaaaagtcagcatcagatggattgacggaaccggcgattttaacgacatgctgataaacggcgcaaaggtgtttcagcaggaactctggcgcaaacgtgcggcataa

SEQ ID NO: 284290 - DNA, 210 bp, Morganella morganii
atggaaccaacggattttgaaaagtggtgtgcgggtgagcttggctatacgcctgagtacatcatgacgcagcggaaaataaattttttcggcggtcatgaatacaaacatggtgagattgcgaaaagataccgcgccgggacggccggagttcacagcatgctgccgtatcagcagccagcgaaaggagatgaagatgaaatggattaa

SEQ ID NO: 284291 - DNA, 882 bp, Morganella morganii
atggtaacagtaagctctgtagctgccacagaacagcatgataatacaataactgttactgcaactaagcgcattcaaagtagttttgatgtaattggtaatgtgaatgttcaaactgatgaacagttaaaaaaatctttagttaatcaaactgatgatttgagcgcagtttttcctgagttgttatctgcaaaccgaagttcgcgtatttataacaatatgactcttcggggccaatcttcggccgatttcttttctccgagtttgggactgtttgttgatggtgctccccagctttctcaatcgtatgctcaatctcttcaaggggttgagcaagttgagctacttaaaggcccacaaggagttatttatgggcgtggcacattgggggggattatcagtgttattaccaaaaaacccagtagtcacgctgaagcatggttaggggggcaatattttggtcaaggggaaagaatcaatacaggaggaagcactggctacatggaaaacggctgggcttttcaggggaatgttagtctcgatagaaataatggttctttgaacaatccagcatgggataaaaaaaatgttgatagcagagatataaaagctggatggttgtctgctaattatatttcccctgatacattatttgagtctaatttaaaagtaggtggagaaaattaccattctcatgaggaatattttgttcctttttcacctctttcacgttcaaaaattgatactgaatggttatatgaaacacctaatcttaaacgtaaattaaaaaatatttcctggaatacaggttatgattttaatgatgaatggaagtttaaaacgatactctcaggatattttgtattcagaagcaagagctaa

SEQ ID NO: 284292 - DNA, 738 bp, Morganella morganii
atgatttcagaaataactttttcaaaaaaatacacttcattttggaatgaaatattgccaaatgcaaagaattatgttcgcctaataaatggtgggttattacatgctgaatatgaaccattccctcccacaccaagaaagcagaatatatcactaatcaatgaactatctttttcaatgctaaggtcgttcattagaaaaaaagaatcgacacatacacttcttaatcctaattatatgaaaagtgataatttcaaaactctaatgaagttatcattagagagtttatcaaaatttagttatgggaatgattacttactaccattgaaaaatgatgaactaaaacaaatccaacagctatttaagatgactattgaacatttcaatactgatccgaatatttttatagacccagagtttgatgggtgcggatttgtcaatcaatcatttggtgatttaatatacaacaagacactaatagaaataaaatcaggagaaagaaaattcagcttaacggatatacgacaactgataatttaccttactttaaatcattattccctccttccttttgaactaactgaaattcagttattcaacccaaggatgggtatatcattcacagagaacattgatgacttttgcttaaatacgagtgcattaaacagtactgaattatactctgaaatacaaaaatacatcacggagaataactttattgaggacccactattttga

SEQ ID NO: 284293 - DNA, 243 bp, Morganella morganii
ttgccggaacgtttccagaactggcggctgaaagaggtcaccccggaaggtgagcgcattttctatcaggacggcgaaccgtgtgacctgccggaatctacccgcctcgatgtgcgcgtggagatgccacagagctctgtgtggaatgtgaaacagcgtgaactggctgaacagatggaacgtgagcaggcagagcgtgaagcgcaggaagcagcagagcagggcgtagactcagatcaataa

SEQ ID NO: 284294 - DNA, 630 bp, Morganella morganii
atggtgcatgcttctgatggtgatcccggtgtttacctacctcttgctgagtcgttaaataatacagtgtggggattaacagttacagatgcttcaaaactaactgatttggatacattgttatcattacatttatctagcataaaaacagcacagcagactggcccttatattcttattggttggtcatatggcgcttttattgccagttaccttgcagaacaactctcgcaacaaaatcagtctgtattattagtattaatagatcccgtctatcgacatgattttattaaattttgccatgatgactcagatagttcatcagatgaaaataagcagcttgcatgcactaaaaggcttatgtcattcctacctgaaagtgacctaccattatctgatgatatcgcctgtttatggctggaagccaccaaccacccaacagaatggacatcacctgaaaaagagtggtaccaacgattaccgccacatacccaacatcactatttttcaggggagcactggtcaatactgcaagatcgcgctaccagcacacatctggccgaaatcattgatcagtgggtgcaacaaaaactttctaataacggatatccatccgaaggaggtaattaa

SEQ ID NO: 284295 - DNA, 1089 bp, Morganella morganii; identical to SEQ ID NO: 277826

SEQ ID NO: 284296 - DNA, 162 bp, Morganella morganii
atggggtcaaacaaactgaaattaatttattttcataaaaaccttgatgaaaatcattatttactcagatcatcattagcttcattttcagcttttactttcattaagctgtatataaattcaagattattgttcattattctaatgattgcatgcaactga

SEQ ID NO: 284297 - DNA, 558 bp, Morganella morganii
gtgaccggtctggatttaaccattaagtttgatggcgagctgaagcgcaaaggtgctgatggttccacgtctgcttttgatatcgccaaagaaatccttgctgaagtcaaggccagccgtcagccgtcatattgggtgcagctcgacatgaaaggtgatggcagtgatgtgattcaggggtatatgaacttcacatcatggtcgatggagttccctaccaaagaaatctccacgtactccggtgaactgaaagtcgcagacgctgacagctttgaatggctgcaggaagaaatcgtggttcagagcatcgcagccaaccccgcgacactgactgtgaaagccggtgaaacggcaacattcacggtcggatttaatccggttaacgcgacaaacaaaaattacgaggtggtcagcgataagcctaacttcgctaccgtcagtaagctactgaatgttgtcactgtcaccggtgtcgcagccggtaccgcgaatattacagtcacatcggaagatggcagtaaggcggcgaaatgtgtcgttacagtcactgcggcctaa

SEQ ID NO: 284298 - DNA, 153 bp, Morganella morganii
atgactgagttcgtgatgatgctgaaggcgaaatatcccgatgagaaaggtttcacgaaagatgagtatgaggctatcaccaaagccgatgatgcacgcaacgatgacctgattaagggcaagcgtcggctggtgagcaggaagaagatttaa

SEQ ID NO: 284299 - DNA, 1899 bp, Morganella morganii
atgactgattatttatcattacctcaaaaaaatattgttaatgctcctatggggactgcaatacaagtactggcttcagctggttctggtaagacaagggttttaactgaaagaatcaggtatatacttgataattcagaacgagggagtgttattgccctcacatttacaaataaagctgctgatgaaatgcttgaaagattagatgatggcagcgaaaatcgcgagcgtatttggattgcaacaatacattctgttgcacaaagagtacttgatagttacggatatactataggtttacctaaagaattacatatattcgagcgtgagcaagatagaatggaggtatttcttcattctctgaaagaacaagggatagatattgatagttatttaaatattgaagatgctaaagaaaaacgtaatcgtgaaaagttattaagtcaatatcttaatgttttttctgaaattaaaagggagtttttaactgaagatgaagtaagggaaaaatataaatcgaatccccgaatttggaatatctatcaagattatcagtcagcactattggaaagtggaggtgttgattttgatgatatcctattgtattcgcataagattcttttaaatcaagagtctgtgtccaggatatatcaaaaaaaatatattgctttatttgttgatgaagctcaggacttgaatcgagctcaatatgaatttataaaggttctttgtggtgagaaaataaaaaacatcatgatggttggtgatagtaatcaaatgatttatggttttaatggttcatcatctgattattttattaaatcatttggtaatgatttttctcctgtgatttatcgcttgaaggaaaattataggtcttctcgtgctgtgatagaattagctaataaaattaagccgaatagtcaggttagtattaatgctgccattgatggatttaaaacttttaaggtattggaggatgagcaatcagaagcagtttgggtctgtgatacggttgaaaacttacttaaattaaaaaaacatcctgaaattgaaggtgatattgattgttcgaaaatggttattattggtcgtaatagatttgtttttaaatctattgaggatgaaatgaaactaagaggtattaaatacttcttaaagcgtagtgataggaatgagcaaccagtgtctttcattggtaaattaattgacttggctataaaaattaaaataaattcaaaagactgggttgatggaaggagattgtataaattaattggtatagagcaatttactaaaataaataatgattacaaaattagtgagatcataaaagaagtaaataattcaaatgtggatgataagagcttaataagtttaattttggattatgtggaaaatctttcttttgaatctcctaatttattgaagttttgttcagagcttaagtctaatttaataaatttgggggcagcagtaaatgactcttctaaagaagatgatattgctcttggaattagagatatagaacaacttcaatctatgtgggggcgttttaaacgtaaaggacttggagataatctgtcctcatttagaaatgcattggctttagggcaacttaataacgatgctttgggtaaaggaatcatgttaagtacagttcacacaatgaaaggccttgaaaaagatattgtttttcttgttggaatgtgtgaaggcgttttcccggactaccgggctaaaagtaatattgatttggaagaagaaagaaataatgtatttgtggctattacacgctctcggcggtggatttacattagttatccagaaaaaaggatgatgccttggggggattataaataccatgcagcatcaagattttatcttgatatgcaataa

SEQ ID NO: 284300 - DNA, 195 bp, Morganella morganii; identical to SEQ ID NO: 14548

SEQ ID NO: 284301 - DNA, 336 bp, Morganella morganii
atgaacaaatatcgtgacaaatcagactttgagattaataaggctgtggctgaaattacaatctacggtgattggtatttgtcaccaacggatgaacaacctttcacattcttcaattatggtattaattcaagcaaaacagtagagctacctgattattgcaataacccagcggatgcaatgccgattattattgagaatgggatatcaataattaaaagctcagggggatggatatgctgtcatggtgcggccggtgtaattgagcatgaaaacttatatcgcgccgctatgatttgtttcctgatgataaaggatgcggagaatgaaagctga

SEQ ID NO: 284302 - DNA, 366 bp, Morganella morganii
atgagacaaattaaaataagctctggcgcgtggcaaaaagatttagaaatggttgtcactgttatcgatgaagataaatttaaaactcagtgtaagcaagttaataaattttattgtgatgcagagtgcagagctaagaaatacggaagccatgaaaaagcgggtttcgccatgttctgtgctgagtgttttcaacaaatggcattcaataactttaaagacgaagaatggctgactgagcaattcgactggtctaaagataaaggaattgaagggtatccttcgttagatgatatgggcattcgaatcgatgaaattgagccatggtttattgattacgacgaaatggaaattacaggatggtga

SEQ ID NO: 284303 - DNA, 135 bp, Morganella morganii
atgtggcgtattgtttataaaaatgacgctaacagagtcctgctaacaggggcagaaagtatcgatgattgcgtcagttttttaatggaacgaaaccttgatgcgaataattatttaattcagcaggttatgtaa

SEQ ID NO: 284304 - DNA, 327 bp, Morganella morganii
atgaaacgcgcaatatgcagtaaagaacttgccgacgatgaagtttatgtgtgcgaccagtgcgccagtgaatgccagatccgaattccgggagtgtgtaacggaaattctgaaacggtggtgcttgctcattatcggatgccgggattgtgcggtaccggaattaagtcaccggacatttttggtgcatgggcgtgcagtgcgtgccatgacgaaatcgaccggcgtacacgcctcacagacgctgagtatgcaaaacagtgtcaccttgagggcgttatccggactcaggcacagctgctggcagaggggaaaatatcggcatga

SEQ ID NO: 284305 - DNA, 159 bp, Morganella morganii
atgttttttggggtatttattattgctgcggggataatttccttacttgaaaactatggtgttattgctggtgatgttaagtgggggcttcctctcgctattatctgctttggcgcaagcattgtttatgattctgtcaaaggtaagaaaaaaaattaa

SEQ ID NO: 284306 - DNA, 366 bp, Morganella morganii
atgaagcccctgggggcgctactggttatcatggttgtgatagcggcttttctggccgatgcgttaggtgatgtcaaaaaagaacgtgacagtctgcaaagtcagttatcagcacagcaggtgataaacaccaccacgttttcagccatttccatcaggcaccgcactgagctcgacaacatcaaggccaaagagacagaggacacggagaatgtcaaaattaaaaccgttatcaggacggagtttaaagacagtgagtgcgctgttactcctgtttcccctggcattgttgggaagttgcagcaatacgaaagagacattcgtgcccgcgccggcggtcccgatcccgccacaactgaccgctga

SEQ ID NO: 284307 - DNA, 600 bp, Morganella morganii
atgactaaattaactgtcatcagtaacgctttgcctgcggaagggcaaccaacaatgaccagtctggaaatggtcgattacatcaatgctgaccgtaaggcgaaagctgaagcagaaggcctgaagtttccatgtaagaaattcaccaagctgcaacataagcatttcctgcaaaaagtaccgaaagttttaggtgttgagcactcagccgaatttttgtctcagtacaaagataaaactggccggtgcttaccgtcctatgatttctacaaaagagaagcttgtctgatggccatgagctacagctatgaattacaggctcgggttttcgatcacatgactgaactggagggtagtaaagatatcaacctgcttgatttctcaggtctggctgacatggctatcagtgaaatgcaaaatcgcgtagcagcagccgagaaattttcgttcgaagagcatggtcagataggtagtgcgctgatgacccgccggaagaaagagaaaaaagtaattaaaaaagcagagcaattggtgaaagacctgattcagtttaagttgtgtgacatgggcgacttcccggaaggtggtgagccagcatga

SEQ ID NO: 284308 - DNA, 219 bp, Morganella morganii
atgaaccacgaacaattcattcagaagaacgtacaggccgagttattaaagctcggcttttctttatctgtttcttcgatggcaagtgacagggcagtggagcattaccgccggtctaccgcgaccgggaaaggaaagatgatggctgactgcatgcacactgccaaagcatgggctgagaagtattcagggcagaaatccaaaccgaaatctaaatag

SEQ ID NO: 284309 - DNA, 315 bp, Morganella morganii
atgaaagcgcataatgttttaaaaacgatatatatcgataatgatgataatgattttctcaaatacgaaataattggcgatcacgatatgagtatagaaaaggccattatatctgctgaggttaaatctaaggccggtgacattgatggatatattttgattaagattggtgaaataacatttgaccatctttcaccgccaaaggtggctgggtttcagcggtcggtaatgtctgaaatgttgccaggtataagccttggttcggtagtcgatgagtgtaaaaagcacagagcatcgtggaaaggccacaaatga

SEQ ID NO: 284310 - DNA, 252 bp, Morganella morganii
atggcgcagttaatcaataaaccaattattaacgggctgacgccggttagccataacggaaagattgttgcgtgtaccgctgacgggcgggtgattggcggattaattagttgcagcgttgatagctgcaatcgcgaattggtcacaatgacaatcactgttgaagtggttgatcgtgacggaggcttggttattggcggcttgcgtggtgacgaaaagcaacaaattgagagtgatttccacaacaagtaa

SEQ ID NO: 284311 - DNA, 807 bp, Morganella morganii
atgtccgtttattttgtgatttctgtactgattatttttctgattatcctgctgattatattaatgattaccaacaaaattgtgatcagccggaagaaaatagtttatctgtcactgattgcgctgttttttgcattttttattaaaagtgcggtggtggaaaaaaatgaacagataaaaactcaggttcttgagatggtaccgacactaaaagccatcaatcaggttgatcccgttatgtccggggccttttttgccgatttcagaaatgcgggtaagggttcgaaaaaacgggaagagtattatatgcgcctgcagcagtgggccaccgaaaatattaaaaaactgctttatctcgcgggggatgacgcggtgattaattacgggaaaatgcggctggaatttttgcagaaagcactggcgcaggatacctccggtgacttctgctttcgtgtactgcatccggaagtatcaggcccgccggatatgaaaaaggcttcagccgggtaccgtgactttattatcggtaacagagcgttgctggatctggtgaattcagccggtgaaggggctccggttgcacattattctgcggatgaaattcagtcattattttcggcacaaatacaggggtcggtggataaatacggcgatagtttcctgacggatgatccgtatgtactggcggaagacaagctgcaaacctgtcagatggaaattgatttaatggcggatgtgctgagagcaccgccccgtgaatccgcagaactgatccgctatgtgtttgcggatgactggccggaataa

SEQ ID NO: 284312 - DNA, 1590 bp, Morganella morganii
atgacccctttgttattcctgttatggctcgcggtaagctcaggtgtcagtcattgggaacatttactgaagtatgtgttgcctgatgcgatactcaataccctgattttattacttggtgtcggcgtactggtcatgcttattggtgcgggttgcgcctggttagtcactgcattcgatttcccgggaaagcggctatttagttgggcattgctgcttcccctcgccatgccaacctacatagtggcatttgcctggcttgatttactgcatcccatcgggccggttcaggaagtcattcgcagcctgttgggctatagcaacccccgtgagttcaggcttccggatcttcgctccatgaccggcgcgattttgttattgggtctggtgttatatccgtatgtttatctcaccatgcgggcgatgtttatgagccagccggcgcatttactggaagcagcccgcacacttggtttaagttcaaccggctcatttttccgggtggcgctgccaatggcacgtcccgcactggtggtaggaacaagcttagcattactggaaacactgaatgatattggcgcatccgaattccttggcgtgaatactctgacagtcacagtgtataccacgtgggtgacgcgttctgatttggcggcagcagcgcaaattgcgtgctccatgttgacggtaattattctgttgctggccctggaatattatgggcgcaagaatcagcgttataattccggccggcaaatgcgggggattttaccggcacgattaacgggaattcacgcatgcctggcgactttattgacttctctgcctgttttactgggctttgttgcccctgcactatttctgggttgggaaagtatcaggcgttttagtgatagtatggaaatttctgccagcctcctgcaatcattacaaaactcattattattagcggcaggagttacccttgtggtgacttttgtcagcctgattgtggcgtggtatgcgagatcaagtgcgatttcggggggggctccggaggccagacgtacattgatgaaagttgcctcattgggctatgcggtgccgggaacggtattggccatcgggttattaacaccgggtatgtcgttggataatatactggccgaattgttcaattatcgcggtttaccgctgctctcttcgggggttttattagttatctgttgttctatccgctttatggcgatttcagtcggggcgattgatgccgggttaacccgtattccgccgggcatggaacaggcctcaagattacttggtgaaagtgagtcgggaacctttttccgcgtacatttaccgttattgcgtccggcattagtgacaggtgctttgctggtttttgctgatgtgatgaaagagttaccggctactttattacttcgtccggttaactttgaaacattagcaacatctttgtatgcagaagcggcgagaggtacctatgaggagggggctgttgcagcattactgattgtattggccggaatgctcccggtaatactattagcacgtagtcaattatcttcatccgggccaaaacaacgataa

SEQ ID NO: 284313 - DNA, 1704 bp, Morganella morganii
atgcaacaatcagataatatcagtcctcaggcgccgtctctgccgaaaggcggcggtgcactgaccggactttccggacaggcgggggccgccgggccggacggcgcggcgtcgctgtctctgccgctgcccgtcagtgccggacgcggctattccccttctctctcactcagctacagcagtcagggcggtaacagtgcctttggtatcggctgggatgtgaatcttcctgcggtcagccgccgcacccgtaaaggtgttcctgcttataccgctgacgatgaatttctggatcctgccggtgaagtcctggtggctgtccccggcgcggcggataaacgtcagaccctgctgggtgtaaaactggccgtttcttatcagataactacataccgcgcccggacggagcgtgatttcagccgcctggaatactggcagccgcaaggcagtaccaccgaaccggatttctggctctggtatgccgcagacggtcaggtgcatctgctcggttatgaatctgccgcccgtatcagtaacggcagccacacggcccgctggttactgaacgcctcggtctccgccaccggtgagcagatttattaccgttaccgtgcggaagatgacatcaattgcagcgaccgggaaaaagccgcccatccgggcagccacagccagcgctatctcagtgaagtccattacggcaatatcaccgccggacgcacattcccttgtttcaacggcaacgatgccaccaaagccggctggctgtttgtgctggtgtttgactacggcggacgcacccttaaaccggcagaaaaaccgctgtttaacgccggttccggctggttgtgccgtcaggatccgttctccggttatgcttacgggtttgatctgcgtacccgccgtttatgccgccaggtgctgatgttccaccgcctggagacgctcgctgaaaaagcagaaggtacggatgtaccggcactggtttcccgcctgctgtttgagtatcaggaaacccacgttgtcaccacactgactgccgcccggcagatggcgtttgaggatgacggcaaaatgctgtctctgccgccgctgaccttcggctggcagacctttgattttccggagtctgtgcagtggtctcagccggagatgggtaaactcaatccgcagcagccgtggcagtatctggatctgcacggtgaaggtatttccgggatcctgtatcaggacagcggcgcatggtattaccgcgccccggtccgtgataccgggagcgatgatgtcaatgcggtaatatgggataaaccgcagcggctcgataatattcccgccctgaaaaacggtgcgatgctgactgatcttgacggtgatggccgtctgcagtgggttgtcacacagcccggcgtacacgggcaataccgtcagcagacagataacccggaacagtggctgcattttacaccgctcagtgccctgccgctggaatacggccatcccgccgcacaaatgaccgatatcgacggtatcggtgccaccgacctggtgctcatcggtccgcgcagtgtgcgcatctggccgggcagcaaagacggctggctatccgccaaagatattccgcaatcagaaaaaattgtcctgccgtcaccggacggcgatgccgccaccggacggcgatgccgccacactggttgctttcagtga

SEQ ID NO: 284314 - DNA, 396 bp, Morganella morganii
atgacaatattagagtcaattaatgaaattatccgtctatctaaattgatttcagcaagatccagtgattatggaacatcggtatatgatgacccaaaatcagtaatagaaagattaaccacaataacctcagaggaagaggatttttataactttcttcagtcactatcagatcataacttagttgtcatccgtaatttaatctacgttggtagagagttatctgcttccggcctctcatttatggactattataatagaactaatagtaacttcagttcagataaagcatcgacattaaacacagttcaggaaaaacaaccagcattagaaaactatttatcgaacactattaagtttgctgaaaaagcaggtgtgaatatagatagattgtaa

SEQ ID NO: 284315 - DNA, 159 bp, Morganella morganii
atgccacggaaccctttaacgctgatcatcaccacggttattctgctgacggcctgttttctggcgggctgttatctgtattcactccccaatcactgccagccgctgctgggtaacccgctggacggtgtgatccattatgagtgtgaagcaccatga

SEQ ID NO: 284316 - DNA, 1164 bp, Morganella morganii
atgaaaaataatgaagagcttgagaggctaattaattatgtcaatctgtcatcaattagtattgatgatgggcttgtgattattgaaaatggactagataatagtttaaatcatgatttctcagctcttctgattaaatttggtgtaaaagatattagtagtcatgaagatggagaaataattttcaaggcgggagtgaataattttaatattgattcatgcatatatgtgtcaattgataatttttggaataagtgttcaagaagtggtgcgtttaatgctaactatgtaattctgaaagagaaaatgttttttaatactgactgtggagagattaaatgtatagaaacatttcttaattggaaaaaggtattggacttagtagctaatcaccaaattgaaggtaagtatgtattctatatacctgataatgatggaggaaaagagctaatagtcaataactattacgatttaaccaatgtcttaaatattaatttgtcagatagtttgctatcatcatcattagaattaataaaggtgttaagcctgagtgatgcacagcaaaaagaaagagtatcaattttaagaagtgctatatttgatgtaattaacaatgatgataataaggatatatttcaattaattagaaagggtgataagatttatagtaggtataatgacttactggatctttatacaaagagattttctgttaataaaatattatctgaattagagcaaaaacatttagaatacacaacaaagataaatgattttatatcaagtagccaaagtaaagcttttgctatacctggggcacttattgctgttggtggattggctaaggcaagcggtttgttagattcaatattaatttttattggtcttgtttttgtatattgggttacatatatatctaatgaggttttaaatgaatcatataattctttacaaaaaagcctgatggaattagtcggtagatactataagtttgatgaaggtgtcgaggtgagagatgcggcatcaaattttgaagaagatataaaagaacagatacgtaatgcaaagaaaagaattaatagaattaatgatatgagtcttctgatgttggctattggtggtacataccttgcttgtaaattattattttcatttgttgaataa

SEQ ID NO: 284317 - DNA, 1203 bp, Morganella morganii
atgataaatagccaagaatctgatgacattattgaatgccaactttgtggaagccatcacagcaccacagaattatgcgattgtggatatgaaccatctttagaagaaccaaagatacatggtggatatactgcaattcatgccttaaccgcaactttagatttagttaggaacggtgaggaaacaaaatttgaaagtgtaattgggcaagagtggtctttatcatcagatgatgtaattcagttcataaccagaactgataaaaaatttatggcaaaaagaaagagtcatgattttataagaaaagacttaatgccattgaatactccaagcatctttttaagttatctgaatgataatttagggtttgttgattttgtaatttcaataatgaaacaaatgagacgggaagctaattctgataaatcaaaaattgttggtggagcttttgttttcattcattatcaaattgatcaggatagcgatagtgatggtagattgctgattataatggtggatagaaaaggagcttttgattttaatgatgatttgattcctaaaaaaataccatcaatagatattgattctcttcgtcaagctgcgctaattgatatgactttgtttaaagcagggtatcctgaaaataaatgtgaaccctatttgcattttataacaggaaaatcaagaagtgagttttttaaaagagctcttggttgtaattctaaagttgataataatagaagtgtacagcaaacaatagaagcagttgacgattttattattaaccaaaatataagggtagtagataaaataaaggtcaatgctgcaattgaatcgttgtttaacgaaaaatcaaaagattcaattgaccgaaaggtaactgttgaagatataggtaattgtattgagaaaacattaccacggagaagaggggtttctaaaaaatttacaaaatttgtcgatacaaatgggtatatgatagatgattattttgagcctagtattttttcaggaaagaatgtaagtaaaattaaaataatagatgatgaaaaagattacgaatttacttttgaagccagctccattagtgaagatgaaaattctgacgctaagatcatttataaaaggcaagatggggaaattataattaggctcgctcgctcaggtaacgatgagatgcgtaaaaaaataccatccaagtaa

SEQ ID NO: 284318 - DNA, 237 bp, Morganella morganii
atgtcggcatgttctggttgcggttcatctctgattgattcgcaggaaatcgagcttgatggtgtgacgtataagtcctgtcctaattgctcaggcaatgcaggtaagcatattttttacagatatgaagattttggcatgagaaatatgggggatggccggcacattgttcagtcgtggtgcccgtcatgcaggtcagacgaaaacccgtcacttgaagtggaatttacctgctag

SEQ ID NO: 284319 - DNA, 591 bp, Morganella morganii
gtgacatacaatttaatctatgctgatcctccgtggatgtatcgggataagtgcaagtcaggtagccggggtgctgagtttaaatactcagtgatgacaattgacgatatctgccgtttgccggtatgggaattagcagataaagattccagtctgcttgctatgtggtgggtaccgacaatgccgtcggaagcattgtctgttgtgaaggcctggggatttcgtttgatgacaatgaagggttttacctggcataaaacaaataagcataaaggtaatagcgctataggcatggggcatatgactagggcgaacagtgaagattgcctctttgctgtcagggggaaattacctgcccgcctggatgcatcaatatgccagcatattacagcgccgagaatggatcacagtagcaagccgggtattatcagggatagccttactcaattgctgggcgacatcccgaaaattgaactgttcgcccggagcaatcacacagggtgggatgcctgggggaatgagtgcagaaatagtattcaaatgaatagtgcgagcatcatcaccgaaaaccgggtagctgaatgctattaa

SEQ ID NO: 284320 - DNA, 381 bp, Morganella morganii
atgtttaaacctaacagcattattttatacgttaatgacgtcgttaaaagtactgagttctactccaacatacttgaatcaactccagttgagcaatacagtgaattttctgttttcgttttatcagaaaatttcatattgggactacaggccaaatcaggtatagaccctgagccacaacctcagtttggtggttttgagttatgtatgtcggatattgcaaatcaggatgtggacgccgtttatcttaagtggtgtgatttggacgtaaaaatagtcatgaaacccacaatgctggattttggttatacattcattgccgtagatcctgacggtcatcgactgagagtttgcgccaccgacactacaaatgtggattaa

SEQ ID NO: 284321 - DNA, 345 bp, Morganella morganii
atgttcggtaaaaaagcagcagttcaatatgatgactggaaaggtactgtagctcttgataaagatgatcttaatgatatctccgactgggctgtaaatgaaaaaattacgaataataatgaacgtgtttttggttttgaaattcaatatagtaagatagctaataccttttccataacactaaatacaaccaaattctcattcgacgaaattaaaaactctcaacaaccaaacgatcttatttccaataaaaatatatcgttaaccccagagcagtttattgaattacttacaaatagatttaaacgcatcaatattattgcctgttccaaggctttggattaa

SEQ ID NO: 284322 - DNA, 789 bp, Morganella morganii
atgagcatgaaattagaatcagcactgaaacagtttcatcctaaatcacctatgttcagtgattcgtcacactcgacatcccctgatcggcttaaaggtatggatacggccgcagcactcggtatgactcagcaaaatgcccggttcggggtgcatgctttttttgcgaagaatgatgtcagcacagaagataaatttaaaactgttgaggcactgacgcagtacgccctgcgtacggtgcctaagctggtggctaaagcagctggtaatcgcgttgctcagtgtatgaagattctgtccacaatggcgtttgaggattacgcccgttcagctggttcggtttgtcagtgtcagaattgtggtggaaaagggctgatttatcgttgtaagaatgtagtaaagcatccgaggatcactaatatggaaggcaacgtgattgttgagccgatagtcagtaatgagctggtgggcgaactgtgtaagacctgtaatgggaaaggacaattgacctaccggtgtcgctgcaaaggccgggggaaagtgtatgacgaagagcagagtgaattacagggagcaccggtatttaaggactgtccaaaatgctcggggcgtggatataaacgggtaccgtcgtcagtagcttatcaggtgataaaacatctggtgccggatttaaatgagaggacatggcgcagaaactggaagccattttatgatctactgacaggaagatgctatattgcagaagcagaagcagagaaaaattttagttatataactcaaaattag

SEQ ID NO: 284323 - DNA, 888 bp, Morganella morganii
atgagcatgattttaactgcgcgggctttgcagataaaaaccggcaacgcgctgcgcaaactggtactggtaaagctggcggataacgccaacgaccaaggtgaatcgtggccgtctgtgccgtacattgccgagcagtgcgaaatgtcagagcgctcagtacagaaccacattaacgccctggtggaaatggggctggtccgtatcgaatcccggaaatcggccaacggtctgaaccagtcaaatatctatcatctgcgcctgaatgctgctgccgtgagtggtgaatctgctgcaccatatggtgtaaatcctgcgggggtgagtggtgcaaatggttccgggactggtgcagcagattcaccaggtggtgcaactggttccgatagtggtgcaggagctgcacccagaatcagtcatgatccagtcatagatccagataataaaaatattatctcccgcgatgaaaaaactaacgccaaaaccgctatgccggaaagctttgagccgggttgtgagcatgctgcaaaagccgaggcatccggattggatgttcaggaagagtttcagaagttcagcgactaccacgccagcaagggtacgaaatacaccgactggcaccgcgcattcagctactggcttggacaggcagctaacttcaaacgcagggctgcaggaaacagcactaactccgtagagcgtgacgaggcattcacccgtctgatcggctcccgttcaaaaccacgtaaccgcaccgaggaaatcgcgctggaaatggccgggaaaaccggtatccggacgcaaaccgagtttatgggccgcaagacgtggattgatatctggaaacaggccacagagcagaccataaaagaacaggaggcagcatga

SEQ ID NO: 284324 - DNA, 2115 bp, Morganella morganii
ttgttcataaatattgactttgacgatcagaaggaaattgccagtatttcgttagaaggttgggctcagccgcttgtcgaattactctcacagtattttatcatccataaagacatgctttgtctgaactactcccacctatcaactgaggaccgcagtcttgaggttatggcttggcaagatccgctaactgatcgtgagtattttatgagcaaattcagagatgcgtcacagcaggggcagatagcgctgaccttaaaaattctcggacacggatccacggggattgagaattcgtcctctatcttggagccaaattcttaccagcgcgctcaggataccttcagggatagcttacttaaggtcgatcccccgggcttacgtgaaatcattgtggcggaaatcgagccacatgcgatttgggtgagttggttgttaaatgaacgttcatattataagtgttattttttggacgatcagcaggtcatgagggcgttggtggacaatacgtccgagaaagattgcatctatgtacttcaactagtcgaccctcctctgggggcgaataattgggccttcgagaaactagtcaagctgtattggcagtgtgtacgcgactatttgcaaatacatatcgacaagtcgtgggactattcaagccccaaaatacatgagctcctcatctctctatttgcgaattcgccgacagtgcagacgtgccggtgggcttgcaaacaggttttcgaacgagcagatccgtcgatctttggtgagcttatcaaacattgccaaaacatattgccggaggatgtacgtgatctattcctacgctggaacatacgttcgcagaataatatcaaggagtgcgctgccaaagccttctcaaggcttgctgaattgtgcggtgtcactaaacctataccatcggacctcgcacttgcggcggcttggcacgagtttggagacccacagctttctagtcagcaaagcgtcattgccagcctcagagaattgccatcccacccgagggatcgagaaacgctgtggacccaactaggcccggccgctcgcgaggcctggcggcaggatctgttcgatcgggtgaatgaggaacctgaattagcccaggggctcctcaattttgcctgcctttggctcgagcagactgcatttgccgaagtcgagccagtgcttttgcgattgatggatgacgaggaccatctggcgtttgcgaatgggcttgtcgatattcctgtaaggcaactgcaactgaggagtaagggattagtgcggtccaagcagggggcactcgacctggaggggccagtaggctggggcgagggtgatactgcgttgcctagcgtaggagcccaaacttggctgagcgacccttccgtggagcgcgtcatccatagggcgcttagccagatggaggaaaaattttgtcgcgaatattcagtgacctggggagaggacgaggagggccatacggcgcgtctcctaacgctgacaacagaggcgattgaaaacgcgagcaaacagttgcaccaactctcggttacgacgcgggcgacgtatccgagtctgacagtgaaggtgcgtcaaccaggcaagaaagaggaaggggcgaacacatcagccggagctccactgggggcggacgtgctgttcctgagccgtatcgtggacaaggggaaaacagtgatccaacgtgcgacccttgtgcaggtgaaaaagcgcaaaggcactggttcggtagggggcttcagttcgacggtaggcattgaactgaagcagtgcgaggacatactcaagcagtcagaacacgcctattacctgttcatgactccggcctcggctcacccggttctctgggttgccccagcgcggctcgtcagaaatttgacccagttgcacacgagtaaaactacggttctggcgatgcaggtacgcgacgccagctgctcctacgcggatttttttctgcacgagcttgttggcctgtgggctggtgacgagcataaggacatcatcgccatcgccaacggcgattctcggcttgggcgaatgccccgccacatcgttgatattgaggttaggcgccaatcggattga

SEQ ID NO: 284325 - DNA, 174 bp, Morganella morganii
atgggggttttaagcaagtatggctgctttgagcgagaagcggacgttgcgaacagcattctgcgtgaattaatggggagcaggtcacttgctaacaatgccatgtatgagtcaactgtgaacaggtcaaccatgatctggctaaagtggataggtaatatgcaaattttttaa

SEQ ID NO: 284326 - DNA, 231 bp, Morganella morganii
atgcggccgggtctcatttttgataatgcactgatgattcagattatgctggaaaggctcaagtcatcaactgctgacatacgtgaactggtgtcagatattcgcgctgctgtagcatctgcattatccggatattccggtagtgtttcctcagtcagcagagcgaaatcaattgcgctggcgctgagaaaaacgctaaagccagttctttccggttattctgacaggtga

SEQ ID NO: 284327 - DNA, 1284 bp, Morganella morganii
atgttgaatatagtatttcaccaacagggtacacaattttggtctcctaacccaaatagaaaatatgttacatatcatgattttagtaaattaccaaaagatgagtatgagaaaaaacttttacaattacgggaaaaattaagccatcaggtactaaatgttgaaagcggtcagttaattgattttcacatgatatcgctacctaacaacagatatcgtttatgtactaatattgatatgttgattgcagatggtacaagttattcattactctttactgaactttgtttattattgagcggagaaatactgcctcagttagatgagcactatgacttttaccattatttacaagataaaaaacagtatgaaaacaaagaatcagcatatcaatattggaaaaataaaatcccaaacctaccagactctcctcttctgccattatatatggatccagaaaaaataaataaaataaaaattaaacgccttagctggacatttagctcaaaagaatggaaaaactttagtaatttggctaaagaaaataatattacaccttccattgcattagcaacctgtttctcatctgtacttgcaagatggactggccaaaatagcttattactcaactttacattatttgatagaaagccattagcccctgcagttaataatattatagctgattttactaatgtcattcttttagaaatgaaaacagacaatcgaccattaatttcattatctaaagacaatcaaaatacatttattgaagcttggcaacattctgattattctggtattgatatcattagagaccttcgtaaaaatggcacccatccttatgggtgtcctgttgtctttactagccatattaatcaaccacttattgataaaaatatagaatctgtattaggttctataggatggggaatatcacaaaccccacaagtttggcttgatcacatggcaattaacaaaagtggaaatattgttttacagtgggattataacaatgacttgttccggaatgatgttataacaacaatatttgatgtttatatttctcgtatacgccaacttgccaacgatcctaatgcctggattgaaacccaacctgatttaattcctaaaaaacaattaaaaaatagaatatcagttatcaaaaaagataattcactattaccacatacactgcataagtctatttcattgatatcgactctcaggaatggagctacaaaaaattattatctaaagcaacaatactcagtgatcaaataa

SEQ ID NO: 284328 - DNA, 4290 bp, Morganella morganii
atgccaaaaggagtagggcaaatcattagcgttctggctattttattaatggggggaacttatgttccgattgatgtactacaaccagaagaacgtataaaccgcattgctaaaaatgctcagctttcattactcatcgtatctgatagcgatccatcctattcaatctatgctacattttgtaacaggattgtttggcaaaaagttcaaccctccgagaataaaccactacacaatatagatatatctcctcatcaagcagcttatgttatttatacttcaggttctactggagagcctaaaggtgttgttgtatcccatgccagcgcaatgaatacctgccttgatctcaatcggcgatataacatttcagacaaagatcgggtacttgccatatcagcactacattttgatctgtctgtttatgatattttcggtgttttaaatgccggagggactcttgtattagttaaagaagatgagcgccgtaatcctgatgcatggttacgacttattaaccaacataaaataacactttggaacagcgtacctgcactgtttgatatgttactaacctatgcagaaggaatagggtcatccattccacaatcgctgctattaatctatctctctggagattggattgggcttgatctcccgacacgttactataatttctgccctgatggacaaatagtcgccatgggaggtgccacagaagccgctatttggtctaactattttaatgtcacaacattagacccatcctggagctcgataccttatggatatcctttatccaaccaacgttatcgtattgttaatgctagaggagaagattgccctgattgggtatcaggagaactttggattggtggtgcaggcgttgcgttaggctacctaaacgatcccgaaaaaacagcacaacagtttgtaaaacaaaatggtgaaaattggtataaaacaggtgatatgggaagatatctccctggcggtatacttgaatttttaggaagacgtgaccgccaagttaagattggcggataccgtatagaaccaggggaaattgatgctgcattcaataagcttcagggtgtgcaaaatgcgattacactatgccttggtaatggtaataaagaaaaagcattacactcttttgtgatactaaattcgggtaattaccagaatattatcagttcaaatagcaccttttctcccctctactatctgcgctcaaccccaataaatgtacaacaacaatcccaagaaacggcaatcatagctggatttttatatgattatcttactgaacaaaatattgatttcgacaacctcttgtcagaaaaaaaatcagcagatgaccatagcattatcgctagctatcagtcattaatggctaattggctaaatttaatagcacaatatccacaaactacactcaattcccccccaactaatagtacccagcgaacgctaatagaaaatttgcagcgccacaaaaacaatttaacagacatactcaaaggtaaaaaatcagctctaacactatttgatgatccctattggtcaccagaacaagtcactatgcgtattgatggaatgcactactccttagaaaatttactacaacaaataagagaacttcatcattcactaaaaaggccaataaaaatcattcaattaggtgctagaagcggtatttcagcaaattatattctgcaacgattacccaataatatggttaccctactgctaactgatgagtctctttcaatggtaacgcaagctaaccaaaatttatcagattatcaaaatagttatgctgagcctcttacagaagtatttcttcataaaaatcgatatagtgcagatatcatttggatgaacaattatcttcatcgattagacagcccacaaaaagagatacaaaaattcgtttcactctgtgctccgagtggaatgatttttatacaagaagtgttacatgcccctgcacaatcactgataagcatctctttattacaacaaaatggtagtgatcctgctgatgaattattaacagcaaaaaaatgcaaagatatctttagcgcttctactgcgacttataaaagtgaaggagttaacggcgaaatattgacacagttataccaagcaccagaaaaaatttatttaccagataaaaataagctagagcatgatttgcgccaatttttaccagactatatgatcccaaaacatatttattttctaactgagttccccttaaccgcaaatggcaaaatagataaccaatcattaaaattgtattgtcaggaataccaagaagaatacctaaatcaacaacctatcaatggtaaagaacagatcatcataacaatatggcaaaagctccttggcaccaacaagatacaccgtcacagtcatttctttcgtgaagggggagatagcctagttgctattcgattgatctctgatttaaaccatattggctaccaagttgaactggagcatatctttgcttatccgatcctttctgattttgcacaaaatataaagcagagcgaagttttcgaaaaacagccagcaatttcacataacgaggcgtatagatacaatccatttccactcactgatattcagcaagcttacttagttggacggcaaaataattttacacttgggggtgttggtacacatttttttgtccattttatagcggaaaatttagatgtacctaaattagaacgtacaattaatcagttgatttctcgtcatgatatgttacgtggtgtcattattaatggacaacaacaagtacttaaaaaagttccttattattccgttaaaacgcattatatccctacagaaaaaagtgacgcttttctagtattacgagctcaacttgctaacattgtttatgatccagaaatttggcctttatttactattcaagttatcaagaccaaagaacaaccagatcatatttttattagccttgataacttattccttgatggaatgagtatgcagatatttttcagtgagctaaaaacgctatatatggagccaaatcaccaatttatccctctagatattacttttcgagattatattgattgtgatgcctatccgattaacacacaaaatgattgggaatattggttaacgcgtttaccacaattaccaccagccccacaattgccactaataaaagatccagcacagattgtgcaacctcgcttctcgcgtttacaaacatcattatctacttctgtttggcaagcactacaacaagttgctcagcaaaataatgttacgccagcagcacttttgattgctgcttattgcgccacattatccgcatggagtaaaagccctgagttaacaattaatttgacattatttaatcggcatcctgtacatcctcaaataaatgaagtacttggtgattttacctcattacaattactcgattggtatacctgtgatctttggtcaaacagtatctcaatgatgcaaaaacgtttacataaagatatgcaacatcgtagtgtttcagccattaaagtaatgcgtgaaatggcaattcaacgacagatgtctcatatagagatacctgtcgtttttacctgtgcattgggctataaacatgatgaaggttttctttctcatcattcatggctaaaacctgtttggggaatatcacaaacaccacaaacatggctagatcatcaagtatatgagtcagacggtgaattatatttaaactgggattttgtcgaacaattatttgactacacaaccattttttccatgttccagcaatatgaacatatactcactaaactggctactgaaccacaatcttggcaattgccactaaataaacttataccaagatgcaataatctcgtcatcaccccagttttcaatgccaaaaataatcaaaacacacattataaacaatctactgatacacaaaaaacaggtcagacaatacaaaaactacaacaacttgttaagcaagttattggaataacgttagcacctgaaacaaattttttcgaagcaggtgccagctctttacaattggttcaacttcatgcagcactacaaaaaaatggctatagccatattacaattactgatctgttcgctagtccaaatctaagtacattagcgcaattgctttggcaaaacacttcaccaacatgtgagcaatattccgaccgagacaaacacaaaaacaagagaaagaaacggttacaactacgaactcatagtagataa

SEQ ID NO: 284329 - DNA, 1767 bp, Morganella morganii
atgaataaaacaatagatactttgccacttaactttcgtattttaataaaattagccccactccctctgattagtggcattattatggcaataatctcaacaatgctaagtttagcaccattatggatcatctataaaatcagccagatttgtttttcaacatcacctaatattcaacaaataaataatctagtttatatcactgtgattattttaattttacgttggggattaatggcaataagtcatattgccgcacatcggggtgctttttatattcagcatcaattacaactcgcaatagctaaaaaaatcagtaaagtaccattatcattttttgctcaatatggcagtggaaatctgcgacgtattatcaatgatgatataaaaagcttagaaggttttttcgcacatatgctacctgatctcgtctcagccatagtgactccctttatcgctattatattacttttttatgtaaattggcctcttgccttattatctctaaccccattacctattgcttttatggctcaacttctcatgttgcgtcgagccaataaacaaaccaatgagtggatgaatattcagaaaaaaattgctaatgaaataggagaatatattaaaggaatacgagaaataaaagcgtttaacttaacctcccatacttttggtaaattatctcaatctatcaattcctctgttaaatggataaaaaataatgtcaaagctagtacaggctcttggatggtatttagtgggatattaacagcgaatctcgttattatagcaccagtaggtgggtggatgtatttaaatcaaaatattgatttatctacttatattttatttttaatgacatcccccctcgtacttgcgccgttattacgactaacatttgtgctaggagaacaagctcaacgaaaacaaaccttaaaacatatcagtatgatccttgaactttcagagcataaacaacatgataaacattttactctccctaaaaatagtgatattacttttaaagatgtctgtttggatcatggtgataaaccgatattagagaaaattagttttaatgcccaagcgggtacaacaactgcaattgtaggccacagtggtgcaggaaaatcctcattattaaaactaattccccgtttttatgattgtacttctggccaaataaaaataggtcaatatgatatcaactactggccagaaattgatttactttctcaaataagtgttgtttttcaagatgtatatctatttcatggaactattttagaaaatttactcatagcaaatcctaatgccttatttgaggatattatcaaagcaactaaagcagccaatattcatcatgttattgaaaaactcccagcagggtataatacattaattggtgaacaaggaaataaactttcaggtggagagaaacagcgattatcaattgcaagagcactattaaaaaactctccaatcctacttctcgatgaaattactgccaatgttgatgctgaaaatgaaattttgatctatcgcgcattaaagagtctatgccagaatcggactgttattatgatcactcataacctacatactattattaacgcagataaaattattgtgcttgataatggaaagattattgatacaggtacacacacccatttattaaaccaatgcccaacctatcaaaaattatggaatgattatagtcacactattcattggcaattaatccaggagaataataatgattaa

SEQ ID NO: 284330 - DNA, 3075 bp, Morganella morganii
atgccgacattaacaactgcacaaattaaatcatcactgaactcagctaaacaatcagcaggtaaaaagctgcaatcagctggagcatcaacaaaagatgctttaaaaaaagcagccgaacaatttcgtaatgcaggtaataagcttattttgtttatacccaaagattatcagggacagggttcaggtcttaatgatctggtcaaagcagcagatgaattaggtattgaggttcagtacgaggaaaaaaatggtacggcgatagcaaagcaagtatttggtacaacagaaaaactgtttggcctgactgagcgtggtatcgctatatttgcacctcagctagataagttgatgcagaaacatcaaaatatcggtaataaactgggaggaagtgcagaaaacttggggaataacctgagtaaagcagggggcgtattatcaactctgcagaattttttaggaattgcactgtcttcaatggaattagatgacttattaaaaaaacaacataaaggtgaagatgttagttcgaatgaactggcaaaagcaagtatcgagcttattaaccaactggtggatacagcagcaagtgttaacaataatattgatgcattttcagagcaaatcaataaattaggtggtttgttgtctaatacaaaacatttgaaaggtatcggcaacaaattacaaaatctaccggatcttggaaaattgggtacagggttagatactatttccggtattttatcagcaatttcagctggttttattttgggaaatgaaaatgcagatggaggaaccaaagctgctgccggtgttgaattaactacaaaaatattaggaaacgtaggtaaagctgtatctcagtatattctcgcacaacgtgtggcacaggggttgtcaactactgctgccggggctggtctgattgcttcagcggttgcattggcgatcagtccgctgtcattcctggcagtcgctgacaaatttaaacgtgcgcgtcaaattgaagagtattctcagcgttttaaaaaatttggttatgaaggtgatagcttacttgcttctttccataaagaaaccggtgctattgatgcatcattaaccaccatcagtacggtgttaagttctgtatcggcaggtgttggtgcagctgcaactgcatcacttgtgggtgcaccgataagtgcgttggtaggtgctattacgggtattatttccggtatactggaagcctcaaaacaggcaatgtttgaacatgttgctaataaaatggctaataccattgctgaatgggaaaaaaaacatggtaaaaactattttgaaaatgggtatgacgcccgccactctgcatttttagaagataactttaagttattatctaaatatagcgaggaatattctgttgaacgggctgttcttatcactcagcaacactgggatgaattaattggtgaactggccggtgttactaaaaatggagacagagctcttagtggtaagggctatgttgattattatgaagaaggaaagcgtctggaaaagaaaccagatgaatttaaaaagcaggtttttgatccattaaaaggaaatattgatctttctgacagcacatcttcgacattacttaaatttgttacaccattgttaactccgggggaggaaacccgcagcagaagacaatccggtaaatatgagtatatgacggaattgttagttaaaggagtagataaatggactgtcaaaggtgtcagggataaaggctctgtatacgattattctaacttaatccagcatgctgtggttggtcataaccaataccgggaaattcgtattgagtcacagttaggtgatggcgatgataaaatatttttatctgccggttctgccaatatttacgcaggtaaggggcatgatgttgtttattacgataaaacagatactggttatttaactattgatggaactaaagcaaccgaagccggtcgttatactgttacccgtgaactggggggcgatgttcaaattctgcaggaagttgtgaaggaacaagagactaaagtcgggaaaagaactgagaaaactcagtatcgccattatgagcttaaacatatcaacggaaattctctgacatcagtagataatttgcattctgtggaagaaattatcggtagtagccgtggagatacgtttttaggcagccggttcggtgatattttccatggtgcagatggtgatgataaaattgagggaaatgacggtaatgatcgcttatatggtgacaaaggtaatgataccttaagaggtgataatggagatgatcaattatatggcggtgatggtaacgataaattaattggcggtaccggtaataattaccttcacggtggtgatggtgatgatgaactgcaggtacacggtagtaatacccggaatgttttattgggaggtaaaggcaacgataagctatatggcagtgaggggtctgatctgcttgatggtggggaaggaaatgatgtactgaagggtgggtatggtgatgatatctatcgctatctttcaggttatgggcatcatattattgaagatgaaggtggtaaaaatgataagctaagtttagctgacattgatttccgcgatgttaccttcagacaggaaggtgatgaccttgtcatgtataaagcagagaataatgtagtttcgtttggtcataaaaatggtattacttttaaaaactggtttaaacaaacatcaaatgaaatttcaaatcataaaatagagcagattattgataagaaagggagagtcattaccccggactcactaaaaaaagcacttgaataccaaagcaaaaataatcatttaaactatgtggatggacataatgcatcaacctatgaaaatgaaaataatcttaatttattaagaaatgatattagtaaaataatttcagcagctggcagctttgatatcagggatacaagacctgctgatatttcatcattactgacttctcatggtatcagtaatttttcttatagcaacagtgcactgactgtaacctcattagtgtaa

SEQ ID NO: 284331 - DNA, 540 bp, Morganella morganii
atgtatatcgtagacggcagcggatattataaaaaatcgtcgccaatcgtccagatttaccctgatggccattatgaaaccaacgacgaatccgaaggcgcggaagtccgccgtaccggcaccggccaatatcatattaccggcattcttggttataactcagatggcgcatggggtgtaaacggcggtatttcggtaccgaaagataataacggccttgagctggtttatgtcgatgatagggtgcagagtgacggcagtctgattattgaaacctgtcaccgtcagcatacgcatttgccggaacgtttccagaactggcggctgaaagaggtcaccccggaaggtgagcgcattttctatcaggacggtgagctgtgtgatttgccggaatcaacccgtcttgatgtgcgtgtcgaaatgccgcaggactctgtgtggaatgtgaaacagcgtgaactggctgaacagatggaacgtgagcaggcagagcgtgaggcgaaggaagcagcagagcaggccggagacacagaggaataa

SEQ ID NO: 284332 - DNA, 336 bp, Morganella morganii
atgaaatcactgatcaccaccaccatgcttagcttagggattttattctccggtttctcaactgcggctgaaggtgatgaaattaccaaagtgtcttattcttgtgaaaagaatcaggtaatggaagttatctatatcaatacagcaaaaaatagctatgccatcatcaatcaaatgaacgaaatgatcccgatgaaaataatgaaaatggcctcaggagcaaactatgaagctatgaataaaaattatacatacaaactttatacaaaaggtaataaagcagatttagttgaaggaaatgataaagctgtattaatcgattgtaatgcaggttga

SEQ ID NO: 284333 - DNA, 762 bp, Morganella morganii
atgccagcttatcttcggaagtcaactattatgaaaataacatcttgcttattgttcgtttttttggctatcacctcatcatcaaatgccagtgttattattatgggaacgcgtgttatttatcccgcacagcaaaaaagcatcaatattcagctaagtaataatgaagcggaaccttcactcatccaatcctggattgatacaggtgattcagaaagtgctccggattctgttaaagttccatttattattaatccgcccgtatttcgtatagagccaaaatcaggacagacattaagaataacctatactcaggaaaaactaccgaataataaagagtctctattttatcttaatgtattagatataccagccaagcctaaatttgataaagatacaaaatcagaaaacaacaattatcttcaattagctattcgaagtcgcattaagttttttttccgacccagcaatcttaaattatcacctttagatgcctataaaaaagtcacctggtcattagagcaggattcatctcaaacttttatcaaggccgaaaataatactccgtatttcattacctataacaatatagttattacattgaaggagaaaagatattcagtcgaatctccggggatggttgctccctttacatcaattaaattccctcttaaaaatatgttatttaatgcagataaagtaacgtggacagttatcaatgattatggtggttaccaaaaaggtgagtctgtactgaagtga

SEQ ID NO: 284334 - DNA, 141 bp, Morganella morganii
atgtatgaatttaatgcggaaaatgatgaattggaatatttagagatgatcaggcggaagttaaaaaatagggaatatttcatgggatatggtttgcaaccaactatcagttacttttttaccaagcctatcaagctttag

SEQ ID NO: 284335 - DNA, 552 bp, Morganella morganii
atgcaactttcagatggtgaaaaattaatattaatgatgttatgtgatttatacgataaaaacgagatagaaggtgaaatagatcacaccttcgttcgcgatacaattttcgaaaaccaaatatgggcattatcttggaagtttaatggtatcccatttgaaaatacagaaactccatcattggtgaaaaaagttttagatattctcgatatgtggagaatcattgagtatagttacaacgaactgactgaagaagaaaaaaaatcattggaagctgatgctgcaccatttggaaaaaaaccattcttcaaaggatttgatggtaacaatgaaacagaatatttagcagcagcagacttcattataaataagctagatagattcgaagagtttaaattacgagatctaaattctcacatgccgtcactaagtacctatgaacgtatggcattaatctttaatcctatgtttcatgagaaccatggagggctattatctctagaacaactaacattagttttacgtgagatgatacatccgagtaagcaataa

SEQ ID NO: 284336 - DNA, 573 bp, Morganella morganii
atgacatatttattggtatatgtatcatgtatgtaccctttaactaatcgtttttggtgttttatggaaatgacagatatttggctatcaagaataggtacttttgttacagttattggtgccttgtgttcattatatggatggaaaaagtctcgtgaagctgctacagaagcacaaaatgctgtagctacagttaagtatcaacgtaatataggagaagttggtggtctcaatgttaagttatcaaatgctataaaatcattacgtacaattggccctggttcaaatgaggaaaatgtacgtggtataagtttaaccccaatcatttctgatatagaggattttatagatttattcgcgaatcaagcaataaaacctaacaataaagaaaggctgaatattgattcagagaaattttgtatcgaaattagaacaaatatttctcaactttcagatgcaagaactcctaaggaaaaattaaagattggcaggatgttgcacgcaaaaattttagctattcaaccccaaataatttctcttgttgatgatttgacatataacactcaaaggtaa

SEQ ID NO: 284337 - DNA, 717 bp, Morganella morganii
atggctcgtaaatatgtttatggcgataaaccaatccgtacaacaaccgctgagatagttgaaaatgagtttgctggaaaggctacggctgctcaggttgacgcaattttaaaggaaagatttccacattacaaagataatacttatttgaatctgatagttaacgcagttaactgcaatcgtggtcactggagttttaacaggacagccagacgaacagatgatgccacccatcgccaccatgaatatgaccgacttttcaagcgaggaaacgttttcgaggtctatgattccgcacttcatggtgtgtttgaaatctatgaagcttcagacggcaaatggctaacacgcccagttaaaagtgagtttgaaaaggccatagaaacagcgtctcaacttacctcagaacaacgtagagagaagttagctacagccaacaccacgccagaaagggtcattataaagagctataccttcaagcgtaatcccctcgttgtagcagaggtattagccttagctggaggtaaatgtcaaaactgcctatgtgacgcaccattcaagcgggaagatggtagaccgtatcttgaagtgcatcatgtggagtggcttgctaacggtggagaggactctgttgaaaatgctattgcactctgtccgaactgtcaccgtgaagcacactacggcgcgcttgtgttgaagctggctaatattaagtag

SEQ ID NO: 284338 - DNA, 558 bp, Morganella morganii
atggcggtcatcggctatatccgtgtatcaacaactgaccaaaatagtgatttacagcgaaacgcgctcatcagcataaattgtgatcagatttttgaggacaaaatgagcggtaaaaccgccgttaggccaggactgaaacgggcattaaaggccattcagccgggcgatacactcgcagtgtggaaactggacaggctcgggcgcagtgtcaaaaacctgatagccctgatatctgatctgcacgaacgcggcgcacacttccggtcactgacggacagtatcgacaccagcaccgctatggggcgctttttctttcatgtcatgtcagcactggcagaaatggaacgcgagctgatagtggagcgtacgctggccggattggccgcagcgagagcacagggcagagtcggcggacgaccggcggcactgacacagaatgaccgggagcaaatcggccgtctgctggataaaggatattcccggcagcagctggcgattatttatagcgtgggggtatcgacgatttaccggtattttccggcaggaagggtatga

SEQ ID NO: 284339 - DNA, 126 bp, Morganella morganii
atgacttccactgaattttattacgagtattctgcccctttcgtatcaatgcatgaacaggaatctatatgtgttataacaatgttactgatcgtgatctcatggagcaaattgcagctaaactaa

SEQ ID NO: 284340 - DNA, 1020 bp, Morganella morganii
atgtgttataacaatgttactgatcgtgatctcatggagcaaattgcagctaaactaaatgactatcgaaaccctcctcaaggtggcatgagccttgatcatgttaaccggtggattaatcaatttgagttaaatgataggcgatttgtcttagaggaaacgaaccgattaatgggtattagatacttttctgagagtgactatcgcagagttgttagtagtatcgccgctgatgagcaaaatgaaaatttatttcaaaccgcagcttttctcgatattcagaaccaaggcaccagtcaatctgaatttttggatttgcttcgagaaaattgtgtagaagaattcgacgttgtgaccagaacatcacaacgccaaagagttagttcattccgtgagtttatttacgttgatgatgtttcattctctggagctaaagcaatcaatgatttaatttggtttgttgataactttgaactccaaaacattacaatattggtatattttttaggtaggcatacgtattcaacatggaaaataaaagaccaccttgaacaaagatttgctgacaggaatattttagttggcgttggtggacatgagtttgcatgtgttgaaaatcaacgccgaaatagttcgaattctgaggttttatggccaaaagcgcaaagtgtatcaatacctgaatgggctgacggtcaggcacattatttaggaacataccgcaacggttacaccgcgaatactttttttcctgatgaacagagacgagatcgttttgaagcaattctgacagaaattgggttttatatccttggtcatagtcaaaatccttctgaagttataaagcccttaggcttttcaactttcaatggtgttgggtttggcggaactatcttcacttaccgaaactgccccaataatactcctctcgcgtactggtggggaacttatcttcgaacaggaaatagagctctggattgttggtatccacttatgaagcgtagtgtgtataatgggtga

SEQ ID NO: 284341 - DNA, 534 bp, Morganella morganii
atggccaaaggatatccgctcttagttaatggtattccaattcaatcgagtgaaatcctttaccaagcatgccgatatccagactatccagatatccaaaaggctattattacccaaggtaacccttacgaagctaaacaaaccgccagagccttcgaagctaaaacccgtactggttgggaaaaaaatcgagtttcggtaatgaaatggtgtgtctgcgttaagctttgccagaactgggaatcgttcttcgcgctcctggatagcacaggagctcatgacattgttgagcactcagagaaggaccaattttggggggctagtaaagactccgaaggtaacttttatggcatgaacgtgttaggtcgcatccttatggatgcgagagacgttgcaagaaagaaggggccttcagggtttgctacgataccgcctctacccttggataggtttcttctgctcggagagcaaatacgtgatgtcactttctctccaccaccggtggactcagggcaaagcttatcgcttttttaa

SEQ ID NO: 284342 - DNA, 1458 bp, Morganella morganii
atgggacaagcccgtctaagaatagccgatcatttacgaaaaatcccgattggctggttttcttctcaacgcagtggtgatcttgcatcacggcttactgctgatttagagatcattgaaaatatctggtcacatttcttaggaatgtttatcagtactttagcgatgcctgtttttctctcactattcttagtatgggtagattggcaactcactttaattatattattttctattccaatcgccctgttcgcattatccataagccataaaataatgttaaaagctgcacaacaggcagctgatgctaatgccaatgtacaatccgaattactcgattatatccaaggaattatggttattcgtagttttgggcgacttggtcctgcatggaaaaaactaaaagcagccttagaaacacaaaataaaacccaaatagttctagattccaagcctgccccttggattgcactttatggttttattcttgaatcaggttttattttattaatgataataggaacaagccgtttaattagtggctcactttctccttctcaattcgtttttttccttgtattagcactccccatttatcgacaattctttgatttaggattatccagtatgttgttaaattatgcacaaaaatcattacaacgcatagaagaagtaatgaaagtggttccactttctgagcctaaatatactcaattaccaataagaacagatatctattttaacaatgtaagctttatttatccttataatagtcaattaacattagataatatatcttgctgttttcctgaaaaaagctttactgctattgttggccctagtggctcagggaaaagcactttactacagcttatttctcgtctatgggatgttaaccaaggtgaaatattgctagatgatattaatattaaccaaataaattccgataaactctgttcatatgtatcttctgtttatcaagatgtcgttttattttcaggaacaattaaagataatattttaatgggaaaaacagatgctcacgatgatgaaataataactgcagctaaattagctaatgcacatgagtttattatacaaaaaccacaaaattatgatactcctattggttacggtggtatgttactctcaggtggagaacgtcaacgtctttctcttgctagaactttattaaaaaatgcaccaattttactgatcgacgaagcaacatcgaatatcgattgttcatcagaagtattaattcaacaagctttatcattgttatcaaaagataagacaatcattatgattgctcatcgattaaatagcattaaaaatgccgataacattatcgtaatggaaaatggaaaaatagcagaacaaggaaaacatgctgagttacttgcaaaaaatggcttatatgcacatttatggttacaacagaaagcgttatgctaa

SEQ ID NO: 284343 - DNA, 354 bp, Morganella morganii
atgagatattacaaaacaaaaaataatgaagtttatgcacttgaagataatgatttagccaaagattggataaaagaaaaagtgactgaaatcaccaaagaggaagctgataacatcacaaatccgcgaccaacgaaagagcaattgatcgcaaaagcggaatacgataaacaggcgctgattacagaggttcaggcggaaacgcaactgctgcaaacaaaacatgctatgaaacgcatcaaaccggatgaactggaactgttaatcgcctggctggattacctggacgaactggaggcagtggacgtatccaccaccccggatattaactggcctgtgaaaccggtggtgtag

SEQ ID NO: 284344 - DNA, 1044 bp, Morganella morganii
atgataatgatgagattgaagataagtttatttttagtatatgttttctatatgcccctatcttatgctgccagtttttgtaatggaacacctaaacattttattcttacaccgaatataaatgttgaaaatattaatatacctatcgattctgtaacatatccaattcaaataggtagttcaacttattacagtgagaatgtgctatttgactattgttggccttattatatgagagaacaggcgagaatcatgagacctgttatggggcaatataatggtcaggatgtttatgatattggtattcctcacgtggggatgacatttactattgctgatagccaggaaggcggatttgttggcggaataccaatgactgggaataataaaataaatgtcgtaccaaattatgatcatatgtatctaattccacgtgttggtgcatcaataaagattggtgttattgctatggatagatatcctataggtattataagggttcctccaataaaggttggtgaattttcaattgtatcatcgaataatggagttaatagtttaggtggcgtctctgatattatcttaaatagttttaatattgaagttaattcaaagacttgtaatttatctcagcgtaactatactgttcctttgcaggctgtatataaaaaccaattccctgacgtgaactctgaggtatttggcggttccgtaaagttacagttatactgccaaagtgatattgatgtttttgcgacactgacggatacaacaaatcctgctaattatagtactatactttccttgagtgaaacatcctcagctaaaggtattggtcttcgtttgtataagaatgggagttctgaggcgttaaactttgggcctgattccgcagttaagggaaatatcaatcaatggaaggtatcacaatataggggtgagttatcgcccgcagtgaatttaactgtaaattatattaggcgtggtaatattaatccgggaacagtatatgcactgtcaacaataacattttcttaccaatga

SEQ ID NO: 284345 - DNA, 354 bp, Morganella morganii; identical to SEQ ID NO: 281587

SEQ ID NO: 284346 - DNA, 153 bp, Morganella morganii
atgggctggtttgaggccgctgacttaatcgttaaaggaatggaaggggcaatcgctgccaagaccgtcacctacgatttcgaacgtctgatggaaggcgctaagctgctgaaatgctcagagtttggtgacgcaatcatcaaacacatgtaa

SEQ ID NO: 284347 - DNA, 483 bp, Morganella morganii
atgcaaaaatggataggtaggtactttcaaaaaaaagaagttatacaatttatttctgcgcttaaacaacaagatgccgctgatatagcaccattgattatcgttgctacatcatacagaaacgcgctcaaaaaaaacgcagatattgatttattaaaaccagctttatgtataattaaagatcctgacatcttattaattttccgaccagaaatagaactaaaacaaagaaatgaagagtatgaaatagctgctggacttatggtatggttgcatacgttacgatgcgcatctgatccattgctgagaaaatatggtagagaattatggcaagagttacaaaggggttttaagtatgtcgaaccatttatctataatactggcattgaggttgctgtaaatacaccctacacaaaaataccattagatattaatgaatatgactattttccagaagggttaactcctgaagtaaaaaattaa

SEQ ID NO: 284348 - DNA, 1767 bp, Morganella morganii; identical to SEQ ID NO: 284329

SEQ ID NO: 284349 - DNA, 1053 bp, Morganella morganii
  misc_feature (946)..(955): n is a, c, g, or t
gtgcaacctcgcttctcgcgtttacaaacatcattatctacttctgtttggcaagcactacaacaagttgctcagcaaaataatgttacgccagcagcacttttgattgctgcttattgcgccacattatccgcatggagtaaaagccctgagttaacaattaatttgacattatttaatcggcatcctgtacatcctcaaataaatgaagtacttggtgattttacctcattacaattactcgattggtatacctgtgatctttggtcaaacagtatctcaatgatgcaaaaacgtttacataaagatatgcaacatcgtagtgtttcagccattaaagtaatgcgtgaaatggcaattcaacgacagatgtctcatatagagatacctgtcgtttttacctgtgcattgggctataaacatgatgaaggttttctttctcatcattcatggctaaaacctgtttggggaatatcacaaacaccacaaacatggctagatcatcaagtatatgagtcagacggtgaattatatttaaactgggattttgtcgaacaattatttgactacacaaccattttttccatgttccagcaatatgaacatatactcactaaactggctactgaaccacaatcttggcaattgccactaaataaacttataccaagatgcaataatctcgtcatcaccccagttttcaatgccaaaaataatcaaaacacacattataaacaatctactgatacacaaaaaacaggtcagacaatacaaaaactacaacaacttgttaagcaagttattggaataacgttagcacctgaaacaaattttttcgaagcaggtgccagctctttacaattggttcaacttcatgcagcactacaaaaaaatggctatagccatattacaattactgatctgttcgctagtccaaatctaagtnnnnnnnnnnggcaaaacacttcaccaacatgtgagcaatattccgaccgagacaaacacaaaaacaagagaaagaaacggttacaactacgaactcatagtagataa

SEQ ID NO: 284350 - DNA, 378 bp, Morganella morganii
atgaactggaaagaagcggtaattgccgcgctgtttattgctgccgcctggtgggtatatgacacctaccgggataaccagcagttgaaggtgaataacacaacattgtccggacagttgtcagcacagcagacgataaacaccatcacgctttcagccgttgctatcagacaccgcgcagcactcgacaacatcaaagccaaagaaacagagggcactgagaatgtcaaagttaaggccgttatcagaacggagtttaaagacagtgagtgcgctgttactcctgtttcccctggtgttattgggaagttgcagcaatacgaaagagacattcgtgcccgcgccggtggtgccgattccgccacaactgaccgctga

SEQ ID NO: 284351 - DNA, 645 bp, Morganella morganii
atggcaaatctcacagacctgagtaatcagctccgaactctgcggaagcagataccctttgccactgctcaagctatgacagctgttgtcagaaagattgaagacgcgcagaaagtggcaatgcagcgcaatctggataatccgacaccatttactgttaaaggtgtgagaagcaaaggtgcccggaagaccgacctgaccgcgaaagtatttgtgatgccgactgctgccagttatctggagccattcgagataggcgggatgcataaactcagcggatccacattgctgaacccgaaagccatcaaactgaacaaatacggcaacctaccgcgcaataagctttccagccttaagagcaaagaaaatactttcatcggtgatatcagtggtgttaatggcgtgtggcaacgtagaaaggcgaagaagggcaagaaaggccggaagcgtctgcagcggtcacctaacggaacccgcagagacagaaagaaacaaccaatgccgaaactgttaatccggttcggtgacgccctgcctgttgaacccgtactcggatatcaggacagagcgatgaagatgacacaggcgctgttgccgcaggagattaaccgggcaatagcagaggcgatacggacagcgagatga

SEQ ID NO: 284352 - DNA, 558 bp, Morganella morganii
atgaatcagtcagattttgcaaaacttcacggagtcagccggaaaactattacagcctggaaagcccggggctggctggtttttgacggagatgaaattgatgttgatgcctccaatgcaaatattgagcagtacagaaaaaccccggcaacaccaaaagctaaggccgaacctaaaaaaacaaagcagcgtcctgctgttaactctgacgacgaatcaccaaagcaggcagcagaaagactgatccgcgaaattggtgcggatatgtcatttgatgaagcgcgaaggataaaagaaaacttcctggcgctgctgacgaagctggaatacgagaaagaggatggacaactggttgagctttcagttgcggaatcaatcctgttttctgaattcagaaagcagcgtgatgcctggatgaactggccgtcccgcgtggcaccaattatggctgctgatttgggggttcctgctgacaggatgactgaggtgttaatcgaacatgtccataaacacattactggcctcggggagcctgaattcaatacagacgaagcatga

SEQ ID NO: 284353 - DNA, 2109 bp, Morganella morganii
atgtccataaacacattactggcctcggggagcctgaattcaatacagacgaagcatgacagactgctgtcagccgtcaggcgaggctggacacctccacctcgtatcagtgttcctgattgggcggatcgctaccgcaaattagctaaagaggcaggaagtacatcaggggactggcagactgataccgttgaggtagcgcgcgggcctatgatgtctgtcacagagtcaggggtccacatcatcacagttatgtgctgcacccagttaatgaaaacggcactgctcgaaaacgtgtttggttattttgctcaccttgatccgtgccctatgctgcttcttcagcccaaagaggatgccgcggaacaattttctaaggagcggatcactccgcttgtccgtgtaactccggtgctgagaaaaatcatcggagccagtaagcagaaaacatcaaaagaaaccctgctgtacaaatcttttcccggcggattcatggcactggccggtgccggtagtccggataacctggcccgccgccctatacgtgtattgttggctgatgaagtcgataagtacccgataacccgtgaaggtgaccccatcacactggcggaagaacgaacggcaacattcgggctgaactggttatcagtcagggcatgttctccgaccgttgaggatgaaagccgtattgctgcgagttatgaggattcagatcaacgaaaggcctccttgtcatgtcctcactgcggacaccgacaatttcctgatttttttaaacacgttcactggcctaaagagggggaaaggcaccagccccatttggctctgatttattgtgaaagctgtggcgcaggctggtcagagggtgagcggctcagagcattacggactatccggtggcatcagacaaagaaatttgaatgctgtggcagtctgcattcacctctgaatgactatgatcgggcatggcatgaagacgatgaaacagcagtagataaagtgtggtcatggtcttcatcggagcgtcatgccgtgtatcgcgctgtttgtccggactgcggtaagtgcgcggttgataatatccacgccggatatcaggcatctaagttattcagcccctggcagaaagataaaccgtctgacattgcgatgaaatacctgaaagccaaaggcgatcctgataaggaactggcgtggtggaatacccagatggggcttcctcaccggccaaactacggtaaaaaactgccgatagatgcgcttctggccagaagagaagtttatgatgcggaagttcccgcaggggtggctgtgctgacggccggcattgatacccagaatgaccggctggaaattgaagtggttggctggggtaaggatgaagaaagctggtcaattgcctttgatgtgattgaaggtgatctggaaactgcggaaccttggctgaggctggatgcttatctgaaacaaatatggcggcgggctgatggtcgcggattcacaataatggcggcgtgccatgactcaggcggtaatcacacacagaaagtctatgaattcgccaaagagcggcttgggcgaaagatctgggcgataaaaggcgaatcggccacaacaggtaagcgctctccaatttggcctaacaagcgtccaactccgaaaaacagagcgcaattcaagccgatcatcatcggcgttaactcagcgaaagattcaatccgttccagattacacctcactgaaatcggtcccggatatatgcatttcccggtggacagggatatggggtatttcagtcagttaacagcagaaagattgattatgaaagaggccgctggtcagcggtacagtgtctgggagctccccaacgggaaagctaacgaagcactggattgccgcgtatatgcatatgctgctctggccggcctgtttcatctggggctgaaattaaacgctctggcattatctattacaggaaatcctgatcgcctgctgcctcctgcaactgaaccggaagaaaaaatagatttccggttaccgggggcgttcattccggataatcaggacacaccaaagcggaaacgcatatccagtaaattagcataa

SEQ ID NO: 284354 - DNA, 258 bp, Morganella morganii
atgtctcaaaaaacaggtttactcatgggtatgagccgcgaccagatgatgaacgcactgaactcggctcagcaagcctaccttgagctggcgtccggaacgaagggcgtatctttttcttacacccagggagatggaacccgttccgtgagttaccagaaaacagagctttcccatcttctggctctgattcagatgcttcaggctgaactcgggctgatcccgcgtgcgcgccgtcccgtgaggtttaaattctga

SEQ ID NO: 284355 - DNA, 1881 bp, Morganella morganii
atggcgggtaatgcctttgattttgaactgaatgctgatgatcgtgcaagcggtcagattacggttctggaggaaaagatccgtagtctgaatccggcactggatgaggcgcgggataaactgaaactcggcggtgatgaatcagtgaccgggctgcgcggtatcggtgatttactccgtgatgtatccgaggaggcgaaatccggcgttcagagtatcggggacatgatcccgccgctgaaaaatttcggtgcgctggccggtaaaatgatgggggctggtggtatcggtgcgcttatcgtcggtggcggtaaaatagtcactcaaatggcagaggacggactaaagcgtaccacatcagcggccaataccggcatgacagttgaggaaagcacccgcctgattggcacattgcaacagcgtggcatgagcgagagtgatgcccgtaacactatggaagatcagtacgagaagttcagtagtgcgattactgcaggcggcgataatgaaacgttagcggctgtcagatctatcggggctgatattgttcagcgcaaagatggcagcgttgacatggaagcgacgctcaaaagccttgagtcggcaatcaaagtgcttcctgagcaccgaaactgggagcttcgggacagattaaaattaccccctgagcttattgcattattacgggaaggtaaatttcaggaaagactgaataaatcggatcagtacggcctgaccattgacggtgaatatgcccagaaaatgactgaggtgaacactcagttaaatgaagccagtgcaaaaatgaccggtgttgttaatcaggttgaaaaggcgctttatgagtttcttgatgcgcccagtaaagttccggattttggtgatcttgatggtgctatgaaaaacatcaaagagcaccagatgcgtgtaaacgatacggaagataacttctatcatggcgataagcgtgaggatcttatccagcgtgcactgaaagatgatgattataaaaaatcgctcagttggtttgaggaattaaaacttgtcgccaaagatccgaccgatgagatgtatagcgagatttataaacgctataacgagcaatgggaaaagcaaaaagcgcaggcagaagccggaaaaagcaaaacagcactgaatagcaaggttcctgataactgggtgcaagataaggcgtataacccaaaccgacgtgggctgcgcaacaataaccctggcaacctgatagctgcccccaatagtgtcgggtatgactatggtaataatcaccgttacgtaaaattcgcatcgtcacgggatggtaatgctgcgttgtctcgtcaaattatgctggatgcagaacgcgggctaaatacccttgatagtcttctcagaaaatatgctcccgccagtgttggtaacaacactcagggatatatagacagagtttcaaaagggactggttttaatccgtatgagcgacttgatatgcatgatcctcgcgttctagaaaaaatcattccatacattatcaaagtcgagaatagtgaacagccatacagttatgaagaaataacagcatctattacggattctattatggatgatcgctgggctggtggacgaaatccttaccgggttcaggagcaacgcaatgcgtttatgatgcaacaagaaaccgaatcagcagtaccggattttaaaatagaaaaggacccaactcaggcgttactggctttcactgagcagttatcccaagtgcttcaggagaataaatctggcggtacactggaaattgtactggttaacccggatactggcacaaaaagcacggttaatgtaaagccgaaaggcagggttacaactgcgatgaatatgccttga

SEQ ID NO: 284356 - DNA, 414 bp, Morganella morganii
gtggatattgtgctgttagtattatcgtgtatatttctgattctgttatttgtatcattttccgataaaccgacatggtacaggagtttatccagaatttactctatagtattttctgtttcattgttttctatatcagtatttgctttctttattcatgaagtgccgaagtgcggcagcaattatgattggttttataatgacaacggaactctttgttataacaaagaaaattactcaagcttaattgcaacgaaacacgataacaaaaaattaaaagtaatttcatttaccataacttcaccagaaagagcagaaataaagcttgataatggtggcggcgctgtaatatataacgaaaacaacaaacgtgtgtttggtccatattatgaagtgaataagagtgagctttag

SEQ ID NO: 284357 - DNA, 468 bp, Morganella morganii
atgaacccgttaaaagctatatctactttggccttacttgttcccgttgccgcattcgcggcctccccgatagtttgtgtaagcgaaaaacccgatagttctggcgcatcaatatggccgtcactatatatgcaggattcaaacaccctttgtttcgatgttaaaggttggccggaattctcaggcacaaattgtgttaaaaatgggaaaacagctaaatggaccggccttgttatcgtgtgggaaggtagtgaatcatttggccgggattcaacaaatttccgtgtggtaaatccggtcgtcactgatgaaaaaatacactatcgtattgaatggtctcgcggtgaagaatggcgaaccatgcaggacgtatcaataaacagactgactggcggtgctgttagctattatattggtgaacatggtggcgaaagctatcagtgccgcacaacccaaagagccatttaa

SEQ ID NO: 284358 - DNA, 867 bp, Morganella morganii
gtgaaaattttagcaaaagatatttttggtctacccggagaaatatatccgccaataattcaagatatacttgaggattcttataataaacaataccattttttaacgcgcgatgattttaaattattgagcgaaattgattcaaagtatgtgtactggattgagatattgtatcgctcacattgggctgcgacctccaatcttattaggtataataaatggttcgaactttgccataacagctcggtcaccaacccaaattacattgccttttgttctggccttagaggtatccttgagtgtgcgaccgatacatacgatgccttagccagcgtcccccttactatggcgcagctattaaaccatattgaagatgcgcttctgcgtcgtccaacactgaatcgaataataagcacggagttggaagacgccttgattcatttctcttttgcacgtaagttaacaaagcacgaagatgcacctgagagtcacaaagcaaaaacagctagcgaatatattgcactgttggacagcaaggatcttcccctcaaaagtctatatgctgaactttgtcaagttgtacaccctgctcaccagtctactgcatggttggtcggcgttgaagagcagtattacaagattcagaaaccggatgatctagcgtttatattaaatttatgtggacgctataaggaatgcattgagtacatccaagtgtcctcggtaaatgctagcatgtttatattcaagattcttaatatgctatcgtgccctgagttacacaattcttccgctgataaatacgacatgtccaatattccgctgtacaagagaattgactccgcaattcgggtgcagaatgcttaa

SEQ ID NO: 284359 - DNA, 249 bp, Morganella morganii
atgtttattgaagaaaatggaacacgatatgagattattagggggagtgatgttgtcagagacggaatgtatcttgaactgcgcttgccggatacatctcctttagaacaactggcagagatattttattcagatgtgacccatgaattttctatcagtatttttgcggataatttgccgttatcgattattgaaatacttgtagcaaaagccaaagttttacttccgctaaaaaagccccttaattga

SEQ ID NO: 284360 - DNA, 210 bp, Morganella morganii
atgctatataaatcacaggcaattagtattattgaatccctcatacgtgaaatcccatctgaactgtgtcgtggtggtatttttaatagtaagtatttcacagtacaacaatatattagctttgcgcgacagctggaactcataagccaacatgagcaacttaatttttcaaaaaaagcagacgctgcatatcttgaagctaaaaaatag

SEQ ID NO: 284361 - DNA, 255 bp, Morganella morganii
atgaaagaaaacgaagacaaacaagtcattattgatcaaaaagtaagcaattatatagggaatagaattaaatggctcaaagacgaaaaatataaaaataacgtaataaatagaattaacgcaattaacgaatgcatgatgttaatctccacaacagatatagtatcaccagaatgttacaagcttttggaatctgattttaattcagagaaaaaatctgtagaaaaaaggttttcttttgattcgcctaactga

SEQ ID NO: 284362 - DNA, 441 bp, Morganella morganii
atgaagacacgctatatttttgcactaaaaagctcgggaaatgccggaaaaacaacatcaattaaattactgcctaggttattacaagaaaagtatccaggatgtgttgtaacaaaaacctattttggtgacgcttaccgtgacataaagctcattattgaaataggacagataaaaataggcatagagagccagggtgatccaaactccagactttgcaaaacgttggctgaatttgtcgcacaaaagtgtgacattattatttgtgcaacaagaacgtgggggcagacagtagattgtgtgaattcgcatttgaaattgtatgagattgaattcatagataaagataaagaatctaatgaaagtaagcaggacgaatcaaaccgtagttacgctatgatattattagactgcatttcaaaagtaatagatgcgaaataa

SEQ ID NO: 284363 - DNA, 1116 bp, Morganella morganii
gtgtttaacggttctaatttgcgattggctcgtctgtatcacgagctgtcactggagcaagtagctgagcgagtcgacaagactcgccagtatattcagcggctggaatccggctcggctgtcccgactcctgagcttgcgaataaattagctgccgtcttgcgggttatacctgaattttttgaagtgcaagagcagtctccagtgaatgaagaaattgttcattttcgcaagcgtagttctacgcgtaatgcgacaaaatgggcaacacttgctaaagcagaattatatcgtcgtttgatagacgtttttgatgaatacttgaatctaccacctgttagatttcctgaaattagagttaacactcaagaggatatagaaagagcagctgaaaaatgtcggagtgattgggggttaggtttcgggccgattgacaatatgacgcgattggctgaaaaattaggagcatttgtcacttcttttgactctgtatctgatgatgtggatgctctttctgttcctttgagtcggccgtttattgtgagaaatacggcaaagaaatctccatgtcggcagcgttttgatatcgctcatgaagttggtcatttgattttacatgaaggtatttcaacaggggatagaataacagaatcacaagcgaatcgttttgcatcggcattgcttctacctcgttcggcgatggcaaaatattttcctcgaccaataggcggtcgcatagattggcagggattgagtcagtttaaattgacttggaaagtaagtaaggcagcaacgatttatagagcacatcaactatcgcttttgactgatgctcagtataaaacagcgtttttcggtctcaagcgaaaaggggaagcgattgatgaaaaagaggattatttaattcaacatgaaaaaccagaattctttcataaggctatgaactttcttttgacgaccctatcggtagatattgagtctttagctaggcgtttgtgtatcactccggcgatgttagtagaactggcaaatgacaattcattatctgctttagttacagatgtggacgcccaaaatgttgtttccttattagcatacagaatgaaagctggttaa

SEQ ID NO: 284364 - DNA, 594 bp, Morganella morganii
atgcaaaactactcggtaccctgggaattccatccacagctaactgcagaacgattgtctgttattgcggaaattcttcttaaagtacaggaagatacacatgacttattatcttcgatagatgatgacaattattctagagccacctgtacatttgctcgccaaaagaatcgcattaaaagattgtgtttatcaaaaaagtatagctggttaggtctgattaatcctaataatgattacacaataacaattggtggtattcctattcgttcttttacagatgaccctaccaatccgcaaagagctaatttctttcgtcgaaattgtgtagatcagctttttgcaccagaagacactattccgacaatttggcgttttgttgcagagaagccagagttcgaaggtgaaggtgggcgtgtgcattttgctggttataatgtattgggagaggttctttctttatggacttatggtgaagagcgggttgctgtactgcattcaatagatgatactccaccaaaacctgttaagattgaactagatgacattagtgcttctgttcctgaaaaggaaaagaaaagcgataacgaataa

SEQ ID NO: 284365 - DNA, 210 bp, Morganella morganii
atgggaaccctctctgagcgcaataaagaataccaggctttatttgatgattataaagcggtaattgaaatgcaattatcactgtctattgatcgaatgagagccgctgaatattggaaacgtctgttacagcaggctgatttatcagtactttcagatgttctggcagcagtattgaatgaagctggttacaaagttttatcaaagtag

SEQ ID NO: 284366 - DNA, 429 bp, Morganella morganii
atgtctgctcctgataatattgtaaaatttaatgaagtaaccggtgttattcttgcctcactgtatgaaagttttcctgtaaaaaaatcctttgaagttacatctctttttcctgaaaccgccgttgagccttctgataaacctataataaatcatgaggcaatctttgttacatcagccacagagtggctctttcaaacaggatatatttctgttaataaaattaatttcgggcattccgtccgcgatgctgtattaacggcaaagggattagagttattaaaattaacccctgatgctatcgggccgtcatttggcgataaattacttgaagcaacaaaatccggcatgaaagataccatcgtaaatgtttcatcagcggtattaacatccggaatttcattactctataaaactctcggtagttaa

SEQ ID NO: 284367 - DNA, 1830 bp, Morganella morganii
atggccgcagagaacagaacaaaatttattgttgatctggtcgggaatgtcacccagcgtgcccggcagttcggggccagtatccgcagtctcggtactgaaggcagccgctcaatgcggctgttttccggtgcggtaacgggtgccaacagcattctggataagtttgataataagctggccgggttcgtgaccggcggcggtctggcaatggccacaaagcgcgttgccgaacatcagcaggcaatggttgagctggggacacaatacaatctgactgccgaccagatgaatacactggacgcgcagattacccgggtggccggtaaccggaaattatcgtcttcggaactgatgcaggcggcaaatgcctttctgctgcagacaaacaattacgatgccactgtcgcccagctggataacatcgcgtcactgataaccggtgtcggcactcagtcggaagtggccggtgcaaaactgggcgctatgtttaactccgggtataaatcaccggaagaaatccgcaggtggctcgacggcgttatcacgctgtcacaggtcggcaccggcgatataaagacacagcttgatgccctgccttctatgggaaaaagtaccccgtggaaaagtctggaagaccagatgcagatgatggcactgatgcggattgccaaccaggagtttgacgacccggcgcaggcatctgctgccgtgcaaggtttttttgatgcagtcagtactaaggatggtgagaaattactgaagtcacggggcggtgttaacaccagaggtaaagacgggcaacttaagtctcctgcagacctgttggcagaaattgtgaaagcaggatatggaaaggaaaaaaacctttcacaagcgttttccggagatacattaaagttggtgatggcgttcgccgaccccaaaaagcagactcaactccgtgatgccgcaaaccccgccaatatccgtgatggttttcttgatgagaaagccacgcagaacgtgcagaccttcaatggtgccatgacctcactggtgaatgccggggagcgttttgcacagctgaagctggcaaagccggtgcaggatttggcggatgccattaatgacctgtccccggaagaactggacaaatacgcggaaaccattgaaaaagcagcctacgccattggtgcagccgttgccgcccgttatgcatggcgcggcggtaataagatactcaactttgttaaaggcggtaaaggcggcccgggggccggtgccgccggaggggatgccggattaggtgacggcagttctgtggtgcccgtttatgtcaccaactggcgggatgagcgccgtggccgtgataacggcggcggaggctctgatgcaggccggggaatgacgaacggcctgagagcaaagggacttgccgtagcgggagcacttccgttcctgtctgaagaagaagcacgggaaaacatcgagaaacgccgtgaacagttgaaacgggactatccaaacggtgataaagggccgtcatggcttccggctcaaattaatgactggtggtacagccgcgatgaaaagcttcaggaaccccgtaaaccatccccgtatctgactggtgaaaataacaactcgttcggcaactggccgtccgcttatccaggccagcagctggcagcggccgccaaaccggcggagccggtcaaaccgcctgacgggcaaatccgggtgattgtggaggctgctgctgatttggtggtgaaaacaaaatccgtggagtcagagaatgtcgatttacgggtcaataccggatacagcggcgggagtaaaatgtaa

SEQ ID NO: 284368 - DNA, 333 bp, Morganella morganii
atgaaccgttatccgccgatgaaagccctgctggcctttgaagccagcgtccggctcggcagctttatcagagcggcagaattcctgcatgtcacaccgggtgcggtcagtcagcagataaaaaagctggaggatgagctgggcgtgatgttgtttctgcgtgagatccgtaaactgacggtgacagagacaggacagaaatactatcgcttaattcagcccgcgctggaacagatccgcgccgccggtgagacaatccgctatgcggcacgccataccctgactctgtccatgccgccgggctggcctccaaatggttctctcccaggatga

SEQ ID NO: 284369 - DNA, 261 bp, Morganella morganii
atggaagtgctgcctgagactttagggtcacctttaggaggtcatatgagaatcaatcaaaaaagaaaagattgttacagcaaggtattagaaccggttaaagctaaaaaagtatcgtcagctgaatatctaaaaataattcaggatcatagtgataatattgaaaaagttgagtatctgatcccaaagtttggtgatgacaactttggctcatttaaagtcacttatagaataccggtactttgtgaaatcaatatatga

SEQ ID NO: 284370 - DNA, 489 bp, Morganella morganii
atgaacgcgaatgaatcatcaagcttgccatcaacaatagctgacgagcaagataaaaaccaacagcagaccaaaaaagatagaccgaatccaatagcggctatcgagaagtttgttgaggttcaatctaaagaaattgaattaaaatccaaagaaatcgattttaaaacacaagaattagaaataagacgccaagagattgaaagtaataaagaaatcgccctcaagtctatcgatgcgcaaaaggaagacagagaaacgcaaactcgtttttttagtggtatagagaccaaaaaggtctactttaagagcttggttgcagtgtgcgttgtacttgttgttatagtttcaatgtatacgggaaatgctcaatacgcgattgaattggctaaaataggcggtggcgttctggctggatacctagctggggtatacaaaggaaagtcagaccaactagagcaaacctcaacacaaaaaagagaaaattaa

SEQ ID NO: 284371 - DNA, 834 bp, Morganella morganii
atgaaaaataaattaaccacgattgatgcaaccgccctgccagtaattgaatggaaaggtgcccgtgttgtaacaaccgaaacactggctgccgggtatggatcagatgtcaaaagcatccagatgaatctggcaaaccataaagcccgctttattgaaggtgagcactatttcaaactcgaaggtgacgaattacgccagcttaagaactgccccaatagtattgggtcagttaataaacacgccagaaacttgattttatggactgaaaaaggcgcggcccgtatgtcaaaaatcgttgatagcgacgaagcctggtcattctttgaaaaaatggaagatgcctacttccgcccgacaccgacagaagtcagccgcaaacagttagcccttatggtaattgaagctgaagaccgcgcagaggctttttcaatcgaaaataaacagcttaatgccaccgttgaaagcctcgaaaaacgcttccgcaaaggcatgactattacttcattttgcaaatcgctgaacggcgtcaacgtcagtaaggtgatgtcgtgggccggtgaacgcaactgggtgtttaattcccggcgtgaccagagcaaaagccctaaatggcgcgttgcctcatatgcgcgggataaatacctgacggaagaagaaacccagatcaccccgcacggtatggatgagtttaccaaattcacaccggtgttactggaaaaaggctgtcagcggttgtttcagctttatatgaaaggtgaattaccgatgaaaaagacatggaacggcgaatacagccacgataaagccatttacacagcggaaggtaaataa

SEQ ID NO: 284372 - DNA, 1203 bp, Morganella morganii
atgagtgagctgagttatctggaaaaactgttggacgggactgaggtggagtgggtttatgcctccgaaatatttaatataaaaaatggttacactccatcaaagtcaaaaaaagaattttgggaggatggggatgttccgtggtttagacttgaggatattcgagttaatggtagaaagcttattgattcaattcagcatgtaaataaattgggtgttaaaggagctatatttcctgaaaattcaatatttatgtctaccacagcaactattggtgaatatgctttagttagaacaccacacttaacaaatcaacaaattaccaatttttcactatcagaaaaatttaaagataaattggatattaactatctattccataggttttacgattttggtgagtggtgcaaagaaaatgcaaataaaagtggtggtttatcgattataggtataaaaaaactatctttatataagtttcccatcccttgccctggcaccccagaaaagtcccttgcgattcagtctgaaatcgtccggattctggatacattcaccgctcttaccgctgagcttaccgctgagcttaccgtacgcaaaaaacaatacaactactatcgtgaccagttgctgagttttgatgatgatgaagttgagtggaagacgttgggggatgttacaacaatcacgattggtgaatttgttcggaaagataaacaactccaaggtgcggaatatcctgtatataacggggggagggtacctacaggttactatgagggctacaacaatgatggaaataagattatcgtcagtgctcgtggagccaatgctggatttgtaaacaaaagctctacgccttattgggctggtaatagttgttattctatttctgtcagggctgttgagcaattaaattggatgtatgtttattactacttgaagcaatctgagatcaggttaacgggtattcagcagaagggagggattcctgccgtatcgaaaaaacaaatggagagctttttactaccaatacccacaatatcagtacaacgcaatattgtatcaatcctcgataagtttgatgtattaactaactctatcactgaaggcttaccccgtgaaatcgaattgcgccaaaagcagtacgaatattaccgtgacttactgttcagttttccgaaaccggaatctgtgaacaactga

SEQ ID NO: 284373 - DNA, 876 bp, Morganella morganii
atgaaaaaactctttaagctaaaagaatggtttactttagaagagactgccagacgattaacaagctcgtttgaggaagaaatatctgtggcggattgtctttctttagcactcgatgggcgtattgtaatatcgactctacttgatagatcattgtatgtaataagaagtagtatagaaaaaacaacaatgaggaagcaatttaatgggctaattacctcggtaacagccgatggtgcatatctaaacatgctttccggtgaagtgtattattcgaatgcggagcttgattatcagtatgatcaaataaaaagaaacggtaatgtttttaggcttgattttggtatatatgatttaccgatgctcggtgcggagaggcttgatgtcatgcatcaatttgacttagagcaacacaggagcccgcgtgaatatataaatatagagggcccattcctgatcactaaatatggtatggttaatgtcttggagagttttaacgaattaacactgaagtttgacggcaaagaatcaagactatttgatcccatcttagataaatatgttgattttaaaaatcatagtgctttcttttatccagatgatggattaggtgaagttgagtttgttttccgtcgagaaaatatagaattatttgaacaatctgtactaaataatgaagaacccactctgaatcttgatagcagcctacttattatagggtcagtgctaaatgccctcaaaaaagctcaacccacatccaaaagatggacacaagaagctattaaaaatgaattagaaaatatctgccccataaaaccacgcgatattgataattatttttcagaggcaaataagcgtttcaaatcaattggttaa

SEQ ID NO: 284374 - DNA, 609 bp, Morganella morganii
atggaaaatttaaaaagtggctttaatgccaccagccaaactcaccctaaatttgagtcagacgatattttgaatatcaacccagatgatatttcattcatccgttttgagggtatgcaggtgcggatcgttaaagttaataatgaaccgtggtttattgcgactgacctttgtggcgcattagaacaaagcaatacagcaaaggcagtaaagaatcttgatgaagacgaaaagatgactgtaactttaagttatagtcatagtccctctcgtggcggagccagaaaattaatcatcgtttcagaatccggcttctataaactcattgcccgcagccgtaaagcagctaccagcggaacacttgcacatcgtttcactaattgggtattccgtgacgttatcccgtctatccgcaaaaccggcgcgtatggtgtgccgttcggtgaactgaatgacctgaccaaacgccagcagcagtacaaattaacctcatcacagcgtgggcgtgacctgcaatcatgcaagactgaaaaagccagcttgcagcgtgaggaagtcgaattgtggcgaaaatatcagcctgattttctcgatgaggagatccactga

SEQ ID NO: 284375 - DNA, 198 bp, Morganella morganii
atgaacagatctatctcgcgccagcaagcggctgaaaaagcacagcagattgaaatgattaatctgcttatcgaatcctatcctcataaaatcgaaagtaaccaaattaccgcgttatcgtcgctgatggcgaagttatccagtgatgtttatgtatttcttattgaagaaatagcagcacaggagggtaaatcatga

SEQ ID NO: 284376 - DNA, 549 bp, Morganella morganii
atgtattatgacggcacatcacgcgccgctggttatcagaaactgcaaacggtgtgggatatcattcacaaatgggcacccaaggggcatgggaaaaatgatccggtagcatactcaaatacagtagcttctcgcatgggggttggtgtccacgacaagataaacctgaatgattcatcagttatgtatgacttgatgaaagaaatgtccaaaattgaaaataaggggaaattcccgtattccaaagggctggttatgtccgccattaatggtactggtgatccggctgtaaatctggcaaataaaatcaatagttttaatgactttatttccaatcccattgcgccgaacgcagccgcaggaacccggcaaattatggctaattcacagatgcttcagtcggggaacaaaaccgttaataaccgtgttgaggctaatttcggagatattaatatcaacacctcatcagcgacagtcagcggtaacgtggcagatgcgaccacatccgcccgtgaaaatatgttccagctgatcacaccaatgagttaa

SEQ ID NO: 284377 - DNA, 444 bp, Morganella morganii
atgaaaaaattagcgctctgtttttgtttgtttttaccgatgtatggggtggctgcaaattgtgacatcgtcgatagtaaactatgcgataaagccacgcagggagatcctgaggctcaggccaaggtaggtgaaacttactatttcggaggagataaggagataggaatggaatggctcgagaaatcagccaaacaaaataaccccagagctcaatatcttgtgggagctacgttaatgggaatgagtgttacgggacaagtcggaaatgacgaatttcagcgtgggatagcgctggtagagaaatcagcggatcaaaatcatgtcgcggctatgctttatttaaaaggctactacggagcccgtggtgacgatttacaagctcaaaaatggagtaatagagcgtgtaatagtgggcacgaaaaatcttgtcaaaaccaatag

SEQ ID NO: 284378 - DNA, 192 bp, Morganella morganii
atgaacactcaacttgtcgtcgccaatgatgatcaatgctcagatcgctatcatgagccagttgactgtactcatatgatggatgtcaatacttcaaataatattgtaagtatggcatcaataaaagaaaagcgatcttatgatgaagccaagaaaagagcagctgctgtagcagaaactttagattggtaa

SEQ ID NO: 284379 - DNA, 1554 bp, Morganella morganii
atgggtaatccggccaaagttattgaaatggttaatagcatatcacatactgaacaaaatgatgatttcgaagatgtagaacttaagattaaaggtcgccattctagtgaacttattattgcactatgtggtatggttggctccggtatatataagctaaaagattcattaatagaggaatttgaaaatttaaattataaagtaaaacatattagaattagtgatttgatagcagagcagcaagaaaaacccaatgaaataaaagcactaactggttatttaagatatgaaacattgcaaaacctaggtgatgaattacgaaaatcaaatacaaataatatttgtgcccaactagccatcagaagaataaatatatggcggcataatgagtatggtgagaaattacaagaaaatgaaaaaccgaaacatacaaaaactttagataaaattgtctatattatagatcaattaaaaaacccagcagaagttagtttatttagaactgtatataaaaacaatttttatcttgtcggactattaagaaatacaagtgaaagagaacgccagttacgagagagtggattaaataacgataatattaatacattaatgagtagagatagaaaaaataaagattcttatggtcagcaagtagaagacaccattcaattatctgattattttattagagatataactcaaataaacgaaataaataattcagttaaacgctttatttcattgattcatggtgttaatcatataacaccaacaagagatgaaaccggaattttcaccgcctataattcatcacttagatctgcttgtttatccaggcaagtcggagcctgtattatggataatgacggtaatatcctatcgaccggatgtaatgatgttccacgatttaatggtgggctttacagtgcagaagatataaaagataacagatgttataacgatggacattgctacaatgatttacataaatcaatattaaaaaatcaaattaaagaaatattaagtaatgaaggcattaaagatgctgagagtttatcgtcaaaaataattaacaatacaaaagcaaaatatataattgaatactctagagcaatacacgctgaaatggatgcaattatgtcccttgccagaaatacatctgtaagctctgtaggaaaaacaatgtattgtacaacatatccatgtcataactgtgcaagacatattgttgctgctggtattgggcgagttgtctatattgaaccatatgaaaaaagtctagctagagatctccatagtgatactatttgtcacactgatgatgtagcaacaaataaggttttattcgcaaattttgaaggtgtctcacctaaccgctatcctagcttctttaaataccatggcgagcgcaaggataaaaaaggtaacgtactaagagagaagatgattacagcgaagcaggtagatccaactggattggattcatattttgactatgaagctaaaactgtaaaagatgttaacggtcgccttggtgaagaaagaactgaatag

SEQ ID NO: 284380 - DNA, 927 bp, Morganella morganii
atggctaacatcatatgggcgagcggcttgcaagtaaccgctgcttggtatgttgtaacagaaactgacgctgctattagagggggggctaatgttaaaggaactattattctgattttgcgcaagcgtcaccaggcattagagacttttcgtgatgatttggggtgggaaatcgaagaggcggttagagagcaggtcgaatcattaatcggactagataaaaaagttagagatcagggatctgatggtctctatacagatgctgatttacaaatggctggttatgctgctgctttgaaagtactaacggcatactcccgaatcgacggcaaagacatggtgactgaagccgaggcacctcgacaaaaaggcaaaaagacttttgttgatgaattgatcgattttgcagtgcaaacagctgttcaatttttggtgcctgttggttttgagaaaggcgaatggcagaagcttcaagcagttgagcgcttctacttgaaaatggtcgaaatggagtacctaggtgcaaagtccttagacaactatcaaaactttgctaaggcgttcaaggtgcatcattttgatcagttaatgagtgacgcatcaaaggccaactctgcaaggttaaagctatctgttgagtttaaaagttcgatgatgtctggtgatgctgaaatggcgggtacactattgagggctttgctctatgccctatatgagctttctaaggatattgaggtcgatgatgttttgttacatttaatggataattgcccaaattatctacctaataagcaaatgctggcaaaagtcgccgattatatcgcagaaaaacgcgaggaattgaaaggtacaaaaacttttgatcctgaacttgaagcgagctgtgcccgtgtccttgctgaagcaattcgaaatcaaaggttgtaa

SEQ ID NO: 284381 - DNA, 2364 bp, Morganella morganii
ttgcatggaaaggctgggtcgattcattatagtaatggatctcgcaagtcctttattggttcggttaatgaatcccaaagtgcatttgcccataactacgaacttgtatggcaagatgatgatgagggaagcgctgactgggtcgaacaagagttttgggctctgtggaatgatggtgtcccattacctgaagcgatactcgcagaaatcaaccgcgttgcaaatcgtagagaagttacagttgaagccttaaaacctgatgaagttcctgctgctgcaatggcagaggctcccatatatagaggtggtgaacaattacagccatggcaacgctcctttgtaactatgttcctaaaacatagggaagtttatgggaaagctcgtttgttgcttgctgatgaagttggcgtcggaaaaaccttatctatggcaaccagtgctctggtaagtgctcttttagatgatggtcctgtgcttatacttgcgccttcgactcttaccattcaatggcaaattgaaatgatggataagctggggatacccgctgctgtatggtcctcacagaagaaggtttggcttggtgttgaaggacaaattctctcgccgcggggtgacccttcatcaataaaaaaatgcccttatagaattgcaattatctctactggtctaataatgcatcaacgtgaaaaagcggattttgtaaaagaagctgggatgctactcaaaaatcgctttggaacagtgattcttgatgaagctcataaagctcgtgctaaaggtggtttaggtgaccaagcatcagagcctaataatctaatggcatttatgcaaagaattggcagacggacccgtcatcttattttgggtacagcaactccgattcaaaccgatgttcgtgaactttgggatcttcttggcatattaaatagtggagctgagtttgttctaggtgatgctttatcacaatggcacgactatgaacaagctattccattaattacgggtaagacgcaggttacatcagaggcgggaatatggacttggctaagtaatcctctacctcctgaaggtgaacactatattgtccaacaaattcgagattatttgcagattgagagcaaaacctttatttgctcccatcatttcaaagatcttgattatatgattcaacatctctggttgtcagaatgccttactcctgacttctttaaggaaaataatccagttttgagacacacagtactcagaaagcgcaagcaactggaagatgatggactgcttgaaagagtaggtgttaatacgcatccaatgatgagaaatttaggacaatatcaatctcgatttgttgggttgggaataccgacaaatacacctttccaagtcgcatacgaaaaggctgaagaatttagtaagctacttcaatctcgaacacgttctgctggttttatgaagtcattaatgcttcaacgaatttgctcaagctttgcgtcagggttgaaaacggctcagaaaatgcttcatcatacgttgtcacatgaagacgaggatcttgtcgaggatgtagagcatattctctctgaaatgacaccagcagaagtttcctgcttaagagaaatcgaaacacaactttctcgttcagaagctgttgattcaaaacttaacactgttaaatggttcttaactgagtttaaaacagatggtaaaagctggctggagcatggctgtattatttttagccagtactatgacacggcagagtgggtagcaaaggaacttgcaaaatccttcaacggtgaaattgtagctgtttatgctggtgttggtaaaagtgggcttttcaggggggagcaatttaacaacgtcgagcgtgaactaattaagtctgctataaaaactcgtgagattagactggttgtagctaccgatgcagcgtgtgaaggtctaaacttacagacgttagggacgctaataaatatagatttaccatggaatccatctagattagagcaaagactaggtaggatcaagcgtttcggtcaggtgagaaaattcgtggatatgcttaatctcgtttatagtgaaactcaggatgaaaaggtctacaacgtcctatcagataggcttcgtgatacatacgatatatttggtagtttacccgatacgattgatgatgactggattgatgatgaggaagctcttaatatacgaatgaatgaatacatacatgaacgtaaaaaagcacaagatgcattttcgattaagtatagagcaagcttagagccagatgcaaatctttgggaaagatgtgcatctgtactttcacggaaagatattataaataaacttagtgagccatgggaataa

SEQ ID NO: 284382 - DNA, 213 bp, Morganella morganii
atgaccaccaatgatgtcgaaatttacttcggtaacgccaacaaagtggctgatttttttggaataactcctgaagcgttttaccaatggaagaaacgcccaggtggattaatcccaaaaagcagagcttttgaggctgcctgcagaactgacggaaaactcaagtacaaccctgcactttatcagcatagcagcacagaaaagcacggttaa

SEQ ID NO: 284383 - DNA, 651 bp, Morganella morganii
atgaaaaaagacaataaaggctacacagtagtcgatttatctcgttggaaacgtaaagagcacttcgaggtattccagtcaatcgctcaatgtacatttagccaaacagttcaattagatatcactaatcttctaaaatatacaaaagctcagaattggaaattttacccttcgatgattcatcttatcgccagattactcaataagcattctgagtttcgtatggcgatcaaggatgactcacttgtaacatgggatataattcatcccagttatactatttttcatgaaaaaacagagactttttcatcactttggtgtcattacaatgatgatatacaccatttttttaaagaattttcggaaaatacggcactttattctgattgccaatcctacttccctaaaggtgaatttatcgagaatgttttttttatatcagccaatccatggctaagctttacaagctttgatttcaccatgtcaaatatcaacaactttttcgctcccatgttcaccataggtaaatactatgtacaagatcagagagtgttaatgcctctggccatccaggttcatcacgccgtatgtgacggattccatgtaggtcgactggtcaatgaacttcaaaatatttgcaatagttattaa

SEQ ID NO: 284384 - DNA, 1491 bp, Morganella morganii
atgcaactacatgattttggtttcgttaattatgcagtgctgtttggttatttagcagcaatgctactcgttggtgtttatttctctaaacgccagaaaacagcagatgattattttcgtgccgggggacgggttcccggttgggctgccggcgtttctgtctttgcaactacattaagctcaattacctttatgtctattccggcgaaagcttatacctctgattggacttttattattggccaatatttagcgatcgccattttgccattagtattttatttctacatccctttctttagaaaattaaaaatcacctctgcttatgaatatttagaagcccgttttgatatacgaagtcgtttattcgccagcctgtcatttatgttatttcatattggtcgaattgcaattatcacttatttgaccgtactcgcattacgtcctttcatagggatagatccgattatattagttgtactgattagcctgttatgtattatttatacatggatgggagggattgaaggtgttatttggactgatgtcattcagggattattactttcaggtggtgctgttttaatctttatcatgatctgttttaaagttgatggaggaattagtgagatttttaccacaacagcacaagctgataaatttttcccagaagcacagttacgctggagctggactgacagtactattcctgtattaatgattggttttttatttgccaatattcaacaatttactgcaagccaagatgttgtccagcgctacattgtgactgattctatcgaacagactaaacgtactttaatcacaaatgctaaattagttgctgttattcctgttttcttttttgccattggttcagccctgtttgtgtattacaaacaaaatccaggtttgttacctgaaggttttaataccgggggtatcttacccttatttattgttacagaaatgccagtgggtatttccgggctaatcattgcagctatctttgccgctgctcaatcgagcatttccagtagcttaaacagtatttcaagttgctttaattctgatatctatattcgcttaagtaaagttgaacgacgttcagaacaaaaaatgaaagtcgccagattagttataattattgctggagtattcagtagcttagcaacaatttggttggttttatctgacgaatctgaaatatgggatgcttttaacagcttaatcggtttaatgggtggtcctatgaccggactatttatgttaggtatttttgttaaacgtgctaatgcaggtagtgcggtcgcaggcattatagtaagtatcattgctgtattagcagcccgttatggcagtgaccttaactttttcttctatggtgtaattggtgctatgtcagtagttattgttggtacaattactgcgccatttttctccgcagcaaaacaaatttcattggatgatagtgaaatatccgggaactaa

SEQ ID NO: 284385 - DNA, 285 bp, Morganella morganii
atgttgattaactacatggagtgcgatgtgaaaataaaaaaagttagctttgtttggaaaaatatagataaatcagaacaatacttgattgatatggtcacctgtaagatagaaactgatgatggcgcgatgtatgaagggtcagtgactcaacccatttttaggcaatacgttatgttgccaccaacccaacccaaagtgcttacaccgcacgagattggagaggttgccgcctacaaccacaccatgaatttaattcgccaagtggtgagtgatcagatgtaa

SEQ ID NO: 284386 - DNA, 201 bp, Morganella morganii; identical to SEQ ID NO: 281771

SEQ ID NO: 284387 - DNA, 240 bp, Morganella morganii
atgacagagaaaacgcagaatacaggttgggcaaagttaaaaggtaacgtagtcacctacctagccagatggacaataggaatcatattcatcgttccaatagccatagtttatttcctcttttttctgattgatacaccgatgcactttgccaggcagcgaatgagagaatttttactttcatcaatggactatatcgaaaagaaatttccattcaggaaggataaccagcatgaataa

SEQ ID NO: 284388 - DNA, 195 bp, Morganella morganii
atggaaccaacggattttgaaaagtggtgtgcggaggatatgagcataccgttagacggcgtcatacgaagcagatttggcgacggatataaatacacaagcattcacaccagataccgcgcctacatggccggagttcgcagcagactgccgtaccagacaccgccaaaaggagatgaagatggaatggattaa

SEQ ID NO: 284389 - DNA, 426 bp, Morganella morganii
gtgagtaaatacggatatgtagaaggcgacatctgcctacgaagtggatgtaaaggcgtagtgaaagagcatccggttgagaattgctcatgccatatcagtccgccatgcggtgcctgtacctcgcctcgcggttactgcgaaacgtgcggatgggaagagtcagaggacgaggttgttaacgattatgtagtcagtttaaacaaagaaacgggctcatatcgctcatgggaactgagaccccttaacccaaacaagctcgactggcacagcaagccacacaccggcgcatcaatgatcaaagaaggtgtttatccggaaggaatgacgtggcaggaagttgagcgcaaagtggttggcaccttcggcggtcgctttgcatatttcggcgatggaaagtttaaatacattgcttacaccgattaa

SEQ ID NO: 284390 - DNA, 210 bp, Morganella morganii
atgacaccacaggaagcagagaacggacgcagacgaatagcaagggaatgcctcacggaattaatgcagcacacatcagacgaacaacacaccgcaatactcgacaaatacacaccgaaatttaaaccacttaatcacctgcgctttccggcaaagagagtgctcgggtattacgtgcgtacgttacagaaggagatgaaggatggataa

SEQ ID NO: 284391 - DNA, 348 bp, Morganella morganii
atggataaagtcacgatgacacgcgacgaggccgctaaatttatcggcgtaagccctgatacgcttacgtcatggtgccgcgccggacgcatttcttatcagcggaaagacccgttcaaaaagaagtcaccctatctgtttacagagtcagcctgccttgcggcactgagtaatccgatcaacactatcgccgagagcgagattgatgtgaaaggagatcacaaatgtcaatcttcaaacgtggtaactcttggtattgcgacttcgcgacacctggcggcaagagaattaaaaagtcgcttggtacgtccgaccggaagcaagcccaggaattgcacgacaaattaa

SEQ ID NO: 284392 - DNA, 222 bp, Morganella morganii
atgcttgtttgtcatcttgctgatgatcttgtagatggcattctcggttatatccttcagccggacaccctcgaagtactcaagccagaaagcgataaagttcttatcatcctctatcgattttttatccgctttttcctcaagccaccgcaggcaggcttcctcataggtatagtccgggaagtcacctacctgctcaattcgccattgctcggcctttaa

SEQ ID NO: 284393 - DNA, 282 bp, Morganella morganii
gtggaccacggatgcctgaccggatgccatatcccactgcgcgcggatggagttctgcgccagcgccagtccgtcttctgctttaacctgtaccgcgtccagtttctccgcaagtgccgttgtttccgtaaccgtgtagttgcggacatcgatgatttctgctttcataacaccgttttcacgctgccagtaaccccactgaccgtaaacgttattggcgttgttgataatggcctcgaagttatcattcgcctgagactgcaggcctttaatgatggctga

SEQ ID NO: 284394 - DNA, 780 bp, Morganella morganii
atgaaactcgaaagcgcattaaaacaatttcatccgaagtcaccgacattcagtgacagctcaaactccacggccccggacagactgaaaggtatggattcagcagcagcaatgggcatggcttcacagcgagccgcgttcggtatgcatgcgttctttggtaaaaatgatgtcagcatagaagataaattcaggacggttgaagcgctgacacagtatgccctgcgcacggtaccaaagctggtggccaaagcggccggtaatcgcgttgctcagtgtatgaagattctggccgcaatggcatttgaggattacgcccgttcagcgggttcggtctgccagtgtcaggactgcggcggaaaagggctgatttaccgccggaaagaggtggtaaagcatccgggtatcaccaatatggagggtactgtaattgttgagccgatagtccgtattgagcgcgttggcgaactgtgcgtgacctgcaacggtaaagggcagttaacccaccggtgccggtgtaaggggcggggtaaggtatacgacgaagaacagagcgaattacagggtgcgccggtattcaaagactgtccgaaatgctcggggcgcgggtataagcgtgtgccgtcgtcagtagcttatcaggcgataaagcatctggtaccggagttaacacagccaacctggtcacggaattggaagccattttatgagagtctggcaggaaagtgctacacagaggaaagcgaggctgaggcatttttcggtaaaatcacacggtaa

SEQ ID NO: 284395 - DNA, 159 bp, Morganella morganii
atgccacggaaccctttaactttgatcatcattgctatcattctgctgacggtcagtctgttggcaggctgttacctgtattcgctcgagactcactgtaagccgctgccgggcaatccgctggacggtgtgattcattatgagtgtgaagcgccatga

SEQ ID NO: 284396 - DNA, 528 bp, Morganella morganii; identical to SEQ ID NO: 278607

SEQ ID NO: 284397 - DNA, 513 bp, Morganella morganii
gtgaccggtattgtgcacagtcacccggatgctaccacccaaccgtcagaactggataaagcacagtgtgatgcccttggcgtgccgtggtacatcgtcagctggccggagggggatctgcggactgttcagccgcgcggcgagctgccattacttggtcggccatttgtgctcgggtttacggactgctgggggctggtgatgagttggttccggcaggaacacggcattgagctgccggattaccgggtggattatccctggtgggaacagggtgagaaccggtacgccgataactggcgggaggcgggatttattcaggttgacgatccgcaacccggtgatgttatcgtgatgcaggtgcaggcaccggtcgccaatcatgccggtattctgctgcctgataatatgctgctgcatcacttatacggtcacctgagtcagcgggtaccgtatggcggttactggcgtgatcgtacagtgatggtactgcatcatgagcaactgatatga

SEQ ID NO: 284398 - DNA, 282 bp, Morganella morganii
gtgaataacggatgcttcgccggcggccatatcccactgcgcgcggacggagttctgcgccatcgcgaaactgtcgtctgccgtcaccttcaccgcgtctattttctcagccagcgccgtggtttccgtgaccgtgtagttgcgtacttcgataatctcggctttcatcgcgccgctttcacgctgccagtaaccccactggccgtaagcgttgttggcgttgttgataatggcctcaaaattatcatccgcctgcgactgcaggtctttgatgatctgtga

SEQ ID NO: 284399 - DNA, 648 bp, Morganella morganii
  misc_feature (532)..(541): n is a, c, g, or t
atgattaatgcaaaacgtgtttaccgtatcatgaagcagtccgcattattattggaacataagcccaccatcccgctctcgaaacgagctcatacagagaaagtagaggtgaatgaaagcaaccaacgttggtgttcagatgtttttgagttccgatgtgataatggtgaaaaactgcccgtcacgttcgctttagactgttgtgatcgcgaagcccttcattgggcagccagcacgggaggcttcgacagtgaaaccgtgcaagatgtcatgttaggcgctgtggagcatcgcttcggtaacgagttaccctcaaagtcaattgagtggttggcagacaatggctcagcgtatcgagcccatgaaacacgatggttcgctaaacaagtctgcctatcacctagacatacggaggtacggagtccacaaagtaatggaatagcggaaagctttgtaaaaatcatggagcgggactacataaatttaatgccaaaacctaacggattagcggcagtgaagaatcttgcggcannnnnnnnnnataatgaatggcatccccacagtgcactgggttatcgttcaccgcgagagtatttgcggcgccgaatccataatgaaataagagataaaaagtgtctggaaatatag

SEQ ID NO: 284400 - DNA, 273 bp, Morganella morganii
atgacactggcgctccggatggggcgcacagtggatgagctgaccagaacgatgagcgccggtgagctgaccatgtggatggcctttgaccgcctcagcccgatcggggacatccgcagtgacatacagacggcccatattgtctcatcactgtaccgcgcacagggcggcaaactcagcctgaatgatgcgatgctgaaatggggcgctcaggatgagaggccggccggtgacagtctggaagagtttctcggatctatttctgaacgttga

SEQ ID NO: 284401 - DNA, 351 bp, Morganella morganii
atgttaacagctgcgcaaaagaaaaagaacgtatgtatcgtagtgtcggatttggaggctgcatacgatactggtggcaagctgattcaacgagctttagatgatgctacacaagagcttggacgtgctgaagtttcaattacaccggtaaaccttgaatcaaatgaaatttatgaaattctaaggaagcgcttgtttttagcgcttcctgataaaagtgaaatttctgagatcgcctctgtttacgcaacaagacttgctgaggcagctaaagccaaaactgttgaacgtagtgctgaggctttagcaaatgacattgaagcttcttggttaggttttcttgatggctaa

SEQ ID NO: 284402 - DNA, 273 bp, Morganella morganii
atgacactggcgctccggatggggcgtacagtggatgaactgaccagaacgatgagcgccggtgagctgaccatgtggatggcttttgaccgcctcagtccgatcggggacatccgcagtgacatacagacggcccatattgtctcatcgctgtacggcgcacagggcggcaaactcagcctgaatgatgcgatgctgcaatggggaaaaacgggtaacggtgaggcagatgacgggctggagggttttctgaaatcggtatctgaaacctga

SEQ ID NO: 284403 - DNA, 258 bp, Morganella morganii
atgccgttaacacgggcggcggatggctctctcggtgtccgggcgatcggcagaaatcagaataccggttctgcagcaccacaggtgtttattaccattgacagtaacggcagcagccagacgcagtcgtcagctggttatgaacagtttggccgggagattgggcagtatgtagaccagcgttaccgggcgctgattaatacagatctgcggcccggcggtgccatctggtcggttgcgaaaggggcccgtcaatga

SEQ ID NO: 284404 - DNA, 708 bp, Morganella morganii
atgtttcagaccaaccgaaaatatgaccgcatggctgtgcgactctctgcactgattgcccgcttaatggcgggcgaaagtctagtgctctcatgtttagcccaagagttcaatgtttctgaacgcacgttacagcgcgatttacgtgaacgcttggcttatctgggggtagaaggtcggcaaggttgttatcgcttgcctatcaatacgctaaaagcttatcgagacaaagatgttctgacctttgtgaaacagattgggatgactcgattgtttccggggctagacagccgcttactgggattgctgttaactcagcagcctcatgcaccttgtttgatttggcatcacgcccataagatttctgctttgcatgccgaccatttctatcaattggtgtatgccattaccagtaagcaatctattagcatactcacacctgagcgtcgttttaatccgctacaaccctatcaactgatttaccgtgaaggccagtggtatttattggcggaataccaccagcaagtgcatgtcttgttgttagaggatatccagcaagttcaaccactcaatacccccttcacaccgaaacacacagtgatgcaactgtcacaacaaaacagttttatcgcagccttaccgcattttcgattgatatcacaattacttacctctattccatcccacaaagaaaggagccgaccatga

SEQ ID NO: 284405 - DNA, 615 bp, Morganella morganii
atgataagtgtagatgtaaatgataattatttggaatgtaggcaatattatgctgtcctattctgtatgctttcagaaaaaacactattacctgaagatttttataaaatgattatcgaggcaagaggtaagaatgttaatacgttaattcgtgagttgaatcagcatgtcgggaatgtcttaaataatgttgatcattatttaagaaaggtggagagaaaaactattccaatagaacaactatcttttttaagggatgaaagaatatcatttgttatcttaaactttctcatgaagtcgtataataaataccttatagaaatgggtcataaatcaattatggctggagtgtataattattcacctttaaatttgatgccaatgatgggtaaaaatataccttttcattatattgtttgttttttggattttatagttttatttatgacccctaaagattttaatgcgatagtttttcaaatgagagataaagcttcatctattaccaaagaatatccagatcctttttcatttttgtcaaaaaaaactgaagcgaaaatattgctgctgatgatgatgttaatgttcttattaaaaatcagaaatggaaaataa

SEQ ID NO: 284406 - DNA, 588 bp, Morganella morganii
atgtctagaaacacctacaacgagcattacattcaaaagataaaccacaccatccgtaaatcactctcaacctataatcgagttactgctattcgagtggacttgcgatttccttcatcggatataattcacttaagtgactccaatgccatcacccgattttttgaatcgttaaaagcaaaaataaatgctgacctaaaacgtaaaaataaaatatggaagcgtaaccattcatgccctttgttttatgtatgggtcagagagtttggtgagataaaaaacaaaaaacactaccatgtacttttgctattaaataaagatgtttattggaacctaggtgattttattaaaaccaaagggacgctctatgcattagtacaacaagcatggtgtagtgctattggtgtaaaccatcctgataagcgttatttagttcatatcccggacaacgccgttacttggctagataataatgaaacccacaatgaaagtgcgatattcaaattaaaccagcgttgtcgttacttagccaaagagcatacaaaatattatggtgatggcgagcgttcttttgggtgcagccgttaa

SEQ ID NO: 284407 - DNA, 147 bp, Morganella morganii
atgatcgagattttaggtcctgaacgtagaaaacaacgttccctacaagaaaaaatggctattgttcagcaaagctttgagtcgggtatgagtgtttccatggttgcccgacaacatggtgtcgcagcaagtcagcttttcctttga

SEQ ID NO: 284408 - DNA, 186 bp, Morganella morganii
gtggaagatagatggttatccgttgatgagattgcagactatctcggaataaagcgtgacacagtctacaagtggattgctgaaaaaggtattcctgctcacaaaataggacgcctttggaagtttaaaaagaatgaagtcgatgtctgggtacgcaaaggaaaagctggcgaaaacaatgattaa

SEQ ID NO: 284409 - DNA, 336 bp, Morganella morganii; identical to SEQ ID NO: 279683

SEQ ID NO: 284410 - DNA, 162 bp, Morganella morganii; identical to SEQ ID NO: 277648

SEQ ID NO: 284411 - DNA, 693 bp, Morganella morganii
atggactcaggaaaatgggacaactgccctgaaaacgcgccggatgatgaactgaagaactaccctgtctggatcggtgttgacctggcaaataaaatcgacgtggccgcagcaattaaggtttatgaagatccgcgcggacaggtgcatgttaagtgcaaattctggctgccggaagaccggatagaaaccgcaccgaaccatattgccgatctgtaccggaaatgggcggccgccgggcatctggagctgactgatggtgaggttattgatcatgacatcatcaaagccgacattctggcatggtgcgaaggtgatgacctgcgtgagctcgggtttgacccgtggagcgcggtgcagttctcacgccgcctggcggaagaggggattccgctggtggaagtggcacagacggtaaaaaacatgtctgaatccatgaaaacagtacagggcgatgtatattccggcaaatttcaccatgaccacaacccgatgatgtcctggatgatgtcgaatgtgaccgtaaaaccggacaaaaacgacaacattttcccgaacaaatcgacaccggaaaacaaaatcgacggaccggttgcgctgtttactgccaaatcacgccagatggtgaacggcggtggtggttccgacttcctttcctctctggatcctgacgaagaaattctattcctatga

SEQ ID NO: 284412 - DNA, 1176 bp, Morganella morganii
atgctgcataagcaggacaagggcattccgtactggaaaacctacccatcaaatgagtcttacaatggtgagcgacaaataatcaagactttgacgtcagatccaatcaaactatatacgcaaatcacagaaaactttgatgcgttgagagcaagatctgagtcgttgttatttggatctcaggacgaagctcgtaaaaccgatctgcttgataaaatgaagcaaaagacacagatgccatggctacctagcaaaggttttgagcaactttcaatagaagcttatcagagaggtgtttgggaagatcttggaaatggatatatcaccaaaaagcctaagccaaaaacaacagaagtgattgtaagtgaggactcatcacctgatgattctggaactgtacgtttgaagattgatgttgccaatgcaggaaacagccctcggatacattatgcagaggatagtgaagtttcagaaaatagtcccgttttaggagagaacattctggcaaccaaagctttgcgtgttcaattccttgccgttgatccaactggaaaaaatctaacagggactcctacgacatggaagaatcgactaaccattcgcaatcggtttgatgaaattgctagaacagtagagttgtttgtagctccaaaaggaaacataaagttcaccctcgatggctcagaagccagaaatggtgagtcatacaatggacctattcagttatgcgagcaggaaactacggtttatgtttttgctgaatgcgacggattagaagaaaagcgtaacttcacttttgccgaatcaggttctaaagagatccccattgtaaaagacaagcccgcgatcttagttagcccctctccaaaacgaatggacagctcagccaaaacctatgaaggcctaaaaattgcgctggaaaagggcatagagtttgaacaagtaagtctaatggttgggtctgctccgaaagtgattcatttatctttgggtgagatgaaaatcagcgctcaatttgttgaaacagctttagctcatttgcaaagtattcttagtcctgaagcaccagttgtgatgacttttaagaaagcatatacaaagactggtcatgatttggagcaatttgccaagcaattaggaattgaaattggaactggtgaggtcgagcaacgatga

SEQ ID NO: 284413 - DNA, 267 bp, Morganella morganii
atgaatatatcaaaattaatcacattagctgcaataactacgctgacagcctgcagccataacgtatacaccaaaccagtggattgcaccgggcatatgtttgaggggctggataaccggcattattcagctaagctgacaaaatatgcgccggacagtaaacggtttttcagtacaggtgatcctgttctgggtttgcatggctggatccgcatggatacgtttgacaaaattacatgtgttaaaggcaagagtacagaggactga

SEQ ID NO: 284414 - DNA, 369 bp, Morganella morganii
atggtgatcggggctgagctgaaaggtggtcaggtgaacacccttatcggttttaacgctcagcagtttgcgttttataatccggtgaaaaaatcgatggacatgttcatgtacatgaaggacggacaggtctttatgcgtgaggcgttcattaatcagacatggcttaacagtgtggttgtcactgacaaaatgcagtcggagaactatgtgccgggtaaacagggttttattctggatgcaaaggctaataaatttgagttctttgacggaacaacaacaaacggtaccggtattacagcgggcggtattaaagtatatgacaataaccggctgacggtcattattggtgatatatcggggtattaa

SEQ ID NO: 284415 - DNA, 1704 bp, Morganella morganii
atgaccggtgataatatctcggtaacaggagccgcaggcacccgtggtgtctatgccatgaccaacagccagattgatctgaccggcgacctgaccattaatatggcaaccgcagatcagatagccattgccacccagcacaatgacggctatgccgccagccggattaatgcaacgggcaaaatgctgatcaacggcggtattcagtcacggggcggcctgatcaatgtggatatggcttccggctcacagtggaccgggaacgcttacagcgataacgtcaacggcggcctgctgaatgtcaccatggacaacagccgctggaatgtcacggatgattccaacctcgataatctggtactgaataataccaccgtcgatttatcgcacagattgtccgacaccggttactcaacgctgagtatcgccaacctcagcggcaacggcgcattcacgctgcggactgatattgtcggtgacggtgatggtgtcaacaacgccggtgacaaactggtggtaaccgggaccagcgccggtgattattcattaactgtattaaaccgcggcagcctggccacaaccgggaatgaaattctgaccgttgtggaaaccgcagacggcgcagccagctttacttcaacgtctgaagtcgagttaggcggttatctgtatgatgtgcgcaagaacggcaataactgggaactgtactcatcaggtgcctacgttccgccgccggtagtcccggatcctgatccggaaccagagccggaaccggaaaaaccaaaaccaccgatcaccaccacggcggatgcaggcggtaatttcctgaacgtgggttatctgattaactacgcagagacccagacactgatgcagcgcatgggtgatctgcgtcagaacggcggggataataatgcatggctgagaggcttcggcggtaaattcaactcctttgccggcggcaaaatgagcggatttgacatgacctacggcggtacacagctgggctttgataaacgtatctcaccggacacaccgctgtatatcggtacctttgcgggcttaacccagggctcaccggactatcgcggcggggacggcactgtccgctcataccatctggggctttacaccacctatatggcggacaacggtttctatgttgacggtattgccaaggtctcccgcctgaaaaacaaattcagcgtatcggacagccagaacaataatgtcagcggcgacggcagctcaacgggtgtcagtttatcagcggaagcaggccggaagttcagcctgagccgggccggtaatggattctatatcgaacctcaggcgcaactgacctacagccatcaggattcaaccggtattcacgccagcaacggcctgaaaatcgacctcggcagctatgattccaccatcggacgcgccggtacactgatcggctatgaaaccaccaccggtgacagccagatcaacgtttacctgaaaaccggttttgtcagagagtttcagggcaacaccgactataaactgaacggctcccgcgaagcacacagcttcaaaggaaactggtggaacaacggactgggcatcagcgccaacatcagcaaaaaacataccctgtatgcagaggctgacagctcaaccggcaaccggtttgatcagtaccagatcaacggcggataccgtttcagcttttaa

SEQ ID NO: 284416 - DNA, 138 bp, Morganella morganii
atgcttcgcattgaagttattttcagcagcaaccaaaaagagatgatgcctcctggcatatttgaagcactggaaaaggaaatagaccgaaagctacgggcccagtatcaggatatgaacgttcgtattgcgtggtga

SEQ ID NO: 284417 - DNA, 252 bp, Morganella morganii
atgaaacaaaaatatgtgtatcaatcgcctgaaaactatgcagaaaaagtaaatgacaatgacgggattaagcaactttccatcacatcgatgctcgaggagttactgcgggagatggatcgtgatggtcatgatgtatcagggccgatgacggagctggtggcgctgaaaaactacgttacgcacacggagaagcaacgaaatacaataaaaacccacctggaatttatttttgctgaattaaataaataa

SEQ ID NO: 284418 - DNA, 495 bp, Morganella morganii
atgtgtttaaaaatagaacgtagccagcatgctgtcagcgccatatcagccgcagtagagaaatacggcatatcagaagctattgctgaatctttcattgctgatttcgaagaatataaaagaatctctattgattacgacgacgtccccaacccgtcagtttctgcgcaattttatcatcctgcgcacattgacaccatcggcagagataagctaatggactggcctgatgaagcaagggatgaggacgtccaccatgtccatctatggcaaacgggatgtgtgtgggaagatgaagatgagggtcttaacgtacaatgggattgtacaagtgattcttttattatttattcgtactttaaagataaagactccgatcatcacttctatatcatagacttcttgtttgatcaggctcacaccatcattgaagacagagaacaaatattgaagtggattgaaatggcgcgccaacaccgggaagccaatacctaa

SEQ ID NO: 284419 - DNA, 729 bp, Morganella morganii
atgcaagctcaaatcgtaactatcgataatttaagtcctgtcatttatcaaaatcgcccagtattaaccacttctctgttggcttcactatatggtaccgattccataagaattagacaaaatcactctcgtaatacatgcaggtttgcagagggtaaacatttttttaatttacaagggactgatttaaaacaatttaaacacagagtatctgaaagctactccgtgctaatccctaaaaatgtcagtaacctaactctttggacagaacgaggcgctgcccgtcatgccaaaatgctcgatacagatatggcatggaatgtttttgagcgactggaagataattattttgcaaagcatgatgaacaaagcagcatttctaaaagcctacctcgcaacgcctctaccgaggaactgctggcgctggtggaccagttgcaacgtactattcacgaaggtgagttcatccctgctggccaggtagcgcaggaatacagcttcccgaaaacgaagaagtcacgttcgcagatcctcaatgacttcctccggtcaccggaagatgacacgctccaccagcttctggcctatctgaaacgggacggccacaatgtggaagaagccgagcgcgtcatgatgtggctccgcgattatatgtgcgatatgggcaaaaccatcaacaccatcattacccatgctcagtacatcgagcacgcggtcagtaagttataa

SEQ ID NO: 284420 - DNA, 816 bp, Morganella morganii
atgaaatacatacttatttttctattttttgtatcgggggtggcgtttgctaaatgtgataaaaacaattttgaccagtgcaaaacatgtgaacagttgagtaaagcaattgatttatctgacccagatagaggagactattacagaggagcgctatggaacgggttgtatgcttcttatgttaggaattgcccagcgatagctgaaaagctcctggcgaatggcgcaacaccatcacttggaggttggaacgcagcgtttcctattgtgatttctggcgaatggccgcataacaataaatcaattaatgaaaaatggaagaatctgctgataaagtacaatgtaaaattagacttgattcctgaatggcgtaagtctccgtatgaaatttatatgaatgacccgagtcaaatagactatgaagatatttggaatgatttaatgtcggcaagtaatccggcaccaattttagccgctagaaatattgaatggtgctcatcagatgaaaatatggcaaaagtaaaaattgaaatgataggctgttccactttaaatataaataagtttgatgacaacatatctactgcttctgatatagctgaggctgtgcttgctaaatgtaaaaatgaatcgtcagttttttctgatgcggtcatatgcactgtggttaataaaaaaaacatacaagatgaaaaaatcagggagattgaattcaattcactacgtaaaaattatgacgattatttaagagataagcaaaaatcagaaataatacagtgggttctcgaaagtaggagaattgatagattgaagtga

SEQ ID NO: 284421 - DNA, 2949 bp, Morganella morganii
atgccagtttacccaacgccggatagctatgaaaatagtgcatttgaccccactgacgtgggcttcattcctcaacacgagccaggagtaaaccctgcaccgtcgaaagaggaacgctcggttattggcgctgcatttcgtcagtataatatactgtcaggcctgcttaacccagcacctgattttgaagaaattgaaggctatacccctctgaacgaccccaatgaaataaagggatatgaacattgggcgacaaaattttctgactcccgctcacctcaggagacagcatggataaagcatcagatagataacgaaaatcaggatcgacagtttctgtctgaatctgggtggcagggggtattcgcatcattttttgctggcggattagatccggtaacgctgggtagctttttcattcccggtgcgcaggggggatttttagccagggtatcttctatggctgccaacgttgggttgagtacagccgtcggcgaggtggttttgcaccagcagcaatacacccgtacggcggaggaaagcctgatcaatacaactgccggggctttatttggcggaatgataggtagtgcgtcacacctgataagcgccaaagcaaaaacagctgcaaccaatgaaatagcagattcgctatctatggcagtatcaggcggtagtgtcggtgcccagaaggtcggggaaacctccctagctcaggaggccatgcgcgggccgggatgggctaattccgtgatgaaaatgacgcctataggacgagccatgaattcagaggcagttacggtaaggcgggttgctcaacaactggcggaaaataacttcactacagaaaaaaaccttgagggaatagccacacctgcggccgttgaaacaaaagttagaacatggatgaggcacgaggctgctgctgtcgtaacaactaacagcgggtttgctaaataccgtgctcagggcggcacaggcaaacgctttgattttgcctcagacgttggtaaggcaatgagacgcggcgatagcagtaccaatccggttgttcaggagacggcaaaagctttgcgccctatcctggataatgttcgagatgaaatgcaggctgtcgggctgctgggtgctgatttaaaggttgttggtgcactcagttattttccgagaatgtaccgcgtaggcgaaatattatccaaacgtgaccagtttaaaaatattctgattaattactggtcgcgagggaatcaggtagcgaaagaagatttggatatagcggcagacgaggttgttaataaaatcaccggtgcgctcaggccgcaggatttcaccaacgctttttctgtaaaattaccgggctcaacaaaatcgcgctcactgaccattccagacgaattaatagaagattatttagagtcggatgttcgatatgttttgcagcaccatatccgtgatgctgcaccgaacattgaactgacaagggaatttggtgattccgcaatgaccaaagttataaaaagcattgaagatgaatatgatgacctgatgaaaggaaatccggcacagatacgcaaggatcttgaaataaaattttctgataaaaaagctacaatgtcagaaagtgaatattttgatttcattaataaagaattagatatcgcccaggataaggccatcaaagagctggaaaaatcaggccggatgagaaagctgagtaaacaaaaaaaacaggatctcgaggacatcatggccatgcgtgaccgtatgcttggtatctataaacggccagataatccgtccaatacatttattcgggccggaaatgttcttcgcaatcttaattaccttactaaacttggcggaatgacagtatctgcaatacctgatgtcgccagggcaataatggtgcacggatttacaaaaaccttcactgcctatggaaaatggctttccagaagtccggcatggaaagcagggaaagaagatttgaaaaaaatgggtatcggtctggatattgtcctttctgaccgtagcagggcaatagctgacattgcggatggatatgcgcagaggtctgcgattgaggctggcctggactatatgacaggcaaattcggcaacctgacattaatgaaccagtggaacgcatttcataaatcaattaacggtatcaataccgctgatattattcttggtgcggccaaatcagatacccgactggctaagttgggtatagatgaaaatatgctgggtcgtattcatcaggaatttgcgaagcacggtgaaacggtcgacggattgcgaatcagtaatagcaacaaatgggaggatccggttgtacgcggtgcttttgagtcagcagtaatgaaggatgtgaacaacacaattgttactccgggggtcggcgacactccgttatggtccagcggattgtttggtaaacattttttccagtttaaatcatttattttcgggtcattcaaccgttccaccatcggtggtatacaggcgggtgatgctcatttttattacgggcttggcatgcagattatgctgggttctatgacttatgtaataaagcagaagttggcagggcgggaaatagactggtctccggagaaattaattatcgaaggcatagaccgatcaggtgtgttgggtccgttgatggagttcaataatatgattgaaaaagccagcgaaggcacgataggacttggccctgcattaggaacaggtacacagactcgtttttcaagccgcggttggtggggggcagtggcgggcccgacattcggcacactggaaaatctgcgggaaatatccagtggcatattgagtggcaactttgacagtggtcctatcagagctacacggcagttaatacctggtcagaatctactctgggcagccccaatactgaacaaggttgaggatagtattaaataa

SEQ ID NO: 284422 - DNA, 2823 bp, Morganella morganii
atgccaacagtaccaacgtacaaccagcagcaggtcagcagcagcccgttgccagccaacggattcagcgcacagtcatcacctgaacacttcggtgccgggctggcacaggccggtgatcagtatatcaatgccttcgctgaggcaaagcagcgtgcagatatcgctctttcgcaggatgcactcctgcagatacaggaatacgctgatgaccagtttcataatcctgacacggggttatacacaaaacagggtaaaaatgccgttggtcagactgacgaggttatgactaatatttccggtaaatggaatgaactttcgatgcaactgcctgagggggcacgtgaagatgccaccaaacagttcagggtgatgagcagacagtaccataatcagggcagaacctatgagcagaaagagttccagacgtttgaggacggccgggataatgcgattatcgagtcccacgggaaaagtgcatctgataatttcagtaacccacaggcttataacagttacattatgctcggtcaccataatatcattgagtttggccgcgcccgcgggatgagtgatgaggaaatcacattaaaaatcagtgaatttgacaataaggcagctttaactgcggcacaaaatgcaatggctacagatgccatgggaaccattggtgctgttggtgagccgtcagaccttggtggttcgatgcgtgttaccggcgggccgtcagatgatcgtggttcacgtaataataatcccgggaatattcgcatttcagataacaactgggaaggtcaggtcggtgatgatggcgagtttgtccagtttgccagtcctgagcatggcgtccgtgcgctggggaaaaaccttatcacctaccgtaataaaggtgttgttactataaatcagatcatcagccgctgggcaccaaagaaagacggtaacgatacagagggctacattaaatttgtctctggaaaaatgggtgttgatccgaatgtgccgattgatgttactgatattaacaccctgagaagtatcactaccgcgattatgcagcaggaaggtaatcacagtatcagcggagagcaggttgacgccggattgcaggctgctctcggattaacaaggctgccggaaccggatccgtcacagtatcaatcgcgtggacaaaccggaaaagcggttaatgctggtgggtattcctggtggccaatgctgacgcctgtccagcagtatcagatcaggaagcagggggaggcgattgataaggagcagcggcgtgaattggcagaagatgtttctctgactacagaaaatatctacgccgcaaccaatgagggattgcagccagggaatgtgccaagcgagtccacatatatcagagcctttggtttgaataaaggccaacgggcgtatgctgatgtgcaggaacaacttcggtatggcagtgtaatcagcgccgcaagggatttaagtccggatagtcgcgctggtgttctggaacagcatcgtcctaaggatcccgatgcccctgactttgccgctgcacagcaacgatgggaaaggatgcgtgtgaaatttgacgcatttgataaggaatgggaagccaaacaaggcgttgagatggttaccaatgctgttaatcatagtgttccccttgatccgaataataaaagtaataaagcggctactgatagctattatgctgctaatttcagcaaccttgatttgaaagatgcaaatcaggtagcgggggtaattaagctggtcggtagtacaggcattatacctacacaacttttatcaaacctcaacgctgcggcagtaacacaagatcccaaagtggtattgcctgctgctgatctcgtcagccgtttatatgaaaccaatccaacggcaataactgggttgtcaaatgaaaagcagtctttttatttgaatgtcagacagtataaaaatgcaggcgttaatgatgatgatgcggttaagatggcatttaattcagtttataatcaaactgatacaatgaaaatgcagcttgcggcagagaaagccacacctgtatacaaaaaagaaagaaccaaagcagcagagagttttgttgatgctcgaacaagcattttcggaccatcggctacagataaaaaccctggctcggtagcattcttaaatgattacgaagcactttacgatataaacttcgataaatctggcggtaatgctgaaacagctaaaaaaacaaccgatcaacaaattaccaatagttggtcaatcagtgaagttaatggtcaggctcagttaatgaagtatgcgccagaatctctttatcccggaggcccggcaggatggcaggctagacaatgggaagaagaaaaatggaaactgaaatatggtgaagaaaaagagacgcttcgctctataaaagggaaaatcagcgaagtaactggtcgcgtcattggtatttctgatgatacgccaaagccgaaaattggtggtgatattatccttgttgcagataaggacaccttaagaaatagagactatgcaattttcatcaggcaggaaaaggatggcgcgccacagccttattacgatgaatcaggtaaggcaatgcgttataaaccagagcttgaaagttataaaccttatcaggatttactggctgaaatagcaacaaacgatatgcaacaagtacagaggttgaaaaatcgactcgaattccaaggtcgacatcgagagttcgataagcaatatgaacaagcgcacgaacagcgtgtagaaaaacaaaaaaattatttctcatggggaggtaatgaataa

SEQ ID NO: 284423 - DNA, 666 bp, Morganella morganii
atgggaactgaagattgggctttggttgttgcaattatcgctgttatagttggtgttggctcattagcattgacttggcaatcgacaagggcggctaaaagatcaattgatacatcaatcgagttatacgaaaaacaaaagaaagatgataatgagaaaataaagactataaacgagaaaaaactaatagcaaaaataaagataattgagaatgaaatagttagttgttatatggaatacatgatgttttttaatttgtgcactgcaattaaaaccagagataatttttccgtaacgataggcaattactctaaatttatgggtatctcaatagatgcggaaaaacccaatcatgtaaatggattaatacaaccgccaaatcttgattttacaaatgattttattaatgagttgtatcttttagatgaaaagcttgctgagagtatagctttactgaaaggttacatgaatcgaagttcacatattatgaatcatatggttttatgtatggagaatttaggtgctaaccatggcaggctaaaggaatatgtggaaaagttctatacagatatagaattatttaaataccacatggaaaaagttcatgacagccattcaattactggcgtttcactcacaaataaatatctagtagcccatatgtga

SEQ ID NO: 284424 - DNA, 438 bp, Morganella morganii
atgagcagcaaaacagcaactaaaagagtgtggtgcgcaccaatcaccaataagattttttacggaagtatctgcaatgaaactggcaaggttattggcgttaagagcgatgttacaggtgatgcgttgcgagctgtagcagagcacttgtttaatcagccgcgagtgctttcgtttactttaaatagcggacagatcttatctgttaagtcgtgtgttactgatagcggggtgcctgataactctgttgaagatgctgcgtatgacctgcttcacgttactcagcgcatggtaaatcagttctatgcggctggcgttgaatcaaaggaagaatcattaaatccggcagaagaattgctgtactcggcagagcaggctattgcgaaagcaacaggtgttaaacaaacaatcgtgacatgtcacagcgatattaattaa

SEQ ID NO: 284425 - DNA, 765 bp, Morganella morganii
atgggtgagcgtattgcattaacaaaaaaaataagattcgaagtttttaagcgggacgcatttacctgccagtattgcggagaatcggcaccaaaagtagttctcaacgttgatcatataaagccggtcagtgctggtggtgataacaatgtgatgaacctgatcacctcatgcttcgaatgcaaccaagggaaaaaggccagattgctcagcgacgattcagttattgaaaaacaaatggctcaaatcaaggctgtgaatgcgaagcgtgagcaactggaaatgatgctcacctggcgtgatgaaatgattaagttcactgaagatcaggaggtaattgtttcccgtgaaattgagaagcttatccctggattctcaataaacgatagtggtaaagcaaaggttaagaagtggttggcaaagtatacggctgaagaggttattaaagcggtagatttgtcggctgaacaaaaattatgcgatggcattaatgatgattcagctggggcgttcttcgcatatatcccaagaatagcagctatgcgccggaatcctcccgagtatgcaaagctgtattacatcaggggtattttacgcaatcgtgtatacgtgaatgaaaactcagtaatggcgctgttacggtcatggatagatggcggtttgaatatcgaagaactggaagatctggcgaaaacagccagaacatggacgcaattccgggaaacagtagaggcgtttgtctatgaagcggatctcgggggttga

SEQ ID NO: 284426 - DNA, 315 bp, Morganella morganii
atgaaaaatcgaattcaacatattgaaccacaacgtgacgagtacggattctggagccatccggaaattccggtcatggaaacatcagatgaagttaaagcatggctgaatgaaaataaccttgagtacgggcgtaccaatctggaagacgacctcgacagtgatgaccctgcatggattgcctattttgaaaaaggcgaaccgaattgctcattatggcaaccaacacccccggttggcgacggttggattatggcatggataaccgatacagatgacggcccagcgtgtgtgtgggttcgctataaagattaa

SEQ ID NO: 284427 - DNA, 324 bp, Morganella morganii
atgaacaaacatcgtgacaaatcagactttgagattaataaggctgtggctgttaatattaatggaactgacgctgttgtagagaagttcggtataatatttatcagtgatagtgatgcgatggtgagcttcagaccctgcaacaatccatatgacgcaatgccgattattattgagaacaggatagctatctgtcctattttttcttctgattggtgtgcaacatccgattgtgatgcttatcgagttattaacaagaacccataccgcgccgctatggaagtattcctgatgatgaaggaggcggagaatgaaaaagtatga

SEQ ID NO: 284428 - DNA, 123 bp, Morganella morganii
atgggttgcctgtccccattcccacggctgactgttgctgacagccagggtaacggagtcatgtttgctgcgtccggcattatcaaaggtacggatttttcctttatcggagtatttatctga

SEQ ID NO: 284429 - DNA, 1203 bp, Morganella morganii
atgagctgcaataaaattattgattctgttgtaaaggcaggatactgcattggatgtggggcatgtacatatcaatgtaagaataaaaatttaacaacaaaaattaacaatgatggattctatgaagtttattccttaaatagctgcaataatgattgtgactgccacagtataaatgtatgcccatttaatccaactccagaagatattgtaaaaaatgaaaatagcatagctaaaatatttttaactacatcccaaaaggatcataaaaaaataggtcactataataatatctatgctggttattccagaaaatatcgtgcaacatcttcatctggcggtatagcaacctacgcattagcgtacttattaaaaaataaattagtaaaatatattattactgtacaggaatcaaatttaccaggcaattatttcgaatataaaatcagcaattcaattgaagaaatcacagcaacctcaaagacaagatatagcccagtaacactggaagatgtattaaaaaaaataaatagccttgatggaaatgttgcaatagtaggtgttggttgttttattaaaagtattcgattactacagcattacaatcccgaactaaaagaaaaaatttcatttctcgttggtattatttgtggtggtataaaaagtaaatttttcacagaatatttggcgaataaaataaatatattacctgaagatatacacaacccagaatatagaattaaagatcctgaaagttcagctaacgattattcttttggttgttttgataaagacaatcgacgcagaacaataaaaatgaaaactgttggtgatatgtggggaacaggattatttaaggcaaatgcctgtgatttttgtgatgatgttaccactgaattagctgatatctctgtcggagatgcatggttaaagccatactctgatgacggttatggctgtaatgttatagtcaccagatcaattattgcagatgaaataataaagtatggcataaataatagtgaattagaaattcataatatatcagaagatatatttatttcctcccagagaggaagctataaccatcgacaagatgctttacattatcgaatacaaaaaaataaaaaaaatgcccctcctctacctaaaagaataataactactagaaatgaaattttttcttttagttcgggattgtaa

SEQ ID NO: 284430 - DNA, 3579 bp, Morganella morganii
atgcaacaatcagataatatcagtcctcaggcgccgtctctgccgaaaggcggcggtgcactgaccggactttccggacaggcgggggccgccgggccggacggcgcggcgtcgctgtctctgccgctgcccgtcagtgccggacgcggctatgccccttctctctcactcagctacagcagtcagggcggtaacagtgcctttggtatcggctgggatgtgaatcttcctgcggtcagccgccgcacccgtaaaggtgttcctgcttataccgctgacgatgaatttctggatcctgccggtgaagtcctggtggctgtccccggcgcggcggataaacgtcagaccctgctgggtgtaaaactggccgtttcttatcagataactacataccgcgcccggacggagcgtgatttcagccgcctggaatactggcagccgcaaggcagtaccaccgaaccggatttctggctctggtatgccgcagacggtcaggtgcatctgctcggttatgaatctgccgcccgtatcagtaacggcagccacacggcccgctggttactgaacgcctcggtctccgccaccggtgagcagatttattaccgttaccgtgcggaagatgacatcaattgcagcgaccgggaaaaagacgcccatccgggcagccacagccagcgctatctcagtgaagtccattacggcaatatcaccgccggacgcacattcccttgtttcaacggcaacgatgccaccaaagccggctggctgtttgtgctggtgtttgactatggcgaacgcacccttaaaccggcagaaaaaccgctgtttaaagccggttccggctggttgtgccgtcaggatccgttctccggttatgcttacgggtttgatctgcgtacccgccgtttatgccgccaggtgctgatgttccaccgcctggagacgctcgctgaaaaagcagaaggtacggatgtaccggcactggtttcccgcctgctgtttgagtatcaggaaacccacgttgtcaccacactgactgccgcccggcagatggcgtttgaggatgacggcaaaatgctgtctctgccgccgctgaccttcggctggcagacctttgattttccggagtctgtgcagtggtctcagccggagatgggtaaactcaatccgcagcagccgtggcagtatctggatctgcacggtgaaggtatttccgggatcctgtatcaggacagcggcgcatggtattaccgcgccccggtccgtgataccgggagcgatgatgtcaatgcggtaatatgggataaaccgcagcggctcgataatattcccgccctgaaaaacggtgcgatgctgactgatcttgacggtgatggccgtctgcagtgggttgtcacacagcccggcgtacacgggcaataccgtcagcagacagataacccggaacagtggctgcattttacaccgctcagtgccctgccgctggaatacggccatcccgccgcacaaatgaccgatatcgacggtatcggtgccaccgacctggtgctcatcggtccgcgcagtgtgcgcatctggccgggcagcaaagacggctggctatccgccaaagatattccgcaatcagaaaaaattgtcctgccgtcaccggacggcgatgccgccacactggttgctttcagtgatgtgctcggctccggacaacaacatctggtacagatcagtgcgggcggagtgctttgctggccgaatctgggtcacggccgctttggtcagccgctggcactggacggtttcagcaaaaaacagacggaattcaatgccgcatatgtttatctcgccgatattgacggcagcggtaccgccgatattctgtatgcccgcagtgattatattgaaatctaccgtaaccgcagcggtaacggttttgacaaaccagtcactgtgaagctgcctgccggcgtccgttacaataagacctgccgtttacagatagcggatgtacagggactgggggtcgccagcctgctgctgacggttccccataccgtaccgcgtcattatctgctgcatctgaccaccgaaaaaccgtggctgctgaatcagattaataatcagacggggatgtcgcagaatctgcgctaccgcagttccgcacagttccggctggatgataaaacccgcgaaccggtttcatatctgcctttcccgctgcatacgttgtggaaaacagaaactaccgatgaaatcaccggcaataaactggtaagtgaagcccgttatcaccacggtgtgtgggatgcccgtgaacgggagttccgcggcttcggctgtgtggaggtactggattcagataccaccgccgcccgcgccaccagcggggtactgacgatgccggtactgacccgtaactggtatgccaccggttatacccctgttgatacacaactgaaaaatgagtactggcagggcgataaaaatgcctttgccgggtttgttacgcggctgacaaccggcagcggtgataaagaatccatctgttctgatgccctgatgcaaaaacaggcattctggctcagccgcgcgcaaaaagggatgcagctgcgcagtgaggtatacggcaaagacggcagtccgcaacaggatttaccgtacagtgtcagtgaacagcggctgagtgtccgtctgatcacaccggatgcagatatgccggtagtccggccgtctgtatcagaaagccgtgaatatcattatgaacgcatggctgctgatccgcagtgttcacaatccgttatactcagtgcggatgagtacggttacccgctgcgtgaagcgacgattcattatccgcgccgtccgaaaccggcaaaaaacccgctgccggataccctgcccgcgtcactgtttgattccggttatgatgatcagcaattgcaactcattgtatcgttatcacagcatgcacggcaccacctgaccaatctgaaacaggaacagtggctgaccgggcagcctgatgctgatcgcagcgatatttttgttctgaaatccggattagttccggcaacgggcttaaatacggaaacactgcctgccctgctcagcaataaccagtctgcacgccactttgccggacaacagaggacttactggctgaataaagataatcagccgtcagtaacagttccgtcctggccgccgcgccggagttatacggatactgcagagctggatgagacgattaccgcagccataaaatcaggtacagatatcacggagcagttactgaaaaccggctatatcaaagcggattacctgtttgccggtacctcagaaacaggaaaaaaggtctggattacgcgctccggtcatcagacttacggtgcaccggaacagttcctgctgccggttgccgtccgcgataatccgctgatcggggaacgtcatctgacccgcgataaacatcactgtgttatcactaaacacaccgatgcctccggacttatcactcaggcaaaatatgactggcgttttctgtctgtctgcgaaataaccgataccaatgacaatatcagctag

SEQ ID NO: 284431 - DNA, 207 bp, Morganella morganii
atggattattttttagcaccgacagatagcggtataaaatctgttttgcacaaaaaaacatgcaagaaattacaacaggttaaaggtgttgagtatatcggatacttctggggagaatatagagctatccgacatgccaaaattatcacgaaagacgctgttatcttatgcacaatatgcttgaaccataatgatgagaaatactag

SEQ ID NO: 284432 - DNA, 345 bp, Morganella morganii
atggcacgtctgaagcagttacagcaccgcgttcccgaacggtttcagaccgacaacggcaacgaatttctcacaaaggcgctggataaatgggcatatgaaaacggggtaacgatggacttctcccggcccggaaagccgacggacaatgcgttaatcgaatcctttaatggtagtttccgtgacgagtgtctgaacgttcactggttcttgtcgctggaagatgcgcaggaaaagatcgagtgctggcggcaggaatataaccggcaaagaccccattcctcattaaataaccagactccggaggaattcatccgaagtctgcaaaaaggtccggatctctga

SEQ ID NO: 284433 - DNA, 477 bp, Morganella morganii
atgaatcatacaaagatcttagtcacaggcggtcttggctacattggtagccatacctgtgtgcagatgattgagcaaggaatgcagccaattattttagataatttatgtaatgccaatccagaagtactcaaccgcattgaaaccatcacaggtacaaaacctgtcttctatgccggtgatgtacgtgataaagctattctggatacggtttttgctgagcaccaaatcacatcagtgatccactttgctgggttaaaagcggttggtgaatccgttcaaaaaccgattgagtattatgataataacgtcaatggcacgttagtattacttgccagtatgcaaaaagtaggcgtaaaaagcttaatttttagctcatcagccactgtgtatggtgatccagaagaagtaccattaaccgaagactctaaagtcggtggtactaccaacccatatggcaccagtaaatatatgtga

SEQ ID NO: 284434 - DNA, 2079 bp, Morganella morganii
atgaacacgacaaaaaccagctccgctgcctcggacgaaatcgatctgctggcactatttaagatactcaaatctagctaccttaaaatcggcttttttaccctcttttttattgttattggtgccgcttatagttttctagcgacaccaatctatcaagctaatgcgacactgcaatacgataaaatgagccaagtctcattgttagatcaaatgagcgatgtgatgccatttgctaatagtaatagtcaagtggattccgaaattgaggtcattaagtctcggatggtactcggtaaaacggttgcagaccttaatttagatacccagatcgcaccagctggttttttcgatagtctttggggagacaaagcttctgtcgccatttccctctattctttacctgaacatcttattggtgagcccgctattgtgacctatttaggcgaaaaccgttatgctcttcatattgataaccaaaccgttgaaggaacagtgggcgaactcctaaaacaagatgaaatcagcttgctggtatcctcaatcaatgctgaagccggacaagaatttaccttatttaaaaacacccgctattctactatcgaaaacttacgaaaaactttagcgatcgcagaggtcggtaaaggcactggcattatcagtatggaaattaaaggtgctgacaaagcagaaaacgtgcaaattctgaatagtattattcaaaattatgtggaacaaaataccgagcgtaaaaaagaggttaccaataataccttattgttcttagatgaatatttaccgaaagtaaaagctaaattggacaactatgaaaaccaattaaatgctttccgtaaaaagaatgaatctatcgacctgtccttagaggctaaatcggctcttgatagcgccttgcaagtcgaagagaaactcaatgagttaacttttaaagaggtagagatccaacagctctatacccgtaaccaccctgcttaccaatcattactggataagcgtcagcaactgttacgtgaaaaagagaaaatcagtaaaaatatccaaaaacttcccaatacccagcaacagatagtgcgtttaacccgtgatgtcgaatccgagcaagctatctataatcagttagtagccaaacagcaagagctgagcgtattaaactccgggatcacagccgatgtacgcattattgactcggcagaatcccaacctaatgccgtggcaccgaaaaaatcattgatactcgttcttgccactatcctcggctttattgtgggttgcgcttatgtgatcgcccgtgagttctttaataataagattaaaggtactgaggatattgatgcattgggtgttaacgtctatgctaccattccattctctactcatgagaaaaaattaattgcagcgggaaataagcgcccacttgcattggtaaaaccagccgatacggcagtagaagccatccgttccctgcgtaccagcgtttacttctcagtgatgaacaaagggaataacttggtgatggtcagtagtgcgtcaccgggcgtaggtaaaagctttgttacctctaatatggcggttgtattagctaatgcgggtaaaaaagtgctcttaattgataccgacttacgtaaaggccgtattcataaagcctttggtttaagcaataaagcagggttatccgaatatttggctcagcaagacattacgcaaccgaccatccaccgtagtgtgattgaaaacctagatgtgatctgccgtggtaaaaatgtcactcactcttctgagttactgatgggggaacgttttaaacacctgctcgacacggtgaaagggcaatatgatatcgtggttatcgataccaccccaatcttagcaatcactgactccgcgattatcggtaagtacgttgggacctcattgcttatcgcctattatggtgtgaacacggtgaaagatattgagctatcgctcaaacgctttaagcaaaacgatatcgaaattacgggtgtgatcttaaatggtatcgatgccaagtcagacgattataattatgtctatgagtactag

SEQ ID NO: 284435 - DNA, 429 bp, Morganella morganii
atgtttaacaatattctagttgtttgtatgggtaatatctgtcgctcccccacaggggagcgtttattacaggcccatttccccaataaaaaaatacactctgctggcattattgccaaagacgatcgccctgcttatgacagtgcaatccgtatcgcacagcaacatgatctctgcttagacaatcatcaatcacgacgtttaaccagtgaattgtgtaaagaagcagacttaatcctagtgatggaaaacgatcatattgataggatccatcaacagtttcccgagactcgcggcaaagtcatgttattcggccagtggcttaataaaaccgagatcccagatccacataaacgcagtgatgaaatgtttgaacatgtttatcaactgatggagaaagccgttatacactggcaagggaaaatttaa

SEQ ID NO: 284436 - DNA, 1155 bp, Morganella morganii
gtgcttagtaagcgtctttcattgacactactcgcagccagcattttgctcaccggctgtaccgttacccctggtgtctatatgtctacatcaggcaaaaatgtcgtcgacactggtgatcgtgatatctctaaatttgtggatatctatccgatttcaccaaaactgctagatgagatgtacgtagcacccgttatcgccaaaccaaaccctacacttgaaaagcaactttcaacttatgaataccgtgtgggagtgggtgacgtattaaccatcactgtgtgggatcatcctgaattaactattccagcgggttcttatcgtagcgctgccgactcaggtaactgggttcattccaatggtactatttactatccttatatcggtaacgtgaaagttgttggcaaaacgctgtcggagatccgtaatttagtcagcagtaaactggctacctatattgaatctccgcaagtagatgtcagtattgcggcattccgctcacaaaaaatgtatgtttctggcgaagtcgctaaaccaggtacattaccaattaccaatatccctttgacagttctggaagcctttaataacgcgggcggtctcaccgaaaaagccgattgggataacgtcgtactgacccgtaatggcaaagaaattaagctctcattgcaatcattggtacagtatggcgatatgactcaaaactacctgatgatcccaggcgatacactttatgtaccacgcaacgacgggcaaaaagtattcgtaatgggtgaagtcggtcagccaaataccctgactattgatcgtgcaggtatgagtatcactgaagcactgagtaaagcagggggtaccgatcaaactaccgctaatgcaaccggtgtgtttgttatccgcccaattaaaaaccaaacctctggcgataaagaacttgatgcgttgctaccgaaaaaaatggcagcagtgtatcagttagatttatcggatgccacggcaatggtgatgggtacagagtttaaactacaaccatacgatctggtctatgttaccgccgctcctgtggtacgttggaaccgtctgatcactcaattactaccaaccatcgcgacctataatcagttaactgaaggtacaaaacgtattcacgactggtaa

SEQ ID NO: 284437 - DNA, 1167 bp, Morganella morganii
ttgaaaatagcaattgcaggtacaggctatgtgggtctgtctaacgccatgttactgtcacaaaaccacgaagtggtggccgtcgacatcgtgcctgaaaaagtggcgatgctgaacaataagcaatcgccgattatcgataccgaaattgaacagtttttgcgtgaaaaaacactcaatttccgtgcaacgcaagatattgttgaagcctatacgggcgcacagtatgtgattgttgccacaccgactgactatgacccgaaaagcaactacttcaataccaagtcagttgaatcggtcattcatgatgtgcagaaaatcaaccctacagccaccattattgttaaatccaccatccctgttggctttactgagcgcctgcgtgaagagtttggctacaccaatgtgattttctcccctgaatttttacgtgaaggccgcgcgctgtgggataacttgtacccatcacgcattgtggtgggtgaacgctctgagcgagcggaaatctttgcggatttgctgctcgaaggcgctatcaaaaaagatgtccctgtgctgtttaccgatggcactgaagcggaagcgattaaattattcgccaatacttacttagcgatgcgtgtggcctatttcaatgaattagatacctatgcagagagtcgtggcttgaatgcacgtcaaatcatcgaaggggtgtctttagacccacgtattggcagtcattataacaacccttcatttggttacggtggttattgcttaccgaaagacaccaagcagttactggctaactatgacgatgtaccgaataacctcattaatgcaattgtggaatctaaccgtacccgtaaagactttatttctgatgcgattattgccaaagcgccacgtaaagtcggggtatatcgtttagtgatgaaagcgggctcagataacttccgcgcctcggcggtacaaggtgtgatgaaacgcatcaaagccaaaggcattgaagtgattgtgtatgagccagtgcttaaagaggacgagtttttccgttcaaaagtgtaccgtgaccttgaagcgttcaaagccaatagcgatattattttagccaaccggatggtgcctgaactcgaagatgtcgcagagaaagtgtatacacgtgatctgtttggcaatgattaa

SEQ ID NO: 284438 - DNA, 576 bp, Morganella morganii
atgcctactgaccatcccgtttcattgtatgcggcaacgaagaaagccaatgaattaatggcgcattcctattcacatttgtaccagctcccgacgaccggtttgcgcttcttcacggtgtatggtccgtggggccgtccagatatggcactattcaaatttaccaaagccatcttagccggtgagccaatcgatgtttataataacggcaatcttagccgtgatttcacttttattgatgatatcgtggaagggatcatccgtatttccgatataatcccacaagcagacccagaaaactgttcgctttcacctgcacaaagcagtgcgccataccgtttatataatattggtaatgggcagcccgtcaaattgacggactttattgctgcacttgaaaaatcattagggaaaaaagcgattaaaaactttttaccgatgcaggctggggatgtgtacaccacttgggcggacactgaagacctatttaaggtcaccggttatcgtccacaagtttctattgagcagggcgtacaggcatttgtcgattggtatcaatcctactaccgcctgtaa

SEQ ID NO: 284439 - DNA, 303 bp, Morganella morganii
atgctgaagctgaataatattttcagggttatactgaccataattatctttctcagttcattctattatttttctgagcaagaaaggataaataacttaaatggttggttacaattgattatcggcgggggagttttgactcctttggtaacctacgcttggaatctaaaatcaaaatttgaaaaacttattgaaagtgaagggttgaactcagttcaaattgacaggttaagtaaaaaatttcaaccttcacaagaaagattggatattggatactattttacgtttttagcgctgggatga

SEQ ID NO: 284440 - DNA, 249 bp, Morganella morganii
atgactgaaaatcaacttgctgaaatgtttgagaacatccgctcattaaaggccatgacaaaagaagtcatgactgtaaacgagtgcgcccaatacaccgggctctccgtatcgtatctctacaaactaactcatagaaaactaataccttttttcaaaccaatgggcaaacgtctttacttcaagcgtacagaaatagaccagtggttgctgcgtaacaagcaaggagagctctatgaggcaaactag

SEQ ID NO: 284441 - DNA, 141 bp, Morganella morganii
atggcaagagtgttagatgaaatcattgagcatgagaaactggaggttgttcagcaagctcacgaaaaagcaaaggaaattataaaagatattgatgagaaggctgaagcgtcagccgctggcgataaatcagacggctga

SEQ ID NO: 284442 - DNA, 411 bp, Morganella morganii
atggcatatcatttacatcttaattttgaaaaaaaagagtattttttatcagatggcgcgtggtcaaccaaagaaacgactcagggccttcttctgccaataggtgcgtatcaacacgccgatgaaaaaagtgcatggaatgccgtcgatgaacttaaacctttggtagatgagattcttgataaggttgagattgagtggaacgactggatgactcaaaagccaacgatcatctacaaggaagatgttaagttattgataagcaggcttaaagaggaattttatgttaactcattccactcttacttaaacaatggaaaatttagtgaacaacataaggaaagggctagtgaagagttttacgggaatttacctcatctcgaagatgaaggttggttcaacttcagttga

SEQ ID NO: 284443 - DNA, 2109 bp, Morganella morganii
atgaagaaaaaactttcacatgtgaaagtttttgtccccactgtcttggccgcagctttcacactcacagcttcaccaacacgtgcggataactacctgatgaagtttgtcgtgaacggacaaaacaagggggagtaccttgtttctcgtgaagtagatagcgccattgctgaaccagggctatggcaagccgctggtgtaaacacaacagcatcacttcccttggaaaggctaaacaacattggtcatgccaaaattgtttggtcagaacaaaccatctacttttacccacgcaaaaacgcagccaaagccagaaaggtcaaaccagaggttacaattgagccaaatgtatccaatctggatgtaaaatcctttgactactttctcacctatcaaagcaaaggtgatatttcgggtagcatcacgggaacaggccgcgtcgcagatctcgatgttgatgttagagcagggttaggagggcaagaatcatatttctccagccagtggcacgacgaggagaacagcaatgtcaaagacattgaagtcggtcgtgttcagcgttacgggctggatggtttctcactcacgaatgaaagtagcctcgccactggatcattttctaatgaccaaattgagctttattggcctgttggaacacgggtagatgtataccgtgacgggacctatttacaatccttggttctggatagtgagccgttctcttacaaaatcgaactggattacagcaataatcaatataaatttgacgctgtattgcccgatggcacaacggacaccaaaacagtagaaagagccatttcgggacgacttgcacccgtaggagggctcaactatcaagtggctctaggcaagtctccaaccactgatgaaagcaagttaatcggacgcttgagctacgggatgaccagtgaattgtcacttttcgctggtcaggatgagcaggaaagacagtatttttccgctttatattcaagtgataacttttcatttgagcctgcttggtatggcagtagtggatacgctctgagcggttcttggcaggatgacgatctttcgatctttggacaactaagtgatttagacaactatcaattacgctctgttagtgtttcatcacgctctctgtttcaaccaactattcagtactcctcccgcacgcacgacggctatgaaactcaggaaacgacgctacgcacgtatcacagcacgcgcattgaggcactgaatacatcaatttctttatctccatactattcgaatcgtttaatcaatggtgtcagctccaatatctttggagggcggatgcttgctagcatggcagaaggttggcaggttttggcgtcttatgagcgtgaaaataaagatcttgatggtattggagatatagaacgcttcagtggagaggtatcaaaacgattcagcttggggcggatcacctaccgctacacggcaagcaattttggtcatgggtgggaaggtcagcaacaaagcctacgttctgatctttggaactggaaatttgcaactgtgtcagcttcgttcaatcatttgtctggtgggggtaacaacattactttatcaatcagtggtagctttggccgcacgggattctcaagaacgcctcagcgaaatcaagctcagttggagctatcaacctgtgaagatttaaaccttaacggcatctgtgaaccatctgagccagaagttgaaggcattaaagcaacagtcgctgggcgggaagtagtaacaccagccatcattggttcactcacaccttatcaaagttacaccattcaggtaggtagcggctttaacttgtcccctcgttacaaagcagttgaatcaacaagattgattagaggcggagtaaataggttacgtttaccgttaactgaaattagagaagttgaaggccagcttgatcgagacggaattcgagtcgctctcgttgacgctgaaaagggagatgttctagcggaacaaaccactgagtttgggggatggtatctgttttatgcaccggctggacgcaaggtcaaggttgtggaagaacctgagttaaaaccggctaaaaactttcacatgtga

SEQ ID NO: 284444 - DNA, 588 bp, Morganella morganii
atgcaaatttttaagtacgccaccctcactaccgttattttcctgtcgtccgctgccgcttttgctggtacagggacgggaacttctcaaatttcagcaacaccgccagctttgtctgtggtcgaagttcagccgtacacgatgacgttggaacgcctgcccggagccgccccaacaggcgggttctctttaaaaagttgggcgacttatctggcgcaaaatccggaggacacagtacagcccggctgcttaaaagtgacaggagatatggataaatcggtcgggattaccatcactaacctgtcaaatcccacagcgccgggtggagcaaccttaagcttctctggaacaccaagaatcaacctaactacttcaactgttgactgcgcagatgcgatttccaaaacaagtacaggcgtcggtataaacgcggcaccagttacatcaactacttcatcttctggcgagctttatatcgcctggtcgtatcgccaacccgccacagcctcatcaggattcatgcagctcagtgcatgggaagaagggatcttttctggaaccgtcgatatcgccgtcgattaccaataa

SEQ ID NO: 284445 - DNA, 567 bp, Morganella morganii
atgcaatccaacatcttcaaaccattaccatttttaccagctcgacatcatcttaaccgatgggcgtttggctattaccttgtaaaaaaagggttttctacttgcattgtcatggaggaaacatcctttacttataagcaaatcagaaaaataagagaagatttagccatcaaggagcgtcgccgagcgagttatgggcaggatatcctgtcaaaggaggattggataaagtactcggcggcaattaatgtttatgttgaacttagtgaaaaaatggctcacatggaagctgtcataaaagcatgtgagtggttaagaagtgaaaaagactttgatatatctggcttttacaaagcatgtaaagaaataaaaagtggtgaggctttttttgttgaatgtgtacattgtcagagtgaagtttttagtgggcctggattgagagataaagttgtcagtaaatgctgtcctacttgtggaaagagtaattgggagcatcccaaagcagatcaccgtcatggacatattgttacccgccctaaatctggtgaccaacaaccgttgttttga

SEQ ID NO: 284446 - DNA, 126 bp, Morganella morganii
atgtacacacaaattacaaaaattgaaatggtaattgctggcttagtaatcgcaagtttgtttggagtggacataattcgaatcgccagcaaaatatttacctccatattaacagtaagtttttaa

SEQ ID NO: 284447 - DNA, 234 bp, Morganella morganii
atgaacgtacaaattcacccttcttatttccgcaagattgtattgtcggaaccattttcacaaatgatcgatgtggctgctgcgacaggctattcatctcatcatgtttatgtttgcttgtcagttgctcgcgctgcaaaactgcccacagcatgtgtaaatgtagcagttgaagcggagattaatcgtcgctcgatggtgcgttctgctcgtgtcgctggaggtgtggtatga

SEQ ID NO: 284448 - DNA, 858 bp, Morganella morganii
atgagcagcagggataagttgtcgactgagttatttaacgcagcggacctcaccagggccatcgacggaccaagaatagcgatccctcgcgcatcaattcaagctctgggactggaagcggctgcatttttacaacaggcgtcgtttctgagcagcctcaaatcaaattctggcggatggttcgatctgcctgccgagggagagcctgaccccgaagctaccaatatttttgcagagcttgggagctggcaagcctgtcttggaattcagagagatgccctgcgtaaaatccggcgtaaactttgtgatatgtgtttgctggaggagaagcgctcaggcgttcctgcacgacttcattaccgtgtaaatcatgatgcgtatatacagtttcttgctgactgcggtcagaaaatccagaatgcggaaaatcgcaaactggatagcgattattcgcaaactagtttgcacggttgtcgcacacaagaatgcaaggtttcagcaaactattccagagagatcccagagagcttcaaagatattaataacacccgctctaaagcgtgttttgattttgttgatgctcttgtgtcgcggggagtagatccggtccacgcccgagagtggcaagcaatccgtaagaaaaaacgcgcgactctcacaaaggacgctgtgctgctggtagagcgggaggcggcgaaagttggcatctgcctaggcgacgcgattgaaacgtgtgttctgagggggtgggctggccttaaggcagattggctggcgtccaacaacgagcgaagctcacaaactcgctcgcttgttgaagacctaactgacacaagctgggcacagggaggatggtga

SEQ ID NO: 284449 - DNA, 729 bp, Morganella morganii
atggcactaaaatccattgcagaagttattgagcttgatcaacagaagcgtgtcgtttgctcggcaaaaaacgcaaggcctacacagtcttcttttcgtgaagtggaaagcaaaccagattctgatcaacttcaagctacggcaaggatcatcaatatcttatttgccgagctccagtcatgcttccccgcttggaaggcgacattcccgagcaaatctgacgttgacgcggcgaagaggacatggaccaagggcttgctggaagcaggtatcataactgaacaacaactccaatgtgggctccggaagggtcggcaagcagaatcaccattctggccgccgcttggacaattcgttaaatggtgtcagccagatcctgcggattacggcctaccaagcgtcaggcaagcatacatagaagcctgccggaactcgcaccgcctatcagaaatgacgaatgaggagtggagtcaccctgcggtgtatgttgctttaaaaaataccgggacgtttgacatccgaaaccgcaaagaagcagaaacctggccgatttttgagcggaactatgaaattgctgtccggcgcgcccttgctggtgaagatcttaatgcagaaatccccaaggcactgccgccacggccttcaccacggccagtagaccctgaagttgccaaacagcatttagaacggttgaaaaagatgttgaagggcgggcaggatattctttag

SEQ ID NO: 284450 - DNA, 1626 bp, Morganella morganii
atgaaatttaaagcagatcaaacctcacaaaaacttagaggtggctattacaccccacaaaacctagccgattatgtaactaagtgggtattaagtaagaatcctaagaacatacttgagccgagttgtggtgatggtgtgtttattcaggctatagctaataatggttatgactctaacattgagttgtcttgctttgaattgttcgacacagaagcatctaaggctctcgatcgctgtaaactgaacaatttttctaatgcaacgattacagagggtgattttcttgtttgggcgaatgaacaactcaagaaaaaacaaccgatttttgatggtgtgttaggtaatcctccgtttatccgttatcagttccttgagaaaaattttcaagaacaagctcaattggtctttgaacaactcgatctaaaatttacaaaacacactaatgcttgggtcccattcctactatcttcattagcccttcttaaacaaggtggaagaatgggtatggtcataccttcagagatttgtcatgtaatgcacgctcagtcattgagaagctacttaggtcatatttgctctaagattgtgatcattgaccctaaagagatttggtttgaagatactctacaaggtgcggtaattatccttgcagagaaaaagcaagatccaaatgaaacaccgcaaggtgtaggtattgttagtgtaagtgggtttgagttccttcaagatgatccagacgttctctttagcgatacagttggaatcaatggtgaaacagttgaaggtaaatggactaaagcgactctcgatattgacgaacttaagctaattaaaagggtaattgctcaccctgatgttcgtaagtttaaagatatagctaaagtcgatgtaggtattgtgactggagctaacaattattttcttgttgataatgaaacagttaagtcttatgagttagaacgttttgctcaccctatgtttggcagaagtcaacattgccccggtattatttatgatgaacagcagcacattaaaaaccagaagcaaggtctaccgaccaatttcttatacataaatgaagagtatgaagacctttctgaaagtgtcaaaagctacattgcgttaggtgaagccgaagagtatcacaagcgttataagtgccgtatacgtaagccctggtttaaggtcccttctgtctatagcgcagagattggaatgttaaagcgttgccacgatgcgccgcgcttaattcataacaaagttggggcatacaccactgatacggcatatagagtgtcttcaacgattactagtgctgagaacttagtatgtagttttttaaaccctctaactgttattacagccgagcttgaaggacgtttttatggtggtggtgttcttgaacttgttccatcagagatagaaaaattatatatccctattgttgaaggattagaacacaacgttgatgaactcaaccagctgatcaaagatggccaaatagaaagagtgattcgacaacaaggttcactaattttagagaagcttggttttactcaggaagaaaatgaaaagctagtagagatatggaaaaaacttagagacagaaggctacgcaaatag

SEQ ID NO: 284451 - DNA, 2997 bp, Morganella morganii
atgaataaaaaagctcagctacaaagactaattgataaatacgaaaacgatattgattattatcgttctgccagatacaacgaaactcaactaagaacggattttttggatcaactattccttattctcggttgggacataacaaactcagcaggaaaacccacaaacgaacgcgaagtgcttgtagaggaaggtttaaaagcccgagcaggcgaaaatactaaaaagccggactacacgtttagactcttctctgagcgtaaatttttccttgaagccaagaagcctagtgtcgatgtatcaactactatagagcctgctttacaagttagacgatacgggttcacagccaagttgaaaatttctgtgttgtcgaacttcgagtatacggcaatttatgactgttctaaccaggttaaagaaactgattcagtaacaaactctagaatcaagttgtatcacttcactgaactcgtagataagtttgatgaaattaataaccttatcggtcgtgaaagtgtttacaatggccattttgacaatgaatggtcagaaattgaaaataagatactgagattcagtgttgatgatctatttctcaaacaaattaatgattggcgtttacttcttgcgaatgaatttttgcagataaaaaacgaacttccagaagaaaaattaaacgaccttgcacaaaattacattaacagtattgttttccttcgtgtctgtgaagacagggacttggaagaatacgaaactctttatcactttgcacaaaataaagattttcaatctttagtcaaaaaattaaaatcctcagacaaaaaatataattcaggattgttctcgttagaatacattgatgaattattaaacaatgctaactcttgtatttggagcatcatagaacaattatacttcccacaaagcacatactctttctccgttttctcttctgatattttaggtaacatatatgaaatatttctgagtgagaaagttcgtgttgatgaattcggaaacgttaagattcaaccgaaagaggaacatatcgatagagacattgttactactccaacgcacattgtaaaagaaattattagaaatactgtcgtagaatactgcaaaggcaagtctgatattgagatattaaattctaaatttgctgatatcgcctgtggttcaggtgcttttattattgaagttttccaattcatccaggatatttttgttgattattatatacaaaatgacaaatctaaacttcaacaattatctgaacacacatataaacttaaattcgaagtaaaaaaagaaattctatgtaaatgtatatatgggattgataaagactataacgcaacaaaagcttgtacttttggtttattgctaaagcttcttgaaggcgaaactaaagaaaccattggtaaaggcacacctattttgcctgcactggatatgaacattctattcgggaatagcttgatagatagtggagacaatgttagacaagaagatattttttcaattaatccatttgatttgcctaaccaccaatttgatgtgattgttggaaaccctccttatatggcaactgagcatatgaatcagttaacgccaaaggaattagatatttacaagaggaaatataaatctgcttttaagcaattcgataaatactttttatttattgagcgttcaatgcaacttcttaaagaacagggctatttaggctatattcttccgtccaagttcataaaagttggtgcaggtaaaaaccttcgcaagcttttatcagacaataaatacttatctaaatttatttcttttggatctcatcaagtatttaggaataaaacaacttacacttgtttgttatttttaaataaagcaaatcacgataacttttctttttatgaagtaaaagacttcaagaaatggttaactcgtgaagataaatcgctattatcaagcacatatcaaactagttctcttgattctgacacttgggttctagaaaagaaaacaaatgacattttaaagctaatattttcaaaatctgaacagctaggcgacattgtaggaaaaagcaatgttgcaaatggcattcagacaagtgcaaataaatactacattcataaagaaataaaatctgaaaatggttttgtttattttgaatatgatggagttgaataccacattgaaaaggaattgactcgcccttacttcgaaacaaatcgttcgggtgacgatagtttctatacttataaagacgttgaacccaattcatttgtcgtttatccatacaaaaaagtgggcgaaagaatccagtttattgaatacgatgaactaaaacgtcaatatcctaagttgtttgagttcctgcacgttgtaaaagtccatttgaatgataagaaacgctctattaagcctgacccaactggacctaatgagtggtacagatacggacgtagccaagcattagagaactgcgatgttgatcaaaagctgattgtcggtgttctatctaatgggtataagtacagcattgataatcatagaacttttgtttcttctggcggcactgcgggctatagcattatcaacgtccctaatgacattagatactctatctactacatccaagcaatccttacatcaaagtatcttgagtggtttgcttcaatatatggtgagatttttagaggtggatttgttgctcgtgggacaaaggttcaaacgagaatgcctattcctactatcgattttgatgatccaaaacagaaagcaacacatgataagatcagcttaaagcaacagtctttgaataaattgtatagccaaactcaaaaatcaggtgatagagataaaatcatattcgaaaggcaatttgaacaagaaaaaatccaaatggacgatttgattacaaatctttttgacttgggggatttagattcagagatcccaacagtagaaaatctatacaaaagcctgtaa

SEQ ID NO: 284452 - DNA, 465 bp, Morganella morganii
atgaaattgatcactttaactactgcgctcgtcgctgtcggtatgctggctggttgtacaaccaaaagcattgattcaatcacgatgcaccactacttccttaatgcccgcgacctgttcgttattgacgaaaaaaacggaaatgtgtcatgcatcgtgtctcacgatactggcaactcggatcaatttaagaaagatcttggtgagattcgggagaccatttacaagtatcagtgtgactccatagtgattcatggccggtatcttaatcctgaagttaaatttcaatgggataatcgaggtaagagacctgtttgctcagtaacattaaaagctaaaaatgaaggtaaacatggtttatggccagatgaaccagcagccatcagtcggtcttatgaatcaatggcggagctcaatttaccaaactgtgattccattgatatccgatggcaggaggctaagtga

SEQ ID NO: 284453 - DNA, 393 bp, Morganella morganii
atgcgtaatcaatttagtcttagcaacccttatacctgcctgcattgctgcggtagcagctatctaaaaatattagagatcgctgctgaatctagtaccgccgttgatgcaatcaataccatagcttctcagttggcagttttggcagcagagcgacgcgaatattctaccagaaaactagcggaactattttcttcaatcaccccgagcttagcgctcggggaccccatctcacagcaagaaaaaaccgtgctttgcccggatttttctccacaccccactcaccgcgagtggtctgtctcatccggcgcagtagcgccttctgaggggactccctgcacctctgtacacacagagttgcaagggagttacacgcaagagaatcagggataa

SEQ ID NO: 284454 - DNA, 357 bp, Morganella morganii
atgggagtttctaaggcgtatcgcgtacaaatatatccacctaggcaagtacatattttgttgaaggaattagctaaagaatcggggcaaacggttagtaaaacggcggtgtctttgatcgaacaggcgttaaataatgactcaacattgagcgaaatcagaaatgtacaagtggatcagaaggagatttatcagcagttaattaacctgctgtcgatcaacgtggcaaccacagattttctgctcaaaaagacctgctctgaggatgaaatggctgaggctaaacaggtcatttcagcgcgcacaaatgctctgcgttctcactttattggaggggacgataatggcaacgattag

SEQ ID NO: 284455 - DNA, 1977 bp, Morganella morganii
atggcaacgattagaaaaggtcgagtcggtgactttgttcgtggtgcggacacatggcttcatagccagcagatgttgttattcagcggaatttggatctttctgcctggtgttttgttggcgattgtcggtggcctgttatacatcgggatagacgctgataaatgtgtcttgcaaaacgctaatacatatatttgggcacaattgaagggactagtacaaccattttcaagcgtaactgtaggaacctgtgttgccctagatgggcgcgactctctgccatcctctgtggtgataaatgaaccactattccgggaagctgctgttaagcttctcaaatcctttggatgggctttcatttcgctctttgtattgtacttgcctattggtgtttatcttgttgtgaaggcagttaagagaggtgaggagatcaaagaagacaaatatattcgaggtgcgaaacttgtttcagccgaaaaattgaaaggagaaatcgtagaaaagcatggtgtttctgatttaaccctcggcgatttccctttacccacaggattttcaaaaaagcatgccttgattagtggcaccaccggggcaggtaaatctacagcacttactcatttgcttaaagctattcgcgctcgtggagaccgagccgtggtgtatgacaagaaaggcgagttcgtagagatgttctatcgggacggaattgatcacatactcaatccggcagatagccgctcacaccaatggactccatgggaagaaatggcctcaccatttgatgcagactggatagctgagacacttttacctagttctaatagtaacagtggttctgataaattcttcacatccgcagccagagcagttgtttctgccgcacttcagaatttatatctagacggaccgaagtcattgctttcacttcttcgggcgacagcgtggaatgatcttgagttactcaaagaactagttgcaggtactccagcagcgacatatttcaatgaagataacgagagaactctcgaaagtattcgttcaaccatcgtagatggtgttcgtccacttcgcctgttgaaagaagagaataaaaaggggttcttttctataagagattggatagcagaaggcgatgaacctaatgccgatgatagttggttattcttaccagtacgtgaatctgaaatagaaatacagaaacctctcatctcaacgtggatacaagctgcggccaaagggttgatggcgcgtggggttaataacgagcgaactctttggattgttgtcgatgagctaccaagcctcaaaaaaattcctgctctttcaatgttgatggccgaagggcggggcttcggtgcggctgttgttttgggtattcaggaaataaaccagctagaggaagagtttggaagaaatacctctaaaaccatacttggcctgtgctccacacagtttcattttcgtttgaataatgccgacacagctgagtgggtctccaaagtacttggtgaagctgagcgtgaggaagttgatgaagacttaaactactccgccgatgacattcgagacggtgttcgggtcagttctaaacgccaaaaccgaaaaattgttcttcccagtgaaatcatggacctgcctgatttgtcttgttttgccaaaatttggggcgtggagagtaaagcccgtattgatattcctttcttgagacttccaaagatcgctgacggttttattcaaggtgatgagaatgagactgttggtatgcgtctgctcaatgccgcaagaacaatgaaaatggaatctgatactgactttgttccgaaagaactttctaacgcgcaggctactgatgagcctaaagagcaagtgccaagcccaagtgacattgagcaggaagtacattcagtattgggaacggtcggaatggatgatgatttggtatttggtctgcttgggaaaggaggcaaaaaatcatga

SEQ ID NO: 284456 - DNA, 3108 bp, Morganella morganii
atgatgtcacccaaagcaataaaaagtgcctcgcaggcaggtcattactttgaaaaagacgattattatgtcgatggcctgtctccgtctgagtgggttggctcgggagcagaagcgttaggtttatcaggagacgtgcagcgagaaactttcaaatctcttttggaaggccagcttcccgatgggcagagagttggaactatcagagatggtgagtggaagcatcaaccaggaacggatgtaaccttctcagcgcccaagagtgtttctattctggctgaaattgctggtgatcaaaggttactgagcgcccacgataaggccgtgcacgccgctctgcgctatatagaacaggaatatattgttactaggaaccgtaaccggttcgagaatagagtcgagtacgaaaaaaccggctcgatggtggccgccaccttcaagcacacaaccagtcgcgccctcgacccacagctccatactcattgcgtcctgatgaacataacacagcgcggtgatgggcagtggcgttccactgagaacaagcccctctttgttgatcagaagtacttaggcctcgtttatcggcaatatctcgctgaagaggtgcgctctttggggtatagcctggatcatgcaaaagatggaacttgggaaattacaggccttgataaagatgttgtccatgaattctcgaagcgttcagaggctattggggatgccttggaagcccgtggaaaaaccagagacacggctacagccgccgagaaagaggctgctactctagacactcgggatagaaaggttcaggcagaacggggtgaacttcttgaacgctggcatgctgaaatcagctctgagaagctgaccgagttgaaagaagtaatagctctgtcacggaagaacattccaagcctagagcggcaatccgaggcgattttggcgcgggttcaattagccaacgaagccgtcatgtgggcgactgagcaccttggagaacgtgatacgtcttgggcacaccacgatctagtcaaagtggctagccgttatgccggatcgcgagtattactttctgatgtaacgaatgcaattgatgctgcaattcgcagtggtcagctcatagagaagtcggttagaacctttaataaggtcagcaagcaagagattgatgtgcggggatatacgtcgaaagcggccatcgccatcgaggatgaggtgatcaaggaggaataccttggccgcgaccgagttcaggcattgtgcagccgggaacaggcggctgaggccatttctaatgccgaggagaaagccaacgaattgggatacgagtggaacgctgaccaaaggaaagctacagagggcattcttctctccgagaatcggatcgttggagtgcaaggattagctggtacagctaaaaccaactccgtgctcagcactgttgctggaaaagcacgagttatggggtacgaagtaagaggtcttactccaactaactcggctgctcaaagtttatctgagggcgcgaatattccctccagtacaatccaaagttttctgggacaaaatcgcaatgaatgggtagaagagaaacgactgatcgcccaagtagagagaatagacagacggctggatcggatcaagaagtcccttgaaaacccaggagtagacctaaaaactggtgctcagatccctaaaacctctcccatttaccaaaagcgactcgatgaactttgttacgaacaaacagagttaaaaagtcaacgggaggagttagctaagggaatgcagcggtcccctcaactttggattgttgatgaagcatctatgatcggtacaaaattgatgcgcgatctacttcaaagagctagacaggtcggtgctagggttgtgttgactggtgacgtccgccagcttgcttctgtggaggctggtgctgcctttcgtcagcttcaggctcatggaatggaaacatatcgactagaggaaatcgttcggcagacgaaccgaggcacaagggatgcggtatatctctccctaatgaaaaaagcctctaatgctctctctcggttacaggagagtggcagcacgataaaagaattggtcgcgcataagaaaagtggaaaaattgaccatgagaaaagcggtgaagtccgcagacaagagcttgtgaaggactacatggctcttgcgccggatgaacgagccaaaagtattatcctcgaaccaagccgtgagggccgacgtcgcacgaatgaattagttcgtgatgcccttaaaaaagaaggtgctctgggcgaagagctgcatactaaccagctatcaccagtcgatgcaaccgaagctgaacggcgtgtggtgacatcgtatcaaaatgggcaaatcgtccggtttgcgcgtagcttcaagcgtgagggcatcaagaagggcctgtattatcaggttgttggtcgagataaccacgatatcttgcttaagaagttcggggccaatgagcaggctgagctgattcgcttctctcctgaaaactatgcggccaagaacatccagttgttcgaactaactgaaagtggcttggccgttggtgagaagatcgtgtggcgtgataatgataagccaactggacgattgaacaatgacacggccacagttgagaagatagaaggcacgaacgtaaccttcagactttcaaatggtaaaactggtgagtttgacatgtccaaactggctaattcccattgggatcacggttacgccatgacggttcatgctgcccaaggtaagacagcccagaacgtgtttgtgcacgccgaaaccaaccgggaagctttattgaacacggaacagttctacgtgcagatatcaagagcaaaggaccgcgtgtatctatacaccgattcaacggaagggtttgtccgagctgtggagcagcgttcaggtcaaaaacagacggctaaggaaagccgttaccagtctctggaaccgctggatcacttgattgataagctatggcaacaaccagagtcaggacgctcgtcaacgcagacaactggtaaatctcaggctaaaggtatatcaagaggcgacagtgaacgcagtctaacaagataa

SEQ ID NO: 284457 - DNA, 1524 bp, Morganella morganii
gtgaaagttctttttacgtcaatcgttgtaatgactgcactggcaggttgctccgcgaccatgcctaacatcgccggcaagactaagacagatacgtcggtccaaaaaactgaaaaaacagagcctgacatccaggcggcactaaccgacatgaaactcgttggattcagacaggaagacttcggcagtgaggaggcattcaactcagcagctaagatggtggcaaatttaggtgccgagtggcaaaccttcaattcttggaccgaggcgttgctagagcccggttatcaatcagcagccctggagcgcattcgtacagccaacgatgagcgacgccaaatagaaaggaaggtgaatttttcaaaaatagatcgctattccgacgaagcagataaggccatggagtacggattccatgattgcttcaatgattctggtcaaatgttctcagtagacgatttcatcagccattatgcgcttaccaatgttgcctctttcaaaagcacggttgagctttatgagcgttgtctaattaacggaggtagtgagtgtacggagaacggtcaggaactgagcttggataaattcttggtgaaccacaatacagccgctccacaagcgcgtaaggatctagcctttaatgaatattacgaatactgtgcagtgcggactcctgtttcatctgttcaatacactatctcggctcatgataatgatgtgatgggcagccttattgcggcagcggcgtcgcgggttggttgggatagtgcgcttaaaatgtctcgtgatgtgttaaacatgcaatccagatctggagcaatgaatatgattgctgccaacttctataattatcaacgaactggctactttgatgcgtttgatatcagaccgttcgcaattgggcgctccagtgtcatctccgtaatgcacgtgggtggtatgtgtgcagcgtttggtacaggtagtagcagccaggatagtgacatcgaaattgatgagctcgctatcgcgctgggagctaaacctcgtcaaacgaatgggggttaccactgtttgaaatggacagacggtaactggaaacgtgttgctgattacattgctggcgaaagcgagggtcttcgtgggtttatgtcggtgtactctcctgcattcaacaactatcaggtgccgtattggagctatcccggtccgtaccagcacaactcaactattcagactcaactccagaaaaaaggaagtggtattgcaagttacacagagaaagtcatggagcgggaaacctgctctacatatgcggcaggccattcaggactcgcaacgtggtcttatcctgcctgtgattacctagaaaaggcaagcgagtcaatgaaggccaaggaaaaaatgatgcaagccgcaggtcggtttgatgcctacatatgcagcagatcagaggctgtgaatggttatggaaaaccggatctgtcacgttgtcccactgtcttttctcgcgaacagatagaagctggcgaacacaaacgctag

SEQ ID NO: 284458 - DNA, 228 bp, Morganella morganii
atgattaccagtattttcagaaaaatcttcagaagagagcccaagcctgatctgtactctcaactatccaaccttgtggctgaaattcggaattatcaggctgagatcgagcgctttcatgcagatatagaggcgtcagctagccactttgaacacattaccgagcccaataatttcattagcgcagagtgggttaatggaaatctacatgtaaaacatcgtcattaa

SEQ ID NO: 284459 - DNA, 2907 bp, Morganella morganii
atgattactaaaaatatagttatcagtgcatataattgtcttaagtcatatgcttattatgaaaattttaatttctttttaaaagcagaagtagctcgctttgaaagtaccaagtttttatcaaaagtaaaacgaatagttgaattttttgaaagcgataatacagatttcagaaaatggctcgataaaatcgatgttgaacttttgccaaagaaaattgatagtcatttagattttgaacaaagaagcggagccctcttcttaagtaataataaaacagcagatgattataaagtttgtgcagtgaactatttaataactgctccgatggaaatatatattatcgatacattatggtctatttttgttggatctatgcttgatgataatttttcggaatcagtttacggaaataggatctctaaatcaataaagaaatactctaaggaaaatgatgatagcaaaaaaataaaagctaaaaatatttttgaaagatacattgataactataatagatggagagatggtgggattaataaagctattgaagttatagaaaaagatcgcaatgatgttgcaatattatcacttgatctcaaaggcttttattacaatatttatgttgactttgatgctattgatgcattaatagaagagcatcagcttgaagaaataaaagaactatcattatttcttaataaaaaattaaagttaatgcatgaaaaatatagaaataaaatatctccttttatagaggaaactcatccggaatcagcttcaaaggggattccaattggttttacatcctccgcgatattggctaattggtatctggctaattttgatagagatattaaatctaagattaatccttcttactatggccgctatgtagatgatattttgtttgttttttcttcgcctaaaattgaaatagaagatagaggtaatgaggttgttaattttattaacagaagtttaagcgactttataattcctactgacgatcataaaggcttcaaattgacgtcagagtatcatgagttacccattcaaaaagataagcttatctttcattattttaataaagatcatagccttgctggattgcaggtttttaagcaagaaattgaaaatagaagtagtgcttttcgctttttgccagaagagcatatttcaagtgatctagataagtttgcatatgatattctatttgatggttctgttaataagttcaggagtatagttggtctggcggaaaatgaaacagagctttctaaatatatatcctctcatattttagctcatagattatgtaatttaccttctaacgaacataccttaaagcaaattacattattctttaaaggtgaaaatggattaaggttttgtcgattgtgggagaaggttctttcatataccttaattacaaggagatatggcttttcaataatgttttataagcaagttattgaattaatacgcaaggtcaaatggtatagaaaagatgatggtaatgtaagtgatagaaataatgaagttagtggtttggtagctgataagttaaagcagggaattcagaaatatatagacatttcactgtgcttaaatctcgcattgctagatttagatgttttgcttggggatgaaaaaccacgaaatagaagtttggaaggattgtgggatttaataaatcagcatgatgaaatgcccttgatgataaacagatttaggagaagtaatatgattcgccataatctagtttcttggcctttagctaattacaccaattatgaaggtgatcttacagaagaaaatttatatagtaaattacatggcgtttcactgtcaaaaagaaagattaataaaaccccaagatatatccatgctgatgaagaacaactatttgaattaatcgatgctttgcataccaatactttgaatgactttacagaggaaaataaatatcatgagaaaagttgctctgtagaaagtataaaagacaataaagcactggagataacgatcgatgttgacgatgctaaacataatgacacaataaaaattgctcttgcaaatatgaaggtcgaatacaaagatattgagagtgcatgtagaaaagatcagtcgccaaatttaagctatgagcgacagaaaaatctttatcgtattcttaattccgctactgatgagaaggttcaaatattacttcttcctgagttatcgatacctgtttcttggttgccatttatggctgcacattcaagaagaaagcaagttgctttaatatttggtcttgagcactgggtggtgaatgatcgtgcgaataatattttggttgagatgttaccttatacttcccattttaagcataagttcagtatgttgacattcagagttaaaaatcactatgcaccaagtgaaattaagatgctgacatcattgaggctgggtgtttcgtctcctgttcctgatgagcaaaaatatcatttaataaaatggaaaaatatatcgttttcaacgtataactgttttgagttagcaaacattgaacatcgggcacttttccgctcaaagcttgatatattatttgctagcgtatggaacaaagatattaattattatcaacatatcattgaatcagccgctagagatttacactgctatgttgcgcaatcaaatacatcacattatggtggttcgtgtgttcttcagcctactagtagtacaatttccaataaaatatatgttaaaggtggagagaatcattgtattttaacagctacgttaaatatctatgcgttacgtgaggctcaatatcgctcatttaggatagattcggattatatcaaagataatcctccaggatttgattatgacgaacttttagctcggggtggaaaatga

SEQ ID NO: 284460 - DNA, 258 bp, Morganella morganii
gtgacacaggtgaagcattccgagctggaactggtcgcgaattttgctgaaatcccgctgcggatttcaaaattactgcaactgcagaaaggggatgtgatcccggtggagaaaccggatcgcctgattgtcagtgtggacggcgtaccggtactgaccagtcagtacggcacccgggacggccagtatgcattgcgtgtggaacatttgattaatcctgtattaaacactctggacgaggaaaaaaccaatgagtga

SEQ ID NO: 284461 - DNA, 885 bp, Morganella morganii
atgagcatgattttaactgcgcgggctttgcagataaaaaccggcaatgcgctgcgcaaactggtactggtaaagctggcggataacgccaacgaccagggcgagtcgtggccgtctgtgccgtacatcgcagagcagtgcgaaatgtcagagcgttcagtgcagaaccacattaatgccttggtagaaatggggctggttcgtatcgaatcccgtaaatcggccaacggtctgaaccagtcaaatatctatcatctgcgcctgaatgcagccgttgtgagtggtgaatctcctgcaccatatggtgcaaatcctgcgggggtgagtggtgcaaatggttccgggactggtgcagcagattcaccaggtggtgcaactggttccgatagtggtgcaggagctgcacccagaatcagtcatgatccagtcatagatccagataataaaaatattaatcctgttcgcggaaaagccaaaagcaaaaccgtgatgccggaaaacttcgccccgtcaccagaacacactgaacgggcaaaaactgccggattggatgttcaggatgagtttggcaaattcagggactaccacgccagcaagggcactcaatacgctgactggaacgctgggtttaattactggctgagacaggccgaaggatttaaacgcgctgcggactcaaagaacatcgacaccaccgagtgcgatgaagtcttcagaaaaatgttctcatcctccaactggaagccagaaaaccgcgtacaggagctggtagcaaaacacaaatcccacattgggcggatgaatgaaattgctggacgggccgcattccgcgggtactggaaacaggccacagagcaggccgcaaaagaacgggaggcagcatga

SEQ ID NO: 284462 - DNA, 2169 bp, Morganella morganii
atggttcaactggcaaatagtcagggcagtgtgagcggcaatgccggaaacctgacgttagttgatcaaaataataatgttatttcagacgatacccgtgtttctgttgttcagaacggtgaagtcgtcgcaaacggcatttatgattaccggctgaccagcggtgaaaataatgatggcctttacatcaattacggattaacgcaggttgaattactggcacagggtgcaaacgcactgacactcagtgcggaaggaaacagcggcaatgcggctgatctgagtgctcagattaccggcagtggcgacctgcgcattaacaccgatacaccgctgtcactgtccaacagcgccaacagctataccggcacgacctggcttgatgccggtacactgaaaatgggtaacaacaatgtgctgggaaatactcacctgctgaccctggctcagaacacacaactggatatgaatggctttgcccagacactgcagaacctgagctcagctgagggcagcctgattgactttaaccagggtgcgctgaccgtgaacaacggtacggtggccggtaatctgaccggtgccggcagcctgaaggtgaccggcggaagcctcagtatcagcagtgataataccggcatgacagcagataccaccattgatgaagacggcagtgtatatatgcaggcgactcatgcattgggaagcggcagtgtcagtaacagcggcaacctggttatcggtactgactccgcagataataaccgccccctgccaaccggttatcaggttggctctctgactaacagcggtaccgtcgcagtcacccacctggctgccggaacacagtttcaggtaaacggaaactataccggtcaggatggtctgattcagttcgataccgttcttgaaggcgataattccctgacagataaaatgacggttaccggagacacatccgggcagacatttgtcagcgtgaataatatcggcgggcatggtgatcagactatcaacgggattgagctgatcagtatttccggggattcagccggtgagtttattaaacagggccgtattgttgcaggaacctatgattactcgctggtcagaggaacaggcagcctggccggtaactggtacctgacatctgaaaatacagacgttgatcctgacgcggacaaaaataatcgtccggaaggcggaagttacatcgctaacctggcggcagccaataccatgtttaatacccgtctgcatgaccgtctgggtgaaacccagtataccgatgcgctcaccggtgaagaaaaagtgaccggcatgtggatgcgccaggtcggcggacataacaactggcgcgataacagcgggcagctgaaaacacagagcaaccgctacgttatacaaataggcggggatattgcccgctggagtactgacggactggggcgctggcacctggggataatgaccgggtacggccatgacagcagccgtacccgttcgtcccccaccggttacagctcaaaaggttcagtcaatggttacagtgccggcacttatgccacctggtatgcgaatgatactgatcacagcggcttatacgcggacacctggttacaatacagctggtttaataatgacgttaacggggaaggcctggcttccgaatcataccgttcccgtggtctgaccgcctctgctgagaccggttatactcagaagttaacggagttcaccggcagtaaaggttcccgtaatgaatggtttattcagcctcaggcgcagatcacactaatggatgtcagagcggatgagcaccgggaaaataacggcacccgtgttgagggtaaaggcaacgggaatattcagacccgtctcgggatacgcacttaccttaagggacacacccgcgaagatgacggaaaagacagagagttccagccgtttatcgaagcaaattggatccataatacccgtaatttttccgccggaatggacggtgtgagcctgtctcagaaaggaacaaagaacctgggagaagtgaaagttggcgtggaaggacaaatcaatccgcacctgaatttatggggaaatgtgggtgttcaggttggtgataatggctataacgacagtgccgccatgcttggcatcagatataacttctga

SEQ ID NO: 284463 - DNA, 1422 bp, Morganella morganii
ttgaaactcagatactcaaagttggctctgctcattataggaacttattcctttcagagtattggtgcaactataattaatggcggaagttctcaggcaataaactcaccattcactgacggattcattattgtaggtaaagataccggcggcacactgaatatagagaccggaggtattgtatcaactgaacacttggctatagggctaagtggctcagaggggactgttaatattgttaatggcggacagctaaacatagaggctgataacatctctcatccgctggatatcggaggttcaactgatggctccggcacaacaccggggggacgcgggattttaactatttcgggtaatggcagtacagtaaattttagttcagctgtaaacagttctgttaacgtcggtaaaaatggcggaaatggtattgtttccgtcacagatggtgggaaatttattattaattcatctgaggggatgtggattggctccagggcagacgaaggtaatgttgccaagcaaagtggttatgtctggattgacggtaccggcagtgaattaatctccagcggacgtattatcgtcggaacttattcacggggcactctttccgtgactaacggaggatatgttcacaccggtgatcgtttaaatgtcgggaatcagccagaaaccagtgcatttgataatttactttttattgacggagcaggctccgaagtatctgcagaagagttagttcaggttggcctgcaaggcaaaggaaccgctgttgtcagcaatggcggcacactccgtaccgacgctatctttgttgcaaatggtgcagatagtaacggtgaactggctgtcggtgcccgggaaggagattcctctgctgccgcaggcaatattgatgcttcagtcattacttttggtaaaggtaatggccggatcacattaaatcatactgactctgatttcctgttatcctctgatatcaaaggcaccggtgtaattaacgcattcaatggcacaacccggcttgccggaaataatgcggcatacacgggtgatatcaatatcagtaccccggcgacgattattgtcagtcatcagaataatctgggtgacaataatattatcaatgacggtgaacttcgtatacaaagtgacactgactgggtttttactaatcccctttcaggctccggtatactgacagcagacaccggaaataatcacttttcgtttaattccgcagcacccggaacaacgttttccggaacggtaaatttactgaatacgttgtttgacctcagtgatattaataccggcgccctggcacaatctgtattattactgggacagggaagccataccactgtcggtacaggagagcagggattggcagcctggcctttaacggtggcactctga

SEQ ID NO: 284464 - DNA, 354 bp, Morganella morganii
atgaaaaaaaataatagaagtctaaatctgctttacggtctatcatcactttcattaaatgaaaatgccggacaactaataaaagcattaaggaaaagtaaaaaagttagtggtgaagttcttgctggttttttgggaataagtcaacaacaggtttcccgttatgaaagaggggaaacagaattaacattagaacaaataaaaaaaatatctggattttttaatattagtatatgggagtttatggatatcttatattttttttatgttaaaaaaaataatgaacttaatgaaatagataaaataatatcacagtcattctacaacaaaagacaatggtggggtatggattaa

SEQ ID NO: 284465 - DNA, 618 bp, Morganella morganii
atgatacggttaccggctgagcgtaaggtgcaggattaccgttcagcatacaacgatatccgtgactggcagcggcgtgagcggtctgcggaggaaaaagagagcaccacggttgactgggatgacgtggtgtttgaggtggatttactcaaatcacaggaaatcaatctcgattatattctggggctgatttacgactaccacaaaaaaaataccgataaaaccaccatgaaagaggaagtgaaacggttaatccgcgccagtctgggaaaccgggccaaagagggactggtggtcggttttattgaaaatactgatttcagtgacctgccggataaagaaagtatcattgaggccttctacgcctttgcccagcaggcacaggcgcgtgaggctgaagccttaatcagggaggaaaatctcaatgacgacgcggccaggcgctatctgcgggcatccctgaagcgggagtatgcaaccgaaaacggcacggcgctcaatgaaactctgccgaagctgagtccgttaaacgcgcagtacaaaacaaagaaacaaacggtatttcagaagatggtcgcttttattgagaaatttaaaggtgtcggcgggaagatatag

SEQ ID NO: 284466 - DNA, 1224 bp, Morganella morganii
atggcatcaatgaccgcaaagcaggtggcgtcacttgcaaaatcaggagagccgacaagaaaatccgacggaaaaggactctactttgtcgttccagactcgggagcgccttattgggcccttcgatatagtggaaatggcaaacgaaaacaaatgactctgggtcagtaccctgatatgtcgttggccgatgcaagatcagaagccgaagtgtttaaacgtgacttaaggcaaggcgtagatcccctcattgcaaaacagcgtcaaaagtggactggtatcatatcggtcgatgatttatttgaggattggtataaaaacgatttagcgccaaggctaaagcatcccaacattccagctcgaatatatagaaaggaaattaagccagtcattggcgaattcaaaattcaggacgtcacagctctggatgttcgagagataattcaaagagttagggatagcggccgtctaaccattgccaatgacactctgggttatatgaagcagcttttcaagcacgctttaaagcttggattaaccgccaataatcccgctgcacctttcacaataaacgatgctggaggccttgaaaacagttgtaaacgggcattagatctggatgaaatcgagaaagtctttaaagtatttcgaagccatctaaatagctttggtagagataactatttgctgtgctgcctctttttggtactaggtaacaggaagagtgaactatgtgaagctccttggtgggaatttgacatgacagaatctgtgtggcacatccccgaatcgcgggtgaaaactggaatagctatttctatccctttaccaactcaggcaatgacatggcttagtgagctcaaagtaagatcgatgggctctgattacgtttttcctgccagacgccgaagcaatctgttacatatgggacctgataccctgaatagcgcaatctcaaagttatttggacgagaagctgggaggaagattcagccccccaacgtaatgggtgatatcgagcattttacagtacatgacttacggcgaacattcaggagtctcgctgcatcagtaggaacaccaaatcacgtcgctcggttgtgcatcaatcacaggcagggaggagttgacggtatatacgatcggtatgagtacttcaaagaacgaaaagttgctcaccagaaagttgccgatctagttacacctctcattcaactggattga

SEQ ID NO: 284467 - DNA, 777 bp, Morganella morganii
atgaaaatcacacaaattcgcaatgcaacacaaatcattgactatgcaggtaaaacattccttattgacccaatgttagcgccaaaaggcacttacccaggatttgaaggaaccgcaaattcacacttacgcaatccaaccgttgaattgcctctgcctcttgaaagcatcatcaatgtggacgcagttctgctaactcatactcatccagaccactgggatgaaacagcagtgaatgcgatccctaaagataaattgatttttgtacagcacgaaggtgatgaagctattcttctatcacaaggttttaccaacgttaaaatcttctctgaagaaactgattatcatggtatttcatttacacgtaccgtctgccagcatggctctgatgcagcgttccaacatgatcaaatggctgaaattttgggtgaagtgacaggcgtgattttttcccatgccgatgaagaaaagttatatgtggttggtgatacgatttggattccaagtgtagaagaaaccatgaaaaaagaacaacctggtgtcgttattctcaatacgggctgggcgcatgtactgggctttggtcctattattatgggtaaagaagatgtactaaaaacacaccaagtactacccacagcgaaaatcgttgcgactcatatgggcgcggttaaccatgtattggtgactactcaagaaatgcgcgaatacgcagcttcaaatatgattagcgattttgtgtttgttccagaagatggtgaaacagtaacactttag

SEQ ID NO: 284468 - DNA, 402 bp, Morganella morganii
atgacgtctgagacaaatattgagttagtgaagtctttctatagggctatagaggataatgattacgatgctgtggcttcaatgtgccatgagcaattcacgttttactcacaggtagatacgccattagatatcgacgggttccttgctcaagaaaagggaaatatggacggctttcctggttttattttccgtatacatgacatcttcgctcatgatgataaagttgcttgttatatgatatttgaaggcgttcattcggcacctatgcataatttgcagccaacaggtaagaaggttcgcttttcattgatgatgcagctaacgattaaagacggcaaaataatcgaaaaacgagcgcacttcaatgaagttgatattatgaagcaactacagagttag

SEQ ID NO: 284469 - DNA, 972 bp, Morganella morganii
atgaacctcgctgaaaaccatacaattccctcagttgcagttgtcgtctttaatcactttagtccgtttcatatttctgttccgagcattgtgtttgggcgagataccctaaatgaaacttttttcgaacttaaatttgtcgcaggagagcaaggaccgattttatctgatatcggtatggaaattcataccgagacacagttggatttcttagagtcttgcgacattatcgttgtcccttattggagaacaattgatgaacgccctaatgaaaacctgctcaatgctctctgtcgcgctcatgcccgaggcgcattggttgtcggtttatgtcttggtggttatgttctcgcttatgctggcttattagcgggaaaacgagctgcgacacactgggaattagaacaggattttagtcgacgctttccagaagtttcgctcgatacgaatgccttatatgttgaagatagtggggtgatcacctcagcaggtactgccgctggtatagattgctgtctgtatgttttccgaaaatactacagcagcacgattgcgaaccgagtagcaagaagaatggttgtgcctccatacagagatggcggacaagctcagtttatagatcaacctatacccgtgacgacatctgattcacgtatcaatgcattaatggacgatatcaggcgtaatatcaatcaaaaatattcactggatgagctagcagattcggtgatgatgacccgccgaacctttacgagaaaatttaatagagctacaggtatgtcatttgtagaatggctgacggctgaacgactaaacttggctcaggatctacttgagtctacagacttatctatcgaacagattgtcgcaaaaacagggtttagctcagttctcattttcagagataaatttaaagagcgttatgaggtgacacctaaccgatggagaaaaacgttccaccaacagccttag

SEQ ID NO: 284470 - DNA, 387 bp, Morganella morganii
atgaagctaaatggtattgaactactcaacctagctgtagcacatgagttaaaagaagtttgggtcgtcaggttagatccgcccgatcagcccggcaatcgggggccagatggtgacctgctctggccggaggttttgctgtgcaaaagttctgacgatgctactcatttggctgagtatttaagcaaagcagcctttgatgatttttctgattttatggccgcagaagaagatggggaaatccattcagaaccccaggacgcagatcagtacatagttgcgctctgtaaaagcattcaaaggtacagatacgcttggctggtagagccgagcatcaatagcatctcacaaatcaccttgctcaaggaggcttttcaacatgattaa

SEQ ID NO: 284471 - DNA, 1164 bp, Morganella morganii
atgattaaaaagtcattgagtttgctggcctttacattaattgcatactcaaacattacacttgctcaagaaagcgccactgtgggccaaaaatcctcacaggaaaagcgcacccaaaaagaaaccacgttgaacgatgagacaagcatggagttacaacgccaaaagggagaggaagcaagaaaaggtgaggaaaaaagagacacgacttccacgtcagctcgacatgcaagcgaagcatcatctaggcagcaatatcaaaatgctcgccgtctttcagtaaaaacagcaccactttctattctcatagagctatttgcctatgtcgaaaaaggcaaatctataagagggaaaacagcaaacctcatcagaaattgttcgctcattacaaacccacaagcgccacaatttccagagctagaacccaaacccctagttacaagcgtgcaggcctgcatggcctggaacaaagaaaaaacactgggacaatgccaagttgagttgcagcaggcagctttcaactgggcgaccactggcatgccttcatccataagagttccatctgaacgactgaaaaaagaaggggtttgctgggcagtctacggacttgtagcagaagcaacgctggatgaaatatcaagcgggatttcggtcaacggaagtggcaagtcagcgataaaaatggcgcttgccaaggcaatgagtaaacagctcatacgtaatgacttaccagaaaaggccttgaagatagtagatagacaatttggaaggaactgtgtagtgccatctacacgagggtatcagtatgaaggaaaatacgaatggtcttgtggctctttttctgctgatccaaaaaatctgtcagcttcaatcggcgagttcactgtctttggccgaggaaactcactctttggagagtcatgggagttggagacatcattaaatcacgacactcttttttcattatcgactaccagaactaactcaaaagaagcatcaacgtctaatgctcattatgcaagtaccgacaaccgctcatccaagtcccgtaatctttcaatgagaacttccgagcgcttacaaactgaggaagcatccaatctcagcaattccacggaggcaagcttcacagtgtctcagccaggcataaaagggggtaattaa

SEQ ID NO: 284472 - DNA, 357 bp, Morganella morganii
atgaaatctgtactgtatggcatcatcattgcctgcccaataacagccatcgtgatctactttgccttaactggtaggcaggaagttcttatccaacaaaaaacacatgaagttcaacaacaaattcgctcggaagagtttcatcgtgacttctccaaggcctgggctgagtttgatctacccaaccagcatgataaggcccttctctcgtcggaaaatgctgaacgaaacgagcgaataaaacagctcaaaaaacttcgctctcaattggaagcggataacggtgagtcaatggatgacctcaaaggagacttagcagagatgagaaaagcgttaaaggaagctgataaaaattaa

SEQ ID NO: 284473 - DNA, 666 bp, Morganella morganii
gtgccaaagaactatagatctaaggtaagcaaagcagttgcttacaaaaagctgcaaggtgttttagaaaggctaaatgattggaatgagctttactcttcctactatgaaatagaagaggctgcattagtcggcagtttggctagaggtggtgaaaaatttggtgatatagatgtgtgcttaaaaataaggcgcagccagcagtttagttacagtgattgtaaaaacgactacataaaatggcgggagcaagttttagggtataaaccacctgctccgtattcatcagcagaacgatgtatgtttgaaacggatgttagccggtttattaaaagtagtgatggacgaattgaaatgttgcgctgggaccagttcgagccaatatgcttaaccttacagccatttataaaattagtagaaaatggccgcgtgatcgttgccaatgttgaagagttggaaactcatagaataactttcaccgcagaacaagctctggatatagtaaagagtggtgtgccagaaaatccaagaggaacagaaggcatatactgggagtcttactgtgctgcacttaagctatatcctgcgtttataagagacgcaatattagagcgggacgcatactgtgccgcatatcgttcatttactgaaaagaatgaaacatag

SEQ ID NO: 284474 - DNA, 390 bp, Morganella morganii
atgaaaaaagcaatcttagcagtggctaccgcatctatgctctctttggctgggtgtgcgacaaagcctggaattaacgacgcttcacttatggtttttaagttcccagcaagtggtgacactattaatgttacttacaagattgagcatggaaaagactgtcttattaccatggcgctcggccctcaaagtaatgaagagaaatatatggctgctcttgatatggaatctcgacattgcctggaggatgtaaccggagagagccaagtgggattacatctggacctctctgatgttcgttacaataatccggctgtgattaattatagcttgacagggccaagcccattagaggaacttgtagcgctcaaaccggataaggcaaaataa

SEQ ID NO: 284475 - DNA, 432 bp, Morganella morganii
atggctgcaaaggctatccagaaaatcttttttgagtcagataacgctaagcagcaacaagctgcccaggagctaaaaaaagatattgggaaaatgacaaaggcgctaggtgttgagttatcccgccttcgactagaggtcaaaacagaacagcggcatgaactgatgtcagatgcgataagcaatgccaaacggttggaacaaagcggccaacagaaggaggctgataagctgatagttagtacctataacaagctatctcattctgccaagaaagagtacagccaatatcaacctcgcccagaacatcaaaaatccatatcccaggctcaatcgagagaaaaagaacgccaagctgcatcgtcaattcagcaccagcaacacagtgaaaaaagaatcgaccgcgacaaaaaccagtcaattggtcgttga

SEQ ID NO: 284476 - DNA, 159 bp, Morganella morganii
atgccacggaaccctttaacactgatcatcattgctatcatcctgctgactactgctctgttggcgggttgttatctgtattcactcccgaatcactgtaagccgctgccgggtaacccgctggacggcgtgatccattatgagtgtgaagcgctatga

SEQ ID NO: 284477 - DNA, 1218 bp, Morganella morganii
atgtcgaataaaaaagaaattataaaaaatttaataagctttggtaccattgatgttcttggtttattaataccaatagttactatgcccatattgacaagagcactggggcctagtcaatatggagaacttttattattattaacaatgttatattttggtcatactattatagactatggaactcaatttactgcagtaagaaaattagctaatgttagaaataataagcatgatattaataatatttactcagataatcaaagcttgaggcttgtcttatgcttactttatctaatcggtttaattgtttactgtttcgttttttcattacatgatacattaaataatttaatcatttttggtagtatgtacttaatcggttatacattaagttccccatggttttttcaaggtattggtgctgtcgaacagctaatgaaagtttccttaactgcgaaattaattaaccttgtaataatattattttttgtcaattcacctaaagatttaacaattgccattgcagcattttgtctaccaatactgtttagtggtttatatctaacaacttatatttatttaaaatataaattaagcataccaaaatttaataaattacttaattctcttaaagatggaaaagatgtatttataggcttattggctcccaatttttacaatatgatacctacaattgttttgggtactatttatcccccttcagaatttgttaattttgctattgcttctcgattagcttcagtagttgtaacaatacaagatgttgttgctaaggcactctatcctgtgctttctaaaataaaggaaagtccggttattaaattgttactactaaatagcataatttctatattcccaattgcatttttattgatctggggggaacgttgtttacttttttttctagggaaaaatttctctggcgctaacctatatttaataatttttactattggagtactttttattggcttatctaatgcattcagtaaaggcttctttttacctaaagggttagatcgtatatatagaaatatatcattgaggatatctattctatccgcagtgatttgtatattttttatatactattttggattaatcggtggggctatatcgattactttagctagattcttattttttatggattattatcttacctacattaaattcaagaaaaatcattgttag

SEQ ID NO: 284478 - DNA, 756 bp, Morganella morganii
atgatgcagagccgcacggtctaccactatcgaagccggcgtgacgaccgtgcagtcacgcagcggataagggaaatagcggaaacccgcgtccgttacggtgtgcagcgtatacacatcctgctgcgccgggaaggctggctgattaaccataagaaaacccaccgtatttattgtcaggaagggctgaatctgcggacaaagcggccccggcgacatgtcacagccaggcacagacaggagcgtccggcagtgacggcagccgatcagtgctggagtatggatttcgttgctgataatctgttcaacgggcgccggatccgggcgctgactgtagtcgataattttagtcgtgaatgtctggcgatagaagttggacagggtctgcggggtgacgatgtggttacggtaatggcgcgtctgaagcagttacagcaccgcgttccggaacggtttcagaccgacaacggcagcgaatttatctcaaaggcgctggataaatgggcatatgaaaacggggtaacgatggacttctcccggcccggaaaaccgacggacaatgcgttaatcgaatcctttaatggtagtttccgtgacgagtgtctgaacgttcactggttcttgtcgctggaagatgcgcaggaaaagatcgagtgctggcggcaggaatataaccggcaaagaccccattcctcattaaataaccagactccggaggaattcatccgaagtctgcaaaaaggtccggatctctga

SEQ ID NO: 284479 - DNA, 654 bp, Morganella morganii
atgatgttctctgattatcaaagcttgatcactcaattatgccaagatgaagataataatcaatcagttgataagattattgcacaactcccttcatatcaatatttagcaatagataatcacttccaatcacgctatcaacaactcgagcaaacattggaaaatcatccgcaaatcaaacgtgctcatgttatggtaaaagacgatacgaaagtagagtctcctctacaattactgtttgaagcctcttctgatattccactatccgttattaaacagcccaattggttacctaatttacttttgccatcagcttcactcagtgacattattgaaaagagttggcaacgatttgaggaacgagcacggtatggcatatgtcacacactgtatcgaaatactctttttaccgagctaaacacaccaatcaccctagctgaaatagtgactcgtttaaaagcaaagcctcagtatgagaggctacttaatcagtggctagatttattatgcctgcatcacttattaaccaaagagggtgatcagttttatgccacaacacagtttattgacttatgtttatctgcccctatttctaaaatattgagtgaagatgttgcaccaaccattgcactaacaatatcttttgcacattga

SEQ ID NO: 284480 - DNA, 258 bp, Morganella morganii
atgaatatattagcaattgatattggaggaacaaagatttcggctgcattaatcagccgggataatcaacttacacagcatactcaaattacaacccctgcaagtgcatcaccaactcagctctatgaagcgctggccgcgataacaacaccactaaaagcacatgcagatggtgtcgccgtagcctctacagggatcatgaggatcagcaatggtatggccaagatggcctgcaatacctcgttttcctgcctgtaa

SEQ ID NO: 284481 - DNA, 147 bp, Morganella morganii
atgactaactctattaagggctcagacctgctgtcaaagcgtatgtttgccttaagtggcttactaatgacgctaagcaatattggtctaagcccatttattgtggtgcctcttggtatagcactagtgcatatcttacgtaagtaa

SEQ ID NO: 284482 - DNA, 288 bp, Morganella morganii
atgacagatgtacgcattacctgtattacgctctccagtactaatgcagcacatgagcatattacccatgttggtagccctcagtttagacctcaaggtagtagatggaccgtagctcaagtagttagcgcaatcgaaaaccaacagcatacgttttatgtaactgataattatggtaatcgagctgatgtaggcgtggttgaccctggaggtaacaggcctaaatttattcgtacctatgcagatggtagatggaacaacaacctactctcactcccatcctgctaa

SEQ ID NO: 284483 - DNA, 168 bp, Morganella morganii
gtgaacacaaaaccgcagttatggccaacggttgagcagtttacccacgaggtcattattcagacaaacacagacccggtaccggtgatgatcacctacaccgtgccaccttttgaggaagttgtcgaagactggcagaatacggacccggcaaaaagctacccgtag

SEQ ID NO: 284484 - DNA, 339 bp, Morganella morganii
atgcatatacaaaacctcataaataatatcaagccacttattccattttcaagtgaacaagatgctaataattttttaaaaaattatactcaagatgattgctatgccctattaactgcaatgtatattggtcgagaccatattcatgatagtgtaatcaaccataattataattcagtgctatccagtggatcttttaatagatactatcaccaaaataccgcttctcttaatgatatcccaagaatactgtacgaaaaaaacacaaatttaacttcatactatgattcatttattcgttgcactatgggttcaaattttaatttgaacaatttttag

SEQ ID NO: 284485 - DNA, 354 bp, Morganella morganii
atggcaagatcccccaaaccaccaatgtatttaaatgatatcgcctcgcagcagtggaaagccagggcgaaacaactggccgaacgcggcgacctgacgccggcagactggagcaacctcgaattgtactgtgttaactatggtatctaccgcaaagccgttgaggacattgagttgcgcggttttgccgttgagggttcacgaggggcggccaccagtaacccgtcattaaaagcgaaagcggacgcggaaaaaatcatgattaaaatgtcctcactgctgggatttgatccggtatcacggcgcagaaatccggtggagacggacgaagaggatgagttagaccgcctgtga

SEQ ID NO: 284486 - DNA, 297 bp, Morganella morganii
atgattaaacctgaaatcagcctggctgatattaagctccactgccgtattgatggtgattatgacgatgccattttaacagtctataaggatgccgcactggaggtctgccagcggcatatcggtaaacgctttgataacgggctggagtttaccccggccataaaagtgggctgcctgatgtatatcagcctgctttatgagaacagggaaatggcaggtcatgagaatctgaaagaggttccgttaacgattgattctctgtggtctgtttaccgggatgtggggatttattaa

SEQ ID NO: 284487 - DNA, 351 bp, Morganella morganii
atgaatgaatttatggaagtggttaaagactcttttaatgaatcaacaaatcatcttacgtgggcttttttttcattagttgctgcatttatgtttgacagggcattagatcttaagggatttaaaagaaaatgggtcaatcgaatatttagatttttattcagagtatattttttcctgtttttgataataggtaccgttaatatcatatttataagcaatatctttactaaaaattttgacggatctgtttggtcaaatgtatttgggatcttaattatggtgatggttgtcgcaaatgcagggttgttggttattgggttagatgataaaaaaagtaaagatatgtaa

SEQ ID NO: 284488 - DNA, 753 bp, Morganella morganii
atgagtgatttaatagatggtgaatttaaccctcacgtttatcttatggagtgttttattcgtgatttatttaccttagcgatggatgacgataattcaagtcttcgtttattccgccatacgcttattggtgattataaatgtaaggatgaatgcagaaaaatcatagagatagttgctaatagttttaatcactacacaaacccaacagagatgttattgatgtatttgggcattgattttgatgattttaatgattttaatgattttaatgacccgctccttgttcaccgttcaattgataaacgtggacgtaaaatactggctgacgcaaaaatatgcgaaagaggacatgatattattaatgctgcatttgtaatgtactcgttgggattaaaagaaaatgcagatagattaaccagagttggcatggaaataatagttaatgatgcgtttaaaaaggagtttgataatttaaataaagaagataccataaaaaatggattgtctgatttaaatagaaaaaaggcatcaaaaccaagaagtaaatattatgatgaagtgatgtttgtaataaaagctacttgggaaaagtatccaaatgcaagccagactaagcttcttgataaattatgcttacattatgcagataaggtcaccagaaacactttattaaactggataaaaaaatcaggagcaaggccaccaaaaccgaaacaatattcatcttgtaagttagtacacccccaataa

SEQ ID NO: 284489 - DNA, 153 bp, Morganella morganii
atgaaaaataataatggtttttggcaggcacttaaggctaacgttgtttcaaggaaagttcgtactgtttggaaactaatagtatggctcattaaattaggattaatgatttttaaactccttgaatggcttgataaacaccgtgagtcttaa

SEQ ID NO: 284490 - DNA, 324 bp, Morganella morganii
atgatcaacagagcattaaagacaattagactttaccacaatttaaaacaatctgaattagctgataatttatgtatatcaaaatcttacttatcggagattgaatctggaaaaaaaacggttagttttgatatgctggtaaagtactcacaagaatttaatattccagtttcatccttagtttttctctcagaagaaatgaatacttcctctaataaaacatttgctagtaaatttcgctctatttttactgaaagaatatttaaaatcatggaatggagtatcgaaaggaatgaaagtaaaaaaacaaaaaataaaaactaa

SEQ ID NO: 284491 - DNA, 2583 bp, Morganella morganii
atgtcattgagagatttatctgggtggttgattaaaaatcaaggattcttaagaaaatatcaggtattagtcgctaactcaataaaagaccaattttcggagttaaaatcagatgaaatcccacaaatcagtcctgaggatatcggctatcttttaacatgtgctagttcttttgctttttctagtgatgagaaatgccaagatgcagccttaagaattgcgcagtattgcctattgaatgaaagaagtgaagcaagaaaagatagtgctgcattaattcttgattcgttatctaacaatccagcaatacaacttgctgaaaatagaggttaccttaaccctgagttcgaagaaagattacccttaaaagctcagttagaactaactaaaagaaagattctatatacaattgaaatagatgctgataagcatatttatgctaatagatttcagtcagagttttgggatgcagtacaaaaaaactcatgggttagtgtctccgcgcctacctctgttgggaaatcatttatcctcgaatcatgggtagagcagtttgtcaaaagcaatcagaattgcttggttatttatatagtaccaacaagagcattgatttcagaagtatattctgaattacaaaaacgtctggaccctaacctaacgaatgcagttaatattcagacattaccattgagtaacgtatacaagagcgaaaagtctaatgtctttatctttacacaagaaaggttaaatttattctacaatcattttgcacaaattccaaaaatagacgtcttagttgtagatgaagcacacaagataggtgacggtggaagaggagtaattcttcaacatgtaattgaactaacttgtctaaataaccctgattcaaaagttatctttgcaagtcctttcaccttgaatcccgaaatattgctcagtgatgctccaatattaaaaaataaaaagactataaaaagtaactatgtaacagtaaatcaaaatttgatatgggtagaacaaaaaccacgcaagaccaaagattggttgatgtattacttcgcaaacggtgagaaacgagagttaggaaatttttctctagagaatgcaccatctcctgaaagtaaaaggttgcctttcgtagctctttgtttgggtaggggaacttctggtaatgtggtttacgtaaatagagccgctgacgcagaagctacttccaaactaatatctgcaagtattgaaaatgagacaaaggatgaagaaattttagatctcattgaacttagtgagagaattatacataaaaatttcgcattaaatcgcactttaaaaaagagagtagcttttcattatggcaacatgcctttgataataaaaggcgagattgaacgactatttagtaaaggtaagattgattttttaatttgcacctcaactttagttgagggtgtaaacatggcctgtaaaaatatttttataagaggtcctaaaaaaggtaattcaaccccgatgcgagaagaggatttttggaatcttgctggtagagctggtcgttggggaaaagagttccaaggaaatgttatctgtgtcgatagtgacaatgaaaaaatttggaatggagaacctccaaaaacaaaaaaaaatatatttataactcgtgctacggatgcgatttcacatgatatggatgagttgatttcctatatttcttcggagcatcactttggtatgtctgagcgaaaccctaatctccagagcctatttagttatttgtgttcatcattttatttttatgatggcctagataataacccttacatggaaaagtacaatataaaaaatatcgatattttaaatgaagtaatatttgacgtttttgattctttaacatttccacatgaattagttgcgcggcatccaggtataagcccgcttttaatgcaaaatctctgggatagattttcacggaatacaaaaaaacctgtagagagattgttgctctctgaaccaagtagtaatgatgcgttaaattcatatgtatccgcattctctagaattagtgatacacttagtaagaagctgggttataattcaaaaggagcctatgtacaggccttattagtttctaaatggatgaaaggttaccccctagcaagattgatctcggatagaataagatataacaaaaagaagaatattactttccaagaagcgactttaatacgggaggttatgaaggatgttgaagagatcgcacgctatcaagccccaagacttttaggatgctataatgatttattaaaaaacttttatcttgcgataggtcgagtggacttagcaaaagatgttgaagatataggtgtgtatttagaacttggtgtaagtttaaaaacccagatttcactaattggccttggattttcaagaactgctgctgtaatgatttcagagcttattcctgatgatagcttagatgaagaagaatgtattaattggattaaagacaataaaattgatctggaagagttgccgcaattagttcaaaacgaaatacataacatatttcgtgtttttttggttaattag

SEQ ID NO: 284492 - DNA, 942 bp, Morganella morganii
atggatgcactgcatgtcgcgcttgaaaatttgattagagatgatggccaaacactgaatagttattttagtgaagttaaagttaactcattgattgaaaatacaaatgcaacttgtcattttcactatcttaatcttgacggaaatgggcgtcctcgggtagacgcgttagtccaattcctgaacgataaagtagttgattatgctattccaaggaagaaaattaatgaggcagtgcaatattttaacgaaacacaatcaacagcgaaaataacaaaattagcaaaccaagcaaagaaattatttactaggcttgcaaatagtggcgaaggaggcgaatttatcctttttttatttgcagagcaatttctcaagtttccacaaattatttgcaaaatgagtctgaaaacaagctctcaaatgcattaccatggcgcagatggaattcatataggcgtagataaagataataaaaaattatgtttatactggggcgagtcgaagctttattccaatttgagtaaaggtatttctgagtgcatggatagtatagctccactacttcaaagttccatgggaatagaaggcgctgaggcacgtgatatgcaattacttgaatcacacttaaatattgatgatatcgaattagagcaagcgttaaaaaaattcttagaccctgacagtccggattttaataaactagaatatagggggatatgcttggttggatttgatcttaaagattacccacaaggaccaagttcaattgatatcagtgaactaattgctttaattaatactaaaatagagaaatggtctattagagtacaaggtggcatagttaataaaaaacttgatcgctttgctatgcatgtttttattctcccttttccttccgtaaaatcatttaggactagtttaattaaagcattggagagttaa

SEQ ID NO: 284493 - DNA, 198 bp, Morganella morganii
atgatagttgaatatcttcttataaataaagatagctcatccgaagtttattatttagccacttcattagttaaaaaaatcactcttacgcgagggacatcgttaacatcgagcacctcacataataacggcggaattaaacacagcaggaaatttaattgccatattctcgcatacacaacaaatcttacgccgtag

SEQ ID NO: 284494 - DNA, 1056 bp, Morganella morganii
atgaaaagcactgttaatttaaacagtattaatttggtcaatgacgactcactcagctatatcaaaaccctcccggacaattgcattgatttaatcgccacggacccgccgtattttcaggtaaaaacatgtgcctgggataaccagtggccggacgtttctgcttatctttcctggctggacgaaatgttggcagagttctggcgggtactgaaaccaaacggcagcttgtacctgttttgtggttcacgtctggcctcagatacagaaatgctgttacgggagaggttcagcgttctcagccatatcatatgggcgaaaccttccggcccgtggcggcggcaaaacaaagaaagcctgcgttgttttttcccgtctactgagcggatcctgtttgcagagcattatcagggaccagtaaaaggaaaaggcagtgagtaccaccagcggcgggatgaactgaagaaaaatgtgtttaccccgctgattgagtatttccggcaggcgcgtgatgcattgggtatcacggcaaaagaaattgaccaggcaaccggcaagcagatgtcttcacactggttcgggtacagtcagtggcagttaccgaatgaagcggattaccggaaattacaggcactttttcagagggctgccgcagaacgtcagcaaaataacccgttataccgtgaacataatgatctggtcagtgagcaacatacactcaggcgtgaatatcacgaacaggcagatcagtatcagttgttacgccgttacttcacggtatcagttgatgtgccttataccgatgtgtggacattcccgccggttcagtattaccccggaaagcacccctgtgaaaaaccggccgcaatgatggagcacatcataaaggccagcagccgtgaaggtgatttggtcgctgatttctttatgggatccggagcgacactgaaagccgcactgaagcacaaccgccgcgttctgggtgtagagatggaagcagagcggtttgagcagactgcagcggaactggcgggcgctgaggtattattcaggtaa

SEQ ID NO: 284495 - DNA, 189 bp, Morganella morganii
atggcacatgagattaaattggagacagctgccaataaagcagctcaattaaacgccttgttgtttacgatcagtggtgagttttcaggtaacccaataaccgacaacctcatcgagctggctcatgaattatctgacagcgtcgtctgctggttgattgaggaaaacgcacagagaaaggagtcgtga

SEQ ID NO: 284496 - DNA, 1734 bp, Morganella morganii
atggtgacgggagttaaaaaagttgttcccatttccgccatgataggaacactgttactgacgcctgtttcgtgggcctcaacagcaccggtaacgcatctgactgaagcagatgccaaagtggaaaatctgaaagcattttcagaatcaccggaaagtacagaagcacaggccgcagagccggtggccggtgttaatgcactgcctctgagcgatgtcgctgacagtatccgccgtgaagttccggcggcaacaccgttactttataccgacacactgacaaacatttatgcggaacatcagctgaaaccgctgtggaccgatgaaaaagcgcgtctgtccctggaaaatcagctggcggaagccgcacttgccggattccagccgcagttcacggcctggctgaatgccctggcacaaccggatctgtccccgctggcgcgggatatgattttaacggatgcggcattgggttatctctattacctcgacaacgtgagcaccaaaggcgataaatggctgtacggcgcccgtccgttcacgtttgcggctgtcagtgccccgtcactggcgcggctgaatacagcggctcataacggcactctggcggcatttaccgatacgctgttaccggcgaataagatgtatcagccgatgcgcaaagccatgctgacagaactggcggataccgcgccgtggccggaaatggtgattaaccggacattgcgtccgggggaaagccatgaatctgtcggggcactgcgtgagatcctgcaccgctttaatctgatctctgccaatgacatgatgagtgccggtgccgtttacgataaaacgctggtggcggccgttaaacagtttcagttacaacacggtctggaagctgatggtgttatcggtaaacagacccgtgagtggctgaataagacaccacagatgcgtgctgccattatggcggtgaatattcagcgtctgcgcattacgccggacaatgaaccgaccgctattctggtcaatattccggatttttccctgtatttctatgtggataataatctgatcctggaatccagaaccattgtcggccgtgcggagcgcaaaacgccgattatgtccagcgccctgaataatgtggtgattaacccgccgtggacggttccgccgaccatgagccgccaggatgttgtaccgcgcggcagggctgatccgagctacttcagcagccgtggttacactatctataacggctggagtaacaacgcctctgtggttgatccgtacagcattgactggagtgttatcacgccgtcaaacttcccgtaccggataacccaggcaccgggcccgtccaactcgctgggacgctataaattcaatatgccgaactcagaggcgatttatctgcacgataccccgaaccacagcctgtttaataaaaacatgcgggccatcagttccggctgtgtgcgggtgaataaagccaaagatcttgcggcgatactccttggtgacgcgggctggaacgaaacccgtgtggatggtgcactgaaagcgggcagtacccgttatgtctctatcccgaaccgtattccggtttatctctattatcagactgcctgggtaaacgcggagaatatcccgcaatatcgcgcggatatttaccgctacgatgacagcagcctgaaaggtattgataaattaactgatatcacgcctttcctgataaaaagctga

SEQ ID NO: 284497 - DNA, 4488 bp, Morganella morganii
atgattgaacgtggtaaattccgctcgctcacgttagtcaactggaacggcttttttgcgcgcacctttgatctggatgagctggtcaccaccttgtccggcggtaacggtgccggtaaatccaccaccatggcggcctttattaccgccatgatcccggatttaaccctgctgcacttccgtaacaccacggaagccggggcaacatccggttcccgtgataaaggtctgcacggtaaactgcgtccgggcgtgtgctacgccatgctggatgtggtgaactcccgccatcagcgtgtgctggtgggtgtgcgtcttcagcagattgcgggacgtgataaaaaagtcgatatcaaatcctttatgattcagggattaccgacacagtactccccgacacaaattgtcagcgaacagctgagtgaacgccaggtgcgggttctgccgctgaatgacctgaaagtccgcctggatgatatcgaaggtgtacatttcaaacagtttaactcgattaccgattaccactcggttctgttcgagctgggcgttatcccgaaacgtctgcgttctgcgggcgaccgcagcaaattctaccgtctgatcgaagcctcgctctacggcggtatctccagcgctatcacccgttccctgcgtgactatttactgcctgaaaacagcggggtgcgcaaagccttccaggacatggaaggggcactgcgtgaaaaccgtatcacactggaagctatccgcgttacccagtctgaccgtgacctgttcaaacacctgatcactgaagcgaccgcgtatgtttctgcagattatatgcgtcacgccaatgagcgccgtgtgcatatcgaccaggcactttctgtgcgccgggaattgctcggcagccgcaaacagctgatcagcgaacagttccgtcaggtggaaatgtcccgcgagttggcggagcagacggcctcatccgccgatctggaaaccgattaccaggcggccagtgatcacctgacgctggtacagacggccatgcgtcagcaggaaaaaattgaccgctatcaggcagatgtcgaagagctgacattccgcctggaagaacagactgaagtggcggaagaagccgcagaacagctggcggaatatgaagaacgcaaccatgttgcggaagaagaagtggatgagctgaaaagccagctggccgattaccagcaggcgctggatgttcagcagacccgcgctattcagtatcagcaggcattacaggcgctggaacgcgccaaagcagtgtgccagttgccgcagctggatattgattcactggatgaatggctggaaaccttccgcgcccgcgaagagcaggcaaccgaatccctgttagtgcttgagcagaaaatgagtgtggcgcaggccgcacacagccagttctctcaggcctatgaactggtgaaatcggtggtcggtgaagtcagccgcagtgaagcttaccagaccgcccgtgaattactgcgcgacctgccgtcacagcagatgatggccgaccgcgtccagccgctgcgccagcagttatccgaactggaacagcgcctgcacagccagcacaatgcgcagaaatcgctggatgatttctgcaaacgcatcgggcagcaggttgaggcggacgggctcgatgagatgctgatgacccttgaggcgcagcaggaaagcctgagtgtcagtgtcagtgaaagcggcgagcgccgtatggaaatgcgtcagcagactgagcaactgaagcagcaaatccagtccctgaccgtcaaagccccggcgtggctggcggcgcaggaagctctgacgcaattgtgtgagcagtctcatgagacgttcaccagcgccaatgatgtcactgaatatatgcagcagttgctggagcgtgagcgcgaagtgactgttgagcgtgatgaaatcgcgctgaaaaaagcacagctggaaaaagatattgaacggctcagtcagccgagcggcgcggaagatagccgtatgcttggcctggcagagcgtttcggcggtatattgctgtcggaaatctatgacgatattacgattgatgacgcaccgtatttctccgccttatacggcccggcgcgccatgcgattgtggtgccggatctcagcgccgtgcgtccgatgctggatgccctcgatgattgtccggaagatctctatctgattgaaggggatccgcaatcctttgatgacagcgtcttcaccaccgaagagctggagcgtgcggtactggtgcgcagcaccgatcgccagtggcgttactcccgcttcccgtctgtgccgctgttcggccgtgcggcgcgggaaaatcagctggcagtgctggaacatgaacgggatgagctggcagaacgcctggcgacactctcttttgatgtccagaaaatgcagcgtgctcatcaggcattcagccgttttgtcggcaaaaatatctcagtggcctttgaggctgacccggaagcggaaatccgcacactgaatcagcgccgtaatgagctggagcgcgagctggcacagtttgaggatcagactgccgttgcccgtcagcagtatgcgcagatcaaagaaaatctgagcatccttaaccgtctgatcccgaataccgctctgctgcttgatgaaacactggcagatcgtgcggatgagatccgtgatgcgctgacggatgcacaggaatccgcccgtcatattcagcagtacggtgcagcgctgcgcaaactggagccgatggtagctgttctccagagtgatccggagcagcatgaagctctgatccgcgattatgaaaacgcgaaacaggtgcagcagcaggcccgtcagcaggcgtttgccctggaagaagtcgcgcagcgccgtcagcactttaattacggcggatccgccggcatgctgacagaaaatgccgatcttaatgacaaactgcgtcagcgtctggaacacgcggagtctgatcgtgcccgtacacgtgagatgctgcgccagcagcagaccaaatgcgcggagttcaatcaggttctggcctcactgcgcagctcgtatgaaaccaaatcggacatgctgcgcgaacttgagcgcgaaatgagcgaaattggtgttcaggcggatgccaatgcggaagagcgtgcccgtgtgcgccgtgatgaactgtacaaccaggtcagccataaccgcgcccgtatcaatcagctggaaaaacagctggggatcggcgagtcggaaatggataatctgcaaaaacgtctgcgcaaagcagagcgcgattaccagcagctccgcgagcaggtcgtgaccgccaaagcgggctggtgtgcggtgatgcggatggtgaaagaaagtggcgttgagcgccgcctccaccgccgtgagctggcttatgaagatgcggacacactgcgttccatgtcggataaagccctcggtgcactgcgtcaggccgtggcggataacgaacatctgcgtgatgcactgcgcctgtccgaagatccgaagcgtccggaacgcaaagtacagttctttatcgaagtgtaccgccacctgcgcgaacgtatccgccaggatattatcaaaactgatgatccgattgacgctattgaacagatggaaatcgagctggcacggctgaccgacgaactgaccgcccgtgaacagaaactggcgatcagctcgaaaagtgtggccaatatcatccgcaaaactattcagcgcgaacagaaccgtatccgcatgcttaaccagggcctgcaggccgtggcattcggtcaggtcaaaggggtgcgcctgaatgtgaatatccgcgaaagccacgcgatactgctggatgtgctgtccgaagagcacgagcagcatcaggacctgttcgccagccagcgtctgaccttctctgaagcgatggcgaaactctatcagcgtctgaacccgcaggtggatatggggcagcgtctgccgcagaccatcggtgaggaactgctggattaccgtaactatctcgagctggaagtggaagtcaaccgtggttctgacggctggctgaaagccgagagcggcgcgttatccaccggtgaggcgattggtaccgggatgtccattctggtgatggtggtgcagagctgggaagaagaatcccgccgtctgcgcagcaaagatatttcgccgtgccgtctgctgttcctggatgaagcagcgcgtctggatgcgaaatctatagccaccctgtttgagctgtgcgatcgcttacagatgcagctgattattgcggcaccagaaaatatcagtccggagaaaggcacaacgtacaaactggtacgtaaagtcttcaataatcaggaacatgtgcatgtggtgggattgcgcggcttcggccagccggaaccaacgccggcaccggaagcattgcctgagccggtgacggaagaggaggatgacggggaagaagagcaggattaa

SEQ ID NO: 284498 - DNA, 291 bp, Morganella morganii; identical to SEQ ID NO: 281794

SEQ ID NO: 284499 - DNA, 1119 bp, Morganella morganii
atggacttattttctccgaaaccaaataacaaactacacagaaacttcaagcacttaattgaaaatgaaaatttaaaaccagtaagagatgtcattcaatcatggggggaaggactattaaacagaaagaatgaaagagataaattcataaatgagtttcagacaacatttaattcatcattctgggaattatatctaaacaatgtatttagaagcatgggattttgtatagattatactaaagaaagccctgatttttgtataagcacgagcaatggatatatgttcaatgtggaagcagttgttgctgatccacctacaaacattactgacactgaatatcatgaaaaaaacttcatagataattgtactataaaaattctaggaagaataaaaaataaacttgatctctacaaaggaactggcggaaaaaaaattccatatagctcattagaacatgtaaagaataatccttttgtgattgcagtagcaccgtttaatagcacactctcattttcacaaaataatgtgtcaattaatcaagttttgtttggaatagatgttccaaaacttaatgatgatggtaattttttagttcctcccaaaacaagaattataaaaccttcaggtgcagaattagaacttggcatatttacaaacgactcatataaagaaattagcgctgtaatattttcatctactggcatgcttggaaaagccattgtcgaaagtggtattccagcttgtatcaaagcaactcgttatcgccaaatttataaacatgatttctaccaagaagaaggcattgataatttaggcaagcatcaccaccaattaacacctacccatgatctattcactatcaggttcctagatggtaattttgtatgcggttcagatatgcacctttgtaaatctaatgaatatagtgaatcgatcttagacggcttacacatatattttaatccatatgcaacaatacccttagatccaaatatatttgatgattatgatattactcataatttttatgatattaaacatcaggaatgcattatggaacatcatgatatgtcgttagtttcccggcaaataattggttatgataacaaagagtaa

SEQ ID NO: 284500 - DNA, 258 bp, Morganella morganii
atggctggtgcaaatcagttgaagttattaataaaaaattatattaacaaaaatagtagaaagtttttgacaaccgttttacagattacggtgcatgaggccaaaatcgggtatgctaacgttaccgataagttgtggacacttgcagaaacagttaaatcaactagtttcgatactgagagtgataacttccctcgaatcttatcctctagtacagcaataactagccattcatcaactatagtgaaaatgggctag

SEQ ID NO: 284501 - DNA, 1335 bp, Morganella morganii
atggaaaataaaaaaacttttactttcattgacttatttgctggtctgggaggctttcatttggcgctgaaacgattaggtgggatttgccgttttgcagtcgagtggaaagagcctctccagaacttatacgaggataattttggtattcgacctcttggtgacataactaaaataccacttgatataatccctgatcatgatgtcttaactgctggatttccatgccaacctttttcaaaggctggtgaacaattagggttcgagtgtacaaagcaagggggattatttttcaacgtagtcgaaattttaaagcataagagacctaaatttttcattcttgaaaatgtccctaacttattaaaacatgatgatgggaaaacgtggataaagatacaacaattgcttggtaaagatggacttggctataatatcgatgcggcaaaactgtctccgcatcgttttggtattcctcaaattcgtgaacgaatatatatagttggatcactgttgccgcttgatgattttaaatggcccgaagccctgaatactgaaacctctatagatagtattttggacgataatccgattgatgcgaaatcactttctcctcaagttatcgattgtttaaatgcttggagtaagtttttagaactttgtcctcctaatattgaaattccttccttcccattgtggtcgatggagtggggggcaacctatccttttgaaaacgaaactccttatgcgagaaaaatgcgattaggaattaatgggttaaaaggattccgggcgagccatggttgtaaaattggccttcgaagaagtatggatgatcgttggatgacattgccaagccatgctcgaacagaagaatttgaatttccaaagtggaaaaagaattttattaggcaaaatagaaagttttataatgataataaaagctggatagatgaatggttacccgatattttaaggttcccatcaagccttcagaaacttgaatggaatgttcatggtgaagagagggacatttggagctatgttctacagtttagagcctctggtgtaagagttaagagaagaactacagctccaagtttaattgccatgactgatactcaagtcccaattattgcttggcaaaagcgttacatgacacctcgtgagtgtgctaagctccagtgtcttgatgaattaaataagctccctgaaagtccaacccaagccttccaggctttaggtaatgcagtcaactcgaaagttgtcgaatgggtagccaacgcgttattaagttccccgctcgatgagagtgataacaataatttaattttttag

SEQ ID NO: 284502 - DNA, 1515 bp, Morganella morganii
gtggtgctttcaaaggttgatattcgtccaggagtaagtatattagccgttttgcggcaccttaattataaaccttggtttgctttgggggaatttgtagacaatgccttgcagagcttcttagcaaactcggcaacgagttctttaaaaaaagtaactatagaaataaatatagactcaactgaacctgcccgaatatcaattaaagatgacgcttttgggattcctttagcggactttccaagagctttcaaaccggcatcaatccctccggataatactggtctatccgaatttggtatgggtatgaaaagtgcagcgtgttggttttctcctaaatgggaggttcgaacatctgtgattggtgaaccaataataagaacagtgtactttgatattgaaaatatgattgcggatgagtcacatgaaatatcaataaaagaaaataaaggtggtgaagaacaacattttacggaggttattttaaataatgtttttcatgttccagttaaacgaactatccataaaataaaaatacatttagctagcatctataggtgctatattagaaagggacttttaacactgaaggttaatggagaggtattaagttatcaagaaccagaaatacttagatccccctattttaaggataaagatggagagcctattatctggcgaaaagatattgaatttaaatttggtgataatatttctgtaaatggttttgctgctatacgtgctgtgggtaatactagtgaggccggattctcacttttcagacgagatagggttattcaaggaagcgctgatgaaacctatcgtcccacatatgtttttggtaattcgaatagttataagtatcagcgtgtgtttggtgagttatatattaatgggattgaagttagccatacaaaagacggttttagatggggagagttagagcaaatatttctaaaattgttacgcgataatttagatagcgatgatatgcctttattacgtcaggcggaaggccatagggttagagtaaatgataataggctaatctcacttgttggacatgcggttgatagctcagtggatgaactgaggaatcatttgccgttgataatccctagtatacttgactctgtactaattgatactcctgtcgaacatactgaataccagtctcagttaatgaaacgaacttttgatatttcgtttcgtgatcaaaattggtctgtatgtattgaaatatcgaacgatgtttctaatagtgagtggttagcattgagtgatacagggaggataggcgatatatgtagacggttacatattcagatgtcgatgtctcatcctctaatgattcagttcgctcaaaaagatggagatgtttctgaaattatgtttcgcgtgggggctgcccttgctatagctgaagtattggctagggactctggtgtcagtaaagccggaacagtcaggcgaaacatgaatgatatcttacgagatgtattttcgaataggtaa

SEQ ID NO: 284503 - DNA, 2178 bp, Morganella morganii
atgagcttagaaactagaaatgatttcattaataacggaatgaattggtctcctgaaaagggtaaagaaactgaagcctttttagaacagagtggtatgccggatggcgctaaagaaaaattactagaagatgctatttcaatattatcccgtggagtttctcctgaaatagaaaatggacaagaaattggtcttgttgttggctatgtgcaaagtggtaagaccatgtcctttgagactgttgcggcgcttgcaagggataatggttttcatatagtaattgttgttgcagggacatcaatccctctacttgaacaatccacgagtcgattaaaaaaagatttggggctaaatgattcaagacgaggccggagatgggtacaactagaaaatccgtcctcttatgatactgctgggcaggtcatccatagtacgttatccatatcaaaagattcgtctactgaggatatatataaacaaacaattcttattaccgtccttaaaaaccataaaagaataaataaactagctgaaatacttgaagctttagatttgaatggaacatctgttcttattattgatgatgaagcggatcaggttagtctaaatactggagtttctcagggagaagagagtgcaacatatggttgcttaatgagactaagaaaagctttaccgaatcacacctatttacaatatacagctactccgcaagcacctcttcttataagtattatagattccttatcacctaattttgtaaaagtattagaaccaggcgatgcttatgttggtggtcgtgatttttttggggcgaattctgaatatatcaatattattccaccaagtgaagttccgacaaaagataatcctttaagccatccaccttcatcattgctagatgccctacgtatattcatgattggagtaactgtaggcattagcgagtccgggaatgccggtaatcgctcaatgcttgtgcatccttctcatttgacttctcagcataaagagtattatggctgggttagaagtacatttgatgaatggcacaggtgtttggcgctatgtgatgatgatccggataagatagatctcctaaacgaatttagagagtcgtacaatcagttaaatacaacagtagcactaccatcatttgataaaattataaattcttttagcattgcatttaaaagtactcagatagttgaagttaatgcaagaactaataaaacaccggcgatcgactggcaacataaatatggatggattttggttggtggaattgcggttgaccgaggatttactgttgaaggattgactataacatatatgcctagaggtattggtgtcggtaatgctgatactatacagcagcgagcaaggttctttggatataaaaaaagctatttgggtttctgtagggtttatttagagcaaagtacacttgatgcctttagaaattatgtcatgcatgaagaagatataaggaggcaacttaaggaaattgaagtaagtaataagttattaaattcttggaagcgagcattcttattagatcttgatttgaagccctgtagggatagtgttattgaatttgattacatgcatactaaattttctgataaatggatttttccaaaaataacacatccttcagaatctgtagttattgaaaaccaaaatacagtatcagaatttttgaaccgtctatctatgcgttgtgatgagggacatgtagaccgtacagaaaatcagaaacattatatttgtgataacgttcttttaagcgatttgttcgaaaatttacttgtaaaaataagggttgctggaaattatgactctcataataatacagctttattattgcatttagcaaaggcaattgaaagagactcaacagagagttgcgttatttatagaatgagcccaaatgagaaaagagttagggatgtaggttcttatttatttcaaggtgcttatcctacaacaaaatctagacgcggggaaatatacccaggtgattcttcaattaaagataataaccgagtgagtgttcaaatacattttattaatttaaagtgtgatggtaaagtaattattaataatgttcctgtggttgcggtgtggataccgagacgattggcttgttcaattatagtgcaacatcaaagttaa

SEQ ID NO: 284504 - DNA, 654 bp, Morganella morganii
atgcattctggtttaatagataaatcctatatttctaatgcaaaacaacatttaggaaagaagcctacacttacaacagatataaagtcttttttcccatcaactacacgtcagaaagtttttaatttcttctataaaaaattatgttgctccagtgatatagcagatttattatctcttttatgcactataaataatcacatccctactggtagtcgtattagcatgcccctagcctactgggcaaacgctaatatgtttaataatctctatgcaatctcttgtgcaaataatattataatgactgtatatgttgatgatataactttttcaggtgaaaaagtgaataaacaatttttaagtcgtgtgaaaaaaataattacatcagaatctcatataatgcatccaactaagactatcctatatagtggtacagaaataaaaaaaatcacaggcgttataatctctaacgataaattaaaggtaccaaactctctgcataataaaatttatttggatatagaggaatggaagtctcttgataataatgaaaacacagcagtaaagaatcgcttacttgggagagtatatgctgctgctaatattgacaatcgctttaaagataaagcgagaacaataaagaaatatgtataa

SEQ ID NO: 284505 - DNA, 939 bp, Morganella morganii
atgccctatgatttgactaaaagattagttgtgggtctatcatcaagtgctctttttgatcttactgattctgacgatatcttcagaaccaaaggcgaagatatttaccgtgaatatcagagagaccaacaagatataccattggaaaaaggtgtagcatacccatttatcagacgtctactaaaattgaatgaactacgtccccaagatcctcttgttgaagtaatattgttatcacgaaatgatcctgatacaggactaagggtcatgaattccattgaatattataaattaccaatcacaagagctgtttttttgcaagggaaatccccatatatatatatacctgcgtttgatatagagttatttctttcagcaaatcaacatgatgtaaaacaagctattttagctggttatcctgctgggcaaatattaaagggaaatataacagatgatgattctgatcttgaattaagaatcgcttttgactttgatggtgtaattgcagatgatgaggcagaaagtatttataaaaattcaggagaactagctgactttcatagtcatgaagctgaatatgttaataaaccacacaacccagggcctcttaaaaaatttctacaacgagtatctgatatacaaaaactagaaaatgacaaagttaaagatgataattcatataaacctataataaacatttccattgtaactgctcgtaatgccccatctcataaaagagtaataaacacaatgagatcttggggaatatctattaatgaagcattttttatgggaggtgttgaaaaatccaaggtattaaatatattaaaacctcatattttcttcgatgaccaaagacttcatttacaagcatcctctatattgccttccgtacacataccattcggaatagctaatgaagtaactaatgaagaatag

SEQ ID NO: 284506 - DNA, 1494 bp, Morganella morganii
gtgcgggtcagggcgattaatgcagcggaaatctccagcggctgggggtattcagaggaaacacggctgaccggcaaggcgggggatccgccggtaccgctgaacttccgtgcgtctacactggtattcgggataaaactgaactgggagttcgggaaattcacggaagataccctgaaaactgaaattcagtacagtaaaaccaacgatggtcagaatctgttattgctggccgatgtgccgtacccgtcccgctctcatgagcttgccggtctggccgccggtaccgtgttttatttccgcgcccgcctggtggataaaaccggcaatcagtccccctggactgagtttgtgcgcggtgtggccgagtttgatgcatcaaccattattgatgaagtggccgccgggctgggtgactcacaaatcatcaaagacctgcagtcgcaggcggatgataatttcgaggccatcatcaacaacgccaacaacgcctacggccagtggaattactggcagcgcgaaaacggcgcgatgaaagcagaaattatcgaagtccgcaactacacagtcacgaaaacaaaggcacttgcagagaaactggacgcggttaaggtgactgcagacgacagtttcgccatggcacaaaactccatccgcgcgcagtgggacatggccgccggtgaagcatccgttgttcacgacatgaaagcccggatccgttataacggtgaggactattccgccggcatggtgatcggggccgagctgaaaggcggggaggtgaacacgcttatcggctttaacgcgcaaaaatttgcattttataacccggtgaataaatcgatggatttgttcatgtacatgaagggcgggcaggtgtttatccgagaggcttttctggatgaggcgtggataaagagcctgctggtgatagacaagcttcagtctgaaaactatgactctgccggtaaaaagggattcctgattgatgccaaaactgggaaagccgagtttaatgaagccattattcgcggaacgctgtatgccacagatggtgaattcgccgggactgtctacgcacaacggataatcggtgacgttgttacggccggtatttatcctgccgcgagcgcagggagtatatacggtgacggcggagactggacgacagttaaatcgacattgacgtatgtcggcggtatgccttaccccatcgcgctggttttaccaactatcattgttggcgtagagcagcatcagggataccccctgggaaaattgcaggggtccgaggtaaacatacgtattgacggcgttgcgcagtcagtcgccgggtttggtgatgtccgctcagcggttattttcatttctgcgggaaggcgtgatgtgaaaatagaggttgagtaccgtgtcagacataccggttctgttggcgttcgcctggcttatggtgttgttcttgcctgtaagtacaactcagcatcattcagataa

SEQ ID NO: 284507 - DNA, 417 bp, Morganella morganii
atgcgtaaaatattagggctattgttgctgtcacttgctccccaagtttcacacgcagatacagctcctttcactctgtcgcaaatttgcctggcaggcgtggccaccttctacggaagaagcatcgatatcatgaaagcccaagttttaccggaaggtgaaattcgcgttacctacaacagacctgaagatggcagaccgttttcattcaaatgcaggaatcaccccaagagcaactatcgcctcaacctccttgacgaaagccttaatggggcgcggtggtacggagaggatatggctgataaacagacattatataccgtaaaagacaatatcctaatcataaggaccgtaggtaatggtgttctgttagcggaggatttctacagaccgtctaactttcccccatctaagtag

SEQ ID NO: 284508 - DNA, 720 bp, Morganella morganii
atggataagttgctgaacaaaaagataaaagttaagcagtctaacgagcttaccgaagctgcttactacctctcgctaaaagcaaagcgcgttctctggttatgtcttatgcagacgtatttcacagcttcagtaagcgaagatgatgatgagatggctgtactcggtgactctactttcaaagtaaaggtggctgactatgagcaaatttttcaggtaagccgtaaccaggctatcaaggatgttaaagaaggcgtgtttgagttaagccgttctgcggtaatcttttacccgaaagaagggagttttgactgcgtcgcgcgcccctggctaacagaggctggcagccgatcagctcgtggtatctgggaaatcgaatttaaccataaactcctgcggtacatttacggcctgacgaaccagttcaccacctactcgctccgcgattgtggcagtcttcgaaatccacggacgatccgcctttatgaaagtcttgctcaattcaaatcttcaggcttatgggttactactcatgcttggttaaatgaccgtttccttttgccggaatcccaacagaagaacttggcagagttgaaacgatctttccttgatcctgcactcaagcagataaatgagagaacacctttacttgctaagtatagtattgatgattcaggaaaatttctgttctcaataattgataagcaaaatcccgtctga

SEQ ID NO: 284509 - DNA, 342 bp, Morganella morganii; identical to SEQ ID NO: 16817

SEQ ID NO: 284510 - DNA, 792 bp, Morganella morganii; identical to SEQ ID NO: 16818

SEQ ID NO: 284511 - DNA, 1266 bp, Morganella morganii; identical to SEQ ID NO: 16819

SEQ ID NO: 284512 - DNA, 441 bp, Morganella morganii; identical to SEQ ID NO: 16820

SEQ ID NO: 284513 - DNA, 426 bp, Morganella morganii; identical to SEQ ID NO: 16821

SEQ ID NO: 284514 - DNA, 405 bp, Morganella morganii
atgttagcgacacttcaacaccctaccgcctggcaattgccagatcggttaatgcttttggaactgttaatgttcgattaccgtaattccgatcaggagcgctacggccagcaagtctatcaccactatcgtaaacagggtaatcatcgctgggatacttctgttcatcaggatagcggcggccaatacgcgattattttccggcactccttcagcaaaaaacaggctgatggcgttaagcgaacgatgatccgcgatgaaaccgttatacgggcaggtacggcgcaggagctgacagaagcgacatttcccgacttccaggatagcgatattctgaaggcgtcggatttctttaagtcgcttatccagcgcaaagcggcagacgtaacacaaaccgatatttga

SEQ ID NO: 284515 - DNA, 156 bp, Morganella morganii; identical to SEQ ID NO: 16824

SEQ ID NO: 284516 - DNA, 546 bp, Morganella morganii
atgtggtcgaaaatctttaaaagcgaacccccggacgtcacccctccggggccgttctgctgtgctgcgcatcgagccgctacgcgtctcgccccgctcacgcgggcagctgccactgacgcctccggcctgcggcctccgcgctccgcttggcaaccccttcccctgctgccgctcatttccccttcagcctcctatcatgattcgtctcctgcattatccgtggattgtgcagctcagtggggcgctggccgtgacggtgcggtgtcccccgtaaccggccgcgcggcggccgctaactcgcagtacggcgccgcgacccgcaggcgggccgccgtacccgcgcgcaggcgcgcggcgcccactgcgcacccccgtgggggacgtgcggcagctgcgtggcggcgggctgggttatggcttagcagggaggggggttggcctgttgctccggtcagtcccgcagtttccggcgatttgcggccggtgtccggtggagtccggcgcggtcgccttccatgccctgacgggcataaaaagatgtaa

SEQ ID NO: 284517 - DNA, 297 bp, Morganella morganii; identical to SEQ ID NO: 97149

SEQ ID NO: 284518 - DNA, 360 bp, Morganella morganii; identical to SEQ ID NO: 97150

SEQ ID NO: 284519 - DNA, 285 bp, Morganella morganii; identical to SEQ ID NO: 16828

SEQ ID NO: 284520 - DNA, 333 bp, Morganella morganii; identical to SEQ ID NO: 16829

SEQ ID NO: 284521 - DNA, 180 bp, Morganella morganii; identical to SEQ ID NO: 97153

SEQ ID NO: 284522 - DNA, 321 bp, Morganella morganii
atgaccacacaaacccttgagcagactcttgaagattttcgtcgccagtgtgagagttttgcgcgcgaacagcagccccgctgcggcctgatttatgaactgtatcagcgccgcctgagcgcggatattgacggctatcttgctggcgttccggccgagtatcgggaagaactgatcgcggtagcgcggcgtgaatttgactatctgacccaagacgagatcgcggaagaaatccggcaggatcgggaaaacgattattgcagccacggtattgagcgtaattgttgcccgctgggctgcggagatctagacgattactga

SEQ ID NO: 284523 - DNA, 345 bp, Morganella morganii
atgaatgaccgacagcgtgaacaggcccgtattcgccaggcccggcgccgcgcgcgactcaaagaggaaggcgcttgcgtgacagtcacgctaacaaaacaggaagaagcaatgttacaggagctttgccgggttcgccgtccaggacgaacagcctattccacgaatgagtttttccaactgctgctgatccgaaactggcaacagtggcaggagcaaaaggcgcagctggggaaatgccaggcttgcggaaagctgaaagcggagggaggttgcggcggcgaacggcagagcgaaacctttaactgctggctagccgtcgaagcaaacgagcttaatgtgtag

SEQ ID NO: 284524 - DNA, 369 bp, Morganella morganii; identical to SEQ ID NO: 97156

SEQ ID NO: 284525 - DNA, 717 bp, Morganella morganii
atgaaagtagcggtaattaattacagtggcagcgttggtaaaaccttaatttcatcctacctgttagccccgcgtctgactggagcaaaattctatgcggttgaaactatcaaccagtctgcttccgatctggggattgagaatgtttccatttttaaaggtgatgacttttcacggttgattgaagatattgtttttgaagatgccgggattattgatattggtgcgtcaaacgtagaagcgttcctgatggcaatgtcccgctttgacagtggcgcgaatgaatttgataagtatgtaatcccggttacgcctgataataaggccattgatgaaagcatgaaaacagcacatacgttaagtaaggcaggtgtaagcagcgataaaatcatctttgttccaaaccgcattagtccagatagtgaagtagaggatgtactggcgccggtatttgaatttgtcaaacgaacgaaaattggcaaaatcagcaaaaaatctgttatttataacagtgaagttttcgaatatctcgcgtatcaccgtatctcattcgaagcattgaccgctgaagatccagaagaatttaaagcccgcgctaaacaaacaacagatgctgacgagcgcaaaaaactggcccgccgttatacctacatgaaacaggcaattcctgttaaagctaatctcgataaagcatatgcggctttaatgggagaataa

SEQ ID NO: 284526 - DNA, 420 bp, Morganella morganii
atgaagcccaaaagtatcagggcggcacttcaattgatgttgccggaaatagaagaaatgctgtcactgggagtttccagggaggaaatttataaggcagtttgtgaacgcttcggcctggaaggtatgaacgttcgtagctttgatacgtccctatatagagcgcggcaaatccggaaaaatggaatgcacaatacacatggaaggatgccgaacaatgaagatagtgtattgcacaatacacaaaatggaggtagcgagaaaggtgcagaggaaagtgtattgcacaatacacaaacgccgcctgagcctgaaccgcaaggaagtgaaaaaaaagaaagtcccggcattattgataaagagttcttcaataaaatcagtgaagatttcgaccctaagatgttcaacaaaaaattctga

SEQ ID NO: 284527 - DNA, 417 bp, Morganella morganii; identical to SEQ ID NO: 16834

SEQ ID NO: 284528 - DNA, 1530 bp, Morganella morganii
atggacgatagagaaagaggcttagcatttttatttgcaattactttgcctccagtgatggtatggtttctagttgcaaaatttacctacggtattgatccatccacggctaaatacctgattccgtatctggttaagaatactttttcgctatggcctttatggtcagctttaattgctggctggtttattggtattggcggtctgatcgcttttatcatttatgataaatcacgcgtgtttaaaggcgaaagattcaaaaagatttatcgtggtacagagcttgttcgcgccagaacactcgctgataaaacacgcgaaagaggtgtcaaccagttaaccgtggctaatatccccatacctacatacgctgagaacttgcatttttcgattgccggtacaaccggtactggtaaaaccacaattttcaatgaactgttatttaagagcatcattagaggcggcaaaaatattgctttagatccaaatggggggttcttaaagaatttctatcgtcccggcgatgttattttaaacgcctatgataaacgcactgaaggctgggtgtttttcaatgaaattcgccgttcatatgattacgagcgtttagtgaactctattgttcaggaaagccctgatatggctactgaagaatggttcggctatggccgtcttatttttagtgaagtttcgaaaaaacttcacagcctatacagcacagtaactatggaagaagttattcactgggcctgtaacgttgaccagaaaaaattaaaagaatttttaatggggacgcctgccgaagctattttttccgggtctgaaaaagcagttggaagcgcgcgatttgttctcagtaagaatcttgccccacatttgaaaatgccggaaggtaatttttccctgcgtgactggcttgatgatggaaagccgggaaccctgtttatcacctggcaggaagaaatgaaaaggtcacttaatccgctaatttcctgctggctggattcgattttttctatcgtgctgggtatgggtgaaaaagaaagccgcattaatgtatttattgacgagctggaatcactccagtttctgccaaacctcaacgatgcactgaccaaagggcgtaaaagcggtctgtgtgtttatgctggctatcaaacctattctcagctggttaaggtttatggtcgggatatggctcagacaattctggctaacatgcgttctaacatcgtgctgggcggcagccgtctcggtgatgaaacgttggatcaaatgtcgcgctcactcggtgagatagaaggcgaagttgagcgtaaagaatccgatcctcagaagccctggattgtccgtaaacgccgcgacgttaaagttgttcgtgccgtaacgcctaccgaaatatcaatgttgccaaacctcaccggctatctggcgttgcctggtgatatgcccgtcgctaagttcaaggctaaacacgttaaataccatcgcaaaaaccctgttcctggcattgaactgagggagatctga

SEQ ID NO: 284529 - DNA, 3237 bp, Morganella morganii
atgcttgatataaccacgattacccgccagaacgtcactagcgttgtgggctactactctgatgcaaaggatgattactacagtaaggattcatcattcacctcctggcagggaaccggagctgaagccctcggcttatccggggacgttgaatcagcccggtttaaagagctgcttgtcggtgagatagataccttcacgcatatgcagcgacacgtgggtgatgccaaaaaagagcgtctgggctacgacctgacgttttcagcgcctaaaggggtatccatgcaggcgctgatacacggcgataaaaccattatcgaggctcatgaaaaagctgttgccgctgctgtgcgtgaagctgaaaaactcgcgcaggcccggacgactcgccaggggaaatcagtaacccagaataccaataaccttgtcgtcgctactttccgccacgaaacgtccagggcgctagatcctgatttgcacacacacgcttttgtcatgaacatgacccagcgcgaggacggccagtggcgcgcgctcaaaaatgatgagctgatgcgtaacaaaatgcacctgggcgatgtttacaaacaggagctggcgttggagttgaccaaagccggttatgagctgcgttacaacagcaaaaataacacgttcgatatggcccatttttcagatgaacagattcgcgctttttcccgccggtcggagcaaattgaaaagggactcgctgcaatgggtctgacgcgggaaaccgccgatgctcagacgaaaagccgtgtctcgatggctacgcgtgaaaagaaaacagagcattcccgtgaagaaattcaccaggaatgggccagccgcgccaaaacgctcggcattgattttgataaccgtgaatggcagggacacggtaaacctctggaggctgatatagcgcgcaacatggccccggattttaccagcccggaggttaaagctgaccgggctatccagtttgcagttaagtcgctgtcagagcgcgatgccagctttgaacgccagaagctgattcaaatcgctaataagcaggtgctgggccatgccacaatagccgatgttgaaaaagcgtacctgaaggcggtacagaagggcgccatcatcgagggcgaagcccggtatcaatcaactctgaaggtcggtgcttcagttatggccgaaactctgacgcgcaaagagtggatcgactcgctgacgaatagcgggatgcgtgcggataaagcccgttttgcggtagatgatggtattaaaaacggcaggcttaaaaagaccagccaccgcgtcactaccgtggagggtattcgccttgagcgttccattctgactatcgaatcacgcggccgggggcagatgccgcgacagctgaccgcagagattgcaggccagctgcttgccgggaaaaccctcaagaaggagcagatgcgcgcggttacagaaattgtgacgagcaaagatcggtttgtggccgcacatggttacgccggtaccggtaaaagctatatgacgatggccgctaaagagctgctggagtcacaagggctgaaggtcacggcgctggccccctatgggacacagaaaaaagcgcttgaagatgatggattaccggcccgcaccgttgccgctttcctcaaagcgaaggataaaaagctggatgaaaaatcagtcgtattcattgatgaagccggggttatacccgcccgacagatgaaacagctgatggaggtgatcgagaagcataacgctcgcgcggtattcctgggggatacgtcacagacgaaagcggtagaagccggtaagccttttgagcagctgattaaagcaggtatgcagaccagctacatgaaagacattcagcgacagaagaatgaagttttgcttgaggcggttaagtatgccgctgaaggtaatgccgcgcgcgccctgaaaaatatcaccggcgtgaacgaactgaaggaagaagcgccccgactcgctcaacttgccgatcgctacctgtctctgtcctcagaacaacaggatgccaccctgataatctctggtacgaacgcctcacgcaaaaccctcaatgactacatccggggcaatctggggcttgccggaaccggcgaaacgttcacgctacttgaccgtgtggattcgacacaggcggaacgccgcgacagccgttatttcagtaaagggcaaatcattatccccgaacaggattacaaaaatggtatgaagcggggcgagtcttaccaggttcttgataccgggccgggcaacaaattgacggttgaaagcagcagcggtgagcagatcgctttcagcccgcgtacacacaccaagctgtctgtataccaggcagtcagcgccgaactggcgccgggcgataaggttatggtaacgcgtaacgataaaacgctggacgttgccaacggcgaccgcttcacggtgaaaaccgtggagggtgaaaaactgacgcttgaggacaaaaaagggcgcacggttgagctggacaaaaaacaggcttcttatctttcctatgcttatgcaaccaccgtccacaaatcccaggggcttacctgtgatcgcgtgttgttcaacatagataccaaatcgcttaccacttctaaggacgttttttatgttggtatttcgcgtgcgcgtcatgaggtggaaatttttaccgacgataaaaaatctttggcatcgagcgtgagccgcgacagcccgaaaaccacggccgcagaaattgaccgtttctttgggcttgaggccaggtttaaggatattggccgcgataccagtttagaaacccgatcagctgaaaaaggtctgccagaagccacgggggaaagcatggcgtttaaccagaaacccgatgaacataacatgacaaccggcactgattatcagccggtgagcaacgcagaggacgcctttcatcttaagcagaaccctatggatgattccgttggcctgcggcgtcatgaagcacagcaaaatgatgcagaactggcccatgattatgctgctgccgacgatcagcagtggagcgcgcaggagtatgccgattacgagcattatgccgaagcatcagactacgactttgacagcagcatttacgacgattacgccatgccgcagacgtctcaggcggaacagagccataccggaaaagaacacacccatgagcatgagcatgaagaagggggccatgaaatctga

SEQ ID NO: 284530 - DNA, 399 bp, Morganella morganii; identical to SEQ ID NO: 218223

SEQ ID NO: 284531 - DNA, 291 bp, Morganella morganii; identical to SEQ ID NO: 16838

SEQ ID NO: 284532 - DNA, 402 bp, Morganella morganii; identical to SEQ ID NO: 16839

SEQ ID NO: 284533 - DNA, 357 bp, Morganella morganii; identical to SEQ ID NO: 16840

SEQ ID NO: 284534 - DNA, 315 bp, Morganella morganii; identical to SEQ ID NO: 16841

SEQ ID NO: 284535 - DNA, 534 bp, Morganella morganii; identical to SEQ ID NO: 16842

SEQ ID NO: 284536 - DNA, 996 bp, Morganella morganii
atgactgatgcagctttctatcaacttggcccactgcgcgagtatttagaagatcctactgtttttgaaattcgcattaactgctttcaggaagttatctgtgatacgttcagcggccgcagggttgtgcagaacgcggcaattacggcagattttattaggaaccttgctaaatcgttggtgagcagcaacaagctgaccatgcaggccattaatgacgtgatcctgcctggcgggatcaggggcgttatctgtctgccccctgcggtgattgacggtacaacggccgtagcgtttcgtaaggatttggcggccgataaaaatctggagcagctgacccgcgaggggattttcagtgactgccggaagattaccggcagcaagcaaagcctaacggatgatgattttttccttaaagagctgcacagcagcgaaaaatggcccgcattcctgcaaaccgccgttgagaagaaacgcactatcgtgatctgcggtgaaaccgggtcggggaaaacggtactcacgcgcgcgctgttaaaatcgctacataaagacgagcgtgtaattattttagaggacgttcacgaagtcacggtcgatcacgttgtagaagccgtttatatgatgtacggcgatgcaggaaagatcggccgcgtcagcgccactgatgccctgcgagcctgtatgcgtctgacaccgggccgtatcatcatgactgagcttagggatgatgctgcgtgggattatcttaaagcacttaataccggccatccaggcggtgttatgtcaacgcacgctaactctgcgcgcgatgcctttaaccgtattgggctgcttatcaaggcgacccctatcggccgtatgctcgatatgagcgatattatgcgaatgctctactccaccattgacgttgtggtgcatatggaaaagcggaaaatcaaagaaatttattttgacccggaatataaaatgcagtgtgtgaacgggagcctgtaa

SEQ ID NO: 284537 - DNA, 1161 bp, Morganella morganii
atggcccgtaaaagtgtcgatgtagatcaggaactcgatgaaaacaccggagacggtgaatttgaaagcgagcgtggcggatttaaaggcagtaaccgccgttcggctcctggtatgaaagcctttgtcatactgatggcgctgcttgctttggtattcatcgggattacggtcatgggtaaaattcgcgccccggctaaagctgaagctgataaagacggtggtaaagcgcaacaggccaatacactgccaaactacagctttaacagcgatcctgatgttaataaacctgcaactgcgcagaatagcgccactgatgcccgtgctgtgcaggctgccgcacaggcagatgcagatgcgggcagcagcaataccggcgcgcgtacctctaataagcgtaaagaaccttcgcctgaagaactggctatgcagcgtcgtctgggcggcgagctggcccagactaatcaggcggctacaagcaatagtcccggagtgcagccccaggacaacgaaacaagcgaaggtagttcagcactcgctaaaaacctgactcctgcaaggctgaaggctagccgcgctggagtcatggctaatcccagcctgactgttccgaaaggcaaaatgatcccctgtggtaccggcaccgagctggataccactgttccgggtcaggtttcctgccgggtttcacaggacgtttactcagctgatggactcgttaggctgattgataaaggctcatgggttgacgggcagattaccggtggtatcaaagacggccaggcgcgcgtgtttgttctctgggagcgtatccgcaatgaccaggacggaacaatcgttaatattgacagtgccggaacgaactcactcggcagcgcggggattccgggccaggtggatacccatatgtgggagcgtctgcgtggtgcgatcatgatttcgttgttctctgacaccttaacggcgctggttaaccagacgcagagtaataacattcagtacaacagtacagaaaacagcggtgagcagctggcgtctgaagcactccgctcttacatgtctatcccccctaccctctacgatcagcagggtgatgcggtgagcatttttgttgcccgcgacctcgatttcagcggcgtttatacgctcgcagacaactaa

SEQ ID NO: 284538 - DNA, 885 bp, Morganella morganii; identical to SEQ ID NO: 97198

SEQ ID NO: 284539 - DNA, 699 bp, Morganella morganii; identical to SEQ ID NO: 16846

SEQ ID NO: 284540 - DNA, 1041 bp, Morganella morganii
atggcattcaccctagtcgcagacattttcgcaaaagtagacggggcgattacgtcaatggtgagcgccaatgttgccaccattatctctgatgtaacgcctctgattgccacctgtctgacaatcaagctgatggttcaggggatgtactcagcgtttaatccgggggcgggcgacagcctgagttcgctgattaaagagtatctttccatagcccttatcctgagctttgcaacggcgggcggctggtatcaacaggaactggtcaacgtggcgcttcacctgccggatgattttgccgggatactgtctgcccctaataaagtcggtgcaagtggcgtaccggcgattattgatagcggtattgaaaaaggtatcaagatcgtcaacaccgcatgggaagccgcagacgtgttttcatcgagcggcctggccgcgtatgccattggcggcattatgatgattgctaccgttgtgctgggcggcctcggtgcgggctttgtgatcatggctaaaatccttctggccgttacgctttgttttggcccgattgcaatcttctgcctgctgtggggagcgacaaaaaacatctttgctcgctggctggcgtcggtcattaactatggccttgtcgtcgtcattcttgcgctcgtgtttggtttcatcatgcagatgttcgacaacctcctgtcctcgatgaactctgatgccgcttactcatcaatcactggttctatctccgccttattactgacggtcatttccgttttcgttctgttccagattccgcaaattgccgccagctggggtagcggtatcagcgccggagttgctgacgccgcacgctctacgggttcttccatgcaggcgcttggcaatatgggcagccacggcatgtttggcggtaatgcgttcagaggcggtaacagtggcggcggccagcaatcggcaggtggaggaagtggcagcaacagcggaggaagcagtggttctaatttaagtggtaaggcaaggggcagtcgagggaagaaggctgcataa

SEQ ID NO: 284541 - DNA, 228 bp, Morganella morganii; identical to SEQ ID NO: 16848

SEQ ID NO: 284542 - DNA, 714 bp, Morganella morganii; identical to SEQ ID NO: 16849

SEQ ID NO: 284543 - DNA, 2601 bp, Morganella morganii; identical to SEQ ID NO: 16850

SEQ ID NO: 284544 - DNA, 318 bp, Morganella morganii; identical to SEQ ID NO: 16851

SEQ ID NO: 284545 - DNA, 294 bp, Morganella morganii; identical to SEQ ID NO: 16852

SEQ ID NO: 284546 - DNA, 282 bp, Morganella morganii; identical to SEQ ID NO: 16853

SEQ ID NO: 284547 - DNA, 735 bp, Morganella morganii
atgagtaaacatccaaaactcctggttctcgctctggcctgccttgcttgtgctggccgtgccagtgctgcgcctgcctccgatgaagttgccaggcttgcgcagagatgtgcgcctgatgtttcacccttaacgatggcgtacatcgtcggccatgagtcctcaaatgggccgtacaggatcaatattaacggtagtattcagttaaaacagcaaccgcgtactgaagctgaggccgtcagcgttgcgaaagttctgctgaaggataataaaagttttgatatgggccttgcacaaattaactcaaataatttagtgggcctgggtctttcggttgacgatattttcaaaccctgcatcaacctgcgggcgagccagaccatccttaaagcctgttatgatagcgcccagaaatcctacccagccgggcaggttgcgctgagacacgcgctttcctgctacaacaccggctcactcacaaacgggatttctaacgggtatgtcacgaaagttatcaacgtggcgcgtcaatcaactgatttgaaaatccctacgctgctacctgacggccagaccagtgaggacagcaccgcgactgagcctcagcaggcaaaaagtacggcgccgcagtatgacggtgaacaagatgtttttggttcgggtgatggcgatgccttcagccgaaataatacggatgcctttttaaccagacaggaaacagcgaagggggagtga

SEQ ID NO: 284548 - DNA, 306 bp, Morganella morganii; identical to SEQ ID NO: 97181

SEQ ID NO: 284549 - DNA, 345 bp, Morganella morganii
atgggcgaacttattgattttgcggaaaggaaaaaaagcagaaggaagaaaaaggcatcttccattccgcccatttttagaaaattccgtgtccatgctatcaggttactcgccagcatcatcaaatccggctcttattcagttgcttatatcgttaagaaaattacaggaaagttaatcaagttgttcgcaatgttaacgattttcgtttttattgtcgaatatatcgcaggcgatataggttacaaatctatttataactctgcgttattattaatattacttaccgttatcaacattctggcgggtgtatatctgaacaaactgttaaggacaaaacaatga

SEQ ID NO: 284550 - DNA, 315 bp, Morganella morganii; identical to SEQ ID NO: 16857

SEQ ID NO: 284551 - DNA, 312 bp, Morganella morganii; identical to SEQ ID NO: 16858

SEQ ID NO: 284552 - DNA, 642 bp, Morganella morganii; identical to SEQ ID NO: 16859

SEQ ID NO: 284553 - DNA, 267 bp, Morganella morganii; identical to SEQ ID NO: 16860

SEQ ID NO: 284554 - DNA, 1434 bp, Morganella morganii
atgtctgaatttgaattactggcgcaggatctgcttgagaaagcagaagcggaagaacaactgcgacaggaaaatgataaaaagctgctcgggcaggtgctggaaatctatgaccagaagtacgtggctgaactgcttagaaaagttggtaaaaatgagtggagtcgcgagactcttaatcgctggattaatggtaagtgctcacctaagacgctgacgttagccgaagaggaacttctacgaaaaatgcttccggaagcgcctgcacatcaccctgactatgccttccggtttattgacctgtttgctgggattggaggtatacggaagggcttcgaaaccatcggtggccagtgcgtttttaccagtgaatggaataaagaggctgtgcgcacatataaagctaactggtttaacgatgctcaggaacacactttcaatctcgatattcgggaagtcacgctcagtgataaacctgaagtacctgaaaacgatgcctatgcttacattaatgagcatgtgccggatcatgatgtacttctagcaggtttcccctgtcaaccgttcagccttgcgggcgtaagcaagaaaaactcgctcgggcgcgcgcatggtttcgaatgtgaggctcagggaacgcttttcttcgatgtggcgcgtattatacgcgcaaaaaaacctgccatctttgttcttgaaaacgttaaaaacctgaagagccatgacaagggtaaaacctttaaagtcatcatggataccctcgacgaactgggctatgaagttgcggatgcagctgagatgggcaaaaacgatcctaaagttatcgacggaaagcactttttacctcagcaccgagaacgtatcgttttggtcggtttccgtcgtgatctgaacattcaccagggctttaccctgcgcgatattagtcgtttttatccggaacagcgtccgtcatttggcgaactgctggaacccgtggttgacagcaaatatatactgacgccgaaactctgggagtatctctataactacgccaaaaagcacgcagctaagggtaacggattcggttttggcctcgttaatcctgaaaataaagaaagcattgcccgtacgctttctgctcgctatcacaaagacgggtctgaaattctgatagaccgtggctgggatatggccacaggtgaaacagacttcgcgaacgaagaaaatcaggcgcatcggccccgcaggctgactccacgagagtgcgcgcgccttatgggttttgaaaaagtagatggcaggccttttcgcattcctgtgtcagacactcagtcgtacaggcagttcggtaactccgtagtggtgcccgtgtttgaagccgtagccaaactgcttgaaccttatatcctgaaagcggttaatgccgattcgtgcaaggttgaacgaatctga

SEQ ID NO: 284555 - DNA, 1209 bp, Morganella morganii
atgtcggttttccacaactggctacttgagatcgcatgtgagaattacttcgtctacatcaaacgcctttccgccaacgataccggcgcaacaggtggtcaccaggtagggctttatatcccttcaggtatcgttgaaaaactctttccgtctatcaaccatacccgtgaactgaacccttcggtttttctcaccgcacatgtgtcatcgcatgattgccctgacagcgaagcccgggcaatttattataacagccgtcattttggtaaaacccggaatgaaaaaaggattacccgctggggtagaggcagcccacttcagaatcctgaaaatacaggggctctgacgctcctggctttcaagcttgatgagcaagggggggactgtaaggaagtaaatatttgggtatgcgccagcactgatgaagaggacgtcattgagaccgctattggtgaagttatacccggagcgcttatatccggccccgcaggacagattctaggcggactatctctacagcaagcgccagtaaatcataaatatattctacctgaagactggcacctgcgctttccgtcgggaagtgaaattattcagtatgcagccagccattatgtgaaaaattcccttgatccggatgagcaacttcttgaccgccggcgcgtggagtacgacatatttctattggttgaggaactgcatgttctggatatcatccggaaaggatttggctctgtggatgaatttattgcgctggccaattctgtcagcaatcgccgtaaatccagagccgggaagtcgctggaactgcacctggagcatctattcattgagcacggcctgcgacactttgcgacgcaggccatcacagaaggtaataaaaaacccgatttccttttcccttccgcaggggcttaccacgatactgagtttcccgtagaaaatctgcgcatgctggcagtcaagactacctgtaaggatcgctggcgtcagatactgaatgaggccgataaaattcatcaggtgcatctgtttacactccaagagggagtttctctggctcaatatcgggagatgcgggagtcgggtgtcagattggtcgtgccatcatcgctgcacaaaaaatacccggaggcggtgagagctgagctaatgacgctaggtgcgtttattgctgagctgacagggctttacgcagatattccatag

SEQ ID NO: 284556 - DNA, 570 bp, Morganella morganii
atgataatcggctatgcgcgtaaatcgacacatcttcaggatgtaacgcatcaggttgatgaactgacaaaagcgggttgcgagcaaatctatcatgaacagatctcacgcggcggcactaaacgcgccaaaaatggtgccccggaactggagaactgtctgaaggcattgcgcgaaggtgataccctggttgtttgggcgcttgatcggctcggcggttcattgagccaggtgattacgttgcttgacgacctgaaaaagcgcggaatcacctttatagccatcaaagacagaatagatactagcgctcctgttatcggggaaatctatactcatctgatggctatattctctaactttgaacgcaaccgcaatattgaacgaacgagatctggactcgcagctgctcgcgcaaggggccgtgtagggggaagaaaaccgtcactttcggaagatgatattaagcaaatgaaaattctgcttgctgatcctgaaatgacagtaggagctgttgcgaagcgcttcaatgtttctcgcatgactatttatcgctacaccacaaaatcatga

SEQ ID NO: 284557 - DNA, 456 bp, Morganella morganii; identical to SEQ ID NO: 34122

SEQ ID NO: 284558 - DNA, 369 bp, Morganella morganii
atgggcgtagacattgggcaattagacccgtgggtgcttggcacctactgtacagtcctgttcgctgtttttgcgtggatcgcatggtgtgctttccgcgacgacgagctgccaattttccccggacttctggcggtgatgctgttgggcggcggctatgccacagtctacaaaccccagcccgacgagtgggaaacattcaaggccgcgcataactgcaaggtggtggccaagcgtgacggtcatagcaacgacgggatcggcgtcaccactcgcggcaccgtgggctacatcatcggcgacgatacgcccgatcaggtcgcctaccagtgcgacgacggcgtgacctactggaaaaacgcgaggtag

SEQ ID NO: 284559 - DNA, 291 bp, Morganella morganii
atgaacaaacaaacagccatcgagctgctgcaagagcaggtaagagactacgccagacaacgggcgaaggacgtggcgcgaggcgcagaaacgccacgtctggcggccttgcttgtgcagaaatacggcaggggcgtagtcgatgctctggctgtagtctttgacagtcctcgggcggccgagccggtcatggtcgtggtggacgaggaagtaagccggatcgatccgctatggcgggaacacgaccgggaacgctgggcaggtcgcccggctgatgtggttgccaactaa

SEQ ID NO: 284560 - DNA, 204 bp, Morganella morganii
atgaacagtgcagatttctataaaaaatttggaattgttgcggattctaacgtgaacttagaaggcaaccgccagtttatcaaaaaggcggttaacaattcgtttttagtaaaacagaactatagccaagttcagtactcttacggaactgacatggtaagtggtgtacagcctataactcgtagccctttatatacatactaa

SEQ ID NO: 284561 - DNA, 903 bp, Morganella morganii
atgcctaattggattgatgttctgggagagattaatgccctctcccagaatgaccctcttgttgtggttagaaaaaagtaccttgcaaaattatctgagcatactggacgtaatgtaatcagttattactctggttttcttcaaaaagtaaatccagaagcacaacatttagtctcattaactgatgatgacaaaaacggctggatgtccgcaatcaatggtcttgatactagcaaaggattagatatattgctgcatacgcctggtggcgatattgcagcgttagaatccatcggtcattaccttagacagaaatttggtacagatatacgtgcaataattccaatgatgtctatgtcatgtggaacaatgttggcttgttgcgcgaaagagataattatggggaagcagtccaatattgggccattcgacccacaaatgtatgggttgtctgtccacggtattttagaagagtttgagagagctcaaaaagaaattaccgctaaccctgcagcccttcaatggtggcagtttagtttgcaaaagctgaaccctacaatgctaggtgaatgtgagaaggcaatcaagtgggctactgatattgttacagattggctaattactgggatgtttgaagactataccgataagcatgagcgtgctaaagaaatttgtgagcaactgaatgatcataaattaacatatacgcatgcaaggcatatacactctgataaagcaaaagatattgggttgatcgtagctgacctggaatcagatcaagaactccaggacctagttttaacaatacatcatagttatatgcatacatttggaaacagtaatgcagcgaaaattattgaaaatcataatggtagcttaatgacttggaatatctctggttag

SEQ ID NO: 284562 - DNA, 261 bp, Morganella morganii
atgaatactgtatttctattaatggcggagtttggaacatctcaaataccgctaaatatcgttgcagaaaaatttttaaggctaacccccagctatgcagataaaaaagctaatttaggcgaattaccatttccaacatacagggacgacaggagccaaaaatcacaaagaatgattcatgtcagtgatttagctgaatggattgataaacaacgaaataatgctaaaaaagagctaaatgctattaactctaagaattaa

SEQ ID NO: 284563 - DNA, 186 bp, Morganella morganii
atgtttaaacatgaattaggtcaggttgtgcaggtcaccatcagcggcgaagaaggtcatgtgaaagcccgtgctgaatatcataacggtccgaatcagtatctcattcattatctggcagcggatggacgtgggactgatggctggtttgatgaaggtgagctgtcaccggctctgccactgtaa

SEQ ID NO: 284564 - DNA, 528 bp, Morganella morganii
atgaaaaaggtaattactgtattgctcaatggctgggtgtgggctgtcgtgttcttcggtctgtggatgttcagcatgctgtcagccgaacaaacggaaggccaacacaaagataaggttatcactgaccagcaaaaggtgattaataacgcttacaccagtatcgatatctttgaccgcgtggccgccgcaaacgccagccgcagtatgcaggcagaagccaaatcacaggagaagcagattgaataccgcactattatccggaaagagcctacctgtaatttgtatattcctcagcctgtttctgatgggttgctcagccacgtctacaccatccgtgaatcagcaatgcgttccgctcccggcatcactgacacaaccggtactggcaccactgccacccgccgcctgacatattgccaggcggttgaatggatagagccactactgaccgcactggataaggcgaacgggcagttaatggatatccggaaagcggatacagagcgaagcgggaagccaagataa

SEQ ID NO: 284565 - DNA, 135 bp, Morganella morganii
gtggtgtgcccgtcgggggcaggagcaaaactgaaagccgcactgaagcataacagccgggtattgggtgtcgggatggaagcggggctgtttgagcagactaaagccgaaatcaacaatttttctaatttttaa

SEQ ID NO: 284566 - DNA, 141 bp, Morganella morganii
atgctgatcatcattgctatcattctgctgactactgcaatgttggcgggttgttatttgtattcactcccgaatcactgtaatccgctgccgggtaacccactggacggtgtgatccactatgagtgtgaatcgccatga

SEQ ID NO: 284567 - DNA, 123 bp, Morganella morganii
atgaccgatattattaatgtgttactgattaagttcgcctttgcgggtgtcacctatgccctgcttttgaaatacaaaccagaacacgcactaccactgactaccgctatactgggcgcttag

SEQ ID NO: 284568 - DNA, 1224 bp, Morganella morganii
gtgcttcttgatgcattattccgcgataaaccgaccagtattgagaatccggcggtacccatcagcgcagattctgttgatactgacggtctgttcaaagcggatgtctatgtcagcccggaaacatcaatgaaactggctgctgtatatgcctgtatttatgttctttcttcctcaattgcacagatgccgctgcatgtgatgcgcaaaaccggcgataaggttgagactgcccgcgatcatcctgtgttccaccttgttcacgatgagccgaacgaatggcagaccagctataaatggcgggaaaccaaagaacgccacattctcggctgggggaacggctacacacaggtgatccgtaacagccgtggtgaggtgaccaatctggaagcctgtatgccatgggaaaccgcactgcttaacaccggcggccggtacacctacggggtttataacgaacagggtaatttcgcggtcagcccggatgacatgatccatatccgggcgctgggtaataaccagcggatggggatcagtccgatagtgcagcatgcggaaaccatcggtatgggtatgtccgggcagaaatacaccagttcattcttcggcggtaatgcccgcccggccggtattgtttcagttaagggggagctgcaggaaaaagggtgggaacgccttaaatcaatgtggcagaaagcgtctgcagcgctgcgcagtcaggaaaacaaaaccatgctgttaccggcggagctggattacaaagccctgaccgtttccccggtggatgctcagttaatcgatatgctgaagcttaaccgttctatgattgccggaatttttaatgtgccggcacatatgatcaatgacctggaaaaagcgactttttccaatatttccgaacaatccattcagtttgtccggcatacggtcatgccgtgggtggtgaactgggaacaggagcttaacagacggttgttcacccggcaggagcgccgcgccggattttatgcccggtttaatctggccgggctgttacgcggaaccccgaaagagcgtgctgaattttatcattacgccattactgacggctggatgagccggaatgaggcgcgggcatttgaggatatgaacccggttgacgggctggatgaaatgctggtcagcgttaacgccgcacaacctgtcggcagtaaatcaaaaggtggtgaaaaagatgagcagtaa

SEQ ID NO: 284569 - DNA, 1734 bp, Morganella morganii
  misc_feature (1701)..(1710): n is a, c, g, or t
atggcaattaacaaaagtggaaatattgttttacagtgggattataacaatgacttgttccggaatgatgttataacaacaatatttgatgtttatatttctcgtatacgccaacttgccaacgatcctaatgcctggattgaaacccaacctgatttaattcctaaaaaacaattaaaaaatagaatatcagttatcaaaaaagataattcactattaccacatacactgcataagtctattttccataattattcaaattcatcaaaaattgctgtcattgatatcgactctcaggaatggagctacaaaaaattattatctaaagcaacaatactcagtgatcaaataatacaacaaggttataaaccagaagacagaattggtgtatgtatgccaaaaggagtagggcaaatcattagcgttctggctattttattaatggggggaacttatgttccgattgatgtactacaaccagaagaacgtataaaccgcattgctaaaaatgctcagctttcattactcatcgtatctgatagcgatccatcctattcaatctatgctacattttgtaacaggattgtttggcaaaaagttcaaccctccgagaataaaccactacacaatatagatatatctcctcatcaagcagcttatgttatttatacttcaggttctactggagagcctaaaggtgttgttgtatcccatgccagcgcaatgaatacctgccttgatctcaatcggcgatataacatttcagacaaagatcgggtacttgccatatcagcactacattttgatctgtctgtttatgatattttcggtgttttaaatgccggagggactcttgtattagttaaagaagatgagcgccgtaatcctgatgcatggttacgacttattaaccaacataaaataacactttggaacagcgtacctgcactgtttgatatgttactaacctatgcagaaggaatagggtcatccattccacaatcgctgctattaatctatctctctggagattggattgggcttgatctcccgacacgttactataatttctgccctgatggacaaatagtcgccatgggaggtgccacagaagccgctatttggtctaactattttaatgtcacaacattagacccatcctggagctcgataccttatggatatcctttatccaaccaacgttatcgtattgttaatgctagaggagaagattgccctgattgggtatcaggagaactttggattggtggtgcaggcgttgcgttaggctacctaaacgatcccgaaaaaacagcacaacagtttgtaaaacaaaatggtgaaaattggtataaaacaggtgatatgggaagatatctccctggcggtatacttgaatttttaggaagacgtgaccgccaagttaagattggcggataccgtatagaaccaggggaaattgatgccgcattcaataagcttcagggtgtgcaaaatgcgattacactatgccttggtaatggtaataaagaaaaagcattacactcttttgtgatactaaattcgggtaattaccagaatattatcagttcaaatagcgccttttctcccctctactatctgcgctcaaccccaataaatgtacaacaacaatcccaagaaacggcaatcatagctggatttttatatgattatcttacnnnnnnnnnngtcagaaaaaaaatcagcagatga

SEQ ID NO: 284570 - DNA, 759 bp, Morganella morganii
atgatcacaaacgattaccagaagctggaaccgggtaatgctgtccggctttttgaggttgacggtaccgcgttcggtgtgccggatattttgcggttccatgcatacaatattcctcacactgaggcagagattactgccgctggtggtgaccctgaaaaactgccggcgaaatccatcttgtggcagggcgaagagtaccgtgcgtggccggtgctgattgacgggattgaggcatccacaacggggtccggcgcacagccgaagttatcggtggcaaatctggacggttcggtcactgcgctgtgtctggcatatgatgacatgctgaaggccaaagtcacgatacacgacaccctggcacactatctggatgcggcaaactttccggacggcaatccggcggcagatcctactcaggaaaaggtatcggtcttttatatcgacagcaaatcctcggaaaccaacgaaattatcgagtttgaattagccagcccgatggatttgcagggggtactgatcccgacacggcaattgcattcaatgtgtacctggtgcatacgcggcaaatacaaatctggtgacggctgtgattatgccggacagaacgggtatttcgataagcacggcaatcgagtggatgatccggcacaggatcagtgcagcggcatgctgaacacaggttgcttcccccgcttcggcaaaaacaatccgatcccgtttggcggctttccgggaacctcattactgaggaaataa

SEQ ID NO: 284571 - DNA, 603 bp, Morganella morganii; identical to SEQ ID NO: 280421

SEQ ID NO: 284572 - DNA, 630 bp, Morganella morganii; identical to SEQ ID NO: 280422

SEQ ID NO: 284573 - DNA, 354 bp, Morganella morganii; identical to SEQ ID NO: 280423

SEQ ID NO: 284574 - DNA, 585 bp, Morganella morganii
ttgctggataagaagttcgataagaccggcgggaagattacaggacagacggatattgagtcgccgggcggtcgcacccagacactgaaagcaaaagctggtacatcggtataccaggaattgtaccttcaagataccttcgccgcatggtgggggattaccgctggtaacaagttaagcctggaaaacaggattacaggcaatacgcttactatcggtactgatggtttcaaaattgacggtaaaaatattgcgaccacagatcagctttttggtgtcgggcaaacctacaaaaatctgacgtccagccgtcaaaataaagtctggtataccaacaccgacagtaagccccgcattatccatgtcgaatcaaacagaaccggcacacaataccctttcagtattgatattcaggttattgatgcgaatggtaataacagggttgattatcgatggacttctgcggatgaggttgtttccctgaatgcactggttcagccgggtgagcggtacagtgttaacggtggatggggtcagcccacagaatgggttgttattaacagatgggtggagttgtcacaatga

SEQ ID NO: 284575 - DNA, 330 bp, Morganella morganii
atgactgagtatgagattccactaggtagtatcgttccctcagatctggaaggtataaaagatttatttgagcagaacgaagatttatttaaagatagcgttttggctaattttgttggagatgaccctcgttacgattattgtgatggttcatttagtatcagtgatattaatgaagaaaatatatgttttacagcgaaggtatcttattatgggggctgtaaagatatgaattttgagcatcagtatgaaggttgtgtgagttacgatatcatcgacaataaaataatttttgagttagaagagtccgcttggttgttagataattag

SEQ ID NO: 284576 - DNA, 708 bp, Morganella morganii
gtgactgcatggaaaggtgttccatatctttttgatatgaatgaactactaaacaaacatatatccgtagttgtggaaaaagttcctcaaatagtgattgaaccatccttttcttgggatgttgcgttatctggttttttggctggctgtgtgcctgctgcaattgcatggttcgcacttaaaaatagcaaagtagataatgaaaaaaaccgagctgctactttagaagcaacaaaaagggccgtctatggacagaccttatctgaccgtttcagaaaaaatactgacactgtcactacgcttgttgctcatttcatggggtattgcacaaaacttttactatcgatggaacaagaaagtggatcatttagataccatgaaaataggttagaccttgttcttattcgtaataaattagcaatattattagaacaggaatatgtgattattgataataaaacaggttcaatatcttcaaatcttaactaccattgtggtaacgcattactggaacaagtagaacagcttttaactttaacagagctatataaagagcaaaatgaagaaataaaagctggaatactgtgtaatctagatcaagatataataaaaaaaactgatatagagaggaaagtggattatttagcattaaccacaagaggatatattaaatatatggcaaataagctagatgaaaacttaaagtaa

SEQ ID NO: 284577 - DNA, 510 bp, Morganella morganii
atgactgatattacgaccccttctgtttatgttggcacttaccataaatacaactgcggaagcattgcgggagcctggctcgatctgaccgattttgatagctcagaggagttttacgagcgctgccgcgagttacacgcaaatgaggctgatccagaatttatgttccaggattgggagggtattccgtctgatatggcgtcagagtgccatatcaactgggattttattaacggctttaaacaagcccgcgaggaaggaaacgaagcggcgtttgtggcctttgttgatctgtttaatagcactgatttcgacctgtttagagatgcctatatgggcgaagctaaggacgaagaaacttttgcagaggaatacctgaatgatagcggtctactgaatgaaattcctgaatccgtagcccgatattttgacatcgtagcctatgcgcgggatctgtttattggggatttcagtttacatgacggtcacgtatttaacatgacttgctga

SEQ ID NO: 284578 - DNA, 198 bp, Morganella morganii; identical to SEQ ID NO: 277859

SEQ ID NO: 284579 - DNA, 192 bp, Morganella morganii
atgcgcatgtctgacaaatattccagccctacagcatatgcctgggggcttataacctctgcttttggcgttttatctctggaccagtgggctattgtcgccgggatcatctgtactgtcgggacgttcctggtgaactggtattacaaacggaaagaattccaactgaaagccggagaacatcatgaataa

SEQ ID NO: 284580 - DNA, 258 bp, Morganella morganii
atgccgttaacacgggcggcggatggctctctcggtgtccgggcgatcggcagaaatcagaataccggttctgcagcaccacaggtgtttattaccattgacagtaacggcagcagccagacgcagtcgtcagctggttatgaacagtttggccgggagattgggcagtatgtagaccagcgttaccgggcgctgattaatacagatctgcggcccggcggtgccatctggtcggttacgaaaggggcccgtcaatga

SEQ ID NO: 284581 - DNA, 255 bp, Morganella morganii
atgccgttaacacgggcggcggatggctctctgggtgtccgggcgctcggcggaaatcagaacagcggttcagcggcaccacaggtgtttattaccatcgacagtaacggcagcagccagacgcagtcgtcggctggttatgagcagtttggtaatgaaattgccgcattcgtcgatcagcgtttccgcgtactaatggacaaaaacacccgccccggcggagccgtctggaatctgactaaggggaaaagatga

SEQ ID NO: 284582 - DNA, 351 bp, Morganella morganii
gtgctgtcagaaaatgttacacattataacggcgatccggctgacaacagctatccgccgggactgctcgacggccctttcttcagcatgaaaaccacggataatctgcctgtgcctcatctgttacaactgaacggactcgcgccgtacagggaaaaaccacagactgaccagatctaccttcgcaattacggggagcgggcactgatgcgcggcggtgccttgtattctcaggaatttgccggggtcagtgctttttgtctgagtcacaccgcactgcaccgcagtgccactgtcggcgggcgtacagcgtggatagttccgcggcagccagtaacgcgcctgaaataa

SEQ ID NO: 284583 - DNA, 1371 bp, Morganella morganii
atgaaaacaaaatcactttttcttctgataccgttattactgtccggttgtgaccagaccgtggtaaaagagatcggcattgaagaactgtcggagaacctgaacaacccggaataccttattattgatacccggccagacagtttatattttggctttaaagataaaggcgctgcccgcggtggtcatatcaaaggtgcgatgcagtttaccactggctggctggattttattgacgaagataaattcgataattttctggcagaaaaggggatttcgaaagaaaaaaccctggtattttacgacagtgacccggattcactggaaagaattaccgccgaatttgctgccaaaggttttcaggtcagggcatttaaatcgtttatccaatacagtaattctgatctgccgatggataaatacccgaattattttctgagtgtttctcccgcctgggttcaggctgcactgaacggtgaaaaaccggaaagttataccagtgatcaaaagccggtgatatttgaagtgtcctgggggggggcggggcaatcaaaatcctatgcaacgcatattaaaggcgctttccattttaataccgactggatagaaaacgcaccggtctggaatttatccgaacctgacgttatcaaaaataacctgctgaaaaacggtatccgcaaagatacgccggttatcgtctattctgaaaatcagatggcagcattgcgggtattatgggcactgaaatgggcgggtgttgaggatgtccgtttcctgaacggtggtttaaatgtctggatggatgcggaattaccaaccgaaaccactctgaatatcccggtaccggtagcagatttcggcgcggaaattccggttaatccgcaggtcactattgccatgccggcagaagccatacaggggcagaaatccggccttaaactgatcagcaaccggacatgggatgaatataccggcaaaatctccggttatgactacattccgcgcaagggtgaaccggccggggcaatatggggatttggcggtaaaaatgcaaatgatatgtccgattactatgatccggacggcacattacgtaatccggaagagatttttgctttatggaaaacacagggtatcgaaccgaccgatcaggttgcgttttactgcggcaccggctggcgggcaagtgtttcctggtttatgacccaactggcaggctgggaaaacagccggatttatgacggcggctggaatgcctggcagatggatccgacattaccggtattaaataatattcagagccaaaaaccggcagcactgaatgattatggtgaaataatcaaaaaaccgggacaatcctgcaaaagctga

SEQ ID NO: 284584 - DNA, 855 bp, Morganella morganii
atgaaaaaactcacagtaacctgctcagttctgcctttggcgctgttttccgctgttttcgctctgccgtcttatgccgcagagtctgactgtaagccgatgtctgaacagacccggctcaatcatatgagaatgatgggaatgccttacctgaacgggccggtgaaatcggtcaccatgacaaccgtcaaaccgccgcaggacagcccgcagatattttccgccagccatatgacactgacaccctgcggacagatcagcagctattctttcacacggaaaagtgaggaatacggtatgattttcgatctgagggtcaccggctcagaaaacgataatgccatcaatatggaataccgtttctccgccgattacaccggtaagaaaaagacgcgaccgaccatcagccgtatttcgatgatcaaagatgaacagcaggttattaccgcgtaccggactgaaaattttattgaagggaacacgaccattctgcctgaaaacggcacaacggcgtaccgggaaggcaatatcagcagtatactgataaacagtgaggttcttgcgaaaacctacagtatgaactttgattatgataagaccggccgtctgagccacatttacaccacaccactcccgttctccgactacacatttacttataacgaacagggtggattactcatcggatcagaaaaaacacaatcatccggaatcataacaggtaatgatgttcagtgtgcgcaatgggatgcttatcagaactgcataaccgggttgtggcgcagacacagtaatacagggcttaccggagatgccgtttaccataccacttatgaatattacggcgaaaaataa

SEQ ID NO: 284585 - DNA, 4035 bp, Morganella morganii
atgaataaatatttttaccttgaacgtacgctaattgcacagaatagtggccatgtattcactgagcgtgagttactggaaaattttcggtatatagttgtgctggcagagccgggtgctggtaaaacagaattgatggcgagtttggcgcgtaagctcagtgttcgtccattgagtgcatcagtattaatgtataatgatactaccagtgctgacaatggtcccttggtagttgatgcagttgatgaaattgcgacaattgaaaaatcaggaatttatagattattgggagctgtttacaagctaaaacctacgttagtgattatgtcgagtcgttccagtgaatgggagcaagcttcgacaactgcttttgagcaatttttaggttcaaccccggagattgttcgtcttaatgagtttagttcagatgaacaacgacaactttttgaaaattatacaggtagtgctgattttagtttatttcaggaagaaatttatcgttttaatctggggatactattaccgaaccctcaatttttgaaattattttctgatgcttattttgaaagtaataagcattttacagacaaaaaatctatctttagtatggcggttgaacgattagcgaaagaggcgaatagtaacattttaaaaatttcaaatactcttcagatatcaaaaaaaatatcattatcatcagaggtttttactaaattactattatccggagctgaaggtgtcaatacatctgaagcaacagaaaatcgtttgtatcctgcattatcatcactggttgatgacgataatgtacataaggttctatcaaccagattatttatgccaggtgctgatgaaaatcaacaccgacctgttcataaaattgttgctgaatattgcgctgccagctacttagtcagcagaatagccacactggaaaaacccttgaagttatcagaatgtttatctttgattgcccctaatggtgtatcaagagatgagctcagagggcttcttggatggatggctacgctgggaaataaaataattcaggaagccattatcgatcttgatgcctacgctgttctggctaacggagatccttctcagctcgagagttcttccaagagacagcttattcacaagttaaaacagcttgaagattctgatccttatttccgaagaggtgattattttcgtcgatttagcgtttcagatttttttacaccagatattctggatgaagttaaatctattttacttaatcacaaagatgggcatttacatgacctacttcttgatttattagtagattcacctctaactgctgatttggtaacagaactaacacagatcgtagtaagtaatagtgaaactgaatatacaagaatgtcagcattagattgtttggttaacaccaaagattataacttacttgatctttttggtattttaatttttgaatccagtaatatatcattatctatgatatcaactcttatagagaaaataggtgttcacgaagtaggttttaaaagtatttgtggatatttaagagtatgtgctcacctttacccggatcataaaacaagatatgacggtgagttagggaagcgttattttattaggcgtttaatttcacttttccctgctgattttcttgagaacttgcttaatgaattaacagctaaactagcttgtacctgtgggagtgagtcatacaattgtgattgccgcaatggaataagtaaaattatcggtatgataatggatcgttactttgaattaattccggccccttatgacccgatacaagtctggaattgggtgaaaaatcttcattatcatgaacgcatcctgactaaagacagtaaagctgtatatgttttacagacagatacggcattaagacaaggcatattgactcatgttttttctaagattactgatcaaaaagaaatatggaatttgaaagttcattattttagttcgggatttcaatctcattctggattaattatcttaaaagatgatattttgtttatattatcaatggcatttaatattaataatgcggaattatggagaggctttattgttagccatccacgatataaaaatgatgatttaaatgaagttaaatctattcgacatatgctgagacagcaagcattggctaaaccagaatttatgcgtcattgggcatgttttaataagatatttaaggctggtaagatggatagctttaaatacgatattaaatttagaagaaaaagaaaaaagcatgagaaaaggaagaatgaaataaatagacgaggtattgaatttattaataataatctaccattgattgttagtggccggcatcttgggtgtctggaaagattttctgaattaattctgttttatcctgaaaaaataaaggaagaggtcggtaatgaaaaattaatcacacaggcattaacgaactgtattgattatatttcatctattacacctactttacaagaaattgctaaattaaggtgtgcgtcaaaacgatcttcactagaattaatatggtttgcagcttgtttagttatttttcgtaatcaagggaaccttgatggtgttccaggaaatatattatttgcactacaagctacttttaattgtcactacaaagctgtatcaagcgaagagtacgatagattgaaaaaagaggtcgcagaggttttatttattaaatgtgattctaaaattcagtttgtttgtaattatatagagccgcaattgtctgaaaaatttgagcgtactaatattgaaatccttcaaacttatgacattttttctgaattacaaggtaagttgtcaataaaatggcttttggaattcaaaggccttccaataaatttaatagacaggatttttgaaatagcagttaatcatggctgcaaagatcaattaaaaaaaataattagacagtatgcgtatgattcagagcaaaaatggataaaaacatcaacaaatgaacaagtaaagtcagaattgtatttttggatactcagagagttttgtttttttgagaaaatccagaattctcattgggattttttcgcgaaagataaaaataacttactgagattgcatcataaaattggacgaataaaccaaaatgagtttcagggatggcctaaactgacatctgacaaagttgaaaaagtattagacgcattctatgagcaatggccggttgtagaattaccaagctcatggggaacagatagccctaaaggggaaatagcatatcggtttttaacagatttaatatggaatattaattctgataatccagataatgccatacctgtactggtgagattacttaatgataaacggtttctaaattcccggagtgagctacaaagtatactaacatctcaacgcagaaaaaaattactactcgattttaaaccaccatctgctagagaagtggtgagctacttagacaaaaatgaagttattagtgtagaggggatcagaaaggtagtgctacaggaattaaccaattttcaaaaatcaattgatggtggtgaattcaattcagcagatcgtttttatgaaaatggagtacgtttagatgaagtaaaatcaacagagattattgctgagagacttagtttgaaacttgaacataaaaacataactgtaacattggaacatcaactaaaatcacataatcgaagtgactttacagcatccggaattgtaaatggaagaaaacggttgttggttacagaagtaaaagggcagtggcatcgagaattatacacggctgctgaaaagcaattgtatgaacgttattcaattcacccggcagcagaacaacaaggtatttttttagttctctggtttggtaaaaatgagaaagtagcaggaaaaatacatcataagatcaaaacagcaactgaattgaaaataaaaattgaatctgaattgccttatgaattacgtggtcttatcgatatttttgtcttggatatttcaaaggaaatttag

SEQ ID NO: 284586 - DNA, 1737 bp, Morganella morganii
atggaaaatgtaattgaaagtgcagaagtcgctgctgaagagtcactccaacaaatgtattcttgtataagaaaccgaaggcattttaagctagaggcgggggcaggagctggtaagactttctcccttgtcaaagggcttcaattgattattgacgagcaaggaatagatttagctaaacgcttccagagagttgcttgtatcacttataccaatgtcgcaacagaggaaatcaatactcgaatagatagtaaccctgtggtttttgcctccactatccatggtttttgttggtcactaatacaagatcatcagctattcttatgggagtctctttcgacaataaatagtaaatgggaggagatgataaatgagattgagtttgatgaaaaaaggaaaattctttactcaacaggtagacgtaggttaaccgacactgaagcttatcttagtcatgatgacatccttccattaatggttttgttgttaagcaaggagaagtttcgtcgaaacttagtgtctaagtatccaataatttttatagatgaatatcaagatacgcataaagagtttgcagaagcccttgtggaatattttgttgcttctgaagctggtacatctataccgttattaggtttttttggagatagttggcaaaaaatatacagaataggtgtgggttcattaacccatccaaatttgactgagattcgaaaacatgcaaattttcgttccgcttctaaaatagttgaaactttgaataaaataagaccagaactacctcaagttgctagaggtgatgctgatttgggaagtgtttctatatatcacacgaacagttggaggggagatagacaaaatagtggtcattggaaaggtgacttattcccaaatgatagccatgatgctttggtcttggcaaaacagaggttaactgaagtaggttggaatttttcatcggaaacttcaagaattttaatgcttacgcataaggtaatggcgtcggagcaaggctatgaaacattagttaacgctttctccaatagtgattcgctcttcaatttagaaaataatcatataagctatttggtaaatacgttgttgcctgctttaggaagctttgaagaagggctgtatgggaaaatgtttttagctcttggaacaaatgccccaaaaatacagaaagctaccgataaggttgtatggaaagctaactttgatgcattgtctgaactgaaagaagaggggtctattggtgaagtgttagctcatcttaaaacgatgtctccttcaattttgccagataaaatatcgacacttgaggatagattggatatgtctgaaagtgacgaaatatcacagaatagatctttaaatgaattacaaaaactcagggatgtgccgtttaaagagcttattgcttttgataaatttattaagaaccacactccattttccaccaaacacggtgtcaaaggtgcagagtttgacaatgttcttgttgttttaggtagaggatggaatttatacaattgggatcaattgtttacgtggttgtatacgacatgtccggaaaacagaatagatgcattggaaagaaatcgaaacctcttttatgtagcgtgctctagacccaagcatcatttgacagtgctgattacgcaacatttatcgaatgaatcattggctctattaaatcaatggtttggacatgaaactattcaatcactatactaa

SEQ ID NO: 284587 - DNA, 2070 bp, Morganella morganii
atgaaactaaaggcaatttctgttaataattttcgcttgttgaaagacgtcaagctatccctagagcccgatactacgattgtggtaggcagaaataacagtggaaaaacgtcacttactgagtttttaagagttttaataggttctaaaggtcatttcaggtttgaggacttttcgttaaattgcttagatggatttattgaagcccacaagttgtttgtacaggatcgtgagcttggagacattagagctgctcttcctgaaatatctgctactttaactatttcctacgatgccaatgaaaatttaggcccgcttggggactttgtgattgatttggatattgattgtaatgaagctcgagttaacattctgtttagtctgaaagcaggaaaaataagcgagttattttcagagtctcctacggaagcagatgttgaacatcagattattattgcttcgcttaaagagaaagtagcttccttgtatgatttgactattgaggctcaagatccttcggatgaaagtaataaaaaaacaataagttttagtaatttagaatcaataataaggcttgattttatcgacgctcagcgagtgctagatagtggagaaaaacctatactaggaaaggttcttgaagagttattccaatccgcaaataggcatcagataggttcagaaagaagaagcttggctgatcttcttaatcaagccactaaaaatatcgaaaccgacattaatcaaaaatttaatggtaaccttagtgcactcgcaccgatatttgataagtttaattatcctggtttagtagatccacatctacaaactgaaacaaaacttgatgtaaacaagctgcttagcaatcacacgacagtgtcatacaaaggttataatgggattaatttacctgagagttttaacggtttaggaagcaggaatctgctctttatgttgctaaaactttatgaattctatcaagcactgagtgtaatgcaacctcaaccatgtgtgcatcttatcgttattgaagagcctgaagcccacttacatcctcaaatgcaaagcgtatttattcggcagctattagaaattcgcaaagcatttgatactgataacttgtgtgaaagccagtatctagtaaccacacattcgtcacatttagctaatgaaggaggattctcttccatcagatattttttaactaaaggacaaagtcaagttgcttgctcacgtcacacagaagttaagaacctgaaagaactgtaccagggtgtcgaattgagcgagcctgataagaaaaaaaataaagagtttcttcataaatatttaacacaaacaaagagtgatttgttttttgcagatttggcaattcttattgaaggtgcaactgagcgattgatgctgccagaaatgatccgaaaaattgatgaaaatagcaggggcatatatgcacttggtcgtagttatgttactactatggaggtcggaggggcatacgctcagatatttttcccactattagagtttttagagttgcccacattagttatcacagatattgacgccacaaataaacctgtaggctcggcaaaaagaaaaaagtgccgtgtatctgagagtgatggaaccagtaatagctgcattaaagcatggtttaataaaaaggtgtctccttcacaattaattgtattggatgagaagtataaaattcacaataagatacgcatagcttatcaagttcctgatatcgctggtgatgcaactgcgcgtagttttgaagatgcttttatcctatcgaacagcacgttgtttgatgatatgcaaaatattgcttatgcagacagagaacttcaagcttgggaaattgcacaagagcaagataaaactgattttgcgattaagtatagtgttgaaatcactaattgggaaactcccttatatataagagaaggtttagagtggttagctagtgaattctgtgctccatcacaactatcggaagctcaagtccctgaaatagagtcagagttcactgaaactaacgttgctgaggtggagattgactga

SEQ ID NO: 284588 - DNA, 1737 bp, Morganella morganii
atgtcattagaagaaataaaagcaaagctactggctgaaaataaaactgtggaaagtttgcttgctcaagttaacgatttttacactgaggaagaatgttctaaagagagcgttttggtagaagcactatctgagctacacaattcagggaaaattgacttcgtcaaaatagtaaaagaaattgataaaaactcctacaaaaacgatttttttagcatcatggatctctttgaaaatgcactacctttactaaactcaaaagttgaagatgttctgcgttgtctggttcaccttacgcaacaggctgatagtattggagcctatgaggcttttcagcatttctgtagggtggaaaaaaaacgtcccaaagacagcgttgaatttatcctgacgcaaagtgaacttagtgcatatgccccttttctttcctgttcaatcctcgcatacgattcaaattatatggctgaggctatccaaacaacaaaagacctgattgctgacagcaatcaggcagtcagaaaccaagcctattttgttttagggagacttaatgtcaatgaagctcaggcaagtgtcattttagagctacttatcagtcatgccttgactgaggaggacactagttgtcatgctttaatactgaggggaatactccattttggagaaagatttccatcttattggtcacaaatagaagaatttctaactccgttcgttaaggacctacccccggaagttctcaatgtaatatcgcatattttggcatttcaaagtggaaatcttcctgaaggtattaaacatcttctggtaaaggagctagccaatatctcccctgagcacaaatgtaccatagataatattgatcatttattagtcaactttatgaaaagggatttatgctctcttacgatcgaattattggaatcgatattgtctgcaggtgtaaaattaacacaactggactatttttcacatgaactattatgtaagcatcaatatcaagagctacgcaatcacataattacaaagtggtttctatccggaaaattatcacgttgtcaggcggcctcagatctacttcatgatgtaacgggcaaagatatagaattaaaagcagacatggcattgttagaggatgatacgaaacaaatatttgttagccacaaggcgatcgggtggttgtttactcgccctgccttggcagcaagtttcatactgtccatttgcgaaacagcttcaacaactatatttaacagtcttgcgcaaattttatacgaccctttacttttaagctatccgggagagcttgggcaattcttccaatcatgcattgataaagacgttcaaggacaactatgtgagcacttgcttggaaaacttaatgcctatcacgcaaatattgagaaagtatatgaattgaatgaattaatggctccaagcgaaaatgtaagagtctattggaaaagcgttgataaagaaatgcaaaaagcccacgaaaaagcatcagaatcttctatctttgagataattgcgacaaagcagagattattatatggcaacagctcgatttactatgtacatatgggtgatggaaagtccgtaaggcaggaggcgcaaatgcactctttttcccattcgactgaaatgccacgattgaacgttttagatcccgagtctctagattacgttttgcgcatataccgctacgggagaatgaaaaatgaagctaattcttaa

SEQ ID NO: 284589 - DNA, 1704 bp, Morganella morganii
atgaagctaattcttaaacaatacttggcttcattaaaagaacgagcagaattagatgctgtactgccagatttgctgagctgcatgggtatgaatgtatttatttcaccgacacgtggggttaaagagtatggtgtagatatagctgctgtcgggcgaatcaatagcgaggaagaaaaagtttatttgttctcagttaaatccggaaaccttactcgtgagacctggaatggtaagacggatcaagctcttaggccttcattagatgaaattcaagattcatttattcctagccgtctaccacctgaacatagagataaaaaaatcattatctgcttatgttttggtggcgatatcagttccggaattaggcaggaggtatccggctacgagcgacggaatacacgagacaacatctcttttgaagaatggaatggcgataaactttcagagtttattcaacaatacctgttgaaagaagagttactgcctagctctagccaagctttgctacgaaaatcgttagctctacttgaagagcctgggagctcaagcaaacacttttttctattgatcgatagggtgctatcaaatgccaccgatgcagattctattgcctcatctataacgcgaataaacgtttgtttatgggtcctgttttcatggtgtcgtgatggacagaatttagaagcagcttatctttcatcagagcgcgcattgctgttggcttgggataaagttaaagaaagctataccgaaaaaaacaaactatcaaaatcatttaatagtattttagaaacttatcaacaaattactgattattatgtagataagcgtataattccatatgttgaattcgagtatgctctttcccatgcagttcgttccccctgctccattgatgtaaatattaaactttttgatgtattggggcgtttatcagtcaaagggctctggattttagattcactatcaaagagttatattgaaaatccaccaatagatggagataacgaagagcaaaaaaaattgagtctgcgcctcagaggaataacaaagtcaattagcctcttagttgttaataatccaatattgctatcgccatataaagactcgcaagccattgacattgctctgactctaacgctgctttcaaataattcagaattagacggatttgtgcgggactggctatcacaaatggtgaattggtgcatattttcttttgagagcaatggcatgtatccgactgtacatgaatcttacgaaaatttgctggaacacaggaaacaagaaaagactgacaatagttataagaataaagctacggaagccagtatcttatacccgttgctagcagtattttgcgctctgtataaattagattcagtaaaccaaaaactagaaaaatttgctacagataaactaacacattgtacgttacagtattggtacccaaatcaagatagcgaacaaaatatgtactcagatatcgatactcatggttctacatcaactcactttccaatgaatagaaacttagcaatagagcatatagtacaagagtgcatcaattcggattcgctcaaaagaatgtcggctgttactggggggaagactccattgatcctgacagcctgtcgctgttaccgatatccagtacctttccattatattgaggattggttagtagattctgcatag

SEQ ID NO: 284590 - DNA, 1770 bp, Morganella morganii
atgaaaaaatttaactttatagcaatcgctatcatatcaattttatattgtgccccgattatctttggtacatcatattattatgatgatttattcagagcttattctggatatagctcatggaatgatgacggaagaccttttgcgaatctattttatcaaatattaacgttcggccaaacaatgccagattcatttcccgttgcattaattttagcgatcgcaatattctcatatgtaggatatctcttagggaagaacaacggtgttgagaagtctttgtcattttccattgcatactccacattgataatgtctccacttttcatttctaatttattgtttagatatgattcttccttcatggttttagcggttgcctctagcgttttgccatacgcaattgacaacaaatcatttaccaataaattattatcaatagttgctataatagtatctttaggcctatatcaagcagccgttagtttatttattgcctttgcgggcattgaattcttaaagacatcgatatacaaaaaaatttctgatgcgttcaagacttgcgccttaaggattttacagttattaatagcttacattatttatgccaaagtaatacttgacctttttttcataaatgattatttcaaagcatttaacaaaccaatcggcataaataatagcgggttggaatcattactgcacaatataaactcatcattaccaactcttaaattagtatttaacaatgggtttatcattgctttctctgttgtatttatactttttgcttactcaatacttagctatttattaagatataaaagactacctttacttattggaatctcagcagcaacattggcggtagtgatatccgttcctggaattgcaattttcggtgaaaatcctatattttaccctagggtttacattgggtttggtgcacttatattttttgtatttgtaactccgataattttaaaacaaaatatcaagataataattactgctcaattgatagcggtattctatttgtttagccttgttcatgctgcaactaatgcggtcaggagtgatgttaactttcaaaaggctactgcagatcgtattattaataatttggacgcacttggagcttcagcgtatcacaaagtggttatacttggacaattgagaagttcaccactcgcgcgtataaattctctttcctaccctgtaattaaggtgctagtccctcagcactttattaatggctacgatggtggccgttatacactaatgcatcaaggaatggactatattgaatacccatcaccatcagaacaaaatcaatacagaagtcttgttagtggaagaaaagaggattacagtaacaatctttattctgtttacctagtaaatggcgcggcagtaatagattttgaaaaaacaaagtacgaccatattaatagaacaatgttgccgtataaatttaacaatcctgatgtaagcgatgtatattttggtgaaaattattttcacgcctgtatttcaaattcactatcaccaacattaaaaatagatgagtggtattacttgctattccatatgagagatggaagtgtctccaatagaagtttttctgttccgtatagcattggtagaaacaatgtcacatgtttagtaagtcagtggaatgatggtgttgatattaataacgtacaatctatagaatttggcatttacaacattaatacagtcattaggcgccttgacttgagtagttaa

SEQ ID NO: 284591 - DNA, 429 bp, Morganella morganii
atgaataaattattactagctattatgttgtctgttccattgtcagcgttggctgataacccatgcgtacctaacctcatcaacgaggacatgtgtgtagtcgcgaaaagtatagaaagtgagctaaaaaaatcgataccaataaaagtaaatgagaggatgaatataacaaatgccaaggctgatatgacaaaagttacggttactaccgcatttatttataaccaggatgaatataaagaaatacttaataacgatgacgagctgatagccaaaactaaagatattgtaaaaaaaattggcgcaaagtcttcgtgctcaaataaagctcttaatgcgttcattaaccttggtggtgtggttgaatatgattatgtttttagtgatggctcccgttatgagacagttaccatcacctcatgcgattaa

SEQ ID NO: 284592 - DNA, 333 bp, Morganella morganii
atgaaaaataaaatcaacaatacattcaatactaatgttcatggtaatgccaacattgcaaatgccagcgaaaacttcaatcaaaatatccaacttcaatccgatgaattaattaatagattagtatctgaactacttcagttaaaggtgaagggtaaggatatggatactattgatgctgttatttctcatgttgaagatgttaagcaggttaaagacaagaaaagtcttatgagcaaattaactgaaataatgactattgcgggaggggctgcttcagtgtatggcgtggtcgtaccttatatcccgatgctttcaaacctgtttggttaa

SEQ ID NO: 284593 - DNA, 675 bp, Morganella morganii
atggtgttatttgacatgatagatttacttgatatacaaaatgacttagttacaaaagatacagatttgacatgtatcttaagaaaatgtttggttctggcattcgatcttgattctgatgagttgaaaaattgggttaaaatggaactcaatgggtatgataaatgggaaagctgtccagactacagaaagataaatactcattttgaaggggaattcattaaatatgaatgtgaaatacatgaagttaatagtatttatagtagcattataccagcagattacataaaaatagatacgacatttccattgtcttttggagtctcatacatactgtcattatacgatagacatcaaccatacccggaggagtatataagagactttactgtagatagtacccgctctcaatacaatggctatattccaggatatagatgtattcgatttgtacgagttattcctactgaggcacttgcatatgttttggatttaattagaaataggatgttggattttattcttgaattaagggatatatatccagacaagtatattgataataaaaaaatagacaattcaattgtaaaaaatatattcaacacaacaatacatggtaatgctaatatttcaaatgctagtggcgaattcgggcaggaaattaatgaaaaataa

SEQ ID NO: 284594 - DNA, 489 bp, Morganella morganii
atgacgcatgatgacctgtgtgaaatagcggtgagattcctgcaaaacaacggatttaacgttgccttcggtgatcggtttcagtcaagcaatggtactggtgagcagcctgacgcaatcgggttcagaagcggagccagttgccttattgaagcgaaagtcagccgctctgattttcttgcagacaaaaagaagtggttcagacagcagccggaaaaaggaatgggtgactggcgcttcttcatatcgccgccggatattattaaaccggaagatttgcctgccggatggggattgctccacgtcaaaggcaagcgggtgttcaaggttcacggctggccccctaactcatactggtatagcaagaagccattttcagccaataaacaggcagagtgtgatcacatgtacagtgcgctgcgccggttacaaatacgcggacacctccatgagatatatgaaggtatttcgaagggagttatttcatga

SEQ ID NO: 284595 - DNA, 798 bp, Morganella morganii
atgtgtagcaggtatgagaaatggtttatttcgtcattatgttggacacttatagctattgttataataatattgttattaggtgtctatagttttatatattattcaaaaatggattttacgggaaaggtttcatcaggatttagttttttatcatccttaagcatcatcgtatctatgttaatttacttattacaaaaaaaagacactgatgaaaacaaaaggaaaacaatatcagcaatgaagaacggtctgttatatgacatggcaatatctagaaaattcttattatttttgaaaagagccgcattaaatggacgaaaggaaaagtacatcaataaaaacactccaaatggaatgcattgtattaaaatacaagaaatggcatctagctcattaatattcattaataattacagtgtaaatgtaatgattcctcaaaaagatagaataaactcaatatgctcaagaagccctgaaattgacgcctctatttatcaatcatctatagacgcacttaatttaattgacaaaataacaatagtgtatacccatataaaattgaagctatcaaatgacactttgagaccgagactcattcttatcaatgtaaatattgcatcaatagaggatattatatccacctgtagccttttgctaaaggaattaaaaaaaaataaaaaaagatatatcatccttataatcaaaaatacatctataaaattcagagccaaccataacaatcggatttgtattactactggtgatacacggctctgctgtgcctgttaccgatga

SEQ ID NO: 284596 - DNA, 246 bp, Morganella morganii
atgaaaaaatataacttaattctcgcagatccaccctggtcttatagcaacaaatcctccaatgacgcagccgataaccactacaacaccaccgatttttattccctcacccgcctaccaatcgaaaaaatatcctctgacaactccgtactctgcatgtggtacacgggtaattttgcgcttgaggcgataaaacttgctgaagcgtggaatttcaaggttaaaaatatgttctgttttgcatga

SEQ ID NO: 284597 - DNA, 441 bp, Morganella morganii
atggagtatttcatagataaagcgggcgaggtttttgcttacgatgatgaccagatggctgtcattaacagaatcaacgctcctgattttgataacgaaaaagaacagataccggcaattttctttgaggttaacgaggaaattaaaggtatgaaaaaaatgacagataaagaggttgatgcacacatcaacccgccggtaactaaggagcaactgatagcagaggcagaagccaaaaagcaggcattgatcgctgaggccagccagaaaacccaactctggcagacccagcttatgctcgacatcatcacggaaggagataaagccagcctcaaagaatggatgcggtacgtgcagcaggtgcaggcagtagatccatccctcggggctgctgtggtatggcctacaccaccggcttcaccggcttcaccggccagataa

SEQ ID NO: 284598 - DNA, 321 bp, Morganella morganii
atgcaaacgtacgcggcaatgccgccggaaggtaaaatgctgggtgctgataaaaaaggtaagccggtgtgggtagatatccctccgcttactcacactgaattagttgagcaagcggaagcacagaggcgatacctgatcgccgaagtccacactgaaacagaaatgctccgggttaaactggcgcttggtcgcatcaaagatgatgaaaaggcgctgttaaacgcctggctggattatctggatgaactggaggcagtggacgtatccaccgccccggatattatctggccggtgaagccggtgaagccggtggtgtag

SEQ ID NO: 284599 - DNA, 714 bp, Morganella morganii
atgacttttgcagaccggctaaacctagccatgaaaatgaggggttttactcaggttgaactcgctgaggccgctgatatggctcaacccagcgtttggaagctcacatctggtaaagcgaaaagctcacgtaagatagtggagatatctaacgctctgcgggttgaccctgtgtggttaagcacgggagagggagatgtgcctgactttttgaaatcagaaaaagccaaagacggcatacctgtaaaagacttcaagccgagagaagtggctgaatgggatagcagtacgcctcttgatgatgacgaggtcgaagtgccgtattacaaaagcatagagcttgccgccggtaatggatgcaatggcgggagcgataataacggctacaaactccgcttctctcgctcgacacttcgtcgctatggcatttcaccgaaagacgtcgcttcgtttcctgtgcatggagagagcatgtcgccggtaattccaagtggaaccactgtgttcgtgaactgcggcgataagaccattgttgatggtgggatttacttcattgagcaggacggcctgctgcggattaaacagctactgcgccagccaggcaagctgatcattcgcagctataactcaatcgacttcccggatgaagaagctgacccgacgacggtaaaaattgtgggcagggtcttcaactggtctgtgatggcgtattag

SEQ ID NO: 284600 - DNA, 741 bp, Morganella morganii
atgttaccgattacaacagagatgaaaatgagcagccgtgaaattgcggagcttacaggtaagcgtcatgacaatgtgatggctgatatcagaaaaatgctcactgaattatacggcgaggggggtctcctgaaatttcaggacacctatcaaaatgaacaaaacggtcagacatacaacgcgtttatgttagatcgtgagcataccgagtgcttacttaccgggtacagcgcagaactacggatgcgggtgattaagcgctggcatcaattagagcaggaaaaagcactcggatttaacccgaatgaccagatagccgtactcgaacacttcctgctggaaaagaaaaaagcacaggtgctgcaaatcgaaaatgacagcctgaaaaatctgtttgttgacggcatgacccctgctcagtttgctaaatcactgaacggagttaattgccagaagataaattctcacctggcgaatgaaagaaaatggttgtttaacagtggtaaatcactgactgagtatgactggcgggtagcggcttatgccagagataattacctgacagaaaagccagtaaagataagccggttaggtaaagacgaaaaaatgaaatatcagccgatactgctcaaaaaaggcgcggctaaaatttacagcatgtatatcgccggtgaattgccgatgaaagctaactggaacgggctgcacactcacgacaagtcagtgcggattgcagggtga

SEQ ID NO: 284601 - DNA, 357 bp, Morganella morganii
atggaatttaaaggtacgccggggccgtggactatcactgatagtggcggctcaataatggatagcgaccaatttattatcgctacctttagccggatggcaatcttgtgcggatggcatgaaaaaggatttgagcactatagcgacgagggcgcaagtagggacattggaacaattgccgcgaaggcgaatgcccacctaatcgcagcagcaccggagttgctggatgcgttgattaaaattgtcgagatgaaccagcagtatgcaatcgacaaatacggagacgtaagaaaggccgaagaaatggcttgtgtacgaacagcacgacaagcaatcaacaaagcacttggaggttaa

SEQ ID NO: 284602 - DNA, 327 bp, Morganella morganii
atgtcggagggcgaacagtttctaagccaagatgaagttatcagcataatcacgaaagcaattaatttccaccgaaagcgcggtgaaatgatgctggcatcaggggcacggaatggatctgcattttcgataataaaaggtcatcttcacgaagtcatggctgcttctttatctgaggccagatatctatacggatattactgcgaagaagatgaagaattccttcaaagtgacggttcttatttaaaggaaatgcaggaatgtgattactttaacgatactgtaatggctatcattaagttcgccaaaatagacgataaatcatag

SEQ ID NO: 284603 - DNA, 192 bp, Morganella morganii
atgaacgcatacgcagcacaggatgctcaggaagatcgcatagacttcacagaggatgtgatatttggactcagcacggaaacgctggaatatctcggaaccgagaaagaaaacgagatcagggaggcaattgataaggcattaagaaaaaggagcgcgagaaatggaaacgggcgtttatttagggcttag

SEQ ID NO: 284604 - DNA, 825 bp, Morganella morganii
atggaaacgggcgtttatttagggcttagcaacgaggactatcacaaggatgaagcgataggctccacatcaataaaggcgatcagcgtcagccctgcaaatctgtatttcaacccatttaaaggaagtaaatcggcacagattggcacagcaattcacgcagcattgctggagccgaaggtatttgaaagggatttcattttgctgccagacgtcaaggatcggcgctcggcggaatacaagaatgcattaaagcaggtcgatgctgaaaagatactggtgaacggtgaggttgaaacaatacaaaggatgattgaatcggccaacctgaacaacgatttcactgattacatggcaacgcctgggcagtctgaaatatctatgttcgccacctgccctgaaactggactgaaattaaagtgccggtttgacaggatgtcagactcctacccttacccacttgatgtaaaaagttgcatggatgcaacagagcgcggtttcagtcaggcttttgggaaatatcactatcatgtgcaggctgcattttatttgtacgtgctgaaattagtcacaggaagggacttaaatcagttctgttttttcgccattcagaataagccaccgtacaccaactgcatgtattacatcggcgaggactcgctggagctgggaagaaaggtaatgttcgaatctctgcacacaataaaacagtgcattgatggcgacataccgaaaaccgaaggaatggttttgccatccagcgaaataaacgtgccctcttatcttttcgatgatgaatatcttgatgacgaggtatatctctaa

SEQ ID NO: 284605 - DNA, 555 bp, Morganella morganii
atggatttatcaaaaacaattatcccgaaatcggatcagcttaatttcgatgatgtcagaaaccagtcaataacggcagtaattaaatctgtgcgcgaaggctcaaaagaccagcctgtatttattgaccttgttgggtatgacggaaggccgtacaaaccatcgaaatcaatgcggcgtgttcttattggcgcgtggggtaataacggtcacgcatgggtgggaaggtctctgaaacttatcggtgacccatcagtgacatatggaggtgttaaggttgggggcatcaaaattaacgccatgagcgatattgacggcgagttatccatgatgcttaccgtgtcccgggggaagcgcgttgaatatcgggttagtcgactggtaacgaatagtacgatgcttgcagatttcactgccaaggtcggcgaaatggagtctgagcaattcgaaagatcatatcaatggctgaaaaataaatttactggcgacacagaaaacacggaaaagttggatgtcgtgtaccagagtcacaaggccgatatgcaaagccaataa

SEQ ID NO: 284606 - DNA, 294 bp, Morganella morganii
atgaaagtctatctcgacgacgaacgccagacaccacagggatttgtgcgcgtctactggcctgatgaagccattaagatgctgcaaaccggcgaggtgacattaatcagtctcgaccatgatttaggcgatgatgaacgcggtacaggctatgacgttttattgtggatagaagaacgggtgtatttgaacggatttaaagcacctgaaattattgttcattccgccaatacttcggcgcgccagaaaatggaactagcaattaaccatattaagcagattcaggaggggtga

SEQ ID NO: 284607 - DNA, 387 bp, Morganella morganii
atgaacaaatatcgtgacaaatcagactttgagattaataaggctgtggctgattgttatttgacgcgagaatacagattcaacagtgccgataaaatcgttgagcttatggatatagatttgtcttgtgagtttggcggtgaaattaacctaaaagataagtacgtcactggcacattcaacccctgcaacaaccctgcggacgcaatgccgattgttattgagaatcgcatcagtatcgaaagtcgttttaacggccattacgatgaatggtatgcaagcagacagctaaataaggtacacatagatgctactggcacaaattattacagaacagctatggaagtattcctgatgatgaagaatgcggaaaatgaaaaagtatga

SEQ ID NO: 284608 - DNA, 663 bp, Morganella morganii
atgaataccgctgaggattttaacaagctttatgctgatatagggcgtaatattgagcagacattagctgatattgcagggcttaatgttgataacgaagatggcaaaaagcagcttaatgcgatgacagagcaactgcaaaccctacagaatactttcaacctgaagctagcctatctgcaggaacatgccgaatgggataaatttaccctcgctttttttggcgaaaccaacgctggtaaaagtactattatcgaatcactgcgaatagtgtttgatgaaactacacgccgacaactgttggaaaataaccaaaacgacctacagaaatctgaacaagaattgcacgaaattttaactcaattacgcagtgatttaggtcgggtttacagcgatgtttttgataaaataagtactattagtttctctgctatccgtttgcagaaaatcattaccgatgaaagtgtctcacgattaaaaatagaagaagagacaaataaaacacgtctgctgctggaacaaaatgaaagtcaatcgcgtctgcaaatattgcaacagcgaactagcagaaagtcgcgtatcaccctatttttcactgccgttatgggggtgatcgtaggtgctggagttgtgatgctgattaatctactgacaggactctag

SEQ ID NO: 284609 - DNA, 1716 bp, Morganella morganii
atgagtgatgcattttattttgtggaagataattctgaacagctggttgataccaacctcaacgaacgtaaatcggcgctcaacattcaaccgttactggatcaaagttttcctcgtcttatccagtcaatcattcgggcggaaaaattaaaaacaacagcaaagcgcgtcgatggcttaattattggtactggtgagtcagattttaccaaaggtaacactcattacacgttacatatcgataataaagactttcaactgattgacgtaccggggattgaaggtaatgagacccgctatgttcatcttgtaaaagaagccattgcgcgagcgcatatggtagtttacgtcaacggtaccaacaaaaagcccgaaatggcgacagcagagaagattaagttatatctggaatatggaacacaggtttatccactggtcaacgttcgtggtttttccgaggcctatgagttcgaagaggatcgtctagagctcactcagcagagtgctgctggcaaagcactacgccagaccgttgaggttctgactcaggtcttagggggggctgtgctgcaaaagggccattgtgttcagggcttgctggcattttcggcgctagcgtatgacgacagtatacaaagtacgaccattcacacttctcggggtcacaacctagccgtatctcagcaggagttctttgacgtattccatgaccgtcaggaaatgcgtaaatttagtcagattgatgctgtagctcagacgatcagaaataaggttgccacattccgtgaggatattgtcgaaagtaataaaggaaaagtcagagagacactgatgcaatatttaacagtgttggaaaaacagttagcagaacatcgggccttcctaaaaggaacggaaccggagtttgataaatgccgagccgcattcaggaaggcaatagccgagtttgaacgtcgtattgtgaataaccgtcgcaatcgatggaatacatttttcaacgaattggcagataccagtgacactattgtagaagaatatttcggcgataaagacgctatatctcaacaaattcagctcgaatttaaaaaacggcatatccgcgttgagaaagatatgttggaagatacagaaaaagccgtcgatgtattacaacagctcatgcttcaggctgtggaacgtctgctagaagatatcaaacatatagagtttcaacaacgcgttagttttgatcgaagcggcagcatcgattttgacagtgatatagcgctaggttacgacctggggctggccgattttggctcaatggccttaaaaattggcagctatgcgctgatgggaggcacaatcggcagcacattcccggtgattggcacagtgattggtgctattgcgggagcacttgtgggagtggtaatgacggtagttgacctttttaccagcaaatcgtcaaaaattcgcaaagcgcagggaaaagtgcgtgaaaaactggaggactcaagggaaaaagcactagctcgcgtgagcgacgaagccaatacactggttatagcgatagatgaagagctgcagagtagcctgctaaaaaaggtgaataacatgcagaatgccctacagcagccgattactatttttgaagcacaaatagcccgaataacacgactaaaaaatcaacttgagaagatgccttatggaacaattcaaacagttcagtattga

SEQ ID NO: 284610 - DNA, 1731 bp, Morganella morganii
atggaacaattcaaacagttcagtattgagaaacaggtagccattgattcgctattacaactacgtggtatgttagaggctctagatgaaatggagatagacgttggcgaagatctgcaaaaaatagccgctactatttctgctgttgaatctgatgtgttgcgtatagccttacttggtgcgttttcagatggcaagaccagcgttatcgccgcttggctgggtaaaataatggaagatatgaatatttccatggatgaatcatcagatcggctgagtatttacaaacctgaaggacttccaggtcaatgtgaaattgtcgatacaccggggctttttggtgataaggagcgtgagatcgatggtaaacaagtgatgtatgaagacctgaccaaacgctatatttctgaagcacacctgattttttacgtagttgatgccacaaatccgctcaaagaaagccacagcgacatcgtaaagtgggtactacgcgatctaaataagctatcttcaactatctttgtaatcaacaaaatggatgaagtgactaacctgacgaaccctgcattgtttgacgagcaggcggtaattaaaaaagaaaatttgaaaggcaaattacagcgagctgctaatctcgacgcttcagaatgcgaacggctgaagatcgtctgtatagcctcaaatccaaacggtcgtggtctacagttctggttcagcaaacctgaacattacgaaagccgctcgcgtattaacgatcttaaaaataccgctgccgatattttgaaggctaatgtacctgaagtactattggctaaaaccggtatggacgtagtgaaagatattgttaatcagcgcgttttgcaggctcgtttacaactcaacgaattgaatacctttgttgagaaaaacgacgaggatgcaagccgctttagtaaagatattatacatagtcgaacagaggttaaacgcctttcaggtgaactgtttgaagagttgaaccagatggaaaagcggctcatgagccagctacgtccactcggtctggaagatattcgcccgtttattgacgatgaacttggatataccgaagaaggggttggctttaagcttcacttgcgcattaagctgtctgtcgatcgattttttgaccaatcgacagaagtcacgcagcgcctatctgatgatattactcgtcaattgaattctagcgaaaatttttttagtagtctgagtgaaggtgcgtttcgctctctaggcggggcattcaagagtgtatcaaaaattagcccagaaacgctcaaaacgacgatttttgctgcacgcgatacaattggcaaattaacagggtacgtttataaatttaaaccttgggaagcaactaaattagccggaggaatagccaaatgggcagggccagcgggtgctgcatttacgattggctccgatctatgggacgcatataaagcacacgaacgggagagtgaactgatagaagtaaaaacctcgttggcggaaatcattagaaagtcgtttaaagatatctatgacgtacttagctcagataaaaaaatattcgctttctttgcaccacagatccaaaacctggaacagatagtcactgagttaactgcgaaaagccagactatacgagataatcagcaaaaactgacgcttattcagttgcaacttgcacaattaacgctgcctacgcaaaaaaatacatcagtctga

SEQ ID NO: 284611 - DNA, 729 bp, Morganella morganii
atgcgacacctgttctgtgtttttgccctgctgttatccgcctgcggcagttatgaccccatcaaccgcagtattgtcagtgacgaagtactgaaatccactgatgcatttaaagcgacagtcaccaaccggagcgaagaccactttattggtttctcttatgacccggagaaaaaagagtttctgatcgccggtgaaacctattcttatattgcgccggtcgcggaaaaagtgcagttcatcattgatacccccgctatccgcgataatatccgcgtgctgtaccgggatgaaaaaggctggggaatatggcggtatagagtagttgatgataacggtaccccgctggaaaaaccggtgcttaacgatctcactctgattatgtgctttaacagcgcagtaccgcagtctcagatcgatgaatacaaaaaagcctttgaacgtaaacggatctattttgtgacacacctgaaagaaccgtgcttctatttcccgctgggtgacagccgcgctcaaatttttgccagtaccgcagaatcaaagcgggcggcaaaaaccaggctgccgcgcccgttcccgtatctgcttgataccgtcaccgccaaagataaagcattgctggagtctcagaaccggaaagccaccgccctgtctccgtttgcgacagcagccgatggcgtgctgaccttcggacaatatctggcgctgccttttaccatgtggttttaa

SEQ ID NO: 284612 - DNA, 642 bp, Morganella morganii
atgatgaaaaaagggtttcttgtcattttcctgcttccgctgctcagcggctgtatgtccgatgaagaatggcacgccatgcaggtttcccggcaggccgccggagagcgggagatctgtaaaaaaggtgcaatcaccctcggacgcgactatgctctggccgggatcgacagtgcgccggggctggctgaatacagggcgttatgtgaaaaacatgactttgtgattgaccgcagccagtgggacaacggctataaaagcggcagccgtcagtactgcgaaccgttacaggcctacaacaccggcaaacaaaattacacctatcaggcagaccgctgccggaaaaaaccggctcagatctcacaactgaacagtgcctggcagatgggattgcactggtcggagataaaccgtcagatcagcgaactggaaaagagttatgacgctctggacagcaccatccgcaatctggagtaccgcaaagatacgatgagcagcgaagatgcccgtgaagcccgccatctgctgcgccgtctgaaacaggagcagacggattcagagcgcacactgcgtcagtaccgcagcagactgagtgcactggatacacagaacctctctgccattgtccgggccggagggtaa

SEQ ID NO: 284613 - DNA, 708 bp, Morganella morganii
atgcggatacaacaaatagtatcgcgggcgcttctctgcacaccgctatttctcgccggatgcgggacgatcggggatgcccgcagcagctatgcattgtcacagtacaatgcgggcccggcgggaattgcggaaaaacaggcacgtgaagcgcaacaggcggaagatgcccggattgccggggagaaagagaagcaaacctgtctgtcctatcagcgtgactggcgtgccgccgggtacaataccggcagcgttggcggacacccgcaatattacaacagcattctgcgtgagtgtcagaggcacaatctgacgttcagcaaaccgcaatgggaaaccggctatcagcaggggctgaaagagggatactgcgtgtatgaaacggcgctgactatcgggacagaaaacgcatacgaccagatgatgacacaatgtacgctgttactttccgcccggcagcagcagaatatgcagatctttttcctcaagggacagattatctcacagcagaaatccgcgctgtcagacgcaaaatatgatctgtcaaaactggaggataaactgcgctacggccgtgataatgagataacccgtgtcgatcgccgggaataccgccacctgaagcaggctgtgaatgatttacagtatgagctggatctgatgtattcagaagctcagcgtctgctgctggaaaccggcggcagataa

SEQ ID NO: 284614 - DNA, 1206 bp, Morganella morganii
atgttttctattcatcagcagttgtctgtaaataaccggcagggagagcagtcacctccgccgttgccacccaaagcacagcatcaggggcggacgatggagttacaggcatcacaaagccgccctccggctccgttaccccggccggaacacacgctttcagatagtgtttcgttacgtcagcatcacactgcgcccggtttacaccatcgccatgcagtgtatgaaatgtcagcgcctgccaccggcgcgctgctgaaagaaccggcgtttatgtcgccgccgtcctatccggcaccggttccgccgtcattacaggcgcgggcacgaatgccgttaccgggggaagtggcgcatcagtcactggcacaacggagagcgggtcctaaattaacgccgttcacggcggtgatggaaacagaacgatcaggctatgcattcgggcaattgaaggcaaaaacagcagagcggcttgatcggaacaattatattaccggaatgaatcatcagcgctacagggatatcgatacttgcgtagcaacgcagatatttacaccggaaggcaaagggctgcctgtaaaccaaatgaaggttgatggggtgaatctggcgatgcgcggtcagttccctacgccggaaggatgtcctgaccatctccgcgtgctggcagctcaaaagccgggggtattggtcgtgctttcttccgataatgatatagctaacagagctcttccggcatatttccgtcaggatggccactatggcgatgtttcggtgaaatgcaaaattcacacggacgttagtgcccgcagtacaatgattgaaaagcttgtagtgaacaattaccggatagaaataaccgcaaacggcaaaacaacaccgatatcggttatgcatgtcacaaactgggaagatcgtacaaccattgctccttcagcactgaaaaaattggtttcgggtatcaatggaaaaattgagcagaagaccaggcaggatccccgttatacacctcagccatttattcattgcagcgcaggaattggtcgtaccggtgttgttgccggtgcaattgaattgttgaagccgggtaataaaaacatgcctgaggaaattgtactgcagatgcgtgaaaccggttcttcaaacatggtacagacttctgaacagtacaataccttgatcaatctgtataaagagcttaattaa

SEQ ID NO: 284615 - DNA, 225 bp, Morganella morganii
atggattattttttagcgcggtcagatgatggtatcaaatccgttttacacaaaaaaatatgcaaaaaattacaacaggtcaaaggtattgaatatatcggatattatctaggcgaatatagagctattcggcatgcaaaaattattgcgaaagatactgttatcttatgccctgtatgcttgagcgggattggtaatcccctcggaaaatggaagtgttcataa

SEQ ID NO: 284616 - DNA, 246 bp, Morganella morganii
atgtttgagatacatatggaaattaaaatcctgaacaagcagggaatgagcaactggaaaccgaggatttcctgcaatatggtaaagcgctacctgcgtgcccagtgtgaaccggtaaaatatacgtcacatccggcagcggtctcacttcttgacgagtacaggggttacatataccagcttattgtggatgcgcatccttataaaacccctgggatttcaacctcgtatttttcatttttttag

SEQ ID NO: 284617 - DNA, 198 bp, Morganella morganii
atgaaatataaatcaacaatttttctgattgctaaaatcattactatcatttttctgatggttatgtcatttgtttttggtgtttcttttattaaaacagctgatgttgacctcatagaacaaacgaaagttaatatttcaacttttcttgaatgtcgggatattgcagagtttaaaaatatcacttattatttataa

SEQ ID NO: 284618 - DNA, 1188 bp, Morganella morganii
atgaatgtaaataactattataattttttacctgtggcgcaggatacacattctcaggtttccggaatgcaagaaaaatcgcagttggcggaggtgtcaactgatagtgaattgctttcatatttctataatgaattaaataacataagtgtaattttgtcaaatccggcaacaacagaagaacaagctgtaaaagagttgagtaaatataatgaaataataaaatcacccgaatttttaaaacttacctcatctcagaatagtgaattttcgtataaaataatagatgttaaggaatctatagagtatttttttctgaaaaaagaaatggtgacttttggctattttgtggacaagatggatgttgcatctaagtatggttataatttaaatgttaaatattaccgggatggatttagccagtatacagagttttataaaacaatgtcgaaattattaagctcatacggtgaatactctgccggagttattgatgatggtaagaaaacaaaatttaagcaggatctgttttattatgatttacatttaaaattaatgaattactatccggttacgggtgatttaaagaattcagatggaaaagattgctcaatatataaaggacgatttgaaatagacacccgtaatgggattgataattgctcgacatatattgatggggagctgattgatagtggtgttaattattcagatgctataaaaaaaatggagtattttttctccattatgaataaaccaatatccggaactcagattattaaaaagataaatacagaaaaagatagtgatggcaagctggttaaaataattggaatggctgattctatagctatgccagatgcattattccgatggcttgatatatccgtgtcttctttatataaagacacgttgaataaaaccaggaaaatatttaatgataaattaaattccagttatttcaaaacggcagagtcaggaagaaataaaccatgggatttagaccaagggaaaattaattcatataatactattattgatggaattaaaaaagaactgcaaatgacccttgatgagttatctcagcgatataatacgatcaacagtaactatgataatatgctcagagttattaccacaatgatcagcgaactgactcaggaattaaaaggttttttacggatttaa

SEQ ID NO: 284619 - DNA, 1041 bp, Morganella morganii
gtgaatattgaatgttattacagtgatcctgagtctggtttttgtacggagatggtaaataaacaggtggccgatttactgtcagtgatgacaaaaagaaaagaaaaaaaacagtgtgataatgatattccggtaatctgttcaacaattcaacattattatgataaatgttatagtggtaatgtattatattttattccaaaaaaagaaagaggtgattatcatttctgcgacaagagtgatgctattatgaccttggtctcaccagcagggaagataaaaaaaataatatatccgaatacgttacctgactatattttatataaaaacacggcagataaataccctggtacgcatcctgagaatgttatttctgcaaaagaaccgaaaagcatggcagcagaaagaagaacggtggaaaacatcccggaatcagcaaatattccggagacagaatacacatctggaacagaatacacaccggagacagaatacacaccggagacagaatacacaccggagacagaatacacaccggagacagaatacacaccggagacagaatacacaccggagacagaatacacaccggagacagaatacacaccggaggcagaatacacaccggagacagaatacacaccggagacagaatacataccggaggcagaatatacaccggaggcagaatacatgacggcagcagatatgacgccggagcttctggttttccggctctccggcgccacaccggagaaaaagagtctcacgttacggtattatgagcaggaaaagggggcgcaggaaaaagccgctcaggttatcggctataccggaaaaaatcaggctgtcccggaaaactgcagacctgattattattgttcttatcatttcaggcagaaatatcagccacctgaaccggtgtttatttaccgggaaaagccgggccggtttaaactggaaaccggttcagaaacgcttagccggcgactgaaaacgatgaacgctataaatggaattgatagtgttgatatattataa

SEQ ID NO: 284620 - DNA, 573 bp, Morganella morganii
atggatattaatattcctgattggaatgatattggaataataccgcctttattaggagcatctggcgttgattttaatcgctcaccatacaaagcaagcgctatagaacttgttgataagtatgcattcaactcaaaaagagcatcgatacttgctggctttcttgcttttaggtctagattgtattcaacaggtattatagaaggatttcaatgggttgatgggagttttacagaaaacgtagagctaaccttattaagaaagccaaatgatattgatttagtgactttttttaaaatccctagcggagaaactgaaaattcaatactacaaaaagattttgagctatttactccaaaggtaaaggagttgtatcttgttgatgcttattggcaggggcttgatgatgatcctgtatctttggttcaaatgtcggcatactggtacagcatgtggtctcacaaaagagacatgagttggaaaggttttttacaaatcccactgtctgaacaagatgactcacaagcatctattatattaaacaacaagatattaggaggcttcgatgactag

SEQ ID NO: 284621 - DNA, 891 bp, Morganella morganii
atgactagagatgaatatgtttatgttctcagcgaacgtagccaagtaatgtcaatgttaaaatcaattgatgaaaaaaatgttataagcaggatgagcctagaatataggttatctcagcttgatgacgaaataaagaatgccaatattaatatgcactcaccagctaaagcggtaattacctttaagggtgatccggttttaggtactgtagggatttcatctgcatttggggcaaaaatattaaaagcattcaattcagcaataacgcaagtgtcaacatcactaatgccagtcactgcggtacaaaaaatcgaaccaatgatcattacaggaaccgctaaaggttcattcgggtttgtcttagaagagccatctagagagggcattttagattttgacgagaaatcaataacctcatgttcgcttgaaaaaacatataaaatacttagttcagcaataagcaatgatgacgagttattagctaatgagttagaagctattgatgaaaattcaataaaaaaaataagagaattcattgatattctagtaaaagaaaaaacaattttcactataaaaaacagtgatttttctttggtcgttaggaatcctcagcaactagaaactatcagctataagctgagcgttgacaacataaaagaagaaattaaaactcttgatgttaagtttactggtgtattaccaaataaaagaaggtgtgaatttaaattaattagcgatgatactgatgtggaagtagcgacaataagttctcacataaagtcaccagaggttatcaatactctaattggaaaaacagtccaagctaaatttttatgcaccactgtaggtaacggcaaaacgaaatactcccttagagatttgccttaa

SEQ ID NO: 284622 - DNA, 195 bp, Morganella morganii
atgctggcagaaattgggcgtgcagtaatacgccttcttgatgagtgccctgactgcagggaagagggaaagatagagatcaacgcccttcttgggctgctgaggcatgattgcgaagatgcttggacggaaagcgaaagaaacagggtatctatggcaatacgcctgcttgttgagagagtggatgtgaagtag

SEQ ID NO: 284623 - DNA, 918 bp, Morganella morganii
atgaaaacagttaacacagcaataccggccgggttctctttacaggagcgggatcgccgctgggatctggcgcgtgacattatgcgccagcgtaatctggatgttctgattgtttatggtgaccgggagtctgctgccccggctccgttctgcgtggatcactattttaccaatgaccgcctcgggtctgtggtgattttttatcaggacaatgacccggttgtggtgacatttgcgccgatgatgattgccgatcatatgcaggccgcattacgcggggacaatcaatggttgtccccgtcacagattatggtcggtaaaaccgggcgtaatatcggggcactgctccgcgagatgaatgtaccggcgacggtacaaatcggcgtgatcgggctggagccgtatccgccgttctattttgatggtgcgatgccgttcaataccctgaccgggattaaagaagcgtatccgcaggcggcgattgtgccggtttaccgtgacttttttgtccgtgcttccgtaaaaagtgaggaagaactggcacatatccgccatgctgccgccatcggtgaagctatgagtgaagccatgcgcgtgacagcagtaccgggaaacagtgaggcggatattgcggcggcagtcaccgccatctgcttatctgcggggggatttactgctgagatcctgatgggatccggtcctgaatatatcggctggggtcagcctgcctggcagtaccgctcacaaaaacccagagagattgaggcggtgatattgtgctgtcagagattttcgcactgtacggaatgtatgaaacccagcatcaggcggcggttgcggtcggtaacattcacccgcagctggagaaagcggcgcaggtcgcccgggaatgttatgacatcggggtgtcatatctga

SEQ ID NO: 284624 - DNA, 564 bp, Morganella morganii
atggaaacattactgacacactggattacagaatacggctattgggcaacctttttcggtaccatgatcgaaggggaaaccgccgcatttttatccggcattgccgcacaccatcagttattatcctacccgaaagtgatgctggtggccgcactgggcggaattatcagtgacaatgttctgttttttaccggttattttgccggaaaccggatcctgccccgcattcataaacatgcggataaaatagcccgtgttcaggaaataatacataagcgacaagtgctgatcattattggtatccggtttgcttatggcctgcgtacacttggtccggttattatcggtgcctcacgtgtaaatccgattttatttattatttttaatataataggtggattattatggggaggagtcattgtctctgccggttactatataagttcgtatatcacatcattacctgttcataaatatatcatttatcttatcatcacactcttgactatagtctttatttttatacgaagacactctgttaataaaattaaagataagttataa

SEQ ID NO: 284625 - DNA, 336 bp, Morganella morganii
atgaggttgaaacttattattatattttttttctttatcagtgtaaattcacatgcaaatacagagcgcgctgataatagaataacaaaatgtgatgtaaaaatagtaaaaatggcacgcgggaatagtcataggttaacattatattaccatgatacaaaaacaggaaaatatattatattaaatgagcacttatcttttcagcttaaatcatcagataaagcatatatttttgtaaaatttgcttatctgtatgacaggaagttatgtgtcaggtactggactgaaggtaatataaatttcatcgctaacttttatgatgatacatcaaattaa

SEQ ID NO: 284626 - DNA, 315 bp, Morganella morganii
atgaaaaaaacaattatgtttttatcgttaactgctggttttttattatcccagcccggtcattccgcaacattcaatgaccggtgtaatgcttatgtcaaggcatcgagtattgatgcggcttcattttatcgctttaatttagttcaaaaagatggtttgttttttgataacagtcgtcagtggagtttctcagcatccaaccctaatattattgaaatgctgaatatggctatgttatcaaaatccccgatatgtataacttacagaacctacaaagactattgggaaataaatgcaataaaattccaataa

SEQ ID NO: 284627 - DNA, 987 bp, Morganella morganii
atgattaatagattgattatcttatttatcataatgttccctgttcattcctcagcagccagcataccaatagaaaatgaagtcatttactttgattacagtaatgaatcaaaatatatggactctatatctgctcttaaaaaaacactcagtgacagtactaattcattaggaacaaccattgttacttctacaaagaatgacaaaatatataaagcaaaaatcacaagtggaggtaacgaatttatacacatggtttttaatgcaagaaatgcctatatgataggattcattgtcacatcaaaagaaaataatgggaaattgaaagaaacatattatagattcaatgaagataataaaaacaatatattggatataaaagattatgaaaatataacattaccatttaaaggaaattacattgatctgcaaaagaaagctgtcgatatagagacaatatcagccactcctgaagcaataaaaaattcagtaatcacactcagcaaatatgattccaggaaaaaatatgatgaaaagggaattaaggatttaaagaaatcattgttaagtcttatcttaatcacatcagagtcagtcaggttccctgatgtcaggaaatggagcattgggcacttcaaaaaatatgatgctcaaccaacagtatttggcatagctttaaaaaaattaattaatgactggggtaaaatcagtaaagaacttaaaatattatacaataaaccaggaaagaacgataattcatattcttatatgaatggttccatgacaacaaaacctcacccttacaatacaggaaacgcccatgaattatgcgattatgtattatatatgccggataaaaaaagcaagcaaactgattcagatgaagagcaccatgaactctatcatattaaagcactaggcaatgatatttattttccattcgaccaactaatgaacatatattactccataaactactcaaattaa

SEQ ID NO: 284628 - DNA, 339 bp, Morganella morganii
atgtttaaatacatcttattttcccctttgatattttcattattatcaccacacgctaaagccgaggatgaatttaaaataaaatgtcgcattaatataaaaaaattcatacagtatgataacgagtatagaatgacactctatattaatgatgaaaaaaatgactacgattatatttttggcaccgacctttcatttactcttccattaaccacctttgtatataattacataaaaaccgcttatattcttgggaaaaatttatgcattcaataccgcgtcgaaaacaacactaataaaataaccagaatgtatgatgattatcatatagatgaatga

SEQ ID NO: 284629 - DNA, 357 bp, Morganella morganii
atgaaaaaattaatatttatattatttacaatttcaatgtccttcagtgccaattccaaagtgtttacagataagtgtgattattatatttttgctactgctgttgaacggggtggttattatcgttttcagatacacgatatacataataatctgtatcccggcagttatatatggagtttttcagccagcacgccggagatcattgaaatactgaatatggcacatcttttccgcacccccgtctgcataagttacaaaacctatgctgattactgggagatatttgatgttgccatgcaggaaggggaagctccggtttcgctgttcagacataaaaaaacctcaccggagtga

SEQ ID NO: 284630 - DNA, 738 bp, Morganella morganii
atgtcagcaaactgggactggggcatcttttttcagcctgcccccttcggcaacaccacatacctcggctggatcctgtccggcctgaaggtcacggtgatgctgtcaatctgtgcctggattatcgcctttctggtgggatctctgttcggcattctccgtacggtgccgaataagtttctctcctcactcggcaccatttatgtggaaattttccgtaatgtgccgctgatcgtccagtttttcacctggtatctgcttttacctgaagttctcccgggtgatctgggtaactggtttaaacaggaactcgatccggaaattcagtttttcatctcctccgtgttatgccttggcctgtttaccgcagcccgggtgacagaacaggtgcgcaccgccattcagtcacttccccgcggccagcgtgctgccggtctggccatgggcctgacactgccgcagacttaccgctatgtgctgctgccgaatgcttaccgcgtgattattccgccgatgacatcggaaatgctcaatctggtgaaaaattccgcgattgcctccactatcggactggcggatatggcttttcaggcagggcagcttctggaatattccgcgcgcgcctatgaatcttttatcgccattaccgtcgcatacgccgccattaacgccattattatgtggctgatgcatgttctggaaaaacgcacccgtctgcccggcacaggaggtcactga

SEQ ID NO: 284631 - DNA, 594 bp, Morganella morganii
atgatcaaagtactgataatgtatcacccacattttgcatcttctggtaagtttgaaagaaaaatcaccaaaatactttcaacactgaatgattatcaaattgtctactttgatgacccagccggtcttattagtagctatttcgaatcaaaactactaagacatcttagcaagaatgtgtttggcagcattgttcaagatgaaaatctgactcatgcagtaatatttgattcgacatattccccagagttcacaactgttaaatcatatctttcagaagtaatacccgttcgatatattcaagataaaattacatttgtctccaataaagataaaggtgatcattttgatacttatattggccgtggtactttgtggggtaatccatatgcaataggtcaagatggtgatcgtgacgaagtgataaggaaatttgcatatgattttaacagaggttttttacgaggtggagaagatttcaatgagaaactaaaagccttaagagggcatacattagggtgccattgtaaaccctacgcatgtcatggagatgttcttgctgagtatcttaataaactggatgatggtgaatag

SEQ ID NO: 284632 - DNA, 438 bp, Morganella morganii
atgaatatctacagcattggttttacagaaaaaacagcagagaagtttttcaatcttattaaatcacaaccaattaaaactttagtggatgtacgcttaaacaatgtatctcagttagctggctttacaaaaaaaaatgacttgaaatatttcttaaaagaaatatgcaatattgactatgttcatattcaagatttagcccctacaaaagaaatgttagatccctataaaaaaggaaatgtgtcatgggaagtttatgagaataattttttgaatcttatggccaaaagaaacattgaaagaatcgacaaaaaattaattgaaaacagctgcttactttgtagtgagcataaaccacatcactgccaccgccgccttgtgatagaatacttgaatgagcattgggatactgattttgaggttaagcatttgatatga

SEQ ID NO: 284633 - DNA, 666 bp, Morganella morganii
atgaccactgaattaaaacacattattttcatatgcttagcatgttctaagaaattcaatgctttttgtgttgctggaaaattaataaataaaaacagagatgtcggagaatgggttagaccgatgaactctaatcaggttattgagctatctgatagagaatactctaagaaacaaggacatgcagccccattagatgtcgttcgtgccgtttacctcaagactactcccgctggttttcaatcagaaaatgttcgaattgatacagaatattattgggaaaaattaaacgctaaccctcctatagttctggataaccttttagacacccctgaaaacttgtggttaaacgggtatcatagttccaacggtaagaatgatcgcgtgcctgttagtgagattaatagtataacaaatagtctatattttattaaggttagtgaattggaagtgttctctgaagtttcatttgagaaacttaaagttcgtgctgattttaactataatgatgttaactataatctaactgttactgaccctgaggcttgtgaaaaatatcagacagaaggtaattactatttaggtgattgctatataactgttagtctcggagttgaatttaatgataatcattataaattaattgcttttctgaagatggaatga

SEQ ID NO: 284634 - DNA, 849 bp, Morganella morganii
atggataaagcactttgtactattgataatagagaatgggatgcccgtttattttctaaactagatcctaatgagatacaactaaagaggcgaaacctcatttgtctgggatgtcagggggatgcttggttcagaaaatcaagctatggaaatgaatcacctcatttttgtgctcatcatcaggaaggatgctcatttggtactgcttatgaggcaataggtgaaggagacaatgagcgtaaaataccagctgtagatgctgataacggaatcattattgattttggtttaccaaaaagttatagcgttgatgttgcatccggttcagcggaatcagaatcaggctcttctggcctgaagttggctacaggcaatactgaggatggcggtaagaaatatccttcgcatacaacactgaagcaaatgttatacagactggttaaatctgatggtcactattatgaagataaaaatctcataattacagatgatactctgcatgatttaccaaaatcaggttctgaattatttgtccacttcaatgatgtcagggagtggctggatggagcaagaagaatattttggggatttatcagtgatgccgggcaaacgtctgatggtaaaatatggctaaatgccggaaatatcagaaaagggctgagtgtatgcttaatggaaagagtaactgaatcatttagagaacaattcaggattggtgataatttggatgaacttgatgggtgccatgctcttattgttggcacttgtacttatgctatgtcaggaaaaccagttattcgttgtaatgacttaaattatattgtgttacgtagatacaaagctgattaa

SEQ ID NO: 284635 - DNA, 615 bp, Morganella morganii
atgtcagcagtctataaggcaataagtgccgtagccaaggaactggctgaaacaggcattaaaaagggtagcaggaacgcacagcaagggttcatgttcaggggtatcgacgctgtatacaacgctcttgccccggcgctggttaaacatggactggttattctcccccgcattattgagcgctctgtcacggagcgacagacacaaaaaggcggcaccttattttatgttgtggtgaaagctgagtttgattttattgccacagaagacggaagcaagcacacggtagccacctttggcgaagctatggatagcggcgacaaggcgacgaataaagcaatgtccattgcctacaaatacgcagctttccaggcattctgtattcccactgaagaaactgcaattgatgctgatgcagaggttcatgatgtcgcaccgcgcaatccagagcagattctgaatgactataccgaatttcttaatgtcacaagtgacacaaaagcgattgaagctgaataccggaaagtgtggcgaatgctgaacggcagcgacaagcaggatgagtgcaagcgcctcaccggcatcagggtcaacgaacttaaacaggcggcataa

SEQ ID NO: 284636 - DNA, 474 bp, Morganella morganii
atggcgagcagaggcgttaataaggtgatcctcatcggaaacctagggcaagacccggaagtgcgttacctgccacagggtggcgctgtaacaaacatcacgctggcgacaagcgaatcatggagagataagcaatcaggtgagatgaaagaaaaaaccgaatggcacagggtagtgttgttcgggaagttagctgaaatagccggtgaatacctgagaaaaggaagtcaggtatatatcgaaggtcagttgcagacacgtaagtggcaagaccagcaggggcaagatcgctacagcacggaggttgttgtgaatgtcggcgggtcaatgcaaatgctcagcgggcgtaacttagggaatgacgattcaccaccggcagggagccagaaaccaccgcagcaacgaccacgacaacaacagccgcagaatcactgcgagccaccgatggattttgacgacgacattccattctga

SEQ ID NO: 284637 - DNA, 549 bp, Morganella morganii
atgaagcacttaatgttagaccttgaaactatgggtaataccccttccgctccgattatctcaattggggctgtatttttcgacctggcaacgggcgaccttggtgcaagtacagaaattaacatctcgcttgaatcatcaatgagctacggctcaatccctgatgccagcacaattatgtggtggatgaagcaaagtgatgaggcaagagtcgcggtatccggcggcggtaaatcgctccacgacgctttgcgtgaattttatttattcgtctgcgagaaagcagataccaagtggttacaggtatggggcaatggcgcatcgtttgactgcgttatcctgcgcaacgcctacagcgtgattggtcagttaccaccctggcagtggtggaatgatcgtgatgtacggacaattgttgaactcggtaagcaggttggtatagacccgaaaaaggatatgccgtttgacggcgttcgtcacaccgcggtggctgatgccatgcaccaagcgcgctatgtgtccgctatctggcaacgaataaccaaataa

SEQ ID NO: 284638 - DNA, 792 bp, Morganella morganii
atgactgcttactataacgaaaacgatccgttcgctgctcagtggttacggaatctcattgctgccggtcatatagcaccgggtgtagtggacgaaaggagtattgaagatgtcacaccagatgatttgcgcggattcacacaatgccacttcttcgccggtgtcggagtgtggtcacttgccctgcgtcgtgcaggatggccggatgacaaaccagtctggacaggaagttgcccgtgccagcctttcagcgcgccaggcaaaagaaaaggatttgctgacgagcggcacctttggcctgcattcttccacctcatcagcgagtgcaaacctggcgttatctttggcgaacaggttgcaagtaaagacggcctcgcttggctcgaccttgtacaagctgacctggaagcagcggactacgccacagccgcggtcgatttatgcgctgcgggcttcggtgcgccgcatgtcagacagagattgtattgggtgggcgactccgcttgcgcgggaaagcaaggagcgcggggatgtgagcaattcgttcttcgagaagtcgggaagattaaggaacagcgtcctatatcgccagatgtggcttcacgctttttctctgactgggagcccaagcagggagcagataaaaacactcgaatgctaccacctaactttggcgagatacttgatggctctgccggtcgagtgggaaaactgcgcgcctacggaaatgccatcgtcgcgccggtcgcggaagaattcataagggcttatatgctgataacagaggaatga

SEQ ID NO: 284639 - DNA, 294 bp, Morganella morganii
atgaaagtctatctcgacgatgagcgcgagacaccacagggatttgtgcgcgtctactggcctgatgaggccattaagttgctgcaaaccgcggatgtgacattaatcagcctagaccatgatttaggtgatgatgagcgcggtacaggctatgacgtgttgttgtggatagaagaacaggtgtatttgaacggatttaaagcgcctgaaatcattgtgcattccgccaatacatcggcgcgtcagaaaatggaattagcaattaaccatattaagcagattcaggaggggtga

SEQ ID NO: 284640 - DNA, 276 bp, Morganella morganii
atggatatatcacaacagcagtttgagcaatgcattaaattacatagcgacccagcagaactggaacagaaattaaaaaaggcgaataacggattaaattacgctgaccgcgatgtagatttaatgtggattagttggcaggcatcgcgtgatgcattaaaaccggttgggtatacatcgcacaaggaactgcaagaaatggcttgcggcatcgttggaatagttcatcgaaataaaaatgtagttaattatatacctgtttatattaaagactaa

SEQ ID NO: 284641 - DNA, 210 bp, Morganella morganii
atgctccggccgcttgtgcagcggttctctctgatctgccgggaggcaaatcatgtatttcaccctgttacactggcaacacccgctgtttacccgccgtcaggcgttgcggttacttattcagttacagagggctgttcatatgacacgcagggagagacgggaacgccggatcagaaaaaacgcatcggaataagagcggaaaactga

SEQ ID NO: 284642 - DNA, 429 bp, Morganella morganii
atgcggctgtcccgtacctttatcagagggctctctgtactgctgctgtgcgggatgttaagcggttgcggggtattttatggtgccatgtgcggcagtatgaccctgtttacgccgtcagaatcagtgacaaaaatcgcgctgccggatgcggtgacaggtcagccgtatgatcagaccattgaaatcgcccggaataccgggatgatcccgttttatgtcagtgaaaaaccggactggctcacggtcacgctgatgtcaaaaaatgaggccggtgaatggcttccgctgatcgccgcccgtttgcagggaacgccgccggagcgcggcaacgtccggataaacatcaaaggtgcagcctaccgcaccatgtgcggaagttctgatccggtctattccctgcggctgactgtgaaaaaagcggagtaa

SEQ ID NO: 284643 - DNA, 483 bp, Morganella morganii
atgatattttttatcttccccttgtccattatcatagaaagcaatggagggtttaaatattcatgtacgcgaacataccattttttatcactaattacatcaaatagttactcatggtatttatcaaaaagatataccagttgttctgttttttttgagcgcatatacttttctgaaacattaatccaatcggtaaaatttgattttggtatttttttacctaaaatcttaagcccaaaaaatgcaattataatgcaaaggcaagtaaaagctaacgtatcttcgttaaaacctagcacccatggaataggttttataggaaaaacgcttaacaaaaccttggaatatatcactaccaaaattatcgatatcaaaaatattataaacaaaatattaagtttagatatgcgtaattttaaatcaacacgtctttcatcagttaagatgggtataccatgcaagaagtatggcaaagactgctag

SEQ ID NO: 284644 - DNA, 366 bp, Morganella morganii
atggtcaggccaacggaatatcttgactatgatggctggacaatggaagaagtaatgcaatctcctgagtatattgcttctgctactttgggggaaatgatgtatctgattattacttcagataaattgcagaagagacaaaaagtatatcttttagaaatcatcattaaaagaatgaaatcccttgatcaaaataagaagtttttgtactccgaggcaatttttaccaaccttatccagccgtactcttgttcaggggttgacactaacgcggtaaatgaattgcggcaactatacaaaagtgttgaccatgttctaaaaactaaaagctcaacttttgaagctgaactttctaaaataccttag

SEQ ID NO: 284645 - DNA, 261 bp, Morganella morganii
atggaactgaaaaacagtatcagtgattacaccgaagctgagtttttaaagttgttgcaggtgatttgtaatgtagagacttccagtgaagaagaacacaaatcattggttagacattttgttaaattatcggagcatcctcgggggaatggattgatctaccatcctaatgatggtgaggatgattctccggctggaattttgaaaatagttaaagaatggcgagcccaaaacggtaagccaggctttaaacaagggtaa

SEQ ID NO: 284646 - DNA, 159 bp, Morganella morganii
atgaaaaaaacaaaaacagggtatctgttgttatatctgatttcggttgtactacaggcggccagtcaggccagctatgttctggatatgtccggcggcagagtgaataccagtaatccgattttatccgggatacttacagtacaacgggtgacctga

SEQ ID NO: 284647 - DNA, 1521 bp, Morganella morganii
atggaaattaattatgatggttttaataattcggaaattgtaatcggattggtaggtgctgtcggtattgatcttaaacaagtattcgatattattgatagaaaatttaattcatttaaatataattctgagttgataaagatatcttctgatgtaatccctatttttagtgagtgtgaaaaaacagaggataaatatcaacgaataagtcaccttatgaataaaggtaatgagataaggaaacgtcatcaggataattcaattttagcaaagggttttgctttgtatgttaatttaaaaaggaaagaaagaaacaaaaaagatgaattaatggaaagaactgtatgggttgtttcatcgttgaaaacaccagaggaagtaaacgagctaagaaaaatatactctgatggattctatctttttggtatatattcgtcagaggaaaggcgatttcaggcattgactgaaaataaggaaatggaaggaaagcaagctgagaaattaatagagagagataaggatgagtcagatgactatggacagaaaacacgagacacatatcatttatctgatttcttcataaactatgatggtaattttgataagtttagtaatgatataggaagagtaatagatttattatttggtcatccttacataacacctacgtttgatgaatatgctatgtatatggcattttcagccgcgttacgctcaggcgatctatcccgacaagttggtgccgtggtaacaagagatcaacagataatgtctactggcgctaacgatgttcccagaagtggtggggggctctattggcctcattatgatgaaaaaaatcttgaaataattgatgatgtagacggtcgtgattataaaaggaaatttgactctaataagaaagaacaaaaagaaatcattgatggaataattaattccttgaagaatagtgatgatgttaaatttaataagaaacaaattgaaaaaatagagtttaaattaaagaaatcaagaataaaggatataacagagtatggtagagttgttcacgcagaaatggaagctatcctttcatgcgctaggaattatgtttcaacaaaaggttcggagttatattgtacaaccttcccatgtcataactgtgcaaagcatataatagcatcaggaataaagcgagttacctatattgaaccatatccaaaaagcaaagcaactaagttccatagtgactcaattagtcttggtgattctgatagcaataatgaaagtgatgaaaaatcaaaaatagagaaagttatttttgaaccatttgttggtgttggcccaaaatcattcctgaaattattttctattagtctgggaggtggcaatacaataaaaagaaaagacgcggatggaaatattgtggattttaaccccaagaatgctaaactgaaaacagtgatgttaccttcgtcgtatattgaacgtgaacgttatgctgcatcacaactatctgataaagagagaaaaaaagaatga

SEQ ID NO: 284648 - DNA, 2784 bp, Morganella morganii
atgacatttaataattcagtgctgattgcactgttttccgcttctttcagcgcttatgccacggaaccaccaccaccttatcagtcagaagtcgaaatccctgatattaataccattctcagcagtgccactgatggctggccgaccgcaaaagataagtgggataataaatatcagtcaattatcaccggtaacaaatatattaatggtcagacgttaaccagaacctggttcccggaacaatttctttatgttgaaaataattcttacagcctgaataacaccattgattccttccagaccacattccggagcggtagtgtcgctatcggaaatatagtcaaaggcggaattaccaatccgtctgctccttccaaagtctatcgcggctttatgtcgatgatggaagattccatagcgtataacaccattgttgaagataacggcagcctcagtctgggaaatgatgccaaagcgtataacaccaccgtaaatgccggcggcagaatggttgtcggtacacggggctatgcgcaggcaattctgatcgacggcggttatctggagcaatccgttaccagcacctcaaataccaaagatgtcattgtcgtgaatggcggccagcatattatctacggcggtacggcaaccaacagtcatatcggcagcggcagttatcaaatgagcagcggtaacacaatcgatacagtgctgtatgacggcgcagttcagcagatctatgccggaaaggacggtgtgaccgaccgcaatacccttgttaaccccggtgcattacagtttgtaacccacggtaatacagaagatacccgtgtttacggtactcagattattaccggtgttgacggggaatgggaaaacggtgaatggacatccgacgattctttccggattgatgatcagacagccaaaaatgccaccatttatgcaggcggtgtacagcgtattcagaccggcgaggctattgatactcaggtttacgggcagcagattgtcagcggcaaaaaaggcggctggaccggcggacagtgggttgagcaggacgcctggattggcaaagatcaggttgcgaccggctctgtgatccatcagggcggtgagcagattgttgaatactatgccgatgcggttggtacgctggttaacggcggcacacagctggtcagggagtttggtcatattcaggataccaccgttgaaaatggcggttcatcctttattgcctatggtgcatattccaccggtgaactgaatgtgaataacggttcagtaaccatggaaggcggcagccttcacagctggaccggcgcactggatgcaaaaggcgcttatgttacccgccttaatctggctggtgataatgcgtttatgtatctgcagcataatgacaccaccagtgaatccgaagcgaccattgaaaaactggctaacaacggaaccgtggtattcggcagcagcaacggcagtgatgcgggtaaatacagccgtttacagatttcagatctgaccggttccggtacctttgtgatgaacaccaatattaatggcggtaccggtgatttcctgaatatcagcaacagtatcagcggtgagtttaatgtcagagtgatggattccggtcaggagctgaaaagccgcggcggtgtgaatcctcatcatctgatctttgccaacggcagtgacagcaacagctttgcactggtgaacggcagtgttgatctgggtgcttataaatattacctggtacagggtgatgagcaggacagtgataactggtatttatcaccgaaagcaaatgaaccggcaccaaatccggacccgggtcctgatccggaaccaaaaccggaaccggagcctgaaatctccgagagcggtaaaaacgccatcgcgatggcaaacgtaacgccaactatctggaacagcgaattatccacactgagaacccgcctgggtgatctgcgtgataaccagacggcacaggatggcgtgtggggcaaatatatcggcagccgtaaccgcatctcaaccagtaatgtcggttacacccaggatatgaacgggctgatgctgggcagcgaccacgcgattgtgctggataacagccgcctgctgatcgggggaatgttctcctatacccattcagaactggatgcccgcaccagtgacggcaaggtggacagcttaggtcttggtgtctataccacctggatgcacaacagcggctattatgtggatggcgtgctgaaagccaaccatttcagaaccaaaaacagcgcgcagtttaatgacggcaaaaccacggccaaagataacaccaacggcatcggtttctctgtggaagccggtaaacacatcaccgcaggcagttactttatcgagccttatgtgctgggatcttacttccgcggcgaaaaaacagcctatcgcttcagcagtgatatgaaagtgaaagcggacgctgcagagtctgttaaaggtgaaatcggtaccaccttcggtaagacatttgtcactgaaagcggcggactgattaaaccttatgcccgcctggcggtcagccacgagttcaaaaagaacaatgacgtggtgattaatgacacggaatcattcagcaatgatatgtccggaaccgtcggtaaatacggcgtgggtctgacagcacagatgaataaccagtggtcagcctatgcagagttcaactatgccaaaggcagccatgtggaaacgccttacagcggcaacctgggtatccgttacagtttctga

SEQ ID NO: 284649 - DNA, 1782 bp, Morganella morganii
atgggtaacaacaatgtactgggaaatactcacctgctgaccctggctcagaacacacaactggatatgaatggctttgcccagacactgcagaacctgagctcagcggagggcagcctgattgactttaaccagggtgcgctgaccgtgaacaacggtacggtggccggtaatctgaccggtgccggcagcctgaaggtgaccggcggaagcctcagcatcagcagtgataataccggcatgacagcagataccaccattgatgaagacggcagtgtatatatgcaggcgactcatgcactgggaagcggcagtgtcagtaacagcggcaacctggttatcggtactgactccgcagataataaccgccccctgccaaccggttatcaggttggctctctgactaacagcggtactgtcgcagtcacccacctggctgccggaacgcagtttcaggtaaacggaaactataccggtcaggatggcctgattcagttcgataccgttctggaaggcgataattccctgacagataaaatgaccgttaccggagacacatccgggcagacatttgtcagtgtgaataatatcggcgggcatggcgatcagactatcaacgggattgagctgatcagtatttccggggattcagccggtgagtttattaaacagggccgtattgttgcaggaacctatgattactcgctggtcagaggaacaggcagccgggccggtaactggtacctgacatctgaaaatacagacgttgatcccggcaccgatcctgacgcggacaaaaataatcgcccggaaggcggaagctataccgctaacctggcggcagccaataccatgtttaatacccgtctgcatgaccgtctgggtgaaacccagtataccgatgcgctcaccggtgaagaaaaagtgaccggcatgtggatgcgtcaggtcggcggacataacaactggcgcgataacagcgggcagctgaaaacacagagcaaccgctacgttatacaaataggcggggatattgcccgctggagtactgacggactggatcgctggcacctggggataatggccggctacggccatgacagcagccgcacccgttcgtccgccaccggttacagttcaaaaggttcagtcaatggttacagtgctggcacttatgccacctggtatgcgaatgatactgaccacagcggcttatacgcggacacctggttacaatacagctggtttaacaatgacgttaacggggaaggcctggcttccgaatcataccgttcccgtggtctgaccgcctctgctgagaccggttatactcagaagctaacggagttcaccggcagtaaaggttcccgtaatgaatggtttattcagcctcaggcgcagatcacgctgatggatgtcagggcggatgatcaccgggaaaataacggcacccgtgttgagggtaaaggcaacggaaatattcagacccgtctcgggatacgtacttaccttaaggggcacacccgtgaggatgacggaaaagacagagagttccagccgtttatcgaagccaactgggtccataacacccgtaatttttccgccggaatggacggtgtgaatatttctcagaaaggaacaaagaacctgggggaagtaaaaattggcgtggaaggacaaatcaacccgcacctgaatttatggggaaatgtgggtgttcaggttggtgataatggctataacgacagtaccgccatgcttggcatcagatataacttctga

SEQ ID NO: 284650 - DNA, 162 bp, Morganella morganii
atggacaaaaggattattcaatgtaattttgtgcgttacttatccactcagagggctttgtgtatgaatttcttatccatcccaagtcatcttgccggtgtctgccttgtgcaggcatggttcaatattgatcatcgtatttcaaacttcttccctgagtaa

SEQ ID NO: 284651 - DNA, 1023 bp, Morganella morganii
atgtttaatttaaaattctttaaagcagacccgtccacatttgttatccgttccgtgaacggtcatgtcaaaagtcaggggcagggcctgagcttctggtacaacagtgcgaccacatcgatcgccgccctgccgttaagtgcgcaggaaaccccgtttattttcaatttccagacagcggatttccagagtctccgtgttcaggggcaactctcctttcaggtcagtgcaccggaaaaaacggccggggtgcttaactttgtgctcaaccgcgacggaaaaacctacgcgaccgacgacccgatgaaactgaatgaccggattgtccgtgcggcacaaaccattatccaggcggaaatccagtccacgccgctgcgccgcgcattattgctcagccagtcgctggtggcactggtgcagtcacgtctgtcacagcaggcggcggttgaggcactggggatcaccattctggatttttctgtcaccgcgattaccccgacaccggaaacggcccgcgcacttgaggcggaagcccgggaatccctgctgaaagaggcggatgatgcgatttatgcgcggcgtaaatcctccgttgaacaggagcgcacgatcaaagaagctgagctggagaccgatctttctgtgcagaaaaaagagcagcagatagaggaatcccggctggaaaacgaacgcacactgttgcgtgaacaggcggcaatggcgcaggagcggttggcggcagagattggtgaggagcagcagcgtcagacactggtttctctcagtgccgataatcagcgcgttcagtccgaagcggatgcgtatgccattgaaaccaaaatgaaagcgtaccgcgagctgccggtggaaaatctcaaagcgctggcactgagccggatggcgccggaacaactgatggcaatggcgtttgagtcactggcacagaatgccggaaaaatcggtgagctgaatatcgcaccggatatgttcagccagatgatgaaaaaagggagcaaagcatga

SEQ ID NO: 284652 - DNA, 561 bp, Morganella morganii
gtggagggtattcgtcaggcaataaaaaatctgaactccatcagtgatacagcagtaccaatcgcaacggcccgggcagtaaacagagttgctgcaagaataatcacccgcagtatcagacgcgtgtcttgtgacactcaactaccacaaaaacttatccgtcagcgcgttcgcctgcaacgcgccagcagccggcattccatccccaaagctcgtttactgataaaccgtggcaacttaccggtcattgctatcggtaaatcaaggcttctgttgtcccgcaggcgtcatgacagaaaggggggcggaagtattctgaagatcgggaaatttacctttcggggtgcctttattcagcaattatccaacgggcgctggcatgtattacggcgtaccgacaacgggcgttatccggtggaggtggtgaaagttgcgttaatgaccccgctgacacaaggatttatcacagagacagaagtactgattcagtctgatttacagaaggaactggcatacacactgaagcatcagttacggctgtattttaaaaggaggatgtaa

SEQ ID NO: 284653 - DNA, 399 bp, Morganella morganii
atgagcaggcataccgcgattaggacagcggtaattaaggctttaaagccatatacagggagcgtgaccgttcatgatggacgtccggtttttctcagtgaggaagaattaccggcgatcgctgtatatctcacaaatgcggtgccctgtagcgaacttcttgatgaagagctgtgggaagcggtactgcatatcgaaatatttctgaaagcaactcatccggattctgcactggatatctgggtggaagaaaaaatccgtccggcaatgttatctgcacaagtgctcgatgtactgacagagagcatacagccatcagggtatgactatcagcgggatgatgaaatgtcgctgtggggttcggctgatatgacgtatcggctaatttattctatttaa

SEQ ID NO: 284654 - DNA, 492 bp, Morganella morganii
atgacattaacacaatctccggttaaaggcgcgggcaccacattatggctgcattccggcaatcaggcgcaggcagcaaaacctctggaagatggcggctggacacgccttgcaaaggtaaaagaacttcagccgggagaaatcagcgctgaaagttatgacgatacctatctggatgatgcggatgcagactggaaatcaacggcccagggagaaaaatctgcaggagaggcaaatatcacactggcatggaagccgggtgaacaagggcagcaggatctggttgcctggtttgataccggcgatgtccgctattacaaaattcgctatccgaacggtaccgttgatgtatttaaaggatgggtcagtaatttaggaaaaaccgtaccggcaaaagaagtgatcacccggataattaagatcactaactctggtcgtccggctctggcagagacactgctggccggaattaaatcaagcgatagtgagtaa

SEQ ID NO: 284655 - DNA, 396 bp, Morganella morganii
atgtttttaaagcaaacggagttcagctgcaataacaaatcgatcatgttgagtgagctgacagcattgcagcgggttgaatatttcgatcatcttgtccgtcagactgagctgacggagcaaagtgaagataaggagcaaaatctgaaacgtacagctctttatgtacggatgaatattgagtcgaacgcttttttggtatctcgttctttgctgaatttatcttctgacggaaaaaaagcagaagaattacaggattgcgtattaaatacctggccaccgggaacactggaactggctgcgaaagccgttctggtgctcagtgatatgcagcttcgtactacggatgatgacagtacagagcaacgcaatgcagcggaaccggcagaaaagtaa

SEQ ID NO: 284656 - DNA, 267 bp, Morganella morganii
atgacagcaactgagttgggagactggtatcgctacttcggggcaatgccattttcagctcagttacttgatctggaatttgctgcactcagtcatacagtggtatcgctggtggcagggaaaacggatatttcattgaatgattttagtttattgcaacaagacacagcaggcagtgaaacagatgattcactgcttatgattgcaggggaagggctgagcggagggatacgttatggcgggtcagattgcggacttggtgattaa

SEQ ID NO: 284657 - DNA, 2865 bp, Morganella morganii
atggcgggtcagattgcggacttggtgattaatctgagtgcggacagcaaatcatttacagaacaaatggggcgggttgagcggcaactgctaaaagttgctgctgatgcggttcataccgaagaaagcatcagtaggatggcggaaggccaatcactggccgtccggcaggcggctgacagtactcaggcggtactgaaagcactggatgcatctcagattttcagtgctgaaaattttgtcaggaaatggcgggaagtggcacaggatattgaatcaacacaccaaaaaattaatgacaaaatcagtaataacaggcagcaaattcagagtacaagggctctggagaagcagcaggatgagctgacagcggctttttaccggcagattgatgcggttaaaaaagtcagcgacggaatggaaaagctggcacagattcgtattcggctggatcagtcgagacgttccggagcattatcacaacaaaatcatcaggcattattatctgcaacaagggagcgggtcagcgcattacggcgtgaaactgagggattatctcagcagcggatcaggttcattcagcggctgaaagagcaggttgcggttcagaatttgtcgcagggggcgatgttacgctttcaggccgcccaactggggatccgttcttcagcggaaatctatatccgtcaactgaaagggatgagtacaaaaacagaggaattaaaaaacagcagcggcttccttgctgaaggtatgaaccggctggctggtcattttggtctgagcggaatagtcgcgggtggtgcgtggggagctgcgctcaccgttattaccggaattggcaaagctgcatggcaggctgaacaggaatttacccaatttaataaacagctgatcctgaccggtaattatgccaataaaacagcatctcagcttaatgaaatggcgagaacattatcaggcggaggaataacccaaaatcagatggcggatactattgcaaaagtaaccggcagtggttatttccgtgataatgaactgacccgagtgtcgaaagcagcagcgcagctgaattatatcaccggtcagtctgtcgaaacgacaatcaaccaatttaaacgccttcaggatgagccattacaggtttctcttgaactggaaaaagccaaccatcacctgactgctgtacagcttgagcagatccgtacactggaattacagggggataaaacagctgcagcccggcttgcgattgatgcatacgcacaatctattaatgatggtacaactgagatcagcgataacctcgggcatctggaatcagcctgggtcactctgcgaaatatagcggccagcgcatgggataccatgttgggggaaggaaggacaaaaacttttgatgagcaaatacgtgaaactgagaatagaattaagcagattggtaatgtggcacctgaatacaggatgaagcaactaaatgagaagttggctgaattgaaagaacaaaaatatcaggagtcttacgcgaaagggttaaataactggaataaatcagtagagcagcaggaagttaataaacttagaatccagcaggaatactacgacaaatacgcgacatgggaaactaaaaggaaagctgagttagataaacttgaaaatgacagatatgcactgactctaaagcaatatgaagacgcaaaggcgatgattaattataagcatcgtgaccgaaaaatgccgggcagcggacgcagtaaagcttatcaggtcgacgaaggaatcaaagcggaagaacaagccattaaggaacaggtagctttggagtctaaacttcgtgtattaaaagaacaccagtctgttactgatgtgatcagcgctgaacgcaaaaaattgtgggaaatagaggctcagattgccactatcgaagaagcagtgagtcagcgtcaattaactgaacaggagcaggcgctgctggcaaataaagctgtggtactggttcagcatgaaaaactggctctgcttggtgatgaggttgtagcacaggaacgcctgaataagctccgggatcaggctgataaatacgttaagcagcaaactgaaaagcagaatgcgatccgcgacagtattggtaaatcttcgcgagaggcgcagcaggtacaggagcgatctcaaattttatcgtctcatcaggatagtccccggctgaatgacatgctgacagctcaggctgacacttattccgcagaagaggaaaagcgggcgaactggctagccggggcacaaacagcatggggagattatcgggatgcagcgctggattcaaacgctcaaatcaaaaatgcagcatcacaggctctggaaggtctttcttctgaattaacgtcagttcttacaaccggtaaggcgaatttccgcgaattcaccacgtctgttctgaagatgctgactgacatatttgttaaaaaatcgctggtaatgacgttagaggccaccggattcggcgggttatttccgaatgcgaatggtggcgtatatcactcttcgtctctcagtgcctatagtggccaggtcgttcacacaccgacgatgtttgcttttgcacatggagccggtcttatgggagaggccgggcctgaaggtatttttccgttgcgtcgcggtcttgatggcaagttaggtgtggcagcaacgttgtccggacattccggtaatattatgcaacataataatattacaattaataatgatggtaataacggacagatagggccacaggctacccggcgtttattggagctggttgagcaaaaaactaaacaggtattgataacagagagacgtcccggcgggacattcggagcgtaa

SEQ ID NO: 284658 - DNA, 330 bp, Morganella morganii
atggaaatttttcactggcgtatcagaccgggaatggggatcaccagtaaaccgcgtacccgtattgttcgtttcggggatggttatgagtcccgcagagcagatggattaaatgctgacctgaaaaagtataacgtcatgttatcgttatctaatttggaatcacaaaaagttgatcagtttcttggcaggcatgcgggagttatcacatttttgtggaaacctcctcatggttcgcaacaaatccgtgtattgtgccgggagtggtcaatttcagcaggaaggatgaggtctgaaattacggctgagtttgaacagtctgttatttaa

SEQ ID NO: 284659 - DNA, 393 bp, Morganella morganii
atgaaagaaaaaaacaaattatttgacaatgtcaattatcatgcattactttatccgaaaaatggaacgggtacgtttattttacgatgcaaggataatattacttctgcatttattgcgtttgatgattattatttttcagatgattactcacttgtttatatcaggatggatggaggtaaagcactcccggcggtctgggaaatgggaataaaatacaactctcttttttcttcaaagccaatcaaatttatcaggagtttatctgacaagaaaaaattacttatcggttatacctctaaacatatgacaaaagaagtaacagaatttgatctcgaagggatagataaggtgtctgccgaagtatcacaacattgcaattggaaaatatga

SEQ ID NO: 284660 - DNA, 3504 bp, Morganella morganii
atgggaaaaggtggtggtggacagcgcacaccgtatgaagcgccgaatgacttaagttcacgacagaaaatctcactgattgacctgatcagtgaggggccggtcgaagggccggagaatgtgaataatgagattaatgatttgtcctgtgtgtatctcgatgatacgccggtgatcgataagtccggcaacagtaccgttaacgggatgacgcttcagtggcgggcaggaacgctggagcagcctgctcttggtggttttacagatacggcaagtgaagtatctgtcggaattgaagtgaaatatgagaagccggtgacccggacaattacatcaccctatgtcgatcgcctgcggctgacattcggtacattggcgctggtgaaagtagaggataacggtgacagcctgccgtcatcggtacggctggcagttgatgtgcagcggaacgggacatgggtgacggaaaagcaggttactatcgcagggaaacggagcaattcaccttatctgatggcggtgatcctggataacttaccgaaagcaccgttcagtgtgcggatgcggcgtctgacaccggacagtaccactgacaggctgcgtaataatacggtctggtccggttattcagaactgacggatgtcagccagacataccccggatctgcggttgcgggtctgacatttgaaagtgaacagttcggtaatcgaattccgcggcgtaattatcttatcagagggcggattattcaggtgccgtccaactatgatccggaaacccgtaaatataccggtttgtgggacggtacatttaaaccggcctggacggataacccagcctggattttgtgggatttactgactcatccgcgttacggcatggggcaacggcttaaaattcaggaggtggataagttcgcgctgtatatgattggccgttattgtgatcaaccggtcgatgatggttttggtggccgggagccacgggttcgctgtaatgcctatattacggatgtgcgcaaagcgtacgatgtgatcagtgatttatgtgtttcgatgcggatcatgccggtctggaacgggcagatgatgacgtttgtgcaggataggccgagagatgtggtctggccgtatacgaatgccaatgttgttgatggtgtgtttgattatagtttcagtccggcgaaagcgcgtcacaatgtggttgaagtgcggtttgtcgatccggataacggctggaaaaccagtattgaacaggtgtcggacgatgcggatattgcacttcgcggcagaaatgttttgcgggtggatgcgttcggctgtacagccagaggtcaggcacaccgccacggattgtggctgctgatgactgaaaagctggaaattcagactgttgaatttaaggtcggggtagagggattacggcatacacccggagacattgttgagatttcggataacgactgggcggcagcgcagacaggcggacgtattaaggaagtcgatacagaaaggaaaacactgttgctcgaccgggaaattaccgctccggataaaggtagtgtgatgatcactgttaccggaagcagcgggttaccgcaaccggtgcgggtcaccgggtatcccgcagcggatcgtgtcacgctggaaacactccccgccggggttgcattgcattctgtctggacactgcactcatctgctgaacagcggcgattattccgggcggtatctgttgctgacaatggtgacgggacgtttaatgttctggctgttcagcattcgcctgaaaagcaggatattgtggataagggagctgtgtttgatcccggtatcacagagcgatctgcttaccaccatattccgccggtggagaatctcagtgtggagattttccaggataatgatgctttgcaggcggaagcaacgtggcattctccattttcgcagcggggaattgaatatcacctgaaattgatgaccggtgaccgggtcgccggtacggcggttaccacatcctctttttaccgtttcggcggaatgccggaagggcattattgcctgatagtggtacctcagaatgataaaggccagaagggcgcagccacagaaacggagttttccgttaatgcaccaaacgcaccgtcacatatcacggtggaaccgggatatttcagcctgggcattataccgcgcagtggcggacgaaatagtttacacgtccggtatgaattctggttctctggcgttcagattaaaaatatcggttctgttgaatcatcggcagagtatctgggaaccggatccatgtgggtggtacaggggcgcagactaaaagccggggaacgctactatatctatgtccgcagcattaattatattggtaaatctgaatttattgaatgcagcggtgttccaatcagtaatgcggaaggggttattgaagctgtcagtgaaagtttgtctgaatcgccggtgattcagcagctcagtaaaaacgtgacacagtttgggagttcacttgagcagtttgagtccgatttgtctgaccaaaacgaagaagtagaacgtcaggcccaatctcttcggaatgcccgatatacactgaatgcaaatttccggagtaatgtatccgctattaaacaggcagaacgtgttcaggctgaatctgaacgcgatctgaaaaaaaagattgagcaggttactgtctctgtcggaaatacgcaggcagatatacaaaagcacagtcgcagtattacatctctgagtaattcagttgcagaatctgaaaaacgtattcaggccaaatacaatggccatgaatctgctatcaatcggattgaacgtagccgtgcagaatctgagcgcagtacagcggaaaaacttgaacaaatagcgacgtcagtcggtaaagtacagtcggatatacgtgaatacaagcatagccagagcacacttaacacatcactcgccgagtcctggaagctgaccagcgctaagttagaggagcaggaagctacgattcagactaaagcaacggcaatgttcaaacaaggccatggctatgccatgcactcagttaatgttggtgtgaaagtgaatggcgttgagcataacgccggaatggtaatcggtgctgatgttaagtggcgaaaagtaaaaacaaccattggttttaatgctgataattttgctttttataatccggcaacaggtggtatggatttattcatgtacatcaaaaatggccaggtgtttatgcgggagtcattcattaataaagcctggctgaatagtgtggtcgtcagcaacaaaatggaatccgacaattatgttgccggagaaaaaggatttttgctggatgcgaaaaagaatgtatttgagatgaattcaaatgaaggcggaagcagcttaagttttgatggtacaggtctgcgcctgcgtgatgaaaatggcaatattcgtatcgaaataggtctcagggatgaagaggatgacgaatga

SEQ ID NO: 284661 - DNA, 1326 bp, Morganella morganii
atggggagtgagtataaagagtgcaagcttggagatattgccaattttacatatggaaaaatgccgaaaaaacacctattaggttctggtgattatataacatattcaggttatagatacctggaagcatatcctgaaatgaatgcatcttcaggagacctgatagttgtagcccgtggtgttggcggaacaggtgacgttaaattggtagttcgtgattgttatctaactaatttatcgataaaaatatccttaaataataatttcttgatgaatgagtatttttactacatatttaagggggataatttaaaatatcttgatagtggttcagcccagagccaaattacaatatctgacttgtcgaatgttaatttaaagattcctagtataggttatcaaaaacttgtagttacccatctaaaacgactagatgaaaaaatagtcatcaacaatcaaatcaaccaaaccctggaacaaatggcgcaaacgttgtttaaatcatggtttgtggattttgatccggtcattgataacgcactggatgcgggcttttttgagcaggacttagcgtttcctgaagagttattacgccgggttgaagtgcgtaaagtggcgcgtgaaggttgtggttttaagtcactaccggaggatattcgtaaactatttcctgctgcttttgaagagtgttctgaaccttcacttggtcttggtggatgggtaccggaagggtggaatatcgggtgtatttctgatgtggctcattatagatcaaagcgtattgagacatcagaattaacgctgaccaattatatttcgacggaaaatatgctttctgataaaaaaggtattcagcaggcagcctcacttccaactgtaaatagtgttcctgcatatacatcgggtactgtactgatttcaaatatccgcccttattttaaaaaaatatggttggcaaaaggagatggtggttattctaatgatgttctgggattcgaggctaatgatccgaaaactgaaggttatttgtttaatttaatgtatcaggacacattttttgattttatgatggcaacttcgaaggggtctaagatgcccagaggtgataaaaaagcaattctgggatggaatattgtggtaccaccattaatcctaagaatatttttttctgaaaaggtgagtgatttttatactgcgggtcacttgcgggatcatgaaaatactattttgactaatctccgcgacaccttacttcccaaactgatatccggtgaactgtccctgagcgatataaaaatcgattctgtgggcgatgcgctggcataa

SEQ ID NO: 284662 - DNA, 609 bp, Morganella morganii
atgctctatattgatgacatcggaatagttaaatcaaaccgtattaaggttaaaatatttagtaaaatagaacatgaccggatggataaagtcaacggaattgttgtacatcaaacgaatacaccatctgcaagtcatacatttaacagttacacccatcccaaatctaatggtgctcattttctgattgaccgggatgggaccatttatcaaacagcatcattatttaaaacgacctggcatgtcggattgatgcaatcacgttgtgttgtgacgaaaaaatgcgaacccgctgaattaaaaaaaatggcagggttagaaaatgcctggaaaccatatgaactgcatgacattgaaaaagccaaatcttttccggacagatttcccggcaatgcagatagtatcggtattgagattgtaggagactctgcggacgtcactacagagaaaaaccccgtatatgaaacagttaacagcaaacaaaatgcatcattaaaatggctgatatccgaacttctggataccctgaatatttcaccctctgagatatatcgacatcctgacatcggaaggaaaaatctgaccgaagcgagtacagcatcatggtaa

SEQ ID NO: 284663 - DNA, 300 bp, Morganella morganii
atgcagatccggatacaaaaccagcaactgcggggattgcttcagctggctcaggagaaggagcgcagactggaagcgatgatgacacagaccatggtgacaccggcaccggtgcagtcatacgacccggacctgtcggggatccgggatctgactgccgccctcgaccgctatgaatctgacattctgaactaccggatacaggcggataaccacgacctgaatgaaatcgccgtgaacctgaatatgtccaaacgtgcactggtgtataaattaaaaaaatacggatacatatcatga

SEQ ID NO: 284664 - DNA, 432 bp, Morganella morganii
atgacaacagatgaagcattacaattcctgtctaatcatcagcctatgccatcagataaggatttgacggaagagttgataaatcaatatgattcagtcaggtgctattttattagtcatccggatgaccgagcgattaatttatttctaagatcgtatggagatggtgatggatggggggtatatcaattagttgaggattttttttataaatgtcaacttgaaaaagtaaagcaggaaataaaaaatgttcttgaagacatcacaataccaaaaagcatccggtattgggtaactcaagtctctgctgctttttgtgataatagtatgatcaacggtttaaaaatatcattgaattctgatgatgttgacattagagatgcagcggaatcagcattagatatattaggttatgatacgacaaataaatag

SEQ ID NO: 284665 - DNA, 309 bp, Morganella morganii
atggctgaggtacattctaagtcaggcggcacggtaaataaggccctgaaaacagaacgattttacacggtcagctacgcccctaagggcaaaaacagcagcctgccgcccgccataaccttaaaaggacactggctgaaagcggcaggatttgagaccggtttcacatttaccgtgaagattttaaacggctgtttggtattaataccggacagcgaagatatccggacaattaagcagcaaaatcagcagcagcaagcccagatcaccgcatttaagcttaaagttaaggcgctgatcggggagtga

SEQ ID NO: 284666 - DNA, 654 bp, Morganella morganii
atgacagcacgccgcagcgcaaacttattattggttgatgatgatccgggattactgaaactgctgggtatgcgcctgagcagtgaaggtttccgggtatcaacggcagaaagcggccctgaagcgctgaaggtactcaataaagaaaaaatcgatctggtcatcagcgatttgcggatggatgaaatggatggtatggcactgtttgccgagatccagaaaacccattccggtatgccggtgattatcctgacggctcacggctctattccggatgctgtggccgccacccgtgagggcgtgttcagcttcctgaccaaaccggtggatcgtgatgcattatataaagcgattgacgatgcgctggcgctttccaccaccacggtcagtgatgaatcctggtgtgagagtattgttacccgcagcccgctgatgctgcgtctgctggaacaggcacgcatggtggcgcagtccgatgtcagtgtcctgatcaacggccagagaccgggaaagaggtactggcgcaggccattcacaaagccagcccgagagcgaaaaaaccgtttattgccattaactgcggcgcgctgccggagcagttactggaatccgagctgttcggtcatgccaaaggggcttttaccggcgcggtaa

SEQ ID NO: 284667 - DNA, 363 bp, Morganella morganii
atgtcagggttgagccaatcaaagttaataagtcggttgcttcagtggatcagcagtgcggcactgttacttttggcaattatattgattgtttttttgataaaagaaacaattatccttgctgctttgttatttaaaaaaaatgacccggtgtcgctgtattcattagttgatgggataattatatattttttatattttgaatttattgcattaataaggctggtagtagtcgaacataaacaaccatcattattaatcgtgtattcaattacaattctgatattagtatttgctctttatgtagctaatacagaaaaaccaattcttaaaagaaaaaaggtaaactgcgaagctgagtaa

SEQ ID NO: 284668 - DNA, 297 bp, Morganella morganii
atgtcaaagttaagacagttatcaaaacagtatttaagggcagtgaatgcgctgttactcctgttcccgctgatgctgtcagtgagttgcgtagatacgcgaccggaattaatacccgcaccggtgataccgattccgccacaactgaccgctgattgtgagcaggtagatataccggatgatctgacgttcggtggtgcagttgagctgctggctgatgccatgaaatatattgctaactgtaatcacgataagagggcaatacgggagattgaagcggggaggataaaaaaatag

SEQ ID NO: 284669 - DNA, 258 bp, Morganella morganii
atgaaccagcaggcacaggatttcgaggtcagtgtgtacgaccatccgatgattaaggcgatccaccatgtggatgacggccgggattacagtcagcagcttatttacgatatgcgccagcggtattacatcagggcgggaatataccttccccgtccaccagcaccacaggtcgttgcgccgaagttaaccccgacaatgacgggtaaaaaacggaataagaaggtcaggaaggtgagccatgaacaaacaatttga

SEQ ID NO: 284670 - DNA, 372 bp, Morganella morganii
atgcgggaaaaaacattatatattcttgccgaagatttataccgtatgggcaacagtagttcgtcccggctggcgaatgtcagaaggagcgatattaataccagagagattggtgaaactgattttattgttgctgataacaacggtgtgagcgtgtttaccaaagagggtctggatgagtgtccgctgacgggctgggtatgggaattaaaagcaggtactatcctgcctgctggcctgactattgttaagcggggttcaaagggccatcatatgattgtgccggcggaaaatatgccactggcaaaatatatcagtctgctggaaagtgtggccatgttctgtgaaaaacaatatatgaagagagcataa

SEQ ID NO: 284671 - DNA, 228 bp, Morganella morganii
atgcgggtactcgaacttaaaatcgacagaagcacatttaacctactgtggaaatcacttcatgccagggaagaggctctccttcgcagagttgaggaatacggggaagattcagatgaaggcgctgatgccctgaatgacatcatggcactccgcctttaccggaaagaactccgggaagatgccgaaccggtttttgatgcgaatgcctttctcactgacgattaa

SEQ ID NO: 284672 - DNA, 795 bp, Morganella morganii
atgattgaaataccgcaaacaccgctagctcaagcagcatcaacgtacttggctaacaagcaagctgaaatcgatgctttgcaagattatgcgcaacaagttgataaaggtaaagctctatggtctagtaaaagtggaaccaattttgaaacggtaaaatctacactgacctcaatgtgtgtaggcagtaagagatgtaattattgtgaagactctgctgcggatgaagtcgagcatgtgaaaccgaaagacctttacccagaaaacacgtttagttgggaaaattatttatacgcatgcgggccatgcaatggacctaaaaacaatttttttgctgttattgaccaaaacaaccaagtggtggaattagctaggaagaaaaatacccctgtgatacgtccacaaacaggaacagatgcttttattaatccgaggaatgagaacccacttttatttatggttctcgacctaaacacaatgtattttgtaccctatccagggattggcgttgtcgaacagagaaaagctgaatatacgattgataagctgagattaaacaccagagattacttggtagaagcaagagcagaagcgtacgaggcttatctcaatgctatgaaagcatttgttctagataaagttttgaataaaacacaagcagagcttcaaaatagtttaagcaagtttaaaactaagcaacatccaaccgtatgggcagaaatgaaaaggcagtaccaatctatacctgagttagtaaatttaataacccaagctccggagctattaaatgtctaa

SEQ ID NO: 284673 - DNA, 1266 bp, Morganella morganii
atgtatgtaaaaaagatagagttagaaaatattaaaacttttaaacgttttgccttcgaacttgatcaggatgaagatcctgcaggctggcatgtcattttaggaaataatggtgccggaaaatcaacattcattagagctgcagcagttggtttaatggggcctcaagaagctattaaatctcgacatacattttctgagtgggttaataagggagccgaaagcgccttaatccgcatggagctaatccaagatagggttctagatagttgggcgcagaagggaaagcaacaggttgataacttatcttatacgctcaaaatcactaaggatggtagttttactacacactctagaaattctccaaacaggcatgtatggagtggtaagaaggggtggttttcagtttcatatggaccatttaggcgattttctggagggaatagtgagtatcagaaactattctattcatccccattattagccagacatttatctgtatttggtgaagatgtcgcactcacggaaacattagaatggttaaaagaattgcgttttaaggagttggagaaacctaattcaatcgaagctaatttacttaaaaaaatcaaagactttgttaaccaagatgatttccttcctaatggagttaaattcaagggggtttcttccggtgggattgaatttgtcgatagcaatcaaacacaagtaaacatcgaatcattaagtgatggttatcgctcagtgctaagtatgactctggagttgattcgtcaaatggtagattgctacgaaacggaaaaggttttttgctcggaagggatctctatcgcataccctggtgtagtttttattgatgaagttgatgttcatttacatccaatatggcagcgaaaaattggtaagtggtttactgagcattttcctagaattcagttcatcgtttcgacacatagtcctttagtatgtcagagtgctgttactggttcgatatggaaattgcctaacttcattgagaatcaaaaaggctatcgtgtgaggggtattgaacttgaccgccttttatacgggaatatattggaagccttgagctctgatgtatttggcgttggtattgaacgttcggatgaagcgcaggaactactaaagcaattagctgagctcaatataaaatctcagtttggtggaaatttaactgaggaagaggttgcgaaaaagcaacgcattcaacgtatatttggaactagtgtggaggcgaaaaaatga

SEQ ID NO: 284674 - DNA, 759 bp, Morganella morganii
atgaaggatcctttagtaagcataataatgccaagctataactcaagtgctacaattgaggaatctatccagtccgttctgaaacagacttataaaaattatgaactaataatatgtgatgataattctgtcgacaacactatagatgtaatagaaaaatataatttaccaaatataactattataaaaaataggtatccaaaaggtgccgcaggagcaagaaactttgccatccagaattcttccggagaatatattgcttttttagatagtgacgacctatgggaagaaactaaattagaaaaacaaattaatttcatgaattcaaataatattaaattttgctatggaaattattttatttttgaaaaagaaaaaatcaaagggaaattcattgctcctcaaaagttgacttaccatgatttattgaaaacatgccatattggatgcttaacagttattctgcatagaaccctcttacagccagaaccatttccatactcagagaaagaagactatcaattgtggcttaaccttcttaaaaaagaagaagtagcctttaattacaatggctgcaactcattttacagaaaaagtagttcttctctatcatcaaataaattccgtgaaatcctacgtcaatggcgggtcattaggaatcaaaaaataaaaatactaaggtctatttactatatcttaacgtatatttttcacgggctcataaagcacacaataaaatataaaagacgagatttttag

SEQ ID NO: 284675 - DNA, 699 bp, Morganella morganii
atgagtgggaatttaatcatttcctttttattatctataaaatacatctcaaaattaattataataagaaaaataacactttcgttgataaaagaatcaattcatgatctcaaagttgcatctaatgtgtttataagtgttcttggtagcattggatacaatggattaattcctattatattaggtaagtacttaggttcatcatcccttgctatatattcaatcttacagaaaatgacaatagcttgccaaagtatgatattacctgtatcacaatttatgctcactaacatatccttagatattaattctcaatggggatttaagaaaaaaatatcacaaagcattaaattacatttggttctgagcataacaggagcaatatgttatatattactcggccaatttgtatcaaatatgttaggtcataaagttgaattaaatttaattatactatcatctataattcctatattttcttcagtaaataatgtgcttggaatacagacaatgattccgcttaaaaagacaagtatattaagagttattaatctatctagcggggtaattatagcgttaatttcagtgtatatcattaaagaaatgggtatacctggtggcgtacttttaaacttacttggtgaagtgcttgttttctttctactagtatattggcatgcaagaaactcatatgactaa

SEQ ID NO: 284676 - DNA, 492 bp, Morganella morganii
atgcttgctgctatcatatcaccacctcattatccccctcaaaaaacacgcatttcaagccagtcaaaaaatacaataaaatccgcatttaattgttatttatctgccggtgaaaacaaaattcccccggggaataaatacagcatcaaatgcagatttcaggccctgaaaagcataagaaaccggattccgccccgtcatagtgaagaatgtcgctggtctctatataaaaagccaataacgccagaaaaaacacgtcacacggtaaacatcagacaaatgatctgcctaatccggaaagaaaagtgtaagtatttgtgtgaaaagtatcacatttttacgagcgcgatccggaaaacccgaaccatgattttcccttctttttatttcagccaaaatattaattatcaacataactcattaaataaaatacaaaaaacagaaaataacaaatgcaacacagggatatttacttactcagtcagcatgtaa

SEQ ID NO: 284677 - DNA, 360 bp, Morganella morganii
atgccgaaaccaatcacattacgcgaatatactttcaaaacactcaccgccgcaaaagactatttccgagacgaaaaattatccctcgcataccgtacccctattacgcaaggtgtactttttgagcgtttgaaggagctctttttgttttacagcaataatagcgatattatctggcactgtactgagagtgaagtggaatacttttatatcgccaatactgttgttcctgatcacgctaaaaagacaatagaggcaagtaccaaagcgtactgggttcattttaatagcgatagacctgacagagatttttcagtagataaggctctggtttttctggctaactacggcagagtttga

SEQ ID NO: 284678 - DNA, 456 bp, Morganella morganii
atgaccaccttcagggttcagatgaaagaacgacattgctcacattgcttccagtgtttatttagccagcccagtgctggctttttttttcccttttttccccttatccattcgcgttgcagatgcgttggccttcctcgttcaccccggtcacatactgatgtatgctcccggggattcactgcgtcgccgccttcctgcaacacgaatggcgtcggggaaatgctgccctgccacaaaccggatggtttaacagatgaattgtttggttttgataatgcaaaagttcattcgggaataaccggcagaaaaaaggaaagcgtaaagcgccatggatggcgcgatccgagcggacagggatgtgtttacagcggctttccgctttgccggttatcccgccgcccgggtctgagagaagatggttttattttttccaccttaccagtcattccctga

SEQ ID NO: 284679 - DNA, 585 bp, Morganella morganii
atgaaaatcaccggtcaggcagtatctgttacagaactcattaaggatacgtcagagcgattcggaaacggcggactcagtcgttttatctcagggatacaaaatgtgtcagagccacagttttgctgcacaaaagagcaggctgaattgctgggaaccagaaactttacggctttgaagaatgcgttcggacatcttgttgcgggattggatatgactccgtttaaaaatatcgcagatgaaatcaagggataccgggagaaccagccaattctctcacgtttctgcaaaggccgtgttctggatgaaattcagaaacaatgtactaaaattattgaaatcaataaggattgcagccgttctcctgtctcgctccatgacacaacactgccggattccgcggtttatacgaccaaagagattatggggaaacatcaggatttaggactttttgtgctggagaaaagcctgcgcgccgtaaagtatggtgctccggtaaatattgccgacccgaaactatcaataccggtgaacattcagaccggcggcccggttgagctgccggcaactgaggcggttgtataa

SEQ ID NO: 284680 - DNA, 1176 bp, Morganella morganii
atgaaaaaaagtatattagctttaattatctcacctttatttattcatgcggcgaatgcaaatatgaagccatttactgaggttacacctcatggtttgggttccggtactttatttgagttcgccgaagaaaaaacagaaggtgaccgtgcggtcggtgtttctgaaatagagcaggttacaagaggcctgggacaatttattttagagaactatgagtatgtagatgatgtccggaaagaggtctcaaagaacgcaaaagagcaggataaatgggtaggaaacctcaatcggagagtgggggatatcaatcatgaagttcttacatttaaagcacgggcagatttgttagaaactaaaacacaggaagttgagagagaaaacaaggcgtataccgataaaaaaatgagcgatattgaacgaacggtcagtttgaataagcacatattgtttgaagatcggtataaagcagaatctgccaaagtcgtcactcaggcactactgggtgcaacagaagacctggaaactgacgttgataagctgaaaaataaagtccttgcagtggaactgcaggcgggctttgcaaaacagtcagcgtataccagtgagaaggatatccgcgaacacaagaatcaacttagcgcacagtcccgggatattgcacaaaacaaaaaattgcttgaatccgctaaactggtaacctccgctatcactgacgctacgttagcgctggaagcggatgtggcgaagatggatacccgtatcagtaacgcatcgaaaaaagccggtacggccttaaatgtggctaatcaaaacacaaagagtattgatgggcaaaaagtaaaagttgagaaaaacacgctggatatcctgaaaaaccgccaggatctgcgttccctggaaaaggatctgcgttccctggaaaaggatttgcgtgaaaccaatgagcgtcttgataatggcctggcggccagcgcggcactgaatggtttattccagccgtacggtgtcggcaaactgaatatcactgcagctgtgggcggatatcaatccactcaggcagtcgcagtgggaaccggttaccggttcaacgagaacatcgccgtgaagaccggtatggcatacaccggttcgaacgatgtgatgtacaacatggcttttaaccttgaatggtaa

SEQ ID NO: 284681 - DNA, 216 bp, Morganella morganii
atgacacttcccgttttcaggccattaatgatatctgccacttttgtcttatgcagtgtatttgccggtaactgccgggctgagattgatttaccctgcgcgatgagccacaagatcaaagttgaggaaatagatgatcgtatttgtttcagcagacggccgttacctgactgccctgcattgtgtcatccgtcaaaaagtgtggaaaaaagatag

SEQ ID NO: 284682 - DNA, 576 bp, Morganella morganii
atgaacatatacgttattacagctgcaactgtattgttatcattcagtgcggtttcctctccggtacttaatgaaaaaacgaaaggtgatttaaaaatacatgatttaggcacattccatcctgagaatgaaggcacttcatatataaccggtatgtcttctgacgggcgttttatcacaggtaatacatcctctgaaatcgattatgattcacctcatggtttttattacgatactgacacctcaaaaaagataagtatcgattctttccgcagtgataaaagcggcatgacgataacatccggaatatctgccgatggcagtgtcatcaccggctcagctgaaaccgatgacggcgggatgcaggcattccatttccgccatgccggcggaaaaatgacccggctcggtacattacgcaccggtaataccggtaattcttatgtcagagctgccagcgctgacggacgggttatcgccggtatttctcagacggatacgtccgcgacagggcaggcattccgctatgaaagaaggggataccggaattaccgggctcggcacgctgcgcagtga

SEQ ID NO: 284683 - DNA, 441 bp, Morganella morganii
atgagtgataacgacgacatcctgaattcaattagaagctcatttcagagtgcattagatattgtagaaataaaaaaagacattgagtccgaaatattcaatttacttgatttagttaaagagtcaacaagcagtatcgtgtatccggaaattaaaaatagtgataaaggcgatacactattaagcatgctttcggcacaaaaaatatatgacaaagccatttatctgaaaagtgaagctaattcagaggtcaaatatcttttatgtgaatattcattaaataagtcaaccggatttccggtaacagtacgatataaaaatgaagaattttcttgcaagactatagatattttaaaattaacattaaaaaacattttgatttcacctgtaacagcaatggcaatggctaacttatttaatggtaaaaatgctgattattaa

SEQ ID NO: 284684 - DNA, 225 bp, Morganella morganii
atgacccttgaagagattgacgacatgatccggcagtacacggaggcagaacgcgctgtattacagggcagaagcatcacgatgaacggccagagcatgtcgatggaaagcctgagcgagatccgcaaagggcgtgaatactgggaagggcggcgtctggccctggtatcagcccgcaaaggcaggactgtcccccgctttaaactggtgaggtttccgcgatga

SEQ ID NO: 284685 - DNA, 456 bp, Morganella morganii
atgtcaggaacaactatccaacttaattttgacggttactggagagatgattcaatctcagacacaccaaactcttcaggtatttattgcgtctaccgaggtacgagaaacacctcggtaaaacctattaccgttaatttaattgaacttatttacattggtgaatcgggtgatgtcagaaagcgattagcaaatcacgataaatatgattcgtggaaacgaaaacttaaaaaaggagaaattttactctattctgtcgctaaagtaacaacaggcaaagatgacagattaagggctgaagcaaccttgattaacagctgtgacccagtgataaacaaagaatatacacaagagtattcagcagtaaaatcatttccatttaacaaaactactgtaaaaactacaggtgcaaacagctttcttccatcaaccaccactgcgggtgatgatgattaa

SEQ ID NO: 284686 - DNA, 192 bp, Morganella morganii
atgcatgaaaaatactccagctctacagcctatatatggggtttaattacctctgtacttggtgtgttatcgcttgaccagtgggctatgctcattgggatcatctgtactgtcggaacttttttggtgaactggtattacaagcgtaaagattatttactcagaataaaaggaaggcatcataaaaagtga

SEQ ID NO: 284687 - DNA, 945 bp, Morganella morganii
atgtcacttctattcgagaaagtaacaaattatctatctgagttggataaaaaagataatgaaatcaatgaagagaaaaagtcaataaaaaaacaaaaagaatacactgatgaacaattaagtgccttgttgcatcataactatgtgttacttggacacgttaaggaattggcgtcaaaagatcccaatatgttagatcttctttattctttcactatgaatacttctcacataaaaaaagacttttatgtaaatagttggaaagaaatgatagagagccccaataacagactaataacattaaagaataatctgatcgtattattaacagcagcatcatctattgcatcagaattaaataatgacattacccaattaaaagaaagcaatgatgaaaatgacacttccactattaatgctgcaaaatttgctgccgatgtatctaaagaagttgcaaatttatatggtaagcaggcagaagaactagctaaagagatcgctctcaaagcaaaaggaaaaaaaataagaaatattaatgatgctgcaattgaatacgaaaagcatcgtaataatattgataaaaaaatcaatgcaaaagacagaatagcaattgctcactatctggactatcttgatgttcgtcaggcatctgtaacatttaataaactaggacgtagtatgggctacgctggttacgcagtctatgttcatcaattatacagtgaaatgaaggaggctatcagaactaacaactggcgcccattttatgtcaaagccgaaactatattagtcggaatgggagctggtgcagtctgtggacttgcattaagctttctcataggtggacctttaggtattgccgcttttggttttatcatggccggcatcagtgtattaattgatgaccaattaattgaaaaagtaaataaatttattggtatttaa

SEQ ID NO: 284688 - DNA, 348 bp, Morganella morganii
atggatagggagtattattttaaaaacttattgttttcacttttaatattgttgattcatttgatttatgcatggatggaatcagatttgttatctttactgacggtgttttttgttataaattctgtggtgtttccatttgcaaagtttataattgaatctgcggtgttgagcttttttagaaagaacgattggagcagaaatatatacacgggaacgatggagggtaaggctttctatcatttcatgtgttttattttttcaattccgctatgttttatttatatttcgttatttatatttaaattgatgttaagccctcgcaaaaaaaataagcgagggccgtag

SEQ ID NO: 284689 - DNA, 201 bp, Morganella morganii
atggatgaattactgattaaaaccaggcaattaaactcattagctcttgcttcttatgaattatcctgtacacatttctctgctaatgatcttaaggaattgaccgggttaatacttaatctggggactgatttacaacttactatagagtccctgatacagacaccaaatcatgacagtataaataaaatagtacgctaa

SEQ ID NO: 284690 - DNA, 1671 bp, Morganella morganii
atgatggaaaaagagcaacccagctatcagttagttttgaataatttgatacgcggctgtaatattctgcgtaactatatggtcgtttcttcgttgggtttggggcaatttatggggttctttggtgctgcgcgtatgggggtacaacgcgagaaaaaattcaacgacacgattaattttgataacaaaccgtctatttatcgagagtatcgtgttggccctgattttttagttggtagaaggaaaattccgaatatttatcaccatcagctaacagattttttcactcagcatgatgcaattaacaaaaccgagcatgcgcacattgtggtgcattttagcagaggtctggctggagcaaaacgtaccgataaacgcgttgaagccatacgcgggaaattgttcaggttggttagggagtttgaaacattctctacttcgctaagtatgcaacagacggtttatcaacctgatataaccgcaccgagcactaatatagacgtgcgtaagttggtgcgcggttatgatgttgcaggtaatgaaaacgacttgcctattgaagtgttcgcgcctgcgctcagggttttgcgtgcggcgaaatattcagctggtgagcattggtcgaccagactgccaaggccgtttattaccgttcatgcaggagaggattatagtcatttactgagcggtttgagggcaatagatgaggcggtagaattttgccaactaggagaaggtgatcgcatcggtcacggtttagccttaggtgttgatgccataaaatgggcgtgtgaacaaaaacgcgcctatatcactgctggacagcatatcgataatcttgtctgggcctatcatcaggcagttaagttgtcacaacatacggtcgcacatattcctgtcatgcatgaactgcgcgataaaattcatcactggtcacagcgaatatttaaggacatctatactccggatttactttatcaggcgtggctactgcgacgtaattggcctgattatgctaacttggagtctgtcagtgcgaataagctggaatggacaccagactgggatgtgttgcagaaagataatgtattatcggcgaaaaatctcaccgcttatcggttatggcaacgttatctcaacagcggtttgaataaaaaggatcccgtcaatcagattatttctattaattgtcgtcctaatgacactgaaagttatttatccactctctctgaggatgaggattggatttctcaaggggaacttgaactatatgaagcaattcaagactacttgactgaaaaatacagtcgtcgaggcttagtgtttgaggcctgtccaacgtcaaatatttatattggccggtttgagaaatatcacgaacatccacttttccgctggaatccaccgaatccagaatggctgatggctggcagtaaatttaacaaatatggcttacgtagtgggccattggctgtatgcataaatacggatgatggagccttgatgcctactacaattgctaacgaacatcgtctgatgcgtgagtgttgtattcagcattatggtatcggttcgtggatggcggacttgtggatcgattctattcgacaaaagggggtgatgctctttcgggctaaccatctcatccaggatggtggtgtagtggtttaa

SEQ ID NO: 284691 - DNA, 678 bp, Morganella morganii
atgtacaatcaggatccacattggttaatacccacagtctatatggcatctgacagattgtttcatcatcatattacacatcatattgatatgggaaagcgagatgttgatatatcactggttgaagaagagattgttattcaggcagcattagactatcaattttattttggcgggcgtttgcgcaaagaagatattgcgaacagcctgcaatgctggagctctggttcccgcgaggaaactcatggttttattatcaggaaattagtccagcgttttttggtttggcggggtaatggatttgaggtgaaacgtgagcagttagagtcttggctgatgctctgttcagtattcgatccagcctgggtcatcgcagcaggctacgcggagttatatcacagtaacgtgctgtctgaacgcgacgtgacggtcttgctaactggcaatcaatgtccgtttgcgtttccggttgataacaaccatatccattatgctgataaccacgtgcactttaatgggcatgggtatacttcattatctatgttgagctttattgcccgtactcatgacatgcgacctggctttaaatggccttatcgtcaggaatatgcccatttcgaaagccagcgcctgcagaaaaaatatcttccgcactggctctgcgcttatacctcatag

SEQ ID NO: 284692 - DNA, 2511 bp, Morganella morganii
atgactgaaaaaattattcttaatcttgatgcacctgaatatcacgacgcttttaatccaggtgcaacaaaaggtaatgaacatgagctatggcaagttcaagcgaataataaattgattgaaaatttggttagaatgggatgcgactcaagaaaatacaaagagcaccttaaacaaaataattatgctagcctgactagttaccatcatgccatttttatcagtggcgcacgcggtgcaggaaaaacagtttttttgcgtaacgcccaggcagtatggaatgactatcagaaaaatttcgctggcagtccaaaattacatttcattgatgtaattgacccaacactattaaatatcgatgatcgcttttctgaagtcattattgcttcagtctatgctgcggttgaatataatctaaaacaccccgatgttaggcaagttgtaaaagacgatttttttcagtctctgaaaacattgtctggtgcactaggtaaatcgcatgaaattgatgaactacgtgggatcgatcgtattcaaaagtaccgttctgggattcatctggaacggtattttcatctatttttagttgcgagtgttaacctgctagattgcgatgccctagtcttaccaattgacgacgttgatatgaaaatagacaatgcctttgcggtactggatgatattcgctgtttattatcttgcccactgatcctacctcttgttagcggggatgaagccctctatcaccatgtcactacggaggctttttctcaaggttatggcggaggctacggtgctggtgatacttcgacacagttatcaaaatcgtatttaacaaaaatatttcctaggcattcccgtttgccactacagccgattaatgaactactgactaaattggtgattcgttatcaggatgtaaataatcatgagattagacaggaaaaaaatatctcgttttctcagtatgaaatgcaattaaaagaaaaattctatgctctgtgcaacggtcaggaacgcagtacacaatggcctctgcctatcagtgcacgtgaggcaactcagcttattcgcactcttccacctaaattattctcagaagagacatctaatgagattgatgtctggcgaacatatttaagttgggcagaagagcataaagatggtgtgtctgtcaccaacatcgaaagctatctaaaaattcagggcttccagttagccacacaattcgattttacaaagctaattgcattcaatcctaagctgcaatttgaccgttatagttgggcagaaaaagacctcaatcagcaattcgacatgatctttaaaatgaaagctcacgataccaataatgatattcttaattcattcatccatggcccaatattacgcagtatgccgccacttgaatttattatggagccgatgtatatccgtacgtcggaggtaaacgattctgatgacaatgcgatactcttagccctatacactcatcatgactactacagccgacagctgaacagacgctatcacgttttttttagccgagcgtttgaatttttatcctggtcattattggccgttaccagaaaccttccagagatattttacgaaaaagaaaaattcaaagacctcttcagaaatttattcttccgagcacctttctattctattttttcaataaaccatactaaagaaatcaatgaagaagagagtgatgttcactatcaggataagccggttgattacacggggcagattgatgcgttaatcgataaaacctacgagtggatgaagaataaccaagaaatggagatgaaaggtaaaaatttcattcctctgcttagtgtagtcttcaataaggttttttcacagttgtccgttttacgtatcaatttaactgataggaaaatggctagagatgaatttttatccgatttgtcccggcgctttgaatatattttcatcaatgcccttctcacgtttactaaagatggattggtggtgaataccaacgttgcgacgggtgcgcgtgcatctatagttcgcagctttagcatattttctaaatatgatcggacgttgtcacgtaatcttgccggcattgtaaacgttgaaatggatgatgatgagcttattataaccaggtcagtcaataattcatttgcaaaattgatagaaggcatgtggtgccatcccatctttaatatcaaagcaacgaaagcgtatcctattggagatgcgtccagtaatttacctgccagcgatagtacttttcttaatatggactttgaggaaatgaaagatttctattatagacactccggtaatagcacgataaaaattgccgaggtacgggagtggggcaatgcaaatcggcaactggccacagccatgcggaatcaaatggttaccaatcctactatctaccctttgattgagggttcatcacaaatttcttggatgtatcgtggactggaacaagtcaccaagcagcaggcggataactaa

SEQ ID NO: 284693 - DNA, 1149 bp, Morganella morganii
atgacaagcgtactggtctcaactttgcatactgaacgccgtattaacccgcttcgcctcactgaggcaagagaggctaaggggttgactatggctgagttggctcgtgttctggatatttcaagacaggcgatttcttcgtttgagaaaggcttaaaaaatccatcaccggaaactctgtccttaattagtaaggttttaggatttcctgagcgtttcttcctcagtaatgaaggttcaccagaaattgaaggagctgtacatttcagaagtagatcgacagctacgaaaaaagagagaattaaaggtagaacaaaaggtcggtgggtttctttaatcattagagaatgcatgaagtatgttcagttacctgaagttgatctgccggtcattgatatacctgattttgaaactttagaagaatctgatattgaggaaatagctacccatgtaagacgtttctggaatatgggtgatgggcctatttcaaacttaactcgattattggaaaataaaggtataattattgctaatctgcatgctgcagagaaagttgatgcattttctttctgggatcaggaacggccgataattatcactgatactacaagaacggcagttagaaccagatttagtattgcacatgaattagggcatctgatcctacatcggacagttgaagatgattaccttgatgacaaatacttgtttgagaaggtagaaggacaggcaaactatttcgcaagttgctttctgttgccagcaaaaacatttggccgtgagtattactcaccaagcttgtctgcgcttgaaaaattaaaaagtcgctggattacttcattagcatgtatgactcaccgagcaagcagtttagggttaatgagtgataaccaaaagagctatgtttataggcaattggcaccttatagaaaaaaagaaccattagatgatgtgattcctcgtgaagagcctgtgtttattaacaaattaattaatttacttcactcgcactcgatccttttaaagagtgatttattggatttatttccgctaccggtacaggatttaatttgtataacaaagcttaaagaagatgaattaataaaagatgataaaatattgccatttgtattgaaaaagaaaatgtaa

SEQ ID NO: 284694 - DNA, 612 bp, Morganella morganii
atgaaaaatttatcagaacaattaattgctgcttttgatgcagattgtcgtaaagagctatcaagatcgctgtcaaaagcatacttactgtcgtttgtgggagctaaagaatttggttctttttggcgacaggctcaatcatatcttaagtggttgtattcggatatgttgattgaaaagtctgcaaaaaatttaaaaattcagtgtgatgtatcacttaatgccgcaaaaaactccaggcatcctacgttgcactctaataactgggccttaacggttcatagtattgatagtaaaggtggcttaccaagagaagcgaaatacaggtctatctattcatctctgaacagggatttatttgaagatatagatgataatgtagagcagattaacaaaaccggtggtcacgtatatttactacacagcggtaaaaatcaggctgtatcaactctcagtctcacggtccccactccaggtggctcagggattatttatgccgaatctgttgccatttatgcgccaagtgaagttgagattgaaaaagttgacgacgaattggatgataagtttaaattattgacagaaactcttcttaagcagaatgaaaaatga

SEQ ID NO: 284695 - DNA, 201 bp, Morganella morganii
atgacagagaaaacacagaggctcaagctatgcccgttttgcgggagtaatcgtatttttgtggcgactcatgaattcgatgaaaggccggattactacaaggttgagtgcaatgaatgtgagtctgaaacaggattcaaactcagcaagcatgccgcaatcgccgcctggaacaggagaccgtcatgcacagcgcaataa

SEQ ID NO: 284696 - DNA, 738 bp, Morganella morganii
atgaaatacatgggaagtaaagcgagaatagccaagcatattcacgcaaaaatagcgccggtattgaataattcaggggtgtatgttgagccgttttgcggcggaatgaacatgacatcgtatgtttccaggaactggtctggcgaaatcatcgcttctgactcacacgaatacctgatcgctatgtggtcagcattacagaacgagtggacgccgcctgaacatattacccgagaacagtattatgaaatcaaagccaataaagatgccgacaaaaagctaacaggctgggttgggtttaactgctcatacgccggaaagtggttcgacgggtatgccggtgttaccgagactaaaaacggtatccgtgattaccagacggaagcgctcagaaatgtaatacagcaggtcgactcactgcggcaggttgacatagttcattcttcttacgatgaaatggctatacctgacggggctgttgtgtactgcgacccgccttattccggcgtacggaaatacagagatacctttgactctgaaaaattctggtgctgggttcgtgaattatcaggacgctgtcacgtgtttgtcagtgaatacaatgcaccggatgattttgtgaagatatgggaaaaggagctgacaagttcgatcagcgcaaatcaccagtcaggaaccaccacgaagtcagttgaagcgctttttgtccatgaatcgtctgtggggtcgctgatatga

SEQ ID NO: 284697 - DNA, 201 bp, Morganella morganii
atgagcagattaactcattcagaaccagaaaagcaatttaaatgcctcgttattggtaatgaaccgtttcgttatgttgaaagcatacctgctggtggcatagcggacaactaccgggaagcaccggaaatggtagaacgggcagagctgaaagaatactggtcaaaatactactatcgcagcggaggtcaggatgcctaa

SEQ ID NO: 284698 - DNA, 249 bp, Morganella morganii
atgattttgaaaagtgccgatgctggcggtctgactgtcgctgaatatattcgccggatagtacttcggaaacacatagttccgaagcctgactatgagttattttccgagttcctacgtctgaaacagcttcaacgggagttactccgtgaaagtaacgggatgcattgcgaagagtccacgaaggttataaatctgattaaagatacattgaatcgggtcggtaactcaccgatgagaacggaataa

SEQ ID NO: 284699 - DNA, 1035 bp, Morganella morganii
atgcctaaaaagttaaatgtagtggatctattttgtggcgctggtggtctacatattggctttaagcgagcgggttttcaaatacagctttgtattgataataaccttcaggttgaaaaaactcataaattaaactttccaaatattccgtttatcaatagagatatagcattaatttcctccgaagaaattgctacatatataaatggcgagctagatgttatggctggcggaccaccttgccaaggtttttctactattggaaaacgttcatcgtcagatcctgaaaaacgatcagctcatgaccctagaaatgaattagtaataacttatgcaaagctaataagtaatttaaagccaaagtttattgtcatggagaatgttaaaggcatcctcacgatgaataaaggtgcttatttaaagaatgttcttaatttgctcagagatgctggctataatgtcgattataagttaatcaatatggctgattacggcgttccacaaattaggaatcgagtaattattttaggtaatagacttggcttacctgtgttatttcccgaatcaactcatgctgaaaatccaggttttcttactgaaaagtggaataattgttgggatgcaatacaggatcttgctgatttaccagaaactcctgaatttaaccacgtagcgttaaaacatacagagaaaaatattgaacggtataaattaataccggaaggaggacgattacctgaaaataaattatcgaaagaactttataggaaaaattttggtaatacttataaaagattgcatcgagaaaagcctagtttgacgatggttccaggaaatgatgcatttccgattcatcctacattacatcgtagtttaactatccgtgaagcatcacgtatacaaacatttcctgatgaaattatttttgcgggaaatagacgtcaacaaggtcatcaagtaggtaatgctgtaccaccaaaattttcagaaattttagctgaatttattaagaatgaattattaaaggttaattaa

SEQ ID NO: 284700 - DNA, 1086 bp, Morganella morganii
gtgaaaagtattgatcttttttcaggtgccggtggattgctagtagcaaaaaaaaatattgggtgcaaaatattatttgctaatgaaatagatactgcatgtgcagtaactcatcgtcataattttaaagatatacctttaatacataaagatattaaagagcttaaaattgatgaaatcaaacagtatatcggtgatgaagaagttgatttagttgtcggcgggccaccttgccaaggtttttcaatgtttgggaaaagacgttttatcaatacgcaaggctatgatcctaaacaagatccacgtaacaatttagtatacgagtacattcgtattgtcgaagaaacacaaccaaaatttttctttatggaaaatgtgaaagggtttatgtctctagataatggattgtttgttcaagaagtaatcaggaactttaaaaatttaggatataacgatatttggtgtgaagttgtttgttctgctgattatggtgttcctcaaaaacgtcatcggatgtttatgattggtaatagactaggcataaattttgaaaaaccacctaaaacacattctgataaagatccgaatttattgccatatactaccgttggagatgctatcctagatattgctagtttaagcgaaaaagatattcctaatcatattgcattagctcataaaccacttgtagctgagcgaatgagttatgtacctgaaggtggtaaacttgatctaaataccttaccagaacatcttcaaaatgcgacgagaagagattcgaaaacaggtaaagtagcaaactatagccatgtctataaacgtttagatcgtaataaaccatctaccacaatggtaccaggccataatgcattcccaatccatcctacacttaatagaactttgactcctagagaagctgctcgtatacagacttttccagacacggttgaattctttggtacaagacaacaacaatgcattcaagtgggtaatgctgtaccaccaaaaatggcagaacctttctttaaaaagattaatgattacattgaagagtacattaaggagagtataggagatgagtcatga

SEQ ID NO: 284701 - DNA, 1509 bp, Morganella morganii
atgagtcatgacttatatgcaacatgggcgtgtgcagaaatagcaaatataattaggactgatcagtctttatactttgctcatagtggatatatcagtgattggactgtagcttcaggtagagaaggcggtcgtttatggcctcttgctgatggtgttattagttcttataacacagcatgttctgatgatcttcatattgctgttgaatttaaacgcaaaaatgaaggtctacatggaactttaactgctttgggacaatctttagcttatttacataaaggatatcatgcctcaattattgtaattccagaaaagtattcttctcatagctctcccgccactcatattaaagaggtactagatctaaccgctaatgatatgcctatcggaatttttagttatgaagagccagatctatctaaactacgcccttttgaaaataaagtcagatgtcatcgtttacctaatttatctttaactccattggttagtaccgctgttaattccagaccaaaatcttctacattatgggctcatgtacgagaaggtatgagttatcctgatgctttttacaaatattgtaagaaggtaaaattcgtaactgcttattcaaaaaataataattttactttaccaaacgaggtattagatgcagttcaaagggtaaaaccaggtgcagatccctacaaatttttaagttgtacaactaatgattctatttcagatagagcatggctgcatgtatggtttgaatactattttcatgaagatttaatcccgatttttagaagagacacaaaaacaggcatttatagtgttaataatataagtactttaattcgtcaaaaccaaagcgaatacgcaaatctactaagtggaagggccgactccccaaaaaataagctagttgatgatataaataatggagtaattacagaagatcaagcatgggatcagtatgtttctaaggtaaattcccaagcccatagttatagagaagtcatagattctggtttatatcaccttaatcttttagataatgatggcaatctgacaaatattggctatcgttttattgatgaggctgacaaacaagattcggtatatacttcaacaagtatgcaagtacttagaggtgctgcattgacatatggaaattttttagcttttttacattacatttatcaattatctgaggaaatatttattgaaaatgaaatagcatttgccagcttgaatagttctggaaaaaaattcaagtttaatgctcaagattataaatcttatttatatacaaaaatgaaagatgatttatctttgattcttacatcttcgcttagatctcctggtaatccaagaaaagcatttcaagctgagttgccatttttgaaatatttaggcattgtctcagaaaataagtctccattccgggttggggtcggtttattaattaattggcctattattcaggagagtatcgattttatgaaaaataataatttatag

SEQ ID NO: 284702 - DNA, 228 bp, Morganella morganii
atggtggatcaggtgctgcgcgggcagggagccggcagtacattgctggcggcattgcagcagcagtgccggacagaaaaactgtttacctccgtgaatacctcgaataccggtatgcaggcgttgctgctgcgtcagggctttgtgctcagcggacaggtggataatctggatgacggtgacccggaactgttttatttccgcagactgagttgtaaaaatgattaa

SEQ ID NO: 284703 - DNA, 1962 bp, Morganella morganii
atgtttgctctatctgacacacagaagaccaagtcaaaattttatcagcctgacgttgatggattaagaactgttgcagtattacttgttcttctattccatgttgggtttacatctattagtggtggctttgttggcgtagatatattttttgtgatatccggttatctgatcaccggaatactcgtatcaagcgttgaaaaagaaagattcagttatgttacttttatgatgtcaagggtatcaaggctttacccaaccctattgatgacattgttgttatgccttatatttggttttcttatttacactcctaacgatttcaaagatcttggattgacatcaatttatgccaccctttccgcctcaaacttccattttatgcttggcgctgggtattttgatacttcatcagaaataaatcctctattacatacgtggtcattggctgttgagcaacagttttatgtggtgtggcctatagtaatctggctctctatgaggtcagggagaaagttagcaataacaatgatatctctattgggattagcatcattggttgcctctcagtacatgacgcaccttaatcccacacaaaactatttcatgatgccatatagaatttttgaatttgccattggcggaattatatttttcattggaaatgaaaaaaaaacaggccaagtattaagttcaattttatttttgattgggatttcattaatattatactcttcattttactttaataaatcaacaccattcccaggggtaaacgcacttattccggtaatcggcgcctctttatgcatacttttttcaaaacacacccctcttgggtatgttataagaaataaactattcgttagtataggtgttgtttcttattctgtttatcttatgcattggccaattttggttttttacaagtattacatatttagacctttaaatgacatcgaaaagatatcaatagtattaatatcaatacttgtagcatatataagctactcatgcattgagaataagttcagaagaataaatttattgtcaataaacaaaatgtctctggcattcattttatctatatctgcaatattatctgcatcatatttaatctataaaaataatgggtatgactttagagtaaataaatattttaaagagaaaatcaaccatgctgacaacttccatttgcaacagtacggtggaaatggatactatgctggtgcacatataattggagacaatgctgcatctaaagtatctgcggtgattatgggggatagtttcgccaggcaatatgcgcatgcaatagatgtgaatactaaaggttataaattcataacgtcaatgaatgatggttgttttttctcgcgtaattacacaacattctatgcgggattacctgacccgaaatgccaacaaagactgaattttgctattgattattcaaggaaatttaatgttcctgttatttttggaatgcggtggattgggtatgaaggaatggtgagcgacccagaaggtaaccaaaggaaatttaaagatgaaaatgaatttattgatttcagtattgataacattaaaaacaatatagctgctttcaatggggaaaaggtagttatatttggcgctccccctggaactgatggcgttggtggtgtagaaaaatgcataaatagaccatcatatctaccactattatgcacgaaatatcttaacaccgagaacaaagatacattcaacaagcggatgaactccgccataaatagtgcatttaatggaaataacaatgttctatttattgacccctacgactacctttgcaaagatggaaaatgtataacgatgactgatgattatcagtttatctactcagatgcagtccatctttcaaaatccggtgcttctttggtttgggaaaaatcaaaaaatcggattattaaatttattgaataa

SEQ ID NO: 284704 - DNA, 399 bp, Morganella morganii
atgaagaaatatttactggctttactctttgtgattccgttttcttctggcgctaaatgctgggttgttagtaatcttgaaggatatagctccttcaaatcagatgggtacgaatacataaaaaacggaatggcaaaaagcgttttccatgttgacataaccgatgatagcgctgacctaaaaatgactgataacaaccttggtggtggcgggttgatttacattccggtatcacaaacatcaatggttggaatgtttaaaaacgatgttatgtccaccattgaaacatgggcaataacaagtgagaataaagttctctataccaaggtggttaacggccataaaatggtaactggaacaacatcattagttggtgatgttattggatcatgtgattag

SEQ ID NO: 284705 - DNA, 2103 bp, Morganella morganii
atggctaaggcatggaaggacgttattgcctctcagcaatatcaggcgctgtcgccgcagcaaagagctgaagcgcaggagcaatactttaatgacgttgttgccccgcaggccggtgaatcggtgaacgaggcaaggcagcagttttacactgcatatccggttgagacagtgcagcaggaacaacagcctgctccggtgcagcaggaagcacagcagcctgaaggattttgggctaacgtgaaagatatggttaccggcgagagccgcatgacaccggaaatggagaaactccagtctgtatctgacgcgccagagctgagcgagtttaacaaagatgccgccaaagttgcatgggctcagatgatgggtaatcagcaagatcaggagatcatgttgagaaacctcggggcggaaatctcatatgatgcaaagggtaatgccattgtcaccatgccagaaatggttaagcagatgggatggttgccaaagcatcatgccgataagctggccgctgaatatggcggcgtggctgaagttgatggtgacgggaacactattatcaaactgccgccgcgtcagtatgcgctaaacaaacctggcctatctcctgaggatgtggcatctggcgcggctctggcagcatcatatacaccggccggacgtgcaggcggattggtcagtgccggtcttcgcgcggccggtacagatgcgttaattcagggcaccacaagttacatgggcggaactgatattgacccgtttcaggttggcttatctggtgttctcggcaccggcggtaaggcatttgaaaatattgtcggcgctgcggctcgggcaataaaaggaaagatgtcaccggaggcggaaactcttttgcgcaatgccgaacagcacaatgttgatgtcatgacatcagatgttgttcctccaaaaaatagctttcagcggcaaatgcagcaagcaggtgagcaaagttttgctggtacaggtcaaagaagatctcttcaggaatcccagcgtgaagccatggttggtgacatggctcagatgattgatagggagtttggcatctatgccccgcatattctacaaggagaagtttcctctggtctgtcaagggctaagactgcgcaagggaatattatcaatgaaataaatggcctaatgggcgacgcccctgtagttgcaacgaggagtattgcaagcatagatgatgccattcagaagatgagcaaatcacttaatcctgatgatgccgctattcaaactctgtctaaattaaaagacagattgtcgtctggggaaagttttagctcattgcgagaattaagaactgacttgcgagaagctatgcagggttcaaatttggtaatgccaagccgttctgacgcagcgtatcaaaaaataaataatgcgctaacttcggatatgaatagcgcagtaggcagaactctgggaggggatgccctcaataaactgcgaggcgcaaataatgaatatcggcgaattgcccgtggcgttgaaaagaccgggttaaaaaatgctcttgaaaaaggggatgtgacgccagagctgataaataatattgtctacagcaaaaggccaagtgatatcgcaagaatttacggcatggttaacgaaaggggtaaaaatcagctaaggtctgcttacctgactaaagccctggagtcagccggaggatctccgaggtcaatgactacacagttggataatatgataaatcagtctggcggtcagatattcaaaacaatctttaacccaaggcagagaaagatgattgaggggatgcaggaagttcttgaggcaacaagcagagcaagcactgccaatcaggttacgcaaactgggatgtcattaataactccatcaagggttgccggtgggcttttaactggaggtgggacaacactggcggaggccgggacaggattaattgcaagaatgtatgagtctgctcctgtcagaaacatgcttctccgccttgccaatacaccaaagggaagcactgcatacgacaggctgatatcaaaaatatctcagtctgtcacggcggtttctcagggcgaaaaagggaagtaa

SEQ ID NO: 284706 - DNA, 750 bp, Morganella morganii
atgttcggactaccggaaatccccaactggaagggcattccagacgctgcgttagatgccggaatcagcttcggcggcgcaacactcatcaacaaactgttcggtaactactgggggatattcaatcagtacggtgttccgctgctgctggccgataacgtcctgtcattgcagtaccagaacacaagccgggtcgttagtgctccgattgagaaaggcacatttgccagctacaacaaagttgctgacccgttcaaagccactgtgcaactgagtaagggcagcggtggcgcactggagcgcggggcattcttggcgcaacttgaaatcctcgccaaaagcaccctgaagtttatcgtcatcacgccggagtatgtctataagtgggcgaatatcaccggttacgacctggtgcgagaagcccgagacggggcaacgctgattaaggtgaacgtgcatctggaagaaatccgcgaagtcactgttaagtatgacgaggaaaaagtaaaaaatccggatgatgcaaagaaaaaggacgcgggtgataaaactcaggcggctgaatctggctcgatggagggaacactaacagaacttgagaagatttgggatgacccggataaatcatatttcaaaaaggggtttgatggtggagccatcctttggcggggcataaaaaatacccggggggaaatcagcaacatcggagaagagacaaaatttatggttaaccagataaccggaggctga

SEQ ID NO: 284707 - DNA, 726 bp, Morganella morganii
atgaacgaattgactttatcaaatagctttggcgctgtcacgaacaaagtaatcgatacgcaaaagctgctttccatgattaacatggctcgtaagtcgtgcggtgaaaatcaaatccgcaataacgtattgattgaacgggtaaaagatgaattagatggcgagacctacaaaatttttgtaggtcaaaaaaacggcgcgtccattgaaattatcgaaatggagatcaagcaggcattacgtgtcgccgcccgtgaatcaaaggctgttcgccgtgtgctggtcgataaactggagtcaatgcatatcgcgtcgcagaaaggcggaaagagccagtccggacttccggaataccgtcaggcgcggacactgaaaatgtcagtggatgcgatcggcaacctgtttgacatgatgccaaatctcagccccgaagcaaaacagtgtgcggcggcaaatatcgttaatccaatcgtcgggtttgaggcggtgcctctgccggttcttgagcagaaatattataccgccggtgaggttggtgaaatgctggaagtgtcagcgaataagataggccgagttgccaacaagcacgagctgaaaactgatgagttcggcaaatttttcctggacaaatcggcgcactctgcaaaacaggttgaagcgttccgctataacgaggaaggtattaaggcacttcgccatatcattcacggtaagcaggtagcttaa

SEQ ID NO: 284708 - DNA, 339 bp, Morganella morganii
atggcaaagaaagacgttcaattaaatattcgcatgacacaagatttgaaagatcgcattgaaaaatcagcaaaattaaataacagaacgataaatgctgaggccacaactcttattgaatttgggttggataaccagatatctgattttgggtacagagtaaaagacgcagcagtcgaaatgagcgagcagatagacctgccatccgatgaaattgaaaggctaattaatgcaactcttgttgaagagatatcgaaagcgctctctgtgtccttagaggaagtgctggagaacgcaaaatcatccttcttgtctgaaattaaaaagcatcggaaataa

SEQ ID NO: 284709 - DNA, 435 bp, Morganella morganii
atgcatgatttgttctccatgtttaaggacgaagcaaccataaaaattattgccggaacggcatggactgccattagttttttctgtggcgcatatgtcggccacagatttaatctgttccgagacaagcgcaaagagttcaatgatgccgctgcacctattagattaatcctgctcaatcagcttaaagcggcaactgaacgagattcgattaaccacagtattagtgaatgcctttactggtctcttatagataaaacaccaaagagaaaaaggcgtaaattgtcttcgatttggcacggttacctaaagtctaaagaaaatgactataacttagaaactgatgaggctggtcgtgtgcttgttaaatttaaaaatagagataactacataagtaacataaataaatttttaaaattcacagaaccaaagtga

SEQ ID NO: 284710 - DNA, 216 bp, Morganella morganii
atggattggggatggatcattgcggcgcttgttgctgccgcaattttaaatgacatattcaaaccaaagaagtgcagtgtttgcaggcagagatttaagaaaaaatataccacatggaagataagcggcaaaaagatgcacctctgcccgaattgcagctctcagatggagcgcaaaatcagtacagccagattcagagataagttcggtaaataa

SEQ ID NO: 284711 - DNA, 495 bp, Morganella morganii
atgataaagaaattatccattggcgtgctgctacttccgtcgctgtgtcttgctgtaccagatcatagtggcctttatcgtgatgctgactttaaccttaattcatatcaaggtgcttatttgtgtaaaatttacccaatgccagcgaacataaacgatcggcgtggttatgttgatgaggttattggtgaggcaaatgtagttgttgaaaatgaggataagggaaccggaaagtatgtttttgtgaacttaaacaatggtaaggatattgaaactccgttattgccattagctaaaaaaggttcatctggcaccacctacggagtcaagcttaactcgttcacgatgatatattcccttacccctaaagagggtacggtaatcggcattcaggatcacaggaaagggaataacctcagtgtgatgcttggcgattgcgctcttcttcgcaaccaagaagcgccagccccggcagatgtattgccagaggattaa

SEQ ID NO: 284712 - DNA, 2400 bp, Morganella morganii
atggcgacgataattgacgcgctggttgtgacgctgaagcttgataatcgcggattcagcaatgaagtgaaaaaagcgaccgcagagaatgaccggctgtcggcagcaatcgacaatgtcagtgattcgtctgccgacctcactatcaccatcaaaaaccaggctgacgaaaccaaaaaggcagcgaaaaagcaggacgacttcacgaagtccatcaacaatggcattaaagcaattggtgctttattcgcaacaatcatggcatcgtccggcctgtcaaaactcatctctgagatacagaaaagcaacgaccagctttatttcctgagtaaaaacctcggcatgagcgccactgagattaaaaagtggcagaacatggctgagatgtccggcggctccgctgatggcatggcggcgagcatgtccaacctcagcaaatcgctgtgggacttggtcactatcggggattcctcggtactgccgtacttcaatgcgctgaatgtcggtgtggtggactcaggcggcaagctgcgagacctggacgctatactgctggatgtggccgacagtctttccggtatgtcccgaccgcaggcttacaacattgcgaaaaacatgggctttgacgagggcacgatcaacaccctgctgcaaggccgtgacgcaatgcaggaaatgctggacacgcagcgcggtctggttatctccagcgaggaagaactggaaatcagccgtcagcttaacaaacagaatgcgaaagttcgtcagggctgggaggggctgaaaaccctgctggcaaactacctgatgccgtcattcctgaaattttcagaaaaagtttccggcttcctgatgttcctgaataagaaccgcgataccgccgtgacgctgtttaagggcattggtatagcgatagggctgttccttatcccgatggctctgaaagctgctacggcgttcatggcgatgtttgcacctctgttcggcggagttggcctgattctgttgctcggccttgtgctggccggtctctatgatgactacgaaacctggaagaaaggcggggattccctgttcgattactccgggtgggaagaaaacatagagatggtgctgaccgcgctgaaaggcctgaaggattggtttaaagacacaacaatcggcaagtggttcacagatcaggatggcaaccttgaaacatggaaagtggcgctcggtgcttttggcctgtggtttgccggtaagtgggttgtcggtattaccgccgggctgctgaaaataggcgcagggtttcttgcgctgttcgggtggccgggactgctggttgccggactgataacggcgctcggattatggcaactgaagctgaacgagctggatttatccccattgatggttgctgcggcagaggcaaagattaaagttgatgatcttacgaaaagccttgatatgttgaggaacgctgaaaacggcggcgacaaagctcaggcgcttatccgtgcaggaagtgacattattcctggggggaatttccttaaaatgggtattgatgcaaagctgccagagaaaataagaaataagattgaaaaagatggcataaagaattctgtcacagacctgtggggaagcacgaaggattacttggtttcagcaggtaaggtgcaggagagaaacaaacaaaaatctgatgatggtaaagtggcctcagtccataaagaaagggggttaaggtataacagtccgctgaatcttgcgtatgccaatcagcaaggagctgataacactggcggctgggctaaatttgacactgaatataacggaattagagccagtgcaaagcaacttaaaatgtattatgacggcacttcgcgtgcggctgggtacaaaaagctgcaaacagtctcagacattatccatcagtgggcgccaaaagggcatggtaagaatgatcctgtcgcatactccaataccgttgcgtctcgcatgggagttggggtcaaggataaaattgacctaaataacccggcggtgatgctttccctgatgaaggaaatgtcaaaagttgagaataatgggaaattcccttattccgatcagttggcaatgtctgcaatacaggggactggtgacccatatgcgaatgccgcaaacaatataaacaaattcaatgagtttgtttctaaaccaatcgctccaaatgcggcggcgggtactcggcaaataatggataattcgcaaatgctacaatctggcagtaagacagtgaataacaacgttgaggcaaacattgaaaacatcaatgttcacacatcggcatccacacttagcggaaatgtgagtgatgggttggatgtgacagtgagagatcatatgttccaactgatcacgccaatgagctaa

SEQ ID NO: 284713 - DNA, 423 bp, Morganella morganii
gtggcagataagtgcttagtggtggaatacaccgttccgcatgagtgggttggccgaaggaaatgcgaataccggcaatcactatcggttgacgatgatttcgatgtcatcttctcaaatgaaacttaccttggaatcaaggggcagattgagaaagaagaaaagcaaaaggtttccattatctcgctgcgtattgagtctgatgaaaagtccgtgatggcagtagttgacattacatgcagtaacgatggcggtttttatcaggaatcgatgtatttcggcagtgattgggggctttgtagtcacgaaattgagtcgaaggattttcgcgactcagtaaagtcccgtctggaggcggagcgtggattggtcgtcaacatcaccagcgttaacgtagtggaagagaaagaaccacccatttaa

SEQ ID NO: 284714 - DNA, 315 bp, Morganella morganii
atgaaagaagcaatacagccaagaagtagtggtgaattatgggcctggtttggtttgtcatacgcatcattccttgttttgccgcgtgtgctgatgcatgaaatgcctattgagtggcagaacaaaatggctgctttactgcatgagtacgatgaaacattcgatacatcatccgtttgtcattcagtcatagtgagcgcaaaagacaaaaacaaccggtttatgaagatgccggaatacatcctgaattaccggcacccggaaagggatgagattaaaaagttacgtatcgaaccgccaaccacggctaattga

SEQ ID NO: 284715 - DNA, 225 bp, Morganella morganii
atgaagcaaacattaggccaaaaattagtgggaattagttttaacccgggtggaaatatcctggttgatgctgtgaagcagaatgctgctgacaccattgatttaattcaggacagcatgcagaaggcaacatcagaagaatctctgatgatccataacgaagcagtgcgccgcatcatggatgctcagatgtgggctgtgaaggctatcacctggaaggattga

SEQ ID NO: 284716 - DNA, 588 bp, Morganella morganii
atgaaaagaggctcattcacagacttgtcatgcttcaggactgaaaagcaactcagggataagtggggcggatcagtggtgaagataaataaatcggacagacctcaggcaagataccttctcactttatggggaatgcactaccgcggcgatgaagcgcctggtgattgcggaataaacattatcggaaagctgatgtcgcgtgacgagtgggatgatgaaactgccaccctgatccgcgtgaccatcggtaactgcaaaaagcagggatattccggcaacgaactactggaaaaggtaaaggagattgtgtcaccaaacaaatcaacgctcggcgcacttcgactcgccaaagaaaaagatgacgccgacgctgttgaatcttgtatcaacaaagcttttcctctgaacaacccgcttcgtgatgtggttattaaacgatataagaaccgcaaaagcccgcaaaatgttctcgaatcattatccagagagacggggatagatattgactcagcaaagcgcagggttaggtgggcggatgccatcattgaagatgtgatttattccacggtaatcggtaatcagtag

SEQ ID NO: 284717 - DNA, 594 bp, Morganella morganii
atggcaaagcaaccgcggcgaaaatgcctgatatgccgagaatggtttcacccgaagtatgacaatattgagtggtgttgtcctgagcatgggctggagctatcacagcgacgaaggcaaaaggcagcagaaaaagcactggcaaaattgaagaaggagcgaaggcagcaggaacgtgaagaaaaagataagttaaaaatccgcaagttagcagtaaaacccctctcatatttccggcagcaagcacagaccgcattcaacgcatacatccgtgaacgggataaagaccttccgtgcatcagctgcggccgtcaccacacagggcagtatcacgccgggcactatcgaaccaccggagccaatccggaactgcggtttgatgaggataacgtccataagcaatgcgccccatgtaacaaccatctgtccgggaatatcgaaaactacacaccgcgcctgattgaaaaaatcggccaggatcgtttcgaccgcctgatgggtgtgcatgagttgccgaagtggaagcgggaggactacgagcggatccgggatgagtaccggcggaaactgaaggagctgaagaatgcgacctga

SEQ ID NO: 284718 - DNA, 138 bp, Morganella morganii
atggaattaaccaaagaagaacaggctctcgttatcgagttgttacatcgaattttcgaggaaggctttggtggcgaggctgaagacagattatttaacaagctaattgccgccgctattgagcgagagggccgctga

SEQ ID NO: 284719 - DNA, 150 bp, Morganella morganii
atgtctttagaatcgatttgtctaccagtattgtgttttttacgtaccagcatgttttttttgcgatctgaatggaatttaacaactaaaattaacagcgataatgaaaaaacggcatgtctgaaaagagatgccgtaattattatttaa

SEQ ID NO: 284720 - DNA, 399 bp, Morganella morganii
atgggcattggtcagcgaggactgaatgctgcaaccattgatggtatgcgctatacctttatcgccgcagtcgggtttagggtgttacagcttatttttcagaaagattatgatttgtataatttcgtcggggatatcacgatggatgtggctaagctgggagtagcttcgttcatagcttggggaggcgggtctacggttatagctgctgcagccgctttatctataggagcaagccctttaattgttggtgttgttgtattcgttttaggttttggaattgcttatggcttaaattatatagatgaaaaatttcatatcagtgaaaaacttattgaaaaaatgagagaggttaaaaatcaaccagaaggagataaatactggaagggaaacagataa

SEQ ID NO: 284721 - DNA, 183 bp, Morganella morganii
atggctacaaggtttattggtttaaaagagatgtgcgaactaaccggaaaaagccaccctacactatggcgcatgtgggcaaaacgaaacgaattcccgaaaccttccaaaacaaaaagcggaacatttttgggatgggcagaagctgagtatgaaaaatgggttgaatcacaaaaaagataa

SEQ ID NO: 284722 - DNA, 372 bp, Morganella morganii
gtgttcacgcaccatttccatgatgaagttgttcaaagtcgttcgatgtcatttcaagtcattttagtttatccgccccatttacgccccatcccacaatccccctgctatactcccatcatcacccaccactccaaaaccaacatgcacaatatcgccaaccttcctcaagacgaaaaagacaaaattaatgccgatttagccgcatccggtatcgcgtacaaagaaagactcggactgccttatgatctgtacgaaacagaaaaccagcagcccgagcatttacggccgtacttcagggagagactggagcactacagagaggtcgggaaaaggtttccgcgcgggttcgagtatgagaaggaaggttaa

SEQ ID NO: 284723 - DNA, 1293 bp, Morganella morganii
atgactttaaaagaaggtcagttagttacatatgcgatcgacgaaatcattgaaaccgtcgaaaacctcactccgatggcgcagaaaaccacgaagtactcgccaccggctgaatctatgcagcgctcaggaaacactgtgtggatgcctgttgagcaggaagcgcctactcagtcaggctgggacttaaccaacaagcagaccggcgtccttgagttgtcagtgaaatgcaacatgggtactccggataacgacttcttccagttgcgtgctgatgagctgcgtgatgagcggtcattccgccgccgcatccaggcatccgctaagaagctggcaaacaacattgaaacggccattgccaaacaggctactgaaatgggctctctggttgttcatgatgaacgcgacatcggcccatcgaccggcctgagcggctgggattttgtgtctgatgcagagcgcctcatgttctcccgcgagcttaaccgcgatatggggatcagttatttcctgaacccagatgattaccgcaagtcaggacgcagtctggtcgatggtgatattttcggtcgcattcctgaagatgcttaccgtaacggcactatccagcgccagattgcggggttcgatgaaatccttcgttcacctaagcttccggcggttaccgcatcgactgctaccggcgtaactgtttccggtgctcagaagttcaagcctgaagcaggcacaactgatgctgacggtaacccggagaacgttgataaccgtgtcgccactgtaacggtgtcctcgtccacagggtttaagcgcggcgataagatttcattcgccggtgttaagttcctgtctcagatggctaaaaacgtgctgactgatgatgcgacattctccatcacccgcgttatcgatggtactcacattgagatcactccgaagcctgtagcgctgaatgacaccgccctgactgcggaagaaaaagcatacgctaatgtgaacacttctctcgcggatggtgcggccattaatgttctgaatattgccaccaccacggcaaacgtgttctgggctgatgattcaatccgccttctgtcgcagcctatcccggtaacccatgagctgtttgctggcatgaaaacacagtcattcagcatccctggtgtaggtgttaacggcatcttcgctactcagggtgatatcagcacgctgtccggcctgtgccgtattgctatctggtattcagcatgcgcagtccgccctgaagcgattggtgtcggtctggccggtcagaaataa

SEQ ID NO: 284724 - DNA, 183 bp, Morganella morganii
atgttcacagacatagcggcagcaatcgaagaagccagatatctcaaacaggaatcagacggacgaatagattacagcgttatgcaatttgagtctgaaatggaagtgtttcacggcctgatggacggcatccgagttatgtacacgacggctaatgacaataatcacatggtgcggggatag

SEQ ID NO: 284725 - DNA, 600 bp, Morganella morganii
gtggcaaagcaatcacggcgaaagtgcctgatatgccgagaatggtttcacccgaaattcagtaacgaatggtggtgctgtccggagcatggcgctgagttggcaataaagcgacgaagcagggaaagggaaaaggctgaggccaaattaaaaaaggagcagcagcagaaaaaacgtgaagaaaaagacaaactcaaaatccgcaaattagcagtaaaacccctctcatatttccggcagcaagcacagaccgcattcaacgcatacatccgtgaacgggataaagaccttccgtgcatcagctgtggccgtcaccacacagggcagtatcacgccgggcactatcgaaccaccggagccaatccggaactgcggtttgatgaggataacgtccataagcaatgcgccccatgtaataaccatctatcaggaaacatcgaaaactatacgccgcggctgattgagaaaatcggtcaggaacgcttcgaccgtctgatgggtgtgcatgagttgccgaagtggaaacgggaggactacgacaggatccgggatgagtaccggcggaaactgaaggagctgaaatcatgttcacagacatag

SEQ ID NO: 284726 - DNA, 738 bp, Morganella morganii
atgaaatacatgggaagtaaagcgcgaatagccaagcatattcacgcaaaaatatcgtcagcattgaataattcagaggtgtatgttgagccgttttgcggcggaatgaatatgacatcatatgtttccaggaactggtctggcgaaatcattgtttctgactcgcacgaatatctgatagctatgtggtcagcattacagaacgggtggacaccgcctgagcacgttaccagagaacagtattatgaaatcaaagccaataaagatactgacaaaaagctaacaggctgggttgggtttaactgctcatacgccggtaagtggttcgacgggtatgccggtgttaccgagactaaaaacggcatccgtgattatcaggaggaggctctcagaaatgtaatgcagcaggtcgactcactgcggcaggttggcatatttcattcttcttacgaagaaatggcgatacctgacggtgctgttgtgtactgcgacccaccttattccggcgcgcggaaatacagagatacctttgactctgaaaagttctggtgctgggctcgtgaattatcaggacgctgtcacgtgtttgtcagtgaatacaatgcaccggatgattttgtgaagatatgggaaaaggagctgacaagttcgatcagcgcaaatcaccagtcaggaaccacaacaaagtctgttgaggcgctttttgtccatgaatcgtgtgcggggtcgctgatatga

SEQ ID NO: 284727 - DNA, 162 bp, Morganella morganii
atgattaatgagccagagatggaatggattaatcgtaacggaaaaacacctgattcagaatgtaaatgcctggtttttggttctcatggaataacaacagcgtactggaagccaaatataaaaaattctgtgatgctgaatctaacgacgatgaaggcatga

SEQ ID NO: 284728 - DNA, 213 bp, Morganella morganii
atgaagggtaagggaacagcgctggcagatttaaataaggcgtatgacaagcaagcatccaagatagcggaaaggacaatgcgctgtcatgaatggtgggtaactgacagttggtttttcgagctgggttatgaaaaaaggaaattactacctcgcggaaaggtatttatcaagctgctcaccttgtgtggggaggcggatatttatgattaa

SEQ ID NO: 284729 - DNA, 141 bp, Morganella morganii
atggatgtggatattcagcggaaggcggagtttaaaaacttccggttcgtgaagtcacccgagggcacgattctgtttgcaaactgcatggtgccgggcattacggcagatgattttaatcagttcagagcgattaactga

SEQ ID NO: 284730 - DNA, 714 bp, Morganella morganii
ttgcagcaggcgggtgataaacgtaccggttccggtgaatgggtcaagaatatgcacacctttgtcggcgagtgtttgtccgaactcctgtttcagcacgtcattcacgctgtgaataataaaatcaaccacctcaacaggcgtatacacaatgcccagacgctccgtcattctcgggaacgcgtttctgaaaaacttatcgtacaactgtacgataatctgctgcttaccttctgcggtggtaatgccgtccgcacgcatttttaccgactcatagaagctgttcagcgtgctggcttctttttcgagatgatgctcctgcaacgtgttaagcacgttctgcatcgccatactcatcgggttatggtcggtaaaattgtaatccgcaaacagggcatcaaaaaccggcttggttatcaggtgctgagccagcatttcaatgatttcatcatcggaaacactgttattcaggtcatcacgcagttcatctgcaaatgccctgaaggcactgatttctattttattccccggattttcgagaatgccgtgaatgcggtcgatatgtgtgcgggcaattttagcaatatcgttcgcccagtcttcccagtgatgccggttaccgcattttttaacgatttttgcgtacagggcgcgctcaatctcaccaacggaaaattcaatatcaaactgctcaggagcgggactcacggctga

SEQ ID NO: 284731 - DNA, 603 bp, Morganella morganii
gtgaatacgaacaaaggcggactcatcatccccttcaaaggtcgcacctgtggtccggtgagcttcatcacaaatgatgaaatcaaatgcaggaaaacccagtttttgcgcctgatggatgacctcaacagagtggtaggtagaaaacaccacgttcatataaggcggcttatcactgccgaaaatatccggctgattaaacgctttgacgaggctgctagcattcgtggtcgccggatatttcaggtcgctgataccgacaacaacattatcatcatggtttttcttacccacatcactgtcagagcagaccgcaaaacatctcaggtctatcagcgtatcctgcgtccattcatccagcgtctgactcaacagtgccagacttggcacaaggaacagtacggttttacctcttccggcaacggcttcagcaatacgcagagaggtgaaggtttttcctgtgccgcacgccataatgagcttgccccgatcggcagtcgccagccctcttttaacggcttcaagcgcgggagtctgatgaggccggagttgctttttggctttcatcaccggcttgtatgccggatcaaaatcgaattgtga

SEQ ID NO: 284732 - DNA, 585 bp, Morganella morganii
atgagcgacgaaattaaacaaattgccgcccttatcgggcatcatcaggcgctggaaaagcgtgttatctctctgactgagcagtttcaggccgcctcatcacaattacagcagcaaagtgaaacgctgagcagggtcattcgtgagctggacagcgcgtccggtaatatgactgacaccgtcaggaaatcggtgagttccgcgctcactcaggttgagaaagaactgaaacaagccggattagcacagcagaaaccggcgacagaagcgctgaatcaggctgccgatacggcgaaagcgatgatccatgaaatgcgtcgtgagatgtcacgctatacgtggaaatccgcgatttatcttgtactgacgatattcttcgtcctggcttcctgcgtgacggcatttacgtggtttatgaatgacgggtatagccagattgctgaaatgcagaggatggaagcggtctggcaaaagaaagccccgctggctgacatatcgcgctgtgacggaaagccctgcgttaaggtggacactcgcactacgtatggtgataaagagaatacctggatgattattaagaaataa

SEQ ID NO: 284733 - DNA, 1116 bp, Morganella morganii
atggcatcttatcatctcagcgtaaaaaccggcgggaaaggcagtgcctctccccatgccgattacatttcgcgtgatggaaagtatgcccgtgaaaaagactccgaccttgagcacaaggagtccggcaatatgccggcgtgggcagcgcataaaccgtccgagttctggaaagccgctgacacgtctgaacgtgccaacggctgtacctaccgtgaaatcgagattgccctgccgcgtgagttaaaacccgaacaacgtcttgagcttgtccgcgattttgtccaacaggaaattggcgaccgccatgcctatcagttcgctatccataatccgaaagcagcgatagccggtggcgagcagccccacgcccatatcatgttctctgaacgcattaatgacggtattcaccgtgaccctgagcagtattttaaacgggctaacaccaaagagccggagcgcggtggcgcaaaaaaggcacgtttcggggaaacaccgaccgaacgcaaagaataccttgttgcccagagggaacgctgggctgacctccagaataagcaccttgaacggtatcagcacgctgaccgggttgattcccgttccctgaaggcgcagggcattgaccgtgagcctgagcggcatctgggcgcgggtcaggttcagcgattcgatactgagcagctacaggccattcttgagcgcagggaggctgaaaggcaggtgcagcagtcccgtgatgaacgtgacagcgtaattgacgtgactacctcgttacgggaagccctcagcgagagggatactctgacgctaaaacaggagctgaagtcagagcctgagcaggaatcccattccggcagaacgtttgattttgaaaaagagcctgacaagctgaacgcactggtcagtgatgccatgaaggatatacaggaagaaatcgatcttcagtcccttgttaacgatgcgatggcggagttccaggggatacatcaggagatggaaaggcagagagagcgcgaacgtctggcggaaaaacagcgtcagcaggagaaagaacgacagcgactcgccgaacagatacgacagaagccggataaaggctggtcattctcacgatag

SEQ ID NO: 284734 - DNA, 957 bp, Morganella morganii
atgtctgagcttgttgtgttcaaagcaaatgaattggcagttagtcgctatgacctaacagagcatgaaactaaattgatattatgttgcgttgctctattaaatccaacgttagataccccgtcgagagcagatagaacagtgtctttcacttatcagcaatatgcaaagatgatgggcttatcaccagataatgcatatcaccgcttaaataaagcgactagtgagttaatgacaagaaccgtagaaataatctatccaactggaaggatatctaagcgcatattccagtgggtaaattacgctgagtttgacagagaaacacaatccttatctttggtttttagtgaagatatattgccttatttgtttcagttgaaaaaattcataaaatacaatctggaacacgtcaaagcctttgaaaataaatattccatgcgtgtttacgaatggatactcaaagaattaactcaacgtaaaactcacaaagcaaatgttgaaattagcattaatgattttaaattcatgatgatgatcgagaaaaaatataaggaatttaagatctttaaccgagacgtgctaaagcctgtaagtaaagatttgaatacctacagcaacatgaagttagcaatagaaaagcgcggtcgtcctgctgacaccctaatatttcaagttgaactggataagcaaattgaccttgtgactgagctggaaaaagatccagcatcaaaaaaagaagataaggcaatccgtttaacgcctgaaaatcgtctgcacgagggattaaaaacaacattgcatgatgctttaactgcaaaaattcagctgactagttttgaagctaaatttctgagtgacatgcagagcaaatatgatctaaacggctcgttctcatggctcactcaaaaacaacgtattacgctagagaaaattttagctaaatacggacggatctga

SEQ ID NO: 284735 - DNA, 426 bp, Morganella morganii
atggcactggtatcagttacagaggcagccagactaactggaaaaaacagagcaacaatacatcgctatataaagcaaggaaaactgtcgcaaatttctgatgcaacaaatacaaaaaaagtagatacatcagagcttattcgtgtatttggttcactaactgcgacacatgcaacactgtcgcaaagcgatgcaatgcagcacgatgcaacacctaaaacagatcaatccgttgcactgttacaacaaaaaattgcacttttagagcaactgcttgaaagcaaaaataaagaattacaacgtcaggacgagcatatagacagcctgaaacaagcaatgctattaattgaatccaagctgccgacaacacctgaacccgttgcaccagtaccaaccaaaaaatcatggcaattctggaaaaaatag

SEQ ID NO: 284736 - DNA, 1584 bp, Morganella morganii
gtgatcggttttgtcactaatggtggctatatcgactctaactcggctgatggacttcgtaagtgtctggcggaagagttcagtagcctgtattttttccatctgagagggaatgctagaacgtcaggagaggttcgccgcaaagaaaaagataacgtttttggtcagggaacaagaacgccgattgtaattgctattctggtaaaaaatccggtagcaacacagacgggtcagatttattttcatgatattggtgattacctgacaaaagaagaaaagctggagacaatttccgattttggcagtattgacggtattgagaaaacgcatggctggcagaaaatcacaccagatgtctacaacgactggctgaatcagcgagatgacagtttttatgacttcattgcgataggtaataaaaaggatgaaaaagaaaaaagcttttttcataactattcaaatggggtcgttacagcaagggactcttgggtttatcaatactctaataaaaagttaagagttaacatttcagatatgattaatttttacaataacgaattgtctactctttctagagtaggtgatttaaatggtaaggatgtaggcgaccttattgataataacccaacaaaaataagttggactagagccctaaagaacgatttaaaaaaaggtcgtaatttggaatttgatgacttatctatatatgtgtcgatgtatagaccatttataaaatgctggatgtattttaatagaagactgaatgaaatggtttatcaaatgccacagatatttccattcccaaactctgaaaatgtgctgataacattaaatgtaaatccaaaaaaaggattttgcgtactattgacagacgtcgtacctgacttccacttgttaggtgatgttcagtgcttccctttatatgtgtatgaatcctcggatactggtgtcgtaagaaaaaatgccattaataatgatgtgttgattgagataaattctcattattcgttaaataatattactaatgaggatgtctttttctatatatatggattgcttcattccaatgactacagggctacatataaggataatattagtaaagagttacctcgtattcctttagttaaaaatattgatgatttttttgtttattctaatagtggtcgtgaacttgctgaattgcatttaaaatatgaaaaagttgagccatacaaggctgatattgatacgggatccctgagctattctcagttaggcaaagacgatttttatgtcgagaagatgaagttcgccaaaaaaggtgaaaaagatacggtcatctataacaataaaattcgcataaaaaacattccaactgaagcctatgactacgttgtgaatggcaagccagctcttgaatgggtgatggagcggcaaggtgtctctactcataaagatagcggtattgtgaatgatgctaatgactgggcagttgaaacaatgaataaccctagatacccactagagctattcctgagaattatcactgtcagcctggaaactcagaaaatcgtcaatagcctgcctaaattagatatctaa

SEQ ID NO: 284737 - DNA, 330 bp, Morganella morganii
atggacactaagacaaaaataattgtggtgattttttttgccatggtgactgtgattgcatgcctaggtaactcactaagtgatgccagaaaagagcgcgactcactatctgaaaagctgtcagcgcagcaggtgattaataccaccacattaaccgcagtcactacctttcaccgtatctctggagagaccatagatgccaagcgaaaaaacacactggacgcacaggcagccaagaaagacatcaaagttattcttgtgggtaatgactgtgcttccgctgctgctcctggtggtctcattgaccggatgcggcagtacaaagactga

SEQ ID NO: 284738 - DNA, 297 bp, Morganella morganii
atgaaagaatcaatacagccaagaagtagtggtgaattatggacttggtttggtttgtcatatgcgtcattccttgtcttaccgcgagtattgatgcacgaaatgcctattgaatggcaggacaaaatggctgctttactgcatgagtacgatgaaacattcgatacatcatccgtttgtcattcggtgacagtgaacgcaaaagacaacaacaaccggtttatgaagataccggaatacatcctgaattaccggcacccggaaagggatgagattgcgaagctacggattaaataa

SEQ ID NO: 284739 - DNA, 378 bp, Morganella morganii
atggactggctgacaaaagctctggccggtatctgcgtggtactggtcattggcttgctgcttaccctgcatctgtatggtggcttgaaagacaattaccaggcactgaaagacaagcactccgcgctgacggcagtaaataacatcaccctgtctgctgtcgctatcaatcaccgcgtatcatccgacaacatcaaagctaaagaaacagagggcacagagcatgtcaaagttaagactgttatcaaaacagtatttaaggatagtgaatgtgctgttactcctgttcccgctgatgttgtcagtgagttgcgcagatacgcggacggaatacgttcccgcgccggtggtgccgcttccaccacaactgaccgctga

SEQ ID NO: 284740 - DNA, 504 bp, Morganella morganii
atgggaaagcttactcaaagcagactcagggaactgctcaactataaccctgatactggtgtatttacctggctgcaatacagaagccagttagctcgcgcaggatcagcagcagggcgcgtgaacatgacaacggggtacgtggagattcagatagacggaacccgatacaaagcgcaccggttagcatggttgtactgccacggtgtgatgcctgataagcagattgaccatatcaacagcaacagaacagataacaggatcgctaacttacggggggcaacacgttctcagaatcagcagaacactggtctgacgaaagcgaataaatccggcaggaaagctgtctacttccgtgatggcaaatggcaggcacaggcacagatagacggtaagaagtatcacctcggaagatataagaccattgatgaggcgggcagggcatatgaaacattttgcagagagaattacagttgcttctacaggcatccggcaacccattga

SEQ ID NO: 284741 - DNA, 1644 bp, Morganella morganii
atgacagtacaaatacttgacagatttggtaagcctatacaatcgacatcaaggccaaaacatcaggcgctggtggggggcagcagggttccttatgacgccggagattctaatagtgatcaaatggcgacatggcagcccgcactttggtcgcctgataacgaaataaatatctaccgtgaccgtatcgtgtcacgcgtccgcgatctggcccgcaatgatggctgggcgtccggttcgataacccgtgttctggataatgcggtcggcgcctgttaccggccggtattcaaaccggattaccggatgctccggcaactgaccggaaacaaagcctttgatgcagagtgggcggcagagtacagccggtttcttactgctcactggcggacatgggcgaatgacaaaggccggtactgtgatgttgagcgtaagcagacagtgtcgcagatgctgcggttggcttttcgtcacaaactgctggatggtgatgcgctggcaattctgcaataccggcctgaccggctggggcacggaaaagcccgttacgcgacgacggttcagattattgatcccgaccgcctgagcaacccgcagcagaatttcgatatgccgaatatacgcggcggagtggagattgatgcagacggagccccggtcgcttatcacatccgcgaggctcacatgggggactggtgggcgggtaagaaaactatgatatggaaacgtattcagcgtgaaacgtcatggggccgtccggtggtgattcatgatttcgatatggaacgcgggtctcagcacagagggacggggattttaaccccggtagttcagcggttaaaaatgctgattaagtatgaccagtcagaacttgaagcggcgattttaaatgcgatattcagcgcctacattacctcaccatatgatcccaaaatggtcgaatctgcaatgggtgaaacttttgatgatactgaggtaggactctatcaggaggggcgctctgaattccataatgaccggcgtatagccctgaataacggagcccgtataccgacactgtacccaggcgaaagtattgaaactgtaaacgcaacccgtcctaacagcaacttcgaggggtttgagagcgcagttcttcgcaacgtttcatccgcaactggattatcagcccagcaaatcacgcaggactggtctgatgttaactattcctcagcccgtgccgccatgctggaagcctggaaaaccctgacccgccgccgtgatgacttttcaaacggctttgcccaaccgatagcggtggcctttgccgaagaaattcacgatgtggaagatgttccgttaccgaatgatgccccggactttatggacgcatcagcatcctactgccgcgcgcgttggatggggccgggtcgcggctgggtggatccggtcgcagagaaaaaaggcgccatcctcagtatggaagccggtttctcaacactggaaatggaagtggctgaaaacatgggtgaggactgggaagagttggtcgatcagcgtagctatgaacttcagcggtttgaagagctcggattgccgccacccagctgggcagtggcagatacctttgcaccaaaccccgaaaataaacaggaggcgaagtga

SEQ ID NO: 284742 - DNA, 1401 bp, Morganella morganii
atgccaattatcaaagacgccatatctgatctgctcggcattgagccggactggaattggtcagaacacctgcagcaggcttcattccgtggtgtgccgttcggtgttatcagcggtgaaagtgtttttggccgccgccaggctattcacgaatatgcttaccgcgatcagtcctggatagaggatatggggcgcagcaaccggcggatcaccataaagggattcctgattcaggacagcctggtgtatgacgcgccggacgttatcacccagcgcaacaatctggttgctgcctgtgaagttggtgaggccggaacgctggttcatccgacactcggggaaatgaccgtcagtgtgactgaaagcggcctgcgggtgtctgaaaacgcagagagcggccgggtgtttgagtttgagctggtggttatcgagtccggcctgaaagtgtttgccatcaccggcagtgaaaaaactggtgaactgacattcgggcagtggctgaaagaagcagcgcataccaccctgaagacgatcgccatgattaaaggtgaggtcaggtctgtcacgcagatgatgaagacgctgaaacagactgcggacttctggatcaatatggtcagcagttcagttgatgaggtcactaatctcagtaactcactgaacagcgtattcggcagcaataaatacggtcgctatcagaaaggcagcgcaggcggggcggtgtccggtgcgaccggcaagcgcatacatcagggggatgctgatgaccgtgaaattatcgataaaacgctgaaccaggccattattgaccggcaacagctggatgaaacactcagcgcggtcagtgatgcagtatccccggaagatgtgatcgcacagatacagcaggtgtttgtcatcctgataacaatggacggtgacaccggccagaagatgcagatcctgaatacattatcccggttccgcaacctggaatatcagcagacggagcaggataaaagaatcgccgcactgactgaaatgatgctggttgtgctggccgcatcggcgctttccgttgtggccggacagtctgacccgacaaacagtaccgaggccgccggacatcagcgggaagtctgtgaatcccttgatgatgccatgactatcaccggggatctggcgctggatgacatctatcttaccctcctgaaccggcgtgaacaggttgttattttcttcactgataaaggttccgaacgtggccgcctgtcgtcttacgctctgccgtcagtgctgccgtcgcttaatgtggcgaaccgcctgtatcaggatgcaacccgcagtgatgaactggtgatggagattcagccccggcatccggcgtttatgccggtgagatttaaggcactgaaaaaatga

SEQ ID NO: 284743 - DNA, 648 bp, Morganella morganii
atgataaaaaaaatggccgtaatggtttttctttttccattttgtgcgagctcggcaagttttgattgtgcaaaagcatttagtgatgtggagaaactaatctgcaacactcctgagctatcaaaggcagatgatgaattatatatagactatcttcaggctaaaatggtcactggcaacagtgatgatttcaagacgttagtaaaaaagaattgggatttgcgtgtagaaaactgtgatacaaaatcatgcctcatggactggtatcacaaatcaggaataatttatcggaatattgcagccaatcatccagttaatgaacaagatgtttccgggaaaagttattattatggatcatcgattaaattgcgaggaactataaaagttgaatcagatggttttccttccatcagaactgatgacattatttctgtttcatcaaaagacccagaaccggaaaacggagagcctgatgagtggggtattgcggttatgcaattagctgcatctggtaatggtcaatataatgaacttataaaaaataaagataaaaaagccattattacatgcaatctataccatgctcatactattcatcataaaacaccggttgtttgctgggtggaagggtttcccataattaagtga

SEQ ID NO: 284744 - DNA, 402 bp, Morganella morganii
gtggatattgtgctgttagtattatcgtgtatatttctgattctgttatttgtatcattttccgataaaccgacatggtacaggagtttatccagaatttactctatagtattttctgtttcattgttttctatatcagtatttgctttttttattcatgaagtgccgaagtgcaacagcaattataattggttttataatgacaacggaactctttgttataacaaagaaaattactcaagcttaattgcaacgaaacagaataacaaaaaactaaaagtagtcgaatttaccataacttcacccgagagggcgataataaaactggataatgacagtaaagcagtagtatacagcatcaataataaacgggagtttggcccgtattatggagatgaatag

SEQ ID NO: 284745 - DNA, 945 bp, Morganella morganii
atgtcgggtgcggatctggtcggtgatgtggtcgataactggctggccaacggtcagaacctgccgaccatctgtttttgtgtgaccgtcagccatgcaaatttcgtcacaatagcgtttaaccgggcgggtgtgaatgctgagattattaccgcagataccccgcatgaagaacgccatcttatcatccaccgctttgagcagggcgggacaaaaatcatcgtaaacgtcggcacactggttgccgggtttgacagtgatgtcaggtgcattatttacgcccgtccgaccaaatcggagatccgttgggtgcagtgcctcggacgcggactgcgtaaagcacaaggcaaagataaatgccttattttcgatcactccggatctgtgcaccgcctgggttttcctgatgatatcgaatatgacgaattgccgggtaaaagtgacggtctggaagattcatcgtctgtccgtgaccaggaaaggcgggagaaaaaaccgaaggaatgcacatcctgtcactacatgaagcctgccagtgtttacgtctgcccgaaatgtggatttaaaccgctggccggtgaggacgttgacgttgatacctcccgcaacatcaaaaaaatgggtaaatctgaaaaggtttacaccacaaaagacaaacagagtttttactctcagctcaaatattaccagaacatccgcgctgccgaaggaaagccggtcagtgacgggtgggtctccaataccttcagagacaagttcggtgaatggccacgtagcctgcatgccacaccgcaggaaataaccccagaggtatccaatttcatcacacacaaacgtattcagtgggttaagcgtaaacagaaaaccgaagcactgatgccgcagagaatcgcagatttaaaacagcaactgaataaaaacgcacagcagggagaattattgtga

SEQ ID NO: 284746 - DNA, 1317 bp, Morganella morganii
atgtgggaagatagatttgaaagtgcaactgatagtgggtttaaacgagatgaatatggacgggatcgcgccagaattattcactctgctttttttcgaagattacaaggtaaaacacaagtattaggcttgggtgaaagtgatttttacagaacccgactgacacattctttagaagtagcccaaattgcagggggtatttctgagtttttgaaagtaaaatataaagataatcaagatttagttgaaatagtacctgaacagagtttgatagaatcaatagggttagttcatgatatcggacatcctccatttgggcatggtggagaggtcgcattaaattatgcgatgagtgatcattctggttttgaaggcaatgcacaaacattaagaatttgtacaaaattaggcgagtactcagataatggcggccttaatttaacacgaagaacattacttggaataataaagtacccttgtctctatagcgatgtggtaaataaaaataaatataaaaaaacaaaaacaagttgtgatattaactttattaacttggatgattataaaccacctaagtgtgtttttgattgtgataaggaaaatatagactggatactttctaaatttaataaaaaagatagagagatattcatgtcttctaatgaattgtctgaaagtgatcacaggaaaccactgtataaatcatttgatgcaagcataatggaattagctgatgatattgcatatggtgttcacgatttagaagattccattgcacttagattagttaatgaaaaaacttggaggtcccaagttgttgatgttttgacggattctctaaaaaaattcccattatcagatagaatggttgaatatacgaaccttctattttctggagaaaataaaacaaggaaaaaagcaattagtgctctggttaattattttgtaacaaaatcagaatataaaaaattaaataaatttagccatgaattattagactatcaagctgtatttccagatataattaaagaagaacttgatatacttaaaagatttgttgttgataatgttattaaaacacctgaagttcaaacgttggaatataaaggacaacagatgatactaaagcttttcgaagcaataaaaaataatccctcaagattattaccaaaaaggtattatcaaagatataaaaatgaaggtgaaaacctaagggttatttgtgactatcttgctggaactacagatgattatgccacaagactgtatcataaaatattcactccatcatcaggttcaatttttgataggctttga

SEQ ID NO: 284747 - DNA, 327 bp, Morganella morganii
atgtccgtaaaacaaaacgagattgatgtttatcaatctgcaaggttctctaaaagctgtagaaagttatctgaaaaacatctaaaaatagttgaagatgaaatagatcgaattatcgacaatccgttaataggtgaactaaaaaaaggtgacttagcttaccttcgtgttcataagtttaaattgaatgaattattagttttgctcggttattcatggatttcatcaaaactagaactatatcttctctgtataggctcacatgagaacttttatgaaaaacagaaaaaatgttctaaaactgattcaaaactaattaattcataa

SEQ ID NO: 284748 - DNA, 282 bp, Morganella morganii
atggctaacagggattctattgtacaaatttttaaaaataaatatggaagaacagagtgttacaaagagattagatccgtatcacaaaaattttattgggctgacgtattaaaagttgcactaagttgttgtcagagaaagaaattaaaaggaattagtggttcagttaaaaaaatagtattgatatctgcgtcaagagatgtttttcatagatatataaataaaaagtatgtgaatttcttgcagactgaattattaggtatggaggtgagctatgtatga

SEQ ID NO: 284749 - DNA, 243 bp, Morganella morganii
atgattgatatgcaaaaatacaacaaggttactgatgatatcaatgatgttctggcaatagtgagcatgcattactttcctgatagcaccagacgacatattgaagaaataaaacaattgttactaaatatcaaatgcaatgtaattacaaaagatactgacattgaagcactgcatttttggatagatggtgcgctaaccatcataagtatcgaacagtttcaaaataaggccacattatga

SEQ ID NO: 284750 - DNA, 726 bp, Morganella morganii
atgactcggacagtagaggtaaaagatcctctggtgaaaggctttgaaatttttcagtgggtcaattacgccagatttaccagtgagcatttgatgctaatttttagtcctcatattgtcccatacctgttccacttaaaaaaattcatcaaatacaatctggagcatgttaaagcctttgaaaacaagtattccatgcgagtgtatgagtggttactcaaagagttaacgcaacgcaaaacgcacaaggcaaacattgaaatcagtattgctgattttaaatttatgctgatgctggaaaataactatcctgaatttaaacaccttaagtatagggttctagagccggtcaccaaagatttaaacacttacagcaacatgaaattgaatatagataaacgaggtcgccctgccgatacgctgatttttcaggttgagttagacaagcaaattgatttggttactgagttggcgaaagaaacaccgtctaaaacgtcctctatcacaccgcaaggaaaagtaagcacctcagacgatagattgcattctggattaataaaaacgctctgcgaggcttctgaggctaaaatacagcttagtcgatttgagacgacgtttctggcagatatgcaacataaatatgatcttaatggctcattttcatggctgagtaacaagcaaatggcaacacttgagaaaattctgagtaagtttaaaaatatctaa

SEQ ID NO: 284751 - DNA, 561 bp, Morganella morganii
atgtcgcatcttacatcaacacatagatatcaatacatacaagataacactaaggatgcggaaatgaaaaattacacagatccatcaaccgtaacatcacctaaatgggctggaatcaaaattgaggaagttatattagatactggattacatggtttttctgtagcaaaactttggtatgagggcgaattatgtataggaataagatggaatggcacggataaacacataggtatgccttcagcaagaggaaacccaatatggtttatcatgccaaatgagttttctgaagatatagaattaaaatctaggtctttagttactgataatgtagataaaatagctggatttattagagaaagcgtaaataaaaataaaacatcaaatagcaatgattatatggctagtgtaaccacgaaaattttactaagtgaaactgaaaaaaatgaacttaaaagcatattagaaaaggaaaaaatctatttccctactccagaaacatgcggaggtaatcctacaattgatggtgaatatagttacaaagttttttatattaaatag

SEQ ID NO: 284752 - DNA, 162 bp, Morganella morganii
atggcgcaactgctgatggatctggatattgagtattaccaggggccggaggaattctacccggttgatgcggatccgctaaccggtatcgacatcagcgttcagatgcctgacggcagcccggaacatcacgtctccatcgacctgactaatcaggagtaa

SEQ ID NO: 284753 - DNA, 168 bp, Morganella morganii; identical to SEQ ID NO: 281037

SEQ ID NO: 284754 - DNA, 1482 bp, Morganella morganii
atgaccgtgccatttgccactattccgcagaatttgcggaccccgctgtttttcgttgagtttgataactcgatggccaacaccgcaaccgccacccagcgcacgttgttaatcggccagatgctggacggcgcggcgggaaaagacagcattcctgagcgcatcacatccgggatgcaggccgcagagcgtttcggtcgcggatccatgctgcacacagaggctgatgcgtatttccgcaatgataccgccggtgaggtgtgggtgttaccgctggcagatactgaatcgcagacagccgccgccggtaaactgaaaattaccagtgctgctaatgataccggtgtgatttcactgtatatcgcgggtatccgcgtgcagatggccgtcgtggacacggacacagaagaagtgatcgcaaccggactggctaaagtgattaaccgcaacgcgaacctcccggtaacagcagcagccgaggcagatacggttactctgacggccaaaaacaaaggcgctcacggtagcgggattgatatccggctgaactacctcgggttgaccggtggcgagtcgacaccgtccggttttgaaatgaccgtcacggcgatgtccggcggtaacggcgctccggatctgcttaatggtctggcgaacctgaaagaccgatcctttgattttatcgtgaacccgtataccgatacggcgtctctcgatgtggtgaaaacctttctggcagaccgctgggcgtgggacaaacagttatacggacacagctacggggtgatcaccggcacttatggtcagttggctgatcttggtgaaaagcggaacgaccagcatgcctcactgctcggggtcaacggttcaccctcaccggattatcagtggagcgcggcatataccggtgccattgcccagagcctgcgtaatgacccgggccgcccgttacagacgctggttatcagtggtgtgctgccgccggacgacacgaagattcttgaactgaccgagcgtaacaatctgctgcacagcggcatttccacatttaccgtggacgatgacggtaccgtgcgggttgagaatatcatcacgacctaccagaaaaatgcctacggcgacaatgacgacagttatctgcaggtggaaaccctgtatctgctgatgtttgtatcacgctatctgcgtacccaggtgaccagtaaatttgggcgtatgaagctggcagaagacggcacccgttttgcgccgggggctgcaatcgtcacgccgaatatcattaaagcagaactgatcgcccagtatggcttcctggaatttaacggtcatgtgcaggacgcgaaagggtttgccaaaggcctgaaagtcgagcgcaacagccagaacccgaatcgtgttgatgtcctgtggaccggcaccctcattaaccagttgcgcgtgtttgcgttgcttaaccagttccgcctgatgccgggcaactaa

SEQ ID NO: 284755 - DNA, 1047 bp, Morganella morganii
atgaatattttcgataccaacgtgttaattcaggtcgtcccaaatctgatgaccagtcagaactggctgctggataagtttttcccgaatatcgtggaatccgataccgaagaggtttccattgatgttgatgtcggtctgcgccgtctggcgccatttgtttcacccctggtggagggagagttggttgaatcccgtaagcttcagaccagcagttttaaaccggcatacatcaaagataagcgtgcgccggatctgcgtaaacccatccgtcgtcagattggtgaacgcatcggcggtcagtacactgctgctgaacgtgaaatgctgaacctccagtttgagataactgaccagattgacatgatcaatcgccgcctggaatggatggcttccagcgctcttcagaccggtactgtgacagtgacaggtaaaggttatgaaacacaggtggtggacttcgggcgttcagctgatcttactatcaccctgagtggtgctgataagtggccggtgaaagtcgatgccggtaaaaccaatacccagccaagtgatgatattgaagactgggcgcagcgcatgctgaaagaatccggggcggtggcgacagatatcgtgttcaccacaaaatcatggaaagcgttccgcctggatacaacgattaaagacagtgccattgttttccctgcacagtctccgttcggtaaccagattaacccgggtgcccaggttcagaaaggcggcgtttataaaggccgctggggtaactatgacctgtggttatataacgactggtttattaacccgctgacaaacaaagaagagccaatgatcgctgacggctcagtgatcatgtccggtgcggctttgatggggacccgcgcatttggtgccatcattgacccggcattcaattacggcgcgatggcttatgcaccgaaatcctggctgcaacatgatccggcccagcgcatgcttatgattcagtctgcgccgctggttattccgagtcgtgttaacgcatcactgtgtgccgttgtggtttaa

SEQ ID NO: 284756 - DNA, 246 bp, Morganella morganii
atggactttgtccacggttacaaagaaaagccggttgccggttttatcgcgatgcgtgtccgtgattccggcggtaccactgtggcggattttaacggcatgaccaatgtgaacgtggtggccgaactggcgaacggcaaaaccatcatcggtcaggggctctgggttgttcagactcaggaagtaaacagcgaagacgccgtgtttgacgtgcgttttgaaggtcgttcggtaacggagaactaa

SEQ ID NO: 284757 - DNA, 552 bp, Morganella morganii
atgtggagaagcaatggtaatttttctgaactaatgttagggaagggaaatccagccttaaacttcatctatggcattggtgtttcctatttaacattagtgcaatctgctgatattgtatcaaataatattattggggatattcagccatattatttcttattcagccaacctatattagttatagataaaatcttcaacttaaatatagatccaactctcatcagttactctcattttatatcaaactactccaacgctatacagtatagtgaaggcgcgggcttggggggaagttatattgcagaggcatattcattgggaggatatactgcatgcttcttgctggcatttctattaatgagcatgacctattatggatatttaaaatcaaaatcagactggagagtctattatattttttacacatcgctaccctctattttattcatacctcgggaaacatatttctattatattccatttgtaataaaaggggttattgttgttcttatttttagtttactaataaaaaaggattgtcatgagtga

SEQ ID NO: 284758 - DNA, 525 bp, Morganella morganii
atgtttagtgaggacaggaaattttcgctccagttaggcaacaacggttatttgtcactgtataacctgaccttggataaatcagttatgacgtggtcgccaaacggtgagttggtatcaggggacatcggatttgatcgggtgaaagacttgaagtctgccgcgaagagagatgtcggaaacggagctgggcagattcctgatatgagcttcttcccgctaagtgggatcgggacagataacctgattgcaacgtttcctaacggattaatcattcaggttttcaagcgaacactggcaaataaagcggctgcgggcgagattgaaacaattcctctgtcatatccgatggcattccctcggggcgctgctgctgttttttgtacaaagacatcatacgcacagacgctggttagttgcgaaaacactactgcgacaggcttctcggcagtaacagtaaaagtttttgaatctgccggtgcgacattatcgaccgcaaactttttggctatagggtggaagtaa

SEQ ID NO: 284759 - DNA, 333 bp, Morganella morganii
gtgatcgtcattcactgtgactggtcacagcgcatcaaggatgacgggctgaaagtttccattattacctacgggaaccgtaaggcggaaagtaacccgtatgtggcgctgagtgatgaagcacaggccgctattcagcacgatgtcgatgaaatggggcgtctgtttgtgagcactgtttcccgtaaccgcggactgtctgagacagtgatccgcaatacacaggccgcctgttatctggcagccgagggcgtacagatgggtctggctgatgtggttgccagtcctgatgtcgcatttcaggaactgatgaaagaatccggagtaatttaa

SEQ ID NO: 284760 - DNA, 339 bp, Morganella morganii
atgggcgttgactgggataaacacctgctggggccgctgcataacgtctttgcggaaaaagcgcgctgggaaccggtgaaaagtgccaaaggcgcagaattttacgacatcgacggcatttttgaccgggcctattcccagaactacgaaagcactgacggtgaaagcggtatcaataccacccgtccgatcctcggtgtacgcgatgttatttttactgtgcctccggcgaaaggggatcgggtatttgtctacagcgtcagcactctgtttgtggtatccgatgtgcagccggacagtcacggcgggacacacctgatcctgaataaggtgaaataa

SEQ ID NO: 284761 - DNA, 342 bp, Morganella morganii
gtgaatgggctttttgccgcgttcggcataaatcaaatcaaccaggtcaaaacaaccggccacttcaccgccgggggagtcgatatccagacagatacccttcacttccggatcgttaacggcggtcaggaagacccggcggatgccgtcataaccggtcataccgctgtacggccgcagtgtgccgagtttctgaaccagcgtgccgtaaaccgggataaccgcgatgccctccagcacgtcatacccgctgtctttccgggctttacggctgaaatattcgtcatcgtcttccatcatggcactgcggatctgtgtgataccgagccgttctgtcagtga

SEQ ID NO: 284762 - DNA, 276 bp, Morganella morganii
atgaaaacgaaaatagccgaagccatgtcatatggcttagctatattagcaagtaagcactcgttgatcgggtatgatgatgtaaaaaataaatttaacttcatcttagaaacgtcacctgacacttttaacgtgaacttagataggttaattaattacgatatagataagaatagtattatagaaaaatatgaactattttattctccacggcgttttcatggccatgaattagactttatttatactaatgccaagaaggtaaaagatgaataa

SEQ ID NO: 284763 - DNA, 348 bp, Morganella morganii
atggtgaacgggcagagtaacccggaatcacagcagaacgattctggtgataagcagggtaacaaaaccacagcagaactgaataccgcggctgattccggcggcggtaatgccggtgatgagcaggattcagacccggaacatggggctgatggtgtatatgtggttgctaaaggccgctgtgtacagcataacggcgaactgtaccgtgagaatcagcaaatcacgctggatggtaccgatgctgaccgtctggtaaaactcggtgcggtcatatcactggaggcagtacggaaaatgctggcgaaagccaacccgcccggcactgtaaccattaatgggcgttga

SEQ ID NO: 284764 - DNA, 246 bp, Morganella morganii
atggataagttcactgcaccgaaaggagtgactcacctgattgttttcgctgatgcagactggggcagcgcaaccggacatgctgcggcttttgcctgtgccaagcgtaaccttgttgcaaacaacgatgtggagaaggtcagcgttcgctggcctgataaaggtgactttaatgacctgatccgcgccggaagcgaagttcgtgaactgacattttaccgggaaaagcaccaggaggccgcgtaa

SEQ ID NO: 284765 - DNA, 954 bp, Morganella morganii
atgaatatttcaatacttcttgaacgcgcattacctctttccaaagaaatccttgaccgcataatatctggtgagttcaaagtttatggaggtacaattcgtgatcaatttggcagaatagtcaaacatctggtttttccccaacaagggcaagatagtcaagctactcattttgacgagctatcccaacagataaatacaaccgttaatcatgcacatacagaaattatgaatcagttagccaatcagacagctattctgtcagctgttaatatcattagttcccacaatacgaataaaactctaggaaaaaaaattgatgaaataggcgataaaattgatcgtctagataagaaaacaacagagatacatgatgaaattgttctaaataaaataattaagattagtgagataaaaagttcatcgttagcttcatttgaagaagcattatatgctaataaagtccaaatagatccgcagtttatccgattacatataatcccactgagaaatatttttaactcccttcatggagtactggtagatatactgggagaatttagtaataaaaaaattattgataatatcgagttattaatgctgattgccgaccttaaaaataaatcatcatttatactagggcagacacatattcggctaggtgaggatgatattgcccaagaatatttcaacagaaatataaattcaaatgaaaatttgcgatccagattagaatcattgaagaaaactggtgtatttagccctcatataataaatgaagaaaaattattaaagttaaaaaatgatgttgataattttaaaactttggaattacaatctcagatcctatcaaatcaaaacaaattatccattgctcttaagttgccgcaccacctattactgaataattcattcaatacaattcacatgattgaccccatccctagagaataa

SEQ ID NO: 284766 - DNA, 669 bp, Morganella morganii
atgaaaaatattgactttgcacgtaatgacatagacctctacccagtattgcaacaagctactcttgatgaaaaagcgttcttggcagaaataatttctgataaatactcttcgagtatagataaaaatgaactcgatgcactgaaattaacaatagaactacaaagaatgggtggtgatagtttagtaaacttgtttcgtaaccgtggagtcagctatcgagagatagcagtcgatgttgccaccaaggtgggggcaaaaattgattcgaaaagtaatattataaaaatagaagaactaatagctgagcgcgtaattgaaggttataaagaaaagttaactgaaaaagaacgaaatgagttcgaagtagtactccgtgaaagtatagaaaacggaaagcaggctatggacgcaaaaaatgcagcggctcgtagtataattggaatgacgccagccctattggctattggtagttttattctacgacgtggagcaattacaacgatccctgtcgccggccaatttctaggggtgatcacaggagttgctagcgtcgttttagcattcactgggacggcttatagtgttaccattccctcagtgttaattgttgggagtattcgttctcgtttaattgccgaaaaatttgcaacacaggtagaattatga

SEQ ID NO: 284767 - DNA, 1320 bp, Morganella morganii
atggggagtgaatggaaagattgtgaacttggcgatgtaatagagtttaagcgtggctatgatttgcctaagacaatcaggggcgcgggagatatacctgtaatatcttcttccggcaagtccggttttcataatgaattcaaagtgatggctccaggggtggtcacgggacgatatggaactattggtgaagtattttatttggacactaatttttggcctttaaatactacattgtatgtgtgtgacttcaaaggtaatgatcctctatttatttattattttctaaaaactatttcttattcagatttcatagataaggcagcagtacccggtataaaccgtaatcatattcataaagctaaagtcaaagtccctaaaaatatcgattgccagcaaaaaattgctaaaactctaaaggtattagacaataaaatttctctcaacaatcaaatcaaccaaaccctggaacaaatggcacaaacgttattcaaatcttggtttgtggattttgatcctgtcattgataatgcactggatgtgggattttttgagcgggatttagcatttcctaaagagttattacgccgggttgaagtgcgtaaagtggcgcgtgaaggttgtggttttaagtcactaccggaggatatttgtaaactatttcctgctgcttttgaagagtgtgctgagccttcacttggccttggcggatgggttccggaggggtggaatatcgggtgtatttctgatgtggctcattatagatcaaagcgtattgagacatcagaattaacgctgaccaattatatttcgacggaaaatatgctttctgataaaaaaggtattcagcaggcagcctcacttccaactgtaaatagtgttcctgcatatacatcgggtactgtactgatttcaaatatccgcccttattttaaaaaaatatggttggcaaaaggagatggtggttattctaatgatgttctgggattcgaggttaatgacctgaaaactgaaagttatttgtttaatttaatgtatcaggatacattttttgactttatgatggcaacctcgaaggggtctaagatgcccagaggcgataaaaaagcaattctgggatggaatattgtggtgccaccattaatcctaagaatatttttttctgaaaaggtgagtgatttttatactgttggtcatttgcgggatcatgaaaatactattttgaccaatctccgcgataccttactcccaaaactcatatccggtgaactgtccctgagtgatattaacattgattctgtggacggcgcgctggcataa

SEQ ID NO: 284768 - DNA, 321 bp, Morganella morganii
gtgttcatttatctggcgattgcaatgggggggtctttatacctggatgtattcagctttatgagtgatgcctataattacgggtatatcgctgaatcaaacaacatctttgatatattgagtactatcgtcacaattgcgatggctgttttctggattgtctgggcatttaagatgaagagcgctttagaatattatgcagcaaaagaattcggcatttctctgcgtcttaacggattctggacatttttatttcaatacttctatatcaactactgcatgaatgcgctggaagaaattttgccaaggaaaaaatgctga

SEQ ID NO: 284769 - DNA, 1734 bp, Morganella morganii
atgagcgaaattaaatttttacaggaacagcattatttacagcaactcagccgcgagtttatccgcgattacccgcaccttgctgatgttctcgacccgcatgatgaacagagcggcagcctgctggaaggatttgcctttctcagcgcccggttgcaggaaaaagtggatgatgcatttcctgaaattaccctgccgctgttacagcgcctgcagtcccgcgcgataaaaggcattccggccacggcggttgtccgtttcgatgatcaggagcagattgatttcccgctggctatccccgcaggtactgtggtaaaaggcgcggcggaggaaatcttcaccacctgtaatccggcgctgttacagccttacacgttattgcgccgctacgtgacgcaccacccgtcaaaaagctgcctgtcgctggaatttaaattccgcggtaactataaagaaccggaaaccgcacaactctcctgttttcttgatcccgccgtctcttccgccggtattttattattgtggctgagtcagtattttgatcatatcgaactggctcacggcgatatgctgtatcacggtgatgaaacccggttcagctttattcctcagataggaaaaaataattcggtattagaaggcgcagatgaaaaaccgaactggccgcaaaaactgctggaagggttatatatcgatcatgtgcaccattttatcaatattgatgttccggcaattgttccggaacttgactgggtattatcagacaccttcacactgaatatttatttcagcaaacagctgccgctgcgtaatgatcaactgacaaatagttttctgcttaattgtgccgccgtggtgaatcaggaagaacaaaaagaaatcatcctggattttcatgaaaatgaagcagtttaccgcctgccgctggatgatgctcactacatcacggaactggaacatattcagctggcttttgagcctcacgaagaattccgcggcgttgtcgcggatttctacccggtaacacacctggcaccggcttcccgcctgctgccacaatatcaggatgcctggttttacgcgctcagcatcgataaaaccatcaccggccagaatcattattatatccatttttatgataatcacggcaaagcactgaccgttccgccgggcccgcatttccgctgtacttaccgctgtattatcagtgcaccgcaaagccgtgcggaggatatctgccatctcagcccgctgctgccggatctgctggaagccaccggtatcacacaatgcacgccgtgctacccgccgataacggataatcacgcttactggaatctgctgtcacactacagtgccaacagctttatgctgtcgtcagtggattcggtaaaacagctgatcagcgactatgtgctgtatcaggatacagaccggcagcgctgcaaacagataaaccagctgctgagcggtattcacgcggttgattcagtactggatgaccgccttgtccggggaaaaccatatcgctgtctggatctgacaatgacactggatccgcataaatatgacaataccggcgatgcctttatgtttgtcatgcatttatatcacttcttccccttctgcctgtcagaaaatatgatgctgaaaatgaatgtgcaatttaccgataatgatacggtctggcatttggcgccttatttactgaacgggtataaatcactgatttaa

SEQ ID NO: 284770 - DNA, 417 bp, Morganella morganii
atgaattatgtttgtcaggaaggctccatcatactgcctttatcagactatcgtgataatagcctgcatattattaagtttccggaaaaaaaagccagcctgtcactgacccgtgatgacttagcggacggacagactgcagagcactacctggtgtcacaaattgctgtgatccgcaaaggcgtcaaattgttcgccatgactgaccctgtggcatttacaacagaatctggtgtgaagggatgggctttctactgtgaaccggaacaaaaagggacgcacttatatcagtacattgccggttatgaactggacggcacaattctggtgatgacgtattgcctgcttcatccgtttactgattctgatttacaggactggcagacgctgaaactgcattttacccgtacagtctga

SEQ ID NO: 284771 - DNA, 1101 bp, Morganella morganii
atgtcgcagcgccgggtccgtgacagcgcggtatgccagcactatcactatgacgcggagcaccgcatcactgcagtgacctttgagcatgacccgcagggaaaccagcgggcagaatatgattacgacatcctcgggcgcagaaccggcaaacgggtctggctgtccgcacaggcacagcggctgaagcagtccccggaaaaccgggagccggaagagacggtgcagttctgttggaacggcctgcggctggcgggtgagaagagcagtaaatccgcacatctgaccctgcattacgtctataacagcggcagctataatccgctggcacggatagaaagctttgatcatccggaaaaacagtccacggatatcagctattaccacatcgcccttaacggcttaccggaagaagtgacggacagtcagggacgtattatctggcacggtgactacagcctgtggggaaaattaaaacgggaacagcacccggttccgggattccggggtcagcagaacctgcgttttcaggggcaatatttcgacagagaaaccggactgcactataataccttccggtactacgcaccggatacaggaagatttacccagcaggacccgatagggctgatgggcgggttgaatctgtatcagtatgcgccgaatccgctgtcctacatggatccattaggattaagttgttctttcgatactaaatcgaatcgttggcgtaataatgaaacaggacgtttcactacacgaccaacagatccttctgacttagtgaataatggtagaattaataaggctgatattgacgcttgggcaaatcaaagaggaacccctaatacatggggacacgatcctgcaaaattccctggtggagggtttaaatatgatgcaggtagttatactgtgcacggtcatggtgctaatccatcagcggcagctaaattcccaaattccaatgccgcaagtggtcctgcagcgagtatgaaaaatacttcgactggtgaggtatttagaactgatggcacatggggagcgtttaaatcagatcctaatggcgctcatattcctcttgatggttcatcttattga

SEQ ID NO: 284772 - DNA, 330 bp, Morganella morganii
atgaaattacaagaaataaaaaataaggtttcatcgctccctacaattatggatatatctgatgagttgctgttgattaatgagttaatgactgttccatatgctgatctggctaaagatatggatactttaaaattcattataaatgcattggatttatcgcatactgactctggttttatggagttgacaaaagaaaatgagagtgtgtttatgagtttttattgttggttaaatagagcaaatagtgaggttgatttagggttaaatgctaatgtaatagacagctttagtttgactgttgacgatataaaaaaattaatgtcataa

SEQ ID NO: 284773 - DNA, 213 bp, Morganella morganii
atgaaagaattaactgtccgtgagtgtgaagctgtcagcggcagcgggttagccgatttattccgtccgggaaccggcaatgtttctccgccggtaacgccggaaaaaaccggaggtacattgattatcggcgggggaatcggtttagggtttggaatttttccgtttatgatcggaaagttcattggcggaatgatcaaaattcctttctga

SEQ ID NO: 284774 - DNA, 1251 bp, Morganella morganii
atgtctttttcacaagcagtcagcggcctgaatgccgcttcatccggtcttgattcgatcggtaacaacattgccaactccgcaaccaacggctttaaaggagcgcatgcttcttttgctgatatgtttgccggttccggtgtcggtctcggggttaacgttgcggcggtttcccagaacttcaaagacggtgctatcacccgtactgaccgcgctactgatgtggcaatttccggtaacggtttcttccgtctgctggatggtaacggtgatgtggtttacagccgtgacggtgaattccaccgtgacaagagcggcaatctggtcaacaaccagggcatgatggtcaccggattcccggcgggtcaggatgctgccggtaacgttactatccagacgggcggcattccgcagatactgaatatcccgaccgatatgatggacgccaaagcgtccgccaaaggcgagttaaccatcaacctgaactcggacgacaaagtgccgtcagtcagcacgtttgatccgaataatccggacagttacaacttcagtaccacaatgacaacctacgacagtcagggtaatgcccatgaagtcgcggtttatttcatcaagaccggtgacaataaatggacggtaaaagccaaagacagcagtgataaagccgccacagttaaagacctgggtaccatggaatttgatgccaacggtaagctggcgaaaatgcaggccgatgacggtaccggcacaatgacagatgtggataattttgattttgcttataacggcctgaatggtgcggctaacggcaatattacgctggatatgagcaaaacccgtcagcagaaagtctccgaatcatccgtcagcaaaattgatatcgacggctatcagtccggtgaatacaccagcttcaaaattgagaatgacggcaccattaccgccaactattccaaccagcagaagcggactgtcggcaaaatcggactgtctgcgtttgccaacaataatggcctggcatcgcagggcggtaacgtctggaaagccaccaacgcctccggcaacccgatggacggcgttccgggcaccggacagttcggtaacctgaccggcggcgcggtggaagcctccaacgtggatatgagccaggaactgatcaacatgattgtgatgcagcgtaactatcagtccaactcgcagaccatcaaaacgcaggatcagatgctgcagacgctggttaacttacgttaa

SEQ ID NO: 284775 - DNA, 153 bp, Morganella morganii
atgactgagttcgtgatgatgctgaaagcgaaatatccggatgagaaaggctccgcgaaagatgagtatgatgccatcacaaaagcagacgatgcccgtaacgatgatctgattaggggcaggcgccggttggtgagcaggaaaaaagcgtga

SEQ ID NO: 284776 - DNA, 357 bp, Morganella morganii
atgaaaaagttattgatagtatcagttgcagccatgtttacctttggtgcttatgccggagaaggtaagggatattcaatagaacaactacataaaatgattgaatccgggaaatatccggctgttactgaatacgaagaaacaggcggtggtgatgttgcggatataaaatcatgcaaggacaggatactgagccgtgctgctaatttttcagaatatcccattaccgttgagcgggatattgaaaatgaagtttacgaatcaacagtatggatgaacttaaaggcgcaaaaagttatttgtgagattaaagatggcaaggctaaagggacgcagtttgatgcatcctataagtaa

SEQ ID NO: 284777 - DNA, 417 bp, Morganella morganii; identical to SEQ ID NO: 282013

SEQ ID NO: 284778 - DNA, 1263 bp, Morganella morganii
atgtttgcgctggtggatgtaaacagcttttacaccagctgtgaaagagtattccggcccgatctgacaggtaagccggttatcgtcctgagcaataatgatggctgcgtgatcgccaggtcagcagaggcgaaagccctcggcatcaaaatgggggcactgtattatgagtgtcgcgatttttgttataaaaacaatgtgacagtattcagctcaaattatgcgttgtacggcgatatgagcagccgtgtgatgacattgctctcatctttcgcacccgccacagaaatctattctatagacgaagcctttctcgattttaccggcatgaccaggatattcagcccggaagattacggctgtgagatacaggctgctattctgcagaaaacacaccttccggtcggtgttggcattgcaccgacaaagacactcgcaaaacttgccaaccatgcagcaaaaacatggaaaaaaaccggcggagtggtcgacctttctgataggctgcgccagcgtaagttactggcactgataccggtcagtgaagtgtggggtatcggtcggcgaatatcggccagactgaacaccatggggattcgcactgcattagatttggcgaacgccgcaccggcgactatccgtaaaactttcggtgttattactgagcgtacgctgcgggaactgaacggagaaccctgcatcaagctggaagaagtcagaaaggtgaaacagcagatcctctgctcccgatcattcggtaccaaagtgacggatattgtcacaatgagaaaggccgtgtgtgaatatgccgagcggtcagccgaaaaactccgggaagaaaagcagcgctgccggatgatcgggttgtttgtgcagaccagcaggcacgcgaacgggccggattatgcgaacagtgcaaatatttcactcgagtatcccagctgcgacacgcgggacatcatcaatgctgccacgagagcactggatagtatctggtgtgacgggtaccggtattataaggcgggcatcatcctgtcagatttcactgattcagccgtcactcagttcgatatgttcgccaccaggcagccattcaaaaacagcgacgagctgatgaagaccatcgacacaataaacaacagtgggctgggccgtgtgtggtttgccggtaaaggcagtgacagcggatacaagatgaagcgcgaaatgttgtcaccggcatacacaacaaattttagtcagttgccggtggtaaaaagttaa

SEQ ID NO: 284779 - DNA, 255 bp, Morganella morganii
atggaaaactacgtatacatatcaggggtagttatttcggcggctctgattatttatattctaatcagtaaacgggtgccgtcgaaacgaaaagtggtatacggttttgtattatttacctttattctcggatttcatgacaccagacagaaaaatattctggcacaacaggcatcagaacaaaatgaccgcaacagcatagtgctggcggagaatgatcaccagcctgccgcatcagtcataacaggaatgtaa

SEQ ID NO: 284780 - DNA, 1422 bp, Morganella morganii
atggatagcaagaaaggtacgtataacaacccaaaatcatggtatgacgaaggtaaggttggtgatgtttattattatcaggagctgagtttttatttcaaaataaaatataatggtaatccatcagaaaagaattggtatttccctacatcggctgaaggaaataaattttgggattttataggatattacgccggcacgatgtcagaaccaaaaatatggtcagaatatggtgcagtggggtgtgtttattatgaaagtgattacggatatttacgtttaaaaaaagagggcaatccggaagataataaatggtattatccaggtaatggcggttcaaatgaacattgggattttatcagctggagagcaggaaccccggcagatcctaaattctggcatgatgaaggaaaggaaggtgattattattattatcctgaatattttatacattgtgtttttaaaaaaaatggcaagccatctgatcataattggtactttccgacggatggaaaagataattcctactggcgtaatatgggcattttgaataagaagaactggctgagtcttattgatggtaatttaccaattaaccagatatccctgcccggaacccatgattcagctacaggtacatattccgaaggaattggcgaaggcggaatggtaaaaacacaagatgattctgtttacgagcagcttaatgctggcatcagatttattgatgcacgttgtcgtcatatcagtaattcatttgccatgcatcatggtatgatatatttagaaaaaatgtttggcgatatattaaatgaatgcaggcgttttttgcgggaaaacccgagtgaatttattcttatgtcagttaaacctgagcataccacagaaaattgtacccgtacttttgaagaaacatttaaacagtcttactatgaccccactttgtggtttactgaagatcgttttcctcttttaaatgaagtcagaggaaaaattgttctttttagtcgtttcggcggttctcttggcataaaaacccatggttggaaagataatgccacatttgatatggacgggagaatgcatgtgcaggatgaatatgatcagagggatgaggtcaaaaaatggcatgcaataagaggcgcatggaattttgcggctgacagagggagaacggactggatgacgcttaattttaccagtattgcatccgatttttggtctactacaagtatcagagactatgctgaagataaaaatccggagcttgcaaaccacatattccagcgttatgagcacagtggtattgttgtctctgatttccatcaaatcgggaaaatttccagtcatgtaatcatgagcaattttggcaacttatgcaatcctttgagatttaactttttgatattcctatatctgtaa

SEQ ID NO: 284781 - DNA, 228 bp, Morganella morganii
atggcacagcctgcttgtcagagttacccggcagcgccggaaaaaatcgtatccgcagatctggatctggtttttgttccggataaaagcggttcaatgtccggttttgagcagaataccatcggcggttataactccgttcttgccgaaaaccgtaaaaaaggaagcaatatttacgtcactaccgttttattcaaaaaggataacagcgagcgcagtaagaaataa

SEQ ID NO: 284782 - DNA, 864 bp, Morganella morganii
ttgagaaaattattgctgttaagcctgatgtgcgccttttcttataatgtgtatgccggtgaaaataactgttcagcagaaaccgctgccgttaacgcatttaataattttatttttatgcaggaacggtcatttaacgattcactgaaagaaatgaaagtgcatataaaaagtagtgatgactacattgataatagcgcgtatgcaaaatttgatgactgcggtggattgctgatactggaaaacagcgagatcattagatcccggataaaagagcatgttatcgtcaatgtctttaacatcaggataaataagcaggatgaaaactggcgctataatatgacatttaaactgtctgatattgaccagcatggtgttgataacacatttatggttcaaagacagcacggaaaattcctgactgaccgcaacgggaaaataacaaaatcggaagatacgtcttatgccacgatcggtgatgaacgtatgaaattcaaagcggagacccgctttttaagtgataataaaggacggttgtcaaaattggacagagtcagtacacaacccaatgacagctcaaatacacgctatttttatgatgataaagaccgcttaatacggactcagtcagactctgcaacgaaagaatatacctatacagatgatggcaaagaatcaggcagtacaatggttcagatattttccacaaccgaaacaaccgtgacaatatgtaaggactggaataaattcggcagatgcacgcgtgcagaacaagatataacggtgttaattgaaagtgagaatggcgaaaaggacggtatctatagccatcatgcggaaattaattatgagtatgtttattaa

SEQ ID NO: 284783 - DNA, 546 bp, Morganella morganii
atgagcaattatacggatgtaacggtaaaagcacagaatgccggacccggcctctgctttttattattgctggcggcctgggttagcgtgttttttataccggacactatttttattgttgtacccgggatgattggttttgcacttctgttttttatttactatctggcatcggaagggcaccttgcagctattttgggcggagtcattgtaagcttcattttgatggcaatcgctgcggcaattcccgttattggatggatactcctggtatgctggatattttacaacatcgtgagggcatttgagagcattcagaatttactgccggatgccctgttgagcgcagtactatatggcagtctcttaattcctgttatctatcagtttaattattacggcagcagtaatttattgcttacgataggatgcggagttgtctactctaataaaaatccacgcaatagcgtggattttatggttttttacgatgcttctgatattcagcaagacatcataagactacaaattttatttacacattaa

SEQ ID NO: 284784 - DNA, 690 bp, Morganella morganii
atggcagataataaaatctgtttttctgatgtaaaaatggccgggaatgccggggatacagaaataattaccgcagcggataaaaccgtatatggttttaccggtgataatgattcagataactacgggctgttaaccgcactgttccagttgcgttacttcgccagcagtgttatttaccggcagcagaccgatgatattcagctgatattcaggagttgcacagaatacagcccggttctgcgggagctgaggacggataactatataattcccgccggtgatattgccggccgtttccggccgtttgttcatgaccatccggtcgtgtttctcgacccgccgtctgatgatgctgccgccataacagataaagggttaaatactgccgctcagggacttttctcgatggtgatattaatccggcgtattatcagcagttacagtaaattcagtaaaagtgaaaaaccggaagaaattaacggtctcgtatttatcgctatgccggagcgtcatctgaatattctgtggcatgagcactgtattccattactgcaggcgacatttccgaaaactgtattttacctgacaacacagtctccggtgatattatcacaacttaacgacggtgaagcataccggttattccgtgacagcggagagattatccgcacacagaaatacagctga

SEQ ID NO: 284785 - DNA, 1194 bp, Morganella morganii
atgaagtattttattttcatcatcagccttctcgtgatttttattgcagcggcctcgatcagttttaaggccggtgatatcaaacgaaagtgtgttccgataatcgtattattattgctggaaggcgcagtggcttatgcacttctgcatacctctgccgggctggcaatactccatactgcctccggggggattgaatatcttatccatcatgctaacaagggtatcgattttgtattcggggatatcactgctaaaaaacccgtaatatttgttattgctgcactgatgccgctgatatttatttgtgctgttatcgggatcttaaaatatttcggtattctcaggctgattatcatcactatcggctatctgattaataaaatagcgaaagtcggtaaacttgaatctttttccgctgtcagttctgttgcggttggtatgatggcagtttatgtatcgataaaagaatatatacccaatctgacaaaaccgcagatgtatacgattgcggcatgttctttatcaacagtcgatatcgccatattgggtgcgtatacacaaatgatatcaccacagtttgttattatcggtgtatgcctgaattttttcagtacatttgttatcgtttctattattaaccccggcgatccggttgagattccggagaatttttccggtgtgaacagtgaacggcacagtttcttcgaggttatcaccgaacatatgcaggatggttttaaacttatcctggcgatagttcctattattctcggctttattgcattaatcagtttactgaatgatgtgtttttatacattgcagggataacgtttcagggtattctcggttatattttttcgccgcttgcttttatattgggtgtgccgtgggaggacagtgtcaggttcggacaaattattgccacaaaggtactggccaatgagttcgtggcaatgattgattatataaaaatacaggatatcagcccgagaacagaaacgattatatcggtatttctgatttcatttgcgaatttcggctctgtggggatgattatcggctgtgtgtccgcgatcagtaaaaaacacggaaaaatgatagccgcaaatacattccggctggttgccggctcaacgctggtcagttgtctgtctgcaacaatggccggtattttttccgggcagagttaa

SEQ ID NO: 284786 - DNA, 888 bp, Morganella morganii
atgaccagactgatagcacatggtgcggtgttcctgctgctgaccggcagtttctccgccctgtccgcagtaccgtccgcagcacaacagccacagtgtgaagccgccaatacactgacccggcagaataaccggatgatctggcaggttcctgctttttccggcccggtaaaatctgtccggtcggaatcggttcctgatcctgcttctccccgcagtgaaaaaatcagcagtaaagcggatttcagcccctgtggtgaaatgacgcattttgaaacccgcaaacgggatatgaccggccggatgatagtcacctcaacactttcgggatcggaaacccggaacattgatagctatgtattcagggtataccgccatcttccgggcaaaaaagcccgctttcccatgacagtcagtactgcgtttaccaaagatgcgcaacagcaggtgaccggcggtaaaggtaaaatgtatatcgaaggtaatgagacggccataaacggcactgttcagatacaacgcaaagacggaaagctgaccatgtttaccctgacatggccggatatctatctcaccctgagttataaggtgggttatgatgatgccggacgtgtcagctcgctgacttccgcacaacctgacggttccggggaatcggtcacttattacacttacacccctgaaggttatccggcaacaaaagaagtcacgaataataaaaccccctccggggtccgcactctgaccatgtgcctgagccgggatcatcacggcaactgcgttcaggagcgtattgtccggatgccatcagagaagaataaaaagaatgccgtgccggaacaatatgaaatgacaatagtcaacaatatcattgaatattatcagtaa

SEQ ID NO: 284787 - DNA, 240 bp, Morganella morganii
atgggtattattacgcaggaaaataaaaataaagaaataaaagaaccgatgctgagacaaataacgctcggtgaaatggcaatggctaaaactatatttggtagctcaatgtcctataatgtctgggttcattgtgatagttatcttccgttcggtatgcagcaggataatgtagcaatggctcctaatggggatatttattttagagaacttctctatagacatgatttttcagaataa

SEQ ID NO: 284788 - DNA, 294 bp, Morganella morganii
atgcatgagcttactcatgtatggcagcatcagaacgggatgtgggtcagaacaagagggctgtttagtaattttgccaattatagttattcacttaatgccaaaagtaagttaagtgatttcggcatggaagcacaagctaatgtggttgctgactattttgtcttaaaaacatttggagtcagagagtttatcaatggcatacaggcaaactatattggatttaacggtaaggtaaatccggataccatcatggatttatatcgttcaacgctgccgaaaactatttcgtag

SEQ ID NO: 284789 - DNA, 240 bp, Morganella morganii
atggcactttattataacagtaatgcagtaattacagaaaaatctgcggataaatataagaaggtttggaaaataggtgaaaaacctgaatatcctgggatctacaaatgtcaggaatgtggctttgaagatgtaattaaccgtgattgcgataaacttccgccatgttcacattgccgtagcgggaaaggaaaagcaaatacctggcaattattggtattagcacaagacgcagagtaa

SEQ ID NO: 284790 - DNA, 831 bp, Morganella morganii
atgacagaaaaactcaaatgtgcgctgatttatgattttgacggtaccctggcagaaggtgactgtccggagcacggactgatgcctgcactgggtatcagtgacacgaaagcattctggcgggaagtgaagcggtttgccaaagcggatgacggcgacgaaatcctctcctatatgggattgctggccgccaaggctgcgaataaaaagtcagaggaactgagcattgaaaacctgaagaaacacggtgcgacgattccgctgtttcccggggtgacagagtggttcagccggatcaatgcctgggctcatgagcaggggctggacccggaacactatattctgtccagcggactggatggtatgatccgcggcacggctatcggccatgaattccgtgatatttttgcctgtaaatatcactattccgccgacggaaaaacagcacagtggcctgctcaggctatcaactacaccaccaaaacacagtttttattccggataaacaaggggatacataactcgtgggataatgtggcggttaaccagtttatcgagcaggaagaacgcgcagtgcagttccgtcatatgatctatttcggtgatggtgataccgatatcccggccatgaagatggtgcgttatcagggcggtttctcgctggcggtgtttgatcagaaaaaatggggcaacccggaaacacagaacaaggtcggcaaactgattgcggaagagcgggcaaattatgtggtacccgcaaattatgaggaaggcagccagttggatgtgaccgtaaaagggctgttgcagctgttccgccgtaagcgctga

SEQ ID NO: 284791 - DNA, 606 bp, Morganella morganii
atgacaaaaaacactatcgataacgcagaacagcctgcacagagcggtataaaaatctatctgagaaacgggctgtattttgtgctgtttttaatggcggtacagttactgaccacactgaccggcgggggattaaccacgctgggtattgagccgcgtacggttaacgggctgttcggtattttccttgcgccttttattcacagcagttgggggcatttattcagtaatctgccgccgctgttaattctcagtgtgttactgatgatcccgtcggttaaacattatattaaggcgtccctgtttattattatcgtcggcggattgctggtctggttattcgggcggacggcggtgcatgtcggggcgagcggctggatattcggcttgtgggcattactgatttatcaggggattttccgccgcaaaccactggatattattatcggcattgtggtgctgatttattacggcggcatgatcagcggactgtttccgggacaacaattcgtctctgttgagtcccatctgagcggcgcggtggcaggcgttttattcggctggctgcaataccgcaaacggaaacagaacaacaaaccagcataa

SEQ ID NO: 284792 - DNA, 426 bp, Morganella morganii
gtgaaactgagaactatccctgcgttattatgttcagtattactgatttctgctccggttaaggccgagaacttctcgacaaagcatccgaattcaagtgcagcgctattcagctcggcggttatcagcggagttatacttctgccgttgcttattccggcacagatagtggttgaatctgttcagttcagcgaaaaagataaaacgacaaccatcaccggaacaacaaagaataatgaaaaggcagccctggttgttgccaccgaaaaattagaaaaaaaaccggtaaaaccaggggatacactgacactggagccggcagaaaaaggagcgggtaactatctgaaaaaggacggtaccgtaatttctcatatgatcagtcaggatgaacaaaatctgtcatatcagggcaggatgtctcagtaa

SEQ ID NO: 284793 - DNA, 1833 bp, Morganella morganii
atgggaaaggataatggttattgtgcagaatgtgaaaagcgcaaagcctggattgagattgttctggtcgatgaactgaatcagccggttgcgggaatgccgtatacattaaaagtatataatggtgaaaaaagaaccggagtaaccgatgccaacggctttatccgtgaggagaatctgccgcagacaggcgggggtttttctgtggatgcacaatctctcgctgatgaaatggagcaaaggccgttaagagttaaccgcagcatgcgggcgtcaaaagcaatgtatgaagccgaaaagcgtcatgatttttatcgttatgtcacgattggcagattgtgtgatgcaatacccaaaattgaaaactggcaagagccggaaccaccggcatatcattttcagtctgataatcccaaaggcatttttgttaaatttgataatcgccggttagtatttgaaatctgtcctttcagagcgtggtcatttttattacatcatcaaaaagagtattccattgttaatgcctgtaatttaagtattttatctgttctggcatacgccagcctgaaagccaacagtgctaaaaaaccaaccgagagcaactatccgggttcggtagaagatgtgtttctgaatcagttttttgatttatcaaaggtaccgactcagtttgaaaaaaataattttacgcctgttgtgtatgatgtgccgttcagtgaacgatatacggaaattgaatttattgattcagaagaagatttagatacccagctgttttttatcgccaataagaacgaaatgattattgcctggcgcgggacggcagaaatgaccgattttaaaactgacctgacgttcaaacccgtgcagttagacagcaatatgggtgtatccggatatgttcacgccgggttttatcaggcgtttaaagtcatggataaaaaatacagccgcagaaatcaacctaagaatatgcctgatgacaatatattagaatatataaattcactcagtatagacaggaaactgtttatcgcaggacacagtcttggcgggtgcctggcattacttaccgccatcaagatgagggaatataatcctgtactgtataccatcggaatgccaagggtgttaaccttgtctgtcggaaaacagctggatgatatcgttcatcaccgtcatgtcaatcaggacgatgtagtccccggtcttccttttgaacaaaatatgaataatgatttttttattaatgataatgatttttcaggttatacttatgaagtgatacaggtattaacggatattaatccacaaatgattattcccaataaattaattcgcagtttaaaaaataaaaatgatatctatattcatcacggaagccctgtgcatttttatgaaaaaacagtttccgattataaatttaacttctacggagatggtataccgaccagtgtgacagaaaaactctatctggtagcagaattattaccggataatatgtataaatcaaaatacttcgaactttaccggataccacgaaactcagccactaatgtaattggagctgctgaccactcatcagtcaagtatactgattttatcataaaaagattaacttcgttattgaaagacaataaaatgagtgactctgcgtatgaaataaggctggagtttgaacgacaaaaggctaatttcaggaatatctattctgaaagtcagtatttatttgatctggatttaatgctgtctgatacattattaccgacattgttaacttcggagggtatcacagccttaaaaaggtataaagatgaaacgaaaaataattaa

SEQ ID NO: 284794 - DNA, 795 bp, Morganella morganii
atggcgacctggcgtacgtggataaaacaggcggggggaggtaatatctattttctgctgaataaactggctcagccggacccggttgtacaattttatgctgctgactgggttgaagaatcgtatccgctctatgccggaaaatcattatctcatctgagagaacagggaccatggctggtaaaagttaaatggcagaacctgaataatatggcagaagcactggatacccatttgtttcccggttcaggatgggcatatcacagtacagaaacatatgaagatcagataatacactggcaaagacagcactttgttatatttcagggggaagaacggattttccgcttatttgatgacagagttgccggggcattaataccgtcattcacgcctgctgactggtcatatttactgatgccggtaagtgattgctttattccgtccctgcctgaaaataatcacgttttccgccctcgggaagcagagaagaaaattaatgtatatccgtataaactgggggagcatattgcactcgcctggaagaattctgcacaatttcgcgtaactacggtagataatttttatattcagttctgggaagagcattctgaacaggcactgatgctggatgagccggaaggtaaacttgtccggctgattaatcaatgtatggatcattatcagacggagtttgttgatatcacatatctgacaaatgacatgtttatccgttacctgaaacagaataaccttattgaaaacaaacaggatgccgaacatgggaaaggataa

SEQ ID NO: 284795 - DNA, 993 bp, Morganella morganii
atgaaaaaaatagtggctacaattttatttgttatttctttttatacatatgcggatctaaacatcactacaataactgaggatttcgattacagtaatagctcaaaatataatgaatcaattagaaaactcagatctacattaagtgaccataattcaggatatggaaaaaacatttatatctctgaaaaagaaaacaagctatacagaataaaaatatatgccgataaacaaaaaacaaagttcattagcctggtatataattccagaaacgcttaccttctcggatttatcaccagtaataagaaaaaaattaatggtaaagatgaaatagaagaaaaatactacagatttaaagatgataaaaataacgttatagacattaaaggatttactgcatatgaccttaattttaaaggtaattatatagatcttgaaagaaacgccaccaaaagagaaacgataaaaatcagtcatgaatcgctacaaaaagcaataaccttactaagtaattatcatggaaatgccggaaataacacaagcaatgatactgaattaaaaaaatcattacttcagataattttattcacatcagaatcaataagattcccggccatcatggaatggagcagtaatcatcttaaatcagttgatatggatacttctgcgtttggcatggaatatacaaaattaactaacgactggaatatgatcagtaaagaattaaaaaaattgtatgctataccaggaaatggttcattccaatattcataccgaacaggaaacatgatgaacaaacctcaaccctaccgaagcgttaatattcatgaactttgtctgtatgcactttatatttccgataaaaaatcacgcaatgatgactattcaattgaagaccataaattccatagcgttaacatcctgaacgaaacaatattctttcctgaaaatcaatttatgaatatcaattatgctatgacatatacctattaa

SEQ ID NO: 284796 - DNA, 315 bp, Morganella morganii
atgaaaaaaacatctgttattttaacaatgatatcatcattcctatttccgcaagtaagttacgctaaaacatttaccgaccggtgtggcgcatatgtaaaagaaacatatattgataaaagctctgattatcgattcaaattagttgatagtgaaggaaataattttgacggtagtcaggattggagtttttcatccacagaccttgtcattattgaaatgcttaatagtgcacatttatctcagacacctttgtgcatagattactcaaccagcaaatggtattggacaatatactccatcagcatgcaatga

SEQ ID NO: 284797 - DNA, 342 bp, Morganella morganii
atgaccgtgagaaacatattactgatggtatgttttactttcattcccattcattatacttcagccgctgaatctgaaaacagtatatgctctgtatttgtaacaaaaatgatgcggggtaatgaacatcgagtaactctggaatattatgattatggaacaggcgaaagacgattactcggccctcatctttcatttattcttccaccaaccactccggtatttaattttattaaattagcttatatttacaataaaagactatgtgtaaagtatatatcccaggtaaataatgaaataacaaccaacactatattacacatacatgacaattcagattaa

SEQ ID NO: 284798 - DNA, 1749 bp, Morganella morganii
atggacgtaatttatgtagggaaagataatgtaaaacgagagtctattcttaaatctcatcattcggtcattctgttattattcgaccgatgggatgactacgattacaaaacatccttcccaacatactgtcagattgatggcaaagaggttgagcttccaacacttaagattttattcaaagatcaaatgatatctttcagttatcttgatgaacttgttttgaaaggatgggatggtgtatttcctattaaaaatttatcctatgtttcaaatccggaagatattactttttacgaacaaatagatggacatcttggtttagatgttgccattgaagttgcagaaattctctgtgatgcgagttacatggtacatattcttgaagataccaatagccttgaattagttaattcaaatgggtttaaaaagtcgctccaacgtgagcgtggatctattaaagcatttcttgatggatggcgttttttagacagacagggaattagcataggaaacatggtctttcgctttcatacatctgcgggagatattcaacccttgagtctaaactttgctacagctacgccactaccacatgatattaatgtcctgattggtcccaatggtatcgggaaatcacaagcgttaatccagattgtcaaggattggcttagaccgattccgagtgaaaagactgaaataggcttcgaaaaagatcctaacatcaatcagatcgttgtagtttcttatagtccatttgaattattcccaattgatagtggagcagtcgatagaacgagtggtaacgagcgaaaagaccatggcgtttatcaatattttggcctgcgagcttatgaaacacaaaaggaagataaaaataataaaaaaatccgtttatctcgaaaaaggcctcatcttaatgctgctcattctttaatatcatgtcttgaggatgatcgtaaatacggtgcaattaaaagttggtctaataagattgcaacactttattctgtactgaaaactgcaattgactttgacgatattactattggtgtttctggttttgaaaataaagctcaactatttgaagatagtgcatggctacaggatgattcatgcatcttagtcgatgagataattgatggtaaggggttaccagaagcatatatcccgattcgtttagtccgtacagatgaacctgatacgaaaaggttacgcgattatctccacgagggcactggaattgcgttccttaaggggggttatcctattgagttgagttcaggacagaggctattttcctacatggttacgaatattttgggagcaatgcgacgaaacagccttattttaattgatgaacctgaattattcctacatcctacgctcgaaatttccttcattcaaatgctgaagaaaatccttagcaattatagttccaaggccttgctggccacacattcattagtaacagtacgtgaattgccccgacattgtgtccatgtttttgaacgcactaatggtggtttatttattaatcatcccccttttgaaacctttggtggagatatacagcggatttcgtcttatgttttcggtgataaatctatttctaaaccattcgaaacgtggttactagaaaagttggaagagtatggatccgcagaagaacttattgaagccttaggtgacaacatcaacgaagaaatgttgattcagattcatgcaatgggggaggataagtggtga

SEQ ID NO: 284799 - DNA, 852 bp, Morganella morganii
gtggtgatacgccttaaccaccctagtttggagctggatgatattgacttacttgaacgcattgttgaagagcgccagagaggaatacatcacgcttattttctccagattaaagacgcatggaaaactcgagtgcgcgaatatattcaatttggaggcaattcagagtttattgaagcttgggaagaaatgaatgatccatcagttcatgggcgattcaaaaacctatatctatctccgggaaaccagtctgttcagaagcccctactggaaaaattgcgaaatcgtgagttagattattgcccgtcatgtggtgaagatggaacacctaacactcttgaccattatttacccaaagatgtttttcctgagttttctgtcaccatattaaatcttttccctatgtgtgacatatgtcaaggagccaaaggggttaagaccaatgatgatgaaggtaaacgactttttattcatccttactttgatgattttatagatcaacaagtgctagttttggatattcgtgaaccatttaatgcacctacttcaattcaactttatcctcatccggatattgaccgtgagttgcaaaaattaatttcgagacatattgctgaattaaaaatccatgcacgctactatcgttattttcaaagtaattatttgcgattgctacgccttgttggaaagatacgtcataagggtttgaatgtaagagagcagcttgataattttcgcgatatggctcttgaaaagtcgattaattcttgggggtatattttttatgacggcgtgttacgtaatgaacatctagtggagtacttatccaatgaagaattacctatggtgtga

SEQ ID NO: 284800 - DNA, 831 bp, Morganella morganii
atgtccgattttattatcagattgagtaacggcaggaatctgaccagacaggaattcagactgacaccaaattattcggtcacgttaaaaatagaaggattgcataaccgaaaacatttagagctgcaaaaaagtaatgaacgaatacgtttggaagtcaatgcggataacaaaaaggcagagcaaacagtaaaaattacggcagtgagtgaaggtgaaagtattgttaccgcaaaaacagatggtattagccggtgtgatattcctgaagctggtggtaaaatatcgaattgttttccaaaattgacttttattgtattacctgcaatgtctatccctgccggattgactgtaaatcaaaagctattattacaggttttactggcggaaacatcaacaccacaaaaaggatattttaatcagaaagaagccaaagaggcgatgtctctgatgcatgattcactttataaccgcatcaactcgccaaaatcccgttatcttgatgtaccggagagtggtgataaattacagggattaatttacaatggcagggttataaaaggtttcaaagcaggtaaaatagatcagagtattcagaacagaattaatcaactgatagattatgcaaatgatggcggaaataatatggataaatacagaatattattatcagacgctatagacattgcaaaaaaagataacattattttgtcacatgacgtcatcggatggcgaacagatgaccgtggtcttggcggaggaagtgttgaagtgcttaaaaaacttcaggggcaggtttttttgaaattaaatgatagttttcataaataa

SEQ ID NO: 284801 - DNA, 519 bp, Morganella morganii
atgaaaaaatacatattcatgacgttattattacttaccacggtttcagccgtcaacgctgatacatggaaagagtcgggaaactggggggtatacgacagtaagccggatgtaacatttaagccacttgacattcctgtgtataaaaaatatttcacagaagcagcagaatatcttatttcagttcacgaagataatgacaaaacgaataaattttgtctgattggttatcaatggaattcggatagtcgtgatgagagagtcaatgttatctgggatggccactatttaattacctgggaaacaccggataactattatgatgattcaacctatataaagtcactttctatgtccagaggaatgatcaatctgaaagaaaatgttgttccgtataacgaaattggtgtacataccgccctttggccggaagagggggtgaaacagataacggatgactgcttacataatggtaatctcgttgagattaaaccatttataaaaaatacagataattaa

SEQ ID NO: 284802 - DNA, 504 bp, Morganella morganii
atgcataaacatatcagaaaagtcagttatgcagatttaaataaaatctataccaccgataaaaagggcaataaaatcccgatgaaatggtatcagtcaggttcctctattaaccagcagggtatgccgtttgagcattatatcggtacacaattaccggcaggctcaaaacttccggatagattcaaaacctttgattattatagcagtaaagataaaatagcgattagcgtaaaaactattaacactcaaacagatagtagactaaataaacctgatgccataaaatataccatcaatggtcatgttaataaaataatgcagttctccgaagaggaaaagggtgaggtgactttaacatctgatatgataaaaaaaagagttctgcatattggtcttccggaaaaaacgacatctgaacaatggaagtcaataaatagtgcagtaaagaacgcaaatgataaaaatatagaaattaaagtaaccattataaaaggtgaataa

SEQ ID NO: 284803 - DNA, 483 bp, Morganella morganii
atggcacaggatatttttataaaaattgaaggtattgaaggtgaatcccgggatttttctcataaaggtgaaattgatcttttaagatgggattggtcagtctctcagccatctaacatgcatgcaggaagtggcggaggagcggggaaagtaactgtatacgatttatatttcaagcattatttcgataaagcatcaacaaatctgcttaaatattgtttgagtggaaagcacattcccgaggcaattctgacagtaagaaaatctggtggtgacccgctggaatttttaaaaattacgcttcaggaaatcgtgattaccagtgtggattcggttggtgagatatatatgccttcgccaatagaaaaagtcagcctacagtttgcaagggtaaaatttgaatacttaccacaaaatgcagaaggcggcagtatgggagtggtcgctgtgggatatgatataaaagctaatacaagtatttaa

SEQ ID NO: 284804 - DNA, 621 bp, Morganella morganii
atgtatatagatgaagatggctatgtatttgatgaccgtattgaaagaaagatattcaagtccattgagcaggagcctctggataaaattaatggaatcgtcgttcatcaaactgattcaccgacagcacaaagtacttttaatagttatagtaataagtctgctaacggagctcattttctgatagataaagatggtaaaatttaccagactgcatctatatttaaagtaacctggcatgtcggactaatgcaatccagatgttatttgaagaaaacatgccaaccaactgaagttcgtttactgtcattgcataaaaaagccttttggaaaaaagtaatagcaaaagaaatttctgatatagagaaagcgaaagatttcccggaacgattcccggctaacagtgatagtattggcatagaaatagttggtcttgctgtgaagacggaaggtaaaacggatcttgtctatgaaactgtaaatgacaggcaaaatgaatccttaaaatggcttataaaagaacttgtatctgaatttaatgttccgatgtctgaagtgtacagacatccggaaattggcagaaaaaatatgactgaagcgagtaccgcggtatgggaataa

SEQ ID NO: 284805 - DNA, 381 bp, Morganella morganii
atgggaataaagaaaacagtactttggcttttagtatttatgcctgtattaactcaggcaagagttgtcagtgacatcaaaatatcggtaaccggtaattacgatagtgaggacagagctgagtacgaaaaagaaggatgtaaaacgtttaatccgacgaaaaaacagctcatttattattttacaaaagcggaagagtcagactccaataatctgtggatgcatgaatattactcaccgtgtattgcatcggggacgataacctttaagggcggcgactccggtaaatggatactgcattcaagcggacttggctgggttgatttcactgatggtaaattaaggtatttttactataccgataatgaatgggataaataa

SEQ ID NO: 284806 - DNA, 732 bp, Morganella morganii
atgccattaaagcgaaccggattaaaactggatttttcactgcttaacctgccggagaaagatgataaaaaaacacacttgccgacagatgattatttgaaacagcatattgataccttattgatacagatgaaacaaatgccggtttcattcataaaagaggcagagaatgcgccggattatccgatgctgcaacaatgtggttattcctcacgatataacggatttcatttatctaatgattgcggtgatgtatttatccgtgcccgcagagagaaacctcactgcgctggtgggtttgaaggtgataaatttcatttgagtgtgcatgaatcacagattgcacaagcggttactatgctgtcaggagcgctgttttcagataacaatccctgtgacagatggaaaataacggatatttcacaagcagagcctgacagcagagttaaacgcggagcccagataacgttatatgttcgtcctgttgcgggtgaacatccttatagcgcagagctgctcagtgaaatccgcagatttatcaccgggcttgaataccgtctgacagaaggggggattgtaccgggagaataccctttatctgatatccgtccgccacactggcaatttaccagctaccgtaatgaaattatcagcgggcgggagggctgtgaggcggaccatcagcggttagcggaatccgcattttaccggctgatgacagctcgggattaa

SEQ ID NO: 284807 - DNA, 141 bp, Morganella morganii
atgatttttatcacagaaaacgattatgatgaaatcattaaccatcactgtgataaatcgcccatgcagaaaacggattctttttacggcaacatgaattatcctgccaaatctgcgatcagtcacggaaactgtcagtag

SEQ ID NO: 284808 - DNA, 522 bp, Morganella morganii
atgtcaacaacactcacactgcgggcagtaacaccggatgagattgccgcactcaataacgccggatattccgcgtaccgctatcatttttctgcttactgggattcagaaacagagctgaatgcctatctggacagtgaatatcacccgcaggttattacacagagtatggaaaataccggggtatcctggttttttatttgttgcggcaataccattaccggattttgcaaactgaccgaaaacagtccggtaaccggaaaaacgtacagcggaatgctgatcaataaactctattttttaccgggtgaaaccggaaaaggatacggaagtaccgcattttcactggctgaagatattgcccgcgcccggggacaggcatacctttggctggaggttttggaaaataacaccggcgcccggcatttttatcagtcacagggaatgtccgtgaccggctatctgccattcattacagaacaacaatcctcacacctgctgattatggaaaaaccactgtaa

SEQ ID NO: 284809 - DNA, 348 bp, Morganella morganii
atggctgcggcagcgatatttgacgctgttccgcagaccgatctgaaacgggcattttccgcgacacttgcgcaatggaacacaccggaggactgggaaaatgatgagtgcaatatcattctggctttgtcgcgcattgcttatactctgacaagcgggcacattgcatccaaagcagacactgcggcgtggctggctgaatctgtttccgatccgcacctgcagcaactgttgctggcagcaaagcatagctatctgaccggtgaatcatttccggtttttgataaacagacaatcagccgttgcattctttctctgcgggctttatgtgacgagaaattatcatga

SEQ ID NO: 284810 - DNA, 501 bp, Morganella morganii
atgcacatcaccggtgacttcatgttggaacggataagacgggcgatccgggttgtaatctttctggataatgacatcgctgcacaactgttcggcgtagcaccaggagaatgccgtgctgtcacggatatcggtatccgcctgcgggttgtaagtcaggttgataccagcggtcatgcccaggtggttgtcgctgtaaaacagtttcggaccttcctcgaaccagaagttaatgccctcttcggcagccaggcggcaccagaaatcaaaggccgattcgcgcttctgggtgatgtaatcccgtttctgatgcagttcgtcctgataaaatttcaggtcatttttgacatgtgcttcatccagaagagtggcgagaacctcaggcacagattgcttctgaaagatacggctgtcctggttgagggtcatgatccacatttcggggcggatcagaaagtgataccaggttttgttgccgtcggtattgccctgttcggctga

SEQ ID NO: 284811 - DNA, 975 bp, Morganella morganii
ttgctatctgtatatcatgcaagtcgaacattattaaatagaaatcaatccggagctatagaatcattaatttcaccacgtattacaaacaaaataaaagaaaatagctatcaaatatatttaattaaaacatggcttgaaaaaaacaaaaatcatgaattagctaatgaagctgaatttttaatctctcaagtggaaaatttagacttcccccctttaattgaagctgaaagtaataatgcctcactttcagctactattaatgaggcgttattaaaaaataaaccgaaaaaagttcttcactcaatcatagaaaatgctttcaaccttagcatcagtaatctaacagcctgtgaaattaacattttagaacaatgtaaggaaaaagccttaggtcatattgactataaaaataatactaaagcacaacaattgtttgatgctgttttattttggcttacacgatttgtcgctaatcgtttagaattaagccgtgcacatgacccttcaagctattatctatttgaacaaaaagatggttcgcttcctcacgaaagtgaattgcaactagatttctatagatggctcacaacaaatgccattggagtagatcttgagcccccaaatgttggaggtgggcgagctgacattcgattaaactcggggccagaaagcttaattattgaagtaaaacgtgaggatagtaattgttcttttgattctctttaccaaaattactctgctcaaacaacagattatcaaaatactggcattagactgggagttttgctcgtattagatttgacaatttcaaatcgtgaaggcacacctcatatgtctactctatttgaaataagagaagttaatcgttcaggagagtcaatcccccgtttaatattaatagttaaggttccaggacggcgtaaattacccagtgagttaactaaactagcaaaaaaaataaaaaatcattag

SEQ ID NO: 284812 - DNA, 441 bp, Morganella morganii
atgataaataaacaaaaagtagctgccatccttttttttgttcttggcattcttttcattcctttgttttttttaggggcgaatacggttctggatgtttttgagaaaaaaaacaacatgatatttttatctcaagggattgtatttacaatagccatgcctttgttttcatactttctcattagtgttgctattaaatctcttattcttcagaaaagaaatgaaaaaataaaaaatacaaacaaatacatatgggtattcaaaagcttattttttatttttatactatccttccctattacttggtatttaatatcagaattaaccgctaataactatgaaaagtgcccggaaaaaaatatttttattcaaaaatacacaacagacctgtccttgtgttcgtcgccttattatgaagaaagatctggtacaaaaaaatga

SEQ ID NO: 284813 - DNA, 387 bp, Morganella morganii
atgggaataggtcagcgcggactgaatgccgcaactattgatggtgtacgttatacctttattgctgcggtcggattccggttattacagcttatctttcagaaagattatgacctgtataattttgtcggtgatatcactatggatgtagctaaattgtgtgtagcttcgttcattgcctggggatttggaacattaggtttatctatttttgttgttgccagtccaattattattggtggtacggtatttgttattggttttgcagttgcaattttattgaattacctggatgcttattttgaattaagtgataaactagtaaagaaaatgagagaagtaaaaaacattcctgaaaatgaaaaatattggaagggaagtagatga

SEQ ID NO: 284814 - DNA, 408 bp, Morganella morganii
atgagcgataaaaagtataatccgacaatgagcggatatctcggtgacgttttgagcggaaaagcgaaaatcaatgagcttcggcctcagcatgagttctttgatgctattggattggaaaaacagttaagggacaatgaacgcgtcattgtattactgacaccggatgaagcaggaaagattctggatgagctgaaagataatggtaaatcctacgttcacgatgcttattcttttgtcagttcctatatcggtaatatccgtgaagggttttctgtagcagagttattgcgtgagtttaattttaagttcggtatcacagcaacagagtatatagcagccaacggcagcgtgatgatcaagctcagtggttacgcaggaattaaatgcgactcattaccttgctaa

SEQ ID NO: 284815 - DNA, 201 bp, Morganella morganii
atgtatttcatttttgttttaaatagccgtggttatgtggagttcattattcatccggattcagttaattctgaaaacacccggaggggtatctgtgtaaccggtgaaatgcagacggtaaatgctacccattttcctgtcggtagtgaaaagttccgccattctcattgcaggtcgccggtgcgctatatattaaattga

SEQ ID NO: 284816 - DNA, 177 bp, Morganella morganii
atgcatgattatatgagaggcgggtttacctataacgaaatgggcaaactgccgggatatccggagcagaaggacagcgctgaactgtatagtggtgcctcatttgtggccggtgcggtgtgtttttgtttttatgtccgcgcacaccttaagtaccggaaatatcgccgtcagtaa

SEQ ID NO: 284817 - DNA, 627 bp, Morganella morganii
atgggaccaacacagggaatacagggacatcaggcgattcagatcctgaataatgatatttacgattcagcaggcagtaacagcccatcgtcgtatgtcagttcatccgggattaaatctgttttattaaatgcatggaatgccgttaaatccgccgtttccggtatgttgtcatcgtttggtttgcacctcagcggacagcagggcagtgataaaccgggcagagaaattgtgatggatatgtcttcgcggtcggcgcagtcgttagctcagcttgaaaacactatttatgggagcagtggtgagaatacctatgattcggtttatgcgcatatcggatccggacgaccggaaagtctttatgcttcggttgatgacagtgcttctgtccgtgcaccggttgctccgccggtacctgactcaccgcgtccgtcactttcggaaccgctttacagcgaagtggcagagccgttgtatgaagtgattgatgagtatcagactccgccgccggtaccggattcaccgcgtccgtcattacggcaggccgcagaaaacgcattatatgaacgcagcgggtctctttatgataatgcggaatggataaacgcagagaagaaatggggataa

SEQ ID NO: 284818 - DNA, 450 bp, Morganella morganii
atggacagtattaatgcattaattaataaattaaatgataatgccattgatgaagtatattggcttggttctgctaatcgtgaatcaataactactcttaaagatgctctatctattgatttaccctctgactttatgaattttttatctataactggtggcggaggggttgttggagaagaaatatctggtattgtgaataatgatgtgtttattgagtctggtggttcgatttattatgatacaatgaattgcagaaaggattttgaattaccgctgcatttatgtgtgatttattttaaggacgatgatgtatgttggtgcattgattgttcagattataaatatggtagtgttataaattatgatttattttcaaagaaaataaccggtatcttacatccttcgtttatgtcatttttcaatgagtatgttgaactcagggtttag

SEQ ID NO: 284819 - DNA, 2202 bp, Morganella morganii
gtggcgatcactgacggtgagggcaaaataacccgttaccgttacgggccgtttgacctgctgctggcgatggttcgccctgacggtacagaaatccgctttgaatatgacagcctgacgcggctgaaaaaagtgattaatgcggccggggatgaataccgctatgagcgggataaagccgggcagattatccgtgagactgattttaccggccgggaaattcagtaccgttatgaccggctcggccgccgcacggccacccgttacccggatcagcatgaaatccgctggtcgtactccccggaagggctgataacccggcaggatatctggtttgatgacggcacacgcagtgaactgaaatccgccacgcactatgaatataacgcccggatgcagcttatccgcgccgaaaatccggatgcggtcaccgaatttgaatacgacgatgcagggcggcttatctgtgaaaaaatcaatggccgtgagattgagcatgagtgggatgaccggacagaccggctcacacagacccggttcgggtcgcaggcattacagtatcagtacggattacagggcgaactgacgcagtttcaggccggaaaacaccagccgctgcaactgagccgcaatgcgctcgggcaggaatacctgcgtcacagtcagtccggttttgcctcgtcacgccattacacggcgaccggcatgctggcgcatcagaccgccgggcgcggctcggacagttatcttcaggcgttgcgggataacccggtacagccgcctgccgccagtgatgtcaaccggagctggcagtatgataaagcctataacatcacggcgattgatgaccaccgctggcggcgtatacagtaccgctataatcagaatgaccagatagagaatacgtccttcggcggtttatatcctcagacagagcagttcagttacgacaccaacctgaatatccggcagcagacgctgataccgggtgaggcgcagggtgctctgcatcagttatcgcagcaacagcaggcgggacgggtggtccggcgcaccacaccaacaggacatcaggaataccactacgatatcaacgggcgtctggaacggaaaaccgagcaccggaacggcttccggccgcgcgagtggcgttaccagtgggacaccttaaatcagctcacatcctgcttcatgccgcagggcgactgctggtgttacacctatgatgctttcggccgccgcctgagcaaatatcaggtggttgatactcaggaacaaatccaccaacggcacctgaatctgccgccgaaaacccgtggccggcagtacctctggtccggcaatcagatgattgaggaagtaccggtctatgcggacggcacggtggcgtatgacgccgggattcagtggctgtatgaaccgggcgcacttactccggcggcgcggtatgaaaaagggaaactgcattacctggtcaccgaccatcagggcacaccgcgtgaaatcttcacggaaaccgggacggtcagttgggcagcaaggccggacacgtggggacagatggcgttctggagcctgaaaaccagtgccaatgacccgaattacaccgaatgccacttccgcttcgcggggcagtatgaagatgctgaaacgggcttgtactacaaccggttccgctattatgataaggacacaggacagtacatcagccccgacccgatagggctggaaggtggctttaatccgtatgggtatgtgcaatgtcctgtgggctgggtggatccgtttgggttggcgggaacatcaacatttagcaataaatatcaggcagaagatgttttaggaagaaaagtatataaaaatactattgatgtaataccagatgcaccttcttatgtccatccgtcagttcacccatcaataaagggtaaaattgatgatggatggacaaacttagatttaatgaagaatggatatgcgcctattggtccagatggtaagaaaattaacttaaaccatgtaataggtaaagagtctgggccaatggttaagctggtagtaacaacacataaagattataataaaccattacatggacttatcgagaatggtaatagttttagaaatacctcagcactagatcgtcaatacaataaatataggcgtgattaccggaagctcagagcgaaagattttgaatga

SEQ ID NO: 284820 - DNA, 825 bp, Morganella morganii
atgaaaacaaattacgcggtatcgttcaactcccaactggctttttgtctggtgaaagtcaatgatatcttaatcatgaacagcgggaagtcatcgatgggcacgatgtttgccggacagaccatcagcgggttactggaaaacggggaaaacaccatcaccatggcaatggtggatgagccgttcagccaggacggctccggattaacaaccgatatggcctgcgaagtcacggtggagaaattatatcccggcaacaaatcagagccggtaataacagcggcactgatggtcaatgatgacaaacagattgtgccggttaccccggatgataaatcgattgtgaaatttggtgtgtcaaatcgtcattttgaggaaggcgtaatagaggtaaccaaaaaattccgtgccggggggctgccggactggaactggaccaccgccacgccggtcacggagcaggacattccaaaaatcaaagcgttttatgaagagctccacaatgcgttcagacggcaggacctggcgaaaatacgaaatatgaccggcggtgcctgggagatgttagccaccacgcagggcggcacaccggacaacatgtgggattccatggattttaagcgctattttgataacggctttaaaacagttccggttaactgggataaatacgaattacatacgtataaagacggcaggatatttcgttatgaagtcggctactccagaatttcacctgtcagactggaaaataacaacggtaatagttttaactataacccgtatctttctgtcatcaacggtaaggtaaccgttgttcattaa

SEQ ID NO: 284821 - DNA, 1695 bp, Morganella morganii
atgtcaaacgcaaaagaaagacgaacggccaatatctccggggcctgccagacctgcaaaattccgccggcctgtacactggaggcaaaactgaagtttaaggacgaggaaaaaatataccgccaggatgcgaattttaatgtccgttttttccatctgattaatttatcagacggaataaaggcttctgaggataaacaccgtgaagagatgagtgttcccgttgaactgacagctaccgccaaaaaatgtatctccggaaaccacaactgcccgatcggtaaggtttatgacgaccgtttttccgctccggtcatcagttttgataatgccgcgccttataaaggaagactggcttacctgaaaagatataacggctttgaaaacaaaatatccccgctgactgacctctttgatttactggacacaaaagcgttttcagacagcagccgcttccgtcaggaataccggctggtattaacggagtgtaacggccggccgttccataccatcgcaccgtatgattttgaacagtataaaaaatggtatgaattaaaccggaacgaactggctgaatccccggaaaaaatcctttacccggtattatccgttgccggtaaactgataaacccggttggtacctttaaggatattctgtttaaacagggggtgagacaactctgcagcgcaaaatttatcattgcactcaaccggtccgttgaagctaatataaaactgaaattcagtaacaaacaggaggccgctgatgtcacgaccggtcagtacctgcaaaaaaccggcgtcagtatatccggtgaactgatatccaaagccggtgcaacggaagtctcactgaaaacagaatacgaattaacacaggcgtataacaaacatgccggtgattttaatttactgaaaaaagccaatgattttatcggtctttttgtggggtcggtggcagacagcggcaaggataaagatgcgttcccgattctggattttcagcttatcaagccggaaatgagcataaaagggaaaaacgacctgattctgagcaaagaaaaaaaattaatctccagactgacatgtgatgtcggcctcgacccgctgattggtcttaaaatcaaactggatttactgcagacgtttatttccttatttgcggccagacaaggtcttacaaaaggcaggaaagtcctggctgccgatgaaaagaaagtcaaaaaaggggaggacggggcatatctggtggcaaaagtcgatgttgttttagagctggcttccaaatttaccttcgccttcaaaacggacgataccggtgactggggatatatcagtccggttctcggggttaatgtgaaagtcagcggcatggccagtcttgagggcggcgcccgctggaacggcctcagtggttttttcaatgccgaggcgacgatgtccacgaaattttattttgagctggacaaggaacataacggacagaaaggcctgagggccatctattaccatgacggattatccgcggaagttactacggggtattcggtcgggatggctgaaggtgatgataatgaaggggggacaaagagtggtagtacaacagttacaccaaaatcaaaaccgaaaaaatgggttattatccccagacttaaaaaaacagagtcggaacattttattaattttggcggttaa

SEQ ID NO: 284822 - DNA, 936 bp, Morganella morganii
atggctaaaccggaggtttgttatgcaatcattgatgccgcttcagagccggatgttttttcactgctggatgaatacaccccgccggtgtgttgcctgtacagcgagcctctgcaaccggaaatagcagaactggcaccttatctggttgaggtgtcggatgatgtccggcaatggctggatacccggcagacaccgtgggggatttatctgtattccccggtgacgatgcgcgagttacgccatcatctgcggaaattcaccatggtgattattccggatcaggaaaaaccggttttctggcgtttttatgacccgagaaatatctgggaaattttagcgacatttgatgactggcgcttacatacttttctggggccggtaacaaaactggaaacgaacctgtgggggaataaaaaatctgaccggtttgaggaacagagaaaacgctatcccggacaggcagtcatgcgcgggatgtttatgaaattctccgccgctgattatgcaaaaatcaatgccgtgtctgagcagaagctggctcagaaaatggcggtatattttttaatgtatgaggcaagcagtaataatatcagttcagatttatctgccgcagacattatgagccgcacactgacgaatgaccgtttcggttatgaaccgttacctgcgggactgtcaccgtccggccttgagcaatacaaggctctgtcccgggatatcattgctttttttaacggattatcggtttcagcggaagaatcctacctgtatttctgttatgccctgacctttttcaggataaaacgtttcagtgagattccgccggaatggctctcttttctgtcggattcagaaggtgacggtaattacagagtctgtaatttgatgatatcgttatttgatgcacttcctgatatctatcattcatcataa

SEQ ID NO: 284823 - DNA, 1980 bp, Morganella morganii
gtgataccatctatttctgagttgttgccggggcagtccgggctggtgtttacctgtaaaatcggccggttaccggagcagacctttcaggtcactgaattctcgctcagtgaatccctttcttcgctgttttcactgaccatcagcgcggtcagcctgctgtcgtcgatcacatttgaagaacatttgggttctgccgcctcactgacggtcacccgtgacggcgttaaagtccgtaccgtgcaggggctgctggcctctgctgaacagggcaataccgacggcaacaaaacctggtatcactttctgatccgccccgaaatgtggatcatgaccctcaaccaggacagccgtatctttcagaagcaatccgtaccagaagtcctcgcaacgctgctggatgaagcacatgtcaaaaatgacctgaaattttatcaggacgaactgcatcagaagcgtgattacatcacccagaagcgcgaatccgcttatgagttctggtgccgcctggcggcagaagaggggattaacttctggttcgaagaaggcccgaaactgttttacagcgataaccatctcggtatgaccgccggtatcaatctgacttacaacccgcaggcggataccgatatccgtgacagcacggcattctcctggcgctacgccgaacagttgtgcagcgatgtcattatccagaaagattacaacccggatcgcccgtcttatccgttccaacatgaagtcaccggtgatgtgcataaacagcacccggtgtatgaaagttatggccgctaccgtgatgatgaaaccggtaagtcgttcacgcaactgcgctatgagcaatcgcagaaccagcgccagaccggcacggcaggtaccaactgctttgcactgatgccgggcaaaatcttcaccctgaaaaaccacccgtcggatgcgatgaatcagtcgtggcaggtcattactgtgaatcatcacggcatccagccgctggcggataacggtggaggagaaggaaccaaattcagtaacaccgtgcagtttatccccggcacccgcgaatggcgcccgccgtaccgtttccgtccgcaggcagacggtgatgagctggcaacgattgtcgggccggacggggaagagatttacaccaacgaacagggtgcggtgaaagtctatttccactgggatcgctacggtaacgcggatcacagcgcctcctgctgggtgcgggtggcacacggctggaacggtgacggtttcgggtttatgtcgatcccgcgtatcggccaggaagtgattgtctcatatctcagcggcgacatagacagaccgattattaccggctgcacctataacggccgaaatcgtcccccgctgaatctgccgcaagaaaaaacccggactattttccgcagtaaaacccataaaggggacgggtttaatgaattacggtttgaagatttagccgggcaggaggagatatatattcatgctcagaaaaatctggctgtcaatgtcctgaactcacgcggagagcggattaattacgacagaaccaccagtatcggacataacgatgaactggtcattgccggtaaccgtactgttactgttgaaggaactcaggctcataaaacgacaggtaattatcaggagcaggttgacggtgatcgccaccggattttggccggagattgtgtggaacgcatacagggggcggtcagtacagatgcgaatggtgatatcacgctgcagagtaagggaaaaatcacgctgaaggtcggcggcagttttgtggttattcatagtggtggtgtcgatatcaaaggaccggttatcaacctgaactcgggcggcagtcccggtgatttgttacaggcgatcaatcctgcagtgctgaaagccgccgccggcagtggtgccgcctttgttgcgcattgtccggtgaaggaagcacaggaggaaacggataatggctaa

SEQ ID NO: 284824 - DNA, 486 bp, Morganella morganii
atgagtaagaataacgagtacattattcctgaaggcagctttattacatcaacgcctgaccttgataatacaatcaacattctgatttaccgtgatcctacgctgaatgaatataatattattgttcaccgggcatttttggatcaggatgaaacggttgaggaattttgtgaaaatgaagtcacgaattttacccgtgatttacccggtttccaggaagaaggtaaaatgatcacccatgaactgggaccgatgaaaatgaaagtggtgcaaattgccaacagttatctgaaggaaggtgagcgattacaacaggtgcaatctctgattaaattgccttatcataaagataccaaccctaataataaccggctgattatctttactctgagccgtaccggatcatttacagaatatcagcgtaagcattatgttcgggtgttaaacagttttactccgaattcaacctttggattattaggctga

SEQ ID NO: 284825 - DNA, 468 bp, Morganella morganii
atggcttcggcgattaccaccttcaaagcaagcggcatcggaacacattttattattgataaagacggtacaataaaacaaacagcaaataccgataaatatacctatcatatcgggaaagttcgtgcacgttgtatggaagaagggacatgcagtgcagaggaagctaaaaaaattaaaagctttggctggtcaacagataaaattcacgacaatgaaaaaaccaaaaattatcctgaacgatatccaatcaatgcagatagcctgggtattgaagttgtcggacaatatagcaagtcaacaaagacctgggaccaggcaactgcccggcaaaaaacatcaataaactttcttataaaaaaattacaaaaggcttataacctgacagacagagatatttatgaacatgacaaaatttcgtataaaactgccggtgaaggtggtgatctttattctggcggtaattaa

SEQ ID NO: 284826 - DNA, 1380 bp, Morganella morganii
atgaaaaaaagtctgttggcattaattattacacctttgtttgcatatgcagaagatgctgtgaataatcatcaaccaagctcaacgataacagaagtaagatttagttctctgtattatggggaatcacctgtatacgcagataaaaaatctgaaggtgacaggtcagcaggtatctctgaattaaatcagcttcataattatatgcgcagttatattattgaaaataatgaatcagcggggaaactccatgaggaaatcaccctgaatcaaaggctggcaatggatgatacaggaaaactggatgataaaataacattagtcagtgatcttgtgaaaaaaacagatcaaaaaataaataaatttatggtggatattacagaaaataaattaccggaatataccgaaaatatcttccctgagttagtaaaaaatgaagttggcagccatatgactgcggtgctggaaaataacattaagcccttagaagagcgtacaggggcactggaaagtaaaacacagtacttagattcacaactggatatcactgcgcgaaaagcacggcataataatgagcttatcggcaccatccccggtatgatcagacaagagatagaaaaagaagcagcggaacacagtgcatatgtcgatcttcgggtaaatgatttggcggatttaatatctcaaaatcaattacatttacaaaatgaacagaataattttgaatcagtaacagcaactgaaatgaaaaaaaatatcagttcattagagtcaagaattgaattcaatgaagaaatggtgataaaggcgaattttgaagccgacgctaatgaaatcaacatcagtaaaaacagtaagcagatcgatgctcatacaactgatattcgggaaaatcaacaattgctggcatccgctcaggtcgtgacatccgttattgctgatgcaaccttggcgctggaagcggatgtggataaactggatctccgtatcagtaatgcctcgagaaaagccggtactgccacaaatgtggctaatcaaaacacacggcatattgctgagcagaaagtgaaggttgagaaaaacacgctggatatcctgaaaaaccgccaggatctgcgttcactggaaaatgatctgcgtgaaacaaacgagcgtcttgataacggcctggcggccagcgccgcactgaacggtctgttccagccgtacggtgtcggtaaactgaatatcactgcggcgatgggcggatatcagtccactcaggcagtcgcagtgggaaccggttaccggttcaacgagaacatcgctgtgaagaccggtgtcgcatacactggttcgaacgatgtgatgtacaacatggcttttaaccttgaatggtaa

SEQ ID NO: 284827 - DNA, 324 bp, Morganella morganii
atggattacctggaatttatcgaaactaaaattttcagccatacccgcaaagaaatgatgactgatgatgaattccgggaatttcagagctatcttttggaaaactacgaacggggtaacacgatcagtcagacaggcggatgtaagaagattcgctggcaacgcaggggaaccggtaaacaaggcggcctccgggtcatttatcacgcccttcccgctcacggcagattgtacctgcttcttatctaccccaaaaatgtcaaagatgatctgagtagtcaggaaagaacggtgctcagatcgttatcacagaaactgaactga

SEQ ID NO: 284828 - DNA, 306 bp, Morganella morganii
atggataaaacactttttgaaaatctggtcagcagcatggaagagatggtggcaattgaaaaaggccacgttgttccggcacaggaaaacaggcacagacacccgattccggatgttaaagcaatccgcaagcatgccggattaaaacagacagaatttgcagatgctatcggttccagtgttgatctggtccgcagttgggagcagcatcgtcgtattccgtcagggattgccttaaaaatgttgtatctcattgaaaaacaacccgcacttttatgtacactacgatcaatccctctgcgctga

SEQ ID NO: 284829 - DNA, 375 bp, Morganella morganii
atgcatggctttgatcagcagcagggcgaccaattgggacaacatggtaaatgtccgtttattcatccctttgcggaatccccgtgctttcatggccgtttcaagctgttgtttggtttcactgaaaatcgcgatatagcggatcgtcagaataaacagttttatcagcttgtcgggcaggggataacgtttcaccgcacacgcgaggtcgatatctgtcatgtttgtcagcatcgcagagacaaacagcagaatcgcattcattttcagcgtgatttgcagggcgagaaacaccccggccggggactgaacaatgccctgactctcaattttccacggcagtgtcagccagacaaacaggataaaaatatttag

SEQ ID NO: 284830 - DNA, 894 bp, Morganella morganii
atggctaagcaaatgaaaaaaaattttaattttaatatttctggtgttagggctacatcaagtattaaatcattaacgttttttgatgattcttattcagaaccagaaaaatcaccaattgatatatttcacgataagaaaaccagtaatataaagttactgggggctggactcttttctgctgaaaaacaacaatttttttcactcgcaacatcgttaaatagtgaatggtaccaactagcaaatttagttattctggggctagtatcgagcgtggaaacatactttagaagcattattagaaaattacttatcatagatgagcattctaaacgacatagctattcctcaactgtaacttatggtgcagcgctacatcaccaaaaaacacttcttccagaagcattgctagagaatgcatcattcacatcctcatctaatatagtaaaaagcttaaatgcttttttagatatcaatttgggaggatatagtaaaataccttctcttaattccgctttctttgactatgataccgtatgcaatttacgtcattgtgttgtccatcgttctggccatttagggtctaataatgctctttctctagggttagatgagtattgtaaatttttggagaaaccaatatcagttgattttcacggcattcaagaaattgcagtggtatgtgacactttagtaaaagaaatcaatgacaaactatttctagagactatatcaagaacagttaagaaatttgattggagtggtgacttaagaaaagataagaatctattcaagccatattttaatttattttctcccgcattaactaatactcctaacgctcttcgtttatgctattatgaatttatttcttgtcatgatataaaagtataa

SEQ ID NO: 284831 - DNA, 873 bp, Morganella morganii
atgtatgctgcatttggtatacctcgtacatatatcatgtatttaaggtcgtatattgattctgatagaaaaagcccccaatcaaagtttaattctatcctctcagaaaaatgtactaatatactaaatgaatatcgttctattgcaaaaaaaatgcctcaatataatagaatcatcgaaactggcgatgaaatgatctctgagattataaaaacaattaaatcatttaaccataaaaaaattgatgagttccccaatgattataaaaaaaatatagttattggtatcgaggatattgatatcaaagcagagagaatgattaaatttcttattgaagcaggtattatttactcccaagaagatatttctcatggtacagagcggaaaattaaaaggtttatccctcatcttgcattattaataaaagaaagaattttcacaaaaagcaaaggatttaatgcttctgtattattaaatatattaaaaggtccatcagaaaagcatccggttagaaagaaatttaatagacttttaaatgaaaataaaattaataatatttctttagatttaccaccttgcgataactgtaaagcaccaagaattgcagaggggcagaggtactgccatatatgtggcatgcaactaattgaaagttctacatttaaaaattgtatgtcaactaaacttattgaattgccattcactgatttccaaaagagagttattgggaaaacaagataccaaactattgaagatgttttgacatcagataattctgctgttgaattaagaaaggttaaaggtgtaggcgataaatacgcagctaaaattattataaaaatcaatgaatggacaaacgagtttttgtactaa

SEQ ID NO: 284832 - DNA, 738 bp, Morganella morganii
atgcataaaaaattaatattcctgctattactgcccggtttcaacctctgtgcttactcagaaaatcagtggactgacaatatcactgtgtatgaatacaacccaattgaactaagctatgacccggcattaccagaatatgcttcttatccaaaaaataaaaatgagctaacttttctgattaataaatcagaaagtggggatttaacaagtcgttatacgctattctctttttattataataactgctaccacctacagcaattaagtaataacacgagcatttcagaacattgtaatactgctgtttactatctggaagatttactttcttcagatcctgagaatccacttgcattattccactatggttttattttatcccatggctacgggaaagaaaaagacgcaaagaatgctatgatttattatgaaaaagcctgtcatattggcagaaacagactgatttccgcctgtgattttatattttcagcatttttaaatggtgagggaaacatagataaagatatcgataaagcaagagaacatgttaataccgtcgctggctacggaaataaaaaatatcagaattatatgaataactgggattacattttgttcagaatgaatacagaaaaggaagtgaataattgtatagaatccggaaaaaaaccagctgagtgcataagatcaggaaataataagatgaaaaaatataatacaaagtatgaaaaataa

SEQ ID NO: 284833 - DNA, 1161 bp, Morganella morganii
atgaaaaaaaccaaacactatcaggtctacaaaacagaagatatgaacattcaccgtgagatacaagaaccatttaattacaatgcaacaagccggcctgaaataacattattcgtcgcgcctcagggaagtgaaatccatgatattaatggagaatttattaccaactctgcatttggtcataccttcattggtataaagggaatcaatcccgttacaaaacagtatgatattattaccgttggtttaagtaccggagaaagccttaaaacagccagtgataacttatcattcaatgatcacatttattatcgtaatgcgtccacgctatctataacgtctgataatttaaaattccataatgacttcaataatctttttactgtactgcataattataagacaggaaaaagtaaaccgccaaactataatttactcactaataactgtggtcaatttgtagatgacttattaactgaaaataatatagatggaataaatatttctttttttcctgataacttgtacgacaacctggaaaatgcagctgacagttactgtactccactcattattgatctggacagaaacggggttgcaacactatctgataatgccggagtatatttcgatttaaatggtaacggcgaatctgtacaaacaggctgggttcatcccggtgatggcttactggcattagatcgtaataatgatggtattataaataatggtacagagttatttggtgaatacacggatcatagcaataacagagatggattctcatcgctttccgttttagatagtaataatgatcatctgataaatcaggatgatattgcatggtccgcattgttagtctggcaggatgtaaattcagatggcatcagtcagtcagatgaactgctttctcttgaaagtataggcatagtatctgttgaattagctacacggccttcctgtttttatgatgacagcggtaattttcataaattaacctctgatattaactggcatgacggcgaaaaatcagagattaccgatgttttatttcatatacacaacagagaaacagctccgttatctgacgatatttatattacagcactcccctctgatatatatcatgacacaataatcataccatatttattcggataa

SEQ ID NO: 284834 - DNA, 369 bp, Morganella morganii
atgagaaggctattaattttagcatgtttttttttgacacttaattcgattgctggtacgggtaatgctgccacctctgaaataataactccattaaaagtaatctgtgacacaaaaaataaggaatttattgctgatagagaaattacagatatttttggagtggcaaataaagatatactaggaggcatatctattactggattaaatggtactaataagaattttcacgtgggaaaaaatgattattatttgtttaatgtagcaaagagcgctcattttatcagaaataaggttaatatctgtgtagataataccttcaataatatgggttattatgaccacttaataggaattgaatacaaatga

SEQ ID NO: 284835 - DNA, 732 bp, Morganella morganii
atgattaaaaaaatattaattttaatcggtcttatttcagtatctatgagtgcagtagctattgataaggtttaccgggccgatggcagatcgccagatgaggtttttaaatatggattaagttcatggggaaataaccttaatatgatagatcatgtttctgatgtaacaacagccagtggagatagaacgaccgcctttatttcaacatcaactaacataaattcggctgaacgttttttagaccgcggaatacgaacaagtacaactggacgtttctatatttatcacattagaccgacccgtaatttttattatataagtgatttaattaatacgctttatgaacgagaaaatctaatcttaaataattattatcgtagtttacttggtggtgaggttgagtactctgcactgagacatatatattcaacacaaatttatggcgttacggcttatcatattaatgaacaaggtcagcgggttactgagccatttcggattaacccatattacactcacggaaatgcggaagtatatgatagtcatattgttcctgcagaaatggatctacctataaccaatgttcaagttcatttaactacagtgggtgtagcttctgaccgtagggtggttccgacatatcaactgccggatcaattaattgatgatgccagatcatggactccagggtgctgggatggctttattaatttcttatcaagtaaataa

SEQ ID NO: 284836 - DNA, 813 bp, Morganella morganii
atgttcaaattaaagaaatcgatattaattacattttcattactttgttctatgtcttcttttgcttcagaaagtgacggaggtgaaaccaaaaagtcaacgcaagccatggttgtaaatgtagtaaataatatggaaactaaattacatttacattctaaagagttaatgtatggtcgctggggatctgagcccagaaatgaaatagctcaggcaaacaataaccaatattatacaaaaggtgtttcgttcacaggcccagaggcaaaagttaattatacatttctaagtaatgatggcaaaaagttatatttgagcatttacactaatgttgaccattactatcctaaagaaccaacattatcggcctgtttgagtgacagaataaacgagagttccatgttacgttgtgctgttcttgctaaatcatcaatagagagaacgacttcgtttggttacgttcagatcaaggctgttaaaacatggagcagtcgcaacaatcaggaacatgattatgatgttattataaaatctctcgatggaatgaagttaaaaaaatcaatatgtaatattgataaaacaaatataattgaaaggcaatatataaaatcaataatggcggtatcgaattttaataataaagatgaatatccacataaggttacacttgcagatggacgtacatttaatatgcataaagattctgagggggttttagatctagtaacaagcgcatatcactcatcaatgtatatagatatttgccagtatcaaaatacaaataatattcagagtgtatatattcataactaa

SEQ ID NO: 284837 - DNA, 291 bp, Morganella morganii
atgattaaattaaataatttacagatagctcaaatatcaggtggcggaacggagcgtatgcctgataaaacacaggctaatgatgttggtattggtatgattgccggtacgctcggagggctggcgcttggtggcggacctgtaggggtagcagttggtgtaattggtggtggtttagcatacgctatgtcatctgaaagtaacagtccgtaccggccagagcctcagatgccagaatatattgattttaatgatatgtactgccctaatcctaattacaattattattaa

SEQ ID NO: 284838 - DNA, 453 bp, Morganella morganii
atggtagataccatgctgataattttttcacgaactttggcaggtacagccgtggatgagataaaaccagttaagatgtattttatttctgctattttgtttttttttatagcaattggtgtatatggttcggcaagtggctatgttgaatatttttttaaatctgacattatatcattttcatttgtagtgggttttcttattttttgctttccttttctttcgtggttatcatatttaatattcatggtggcatataaaaaaagaaaactaaaagtaaataataaaataaccaactctcttgcggtaatagcgatgtttggtattgtttttagttttgttttctcattttatgttgagtatgatttaacatcacgcggttatgtcaaatgttataaaaaatcaattcacgcaccaactaaatacgttatttcaaaggatatgtgcaaatag

SEQ ID NO: 284839 - DNA, 888 bp, Morganella morganii
atgggatataaatacgaccccgtacgcggaaccgtcatttcatcagagacgccgtacggttttgaggagagacccgattatgatgaattacatcatcaggctaatctgcttaaaataaaatcaatcattggagataaaacggatgatgagaatgttgccgcactgattacggttgaggaagcggagtatgttttaataaataccaatacttcgaatcccttttcgtcagcgaaagaaacgttgtttggtgtcggtgattttatttccaatttcgcaggtagcgtttatgagtcaggcagggtttttcggattattaatgaatttaaggatataggtattaaagctacggaatacgtagggaaaaatggtaatgtttatatccgtctgtccggtcatgccggagtcagaacctttcttaatgcaacccggtatttggcagacaatgcaaaaatactttatataggcatcggaacccaggggcagaatgatatttcagtcaaagcaacacgattttcaattgtgtattctctggcctatcgtgttgttgagcttatatttaaggatgaatatacgttgacagatttttttgtgaacgtgactatggatatggcaaagcttttgataagtattaagctgggaacaatagctgtcggagtactaacaacagccagtgcctttgcagcagggagtgttattgttgtagcttttggggtattcgttgcaggtgcttttatttcttatggtttatatgctttggatgattatttaggaataagtgaatccattatcagagagctgaaaaagcagcgtaaaccaaggtctgatggtgatggtagataccatgctgataattttttcacgaactttggcaggtacagccgtggatga

SEQ ID NO: 284840 - DNA, 1008 bp, Morganella morganii
atgaactatacaaaacacttatttttcagtctgtgtgcagggctgctttcttttcaggctgctgcctataccgacttggctcatatgatcagtgtcaccattgacagccccgcacagcaacagcccgtcggaacaacgctcggtcactggcaggatttaagctcatcaataaattgtgattcgcccatagcgccggataattaccgattcagcaataacggctataccacaaccggcgtgacactgtctgacgacggaaaacgctatccggtatttaagacatatcttgaaggtgtcggcgtggcactcgctgtacgggaaaaaggcacatcagcctggcatcctgtcaccgaaaaccagacaagcgtttcactgaataaatcagacaataatatagtatttgaagtaaaaggcatttatgtgaaaacccaaaaaacgttagtgccgacaaaagtttcacaggaggtcagtctggtgaagatctcctgtatgttttccagctcatccgtaagcatgccgatagaattatccgtacgcagtaacggagccacacagaaagcggaaacctgtaatgtcaccaataaaacccagtcggtttatctcggtactcatgagctgacggcgatcagaaaattaaaagtgggtcagaattttggccatgcccgtgccgggcttaccgtgaaatgtgacgcgggaatgaatgtctattttacactcggtgatcatctgcattccggaaacatcaatactgataccctctttcttgaaaaccacaataccaatccgggatttgcggtacagatattcgaaccggaaaaatcagagccctataaattaggcggtgataaaaaaaccggttcggcacatcagtatccgttttataaaaccggtaacagtacctcagagaccatcacaaaatatctggattttaaatatgtaaaattatcggatgatgtcaaagcgaccgaaggaaatgcgcaggcaacaattactcttatctataaataa

SEQ ID NO: 284841 - DNA, 576 bp, Morganella morganii
atgacattcataaaatgtgcgcatgctttattacttgccgcgctgttacccgctgcggtgagtctgaccgcatttcccgcattgggtaaaaccggtgatgaaaaccagttgaaaataaatatttcgggcacggtggtggccatcggacggtgtgttttccgtaatcactcttcaccggatattgattttggtgatgtgcgtttttcgtcggtggcgggcgtgaataatattgagggccgttatatcagagagctggacgcatcaatgtcgtgcattggtgatactgccggtacaacccgctttagtatgaacacaataaacggaaatgctatcagtgacggcagctatgagtcgttaccggtgattgtcggtggcattcagacggttaataaaaatctggctattcgtttatttgtgaatggcaaacaacaaagcattaataaggattttattgtggatattcagaatctgccaacgctggaggcggaactggttcagctgaatcccgatgataatacctggcaaaacggccagtcgattgaatctcacggcatattagtgatgagttttgattaa

SEQ ID NO: 284842 - DNA, 1719 bp, Morganella morganii
atggatatgaatgttaataaattatcaggtacaggttcaggaaatataaactccacagacggtgttaaatcagagaaaaaaccaaatgttattaataataatggcaggaaagttaacaatgaagtagttagtgatgtcagtaaaaaagccacagatattaataatgataaaaataaaccagttttaaataaaaataaccttgatgttaaaagtaacataaaaggaagtggtgatttttcatttaatatgctgtgttcattactgactgatttcttttctgacgaaaaattaaaatttaactccagagcacatggctataatcacaaatttctggatgggctatggtcttcagaaaaagaaaatcaattaaccgaatgtatttctgattctgctgatttaattaatgaccatatcaatgcagtagcggattactattttttaatgatgagtgaaaataatgattcgttattgaaaatgcctggcggtgaattaaaaaataaactgacaggtgatggggttgataagtttaaagataaaaacgaaattgttacctatttaagaaataaaacaaatgcagatgaggtgattaaaaatataaacacagaatcatctttctgtaaagataggactaaattatttaaatcattaactgaggaattaaataacctgccggttcttgatgatgaagtcggtttacttttatcaggaaatcgtgatgaaattaatgctgagcttacatcattacatgccttggctgatattcaggatgatgcaaaagatatccttaaggatactgtaaatttatttagtgctcagcgtaaatctgatactgatttcactaattcattaactattttgatgggaaaaattgcagatttacgggataagttagcacagcataaacttgaaaatgatcgtctgatagccactgctcagcaaaaaacattgcaggataaaactgatgctgacggagctgaaatggcggaaaaaataaaaaaagcagagcgtttacaggctatttttaaatggttggggccattattgattgcactgatggcagtattaacagcactgacaggtggtttactggcaaaagcattggtggcagtggttgtaattgtcactattattagtgaaattgttaaagcgaccggtggcccggatattatggcaaagataatgacaccggtgacaaaattggtggaagttgtccagaagtttattaaagatatggccatgaaaattggccaaaaacttgggctgccaccggctgagttaaaaaaactggaagaaaaaatggaaattattgccatggtacttgcagttgttgttgtgatggctatgtttgctgccgcaggtgccgttgccggtaaagttatcggtcaggtagcatcagaaacggtgaaggaagtattgaaacaggtaatggcggaggttaaaaaattattaattacaatgatgttgacatctaccattgtcaatggtgcaaattcaataattcaggcgaaacttaatgaagatgtaatgaaattaaactctgatatagatttagaccaggaattgctggataaattgatggcattgatggagaaaataatggcagctttttcagagtcacaacaggatttaaataaaatgaaagagcagttgggtaaaataggtaaggatgattttcagcgtaaaaaatctattatacagtcagggatgttagcagtttaa

SEQ ID NO: 284843 - DNA, 858 bp, Morganella morganii
atgatcaatactgagtcgtgttgcagtgatccggaactggttttccggggcgagagagtgaataaaaaagccgttgattttttattcggaataataaaaagaaaatcaaaaaaaaaggaaggtaatgatatttcgggatattattaccttcggtgtcagtatgacaataaatatcatcatgggaatatacctctctctgtttctgaggtaaaaaagagagattgtcacgttccggaggattatgatattactctgatgtgttcatcacctgataaaataaaagacaccgtgtttaagaatggtatcagtcaatatattgtctgtaaaaatacgattgctgaaccatctgatgtgcctgctcatagttatgctccgaataataccactcaggataatctttctcaggataatacgatagcgccggaagaagcagaaaacatgccggcagaaaaagaatactatcccgttactgattgtggtgacacaaacagcattccggagcaggggattgcggtaacgttgccggaacagcctgtttttatgaactatcctctgtcaggagtaagcccggaaagagaaaattatctgttgcggcattatgaaccggaaaaagcggctcaggagaaaacatctcagacagtttatcatctctggaaaaatcagttgtctccggaaatcagaaaagctgattattattgctcttaccatttcagacagaaatatcagccaccggaaccggtttatatttacagagataatccgggagggtttaaattagaaacatattcagaatccctgaagcgacgactgaaatcagcagtaaatgtaaacgtaattgataatattgatataatatga

SEQ ID NO: 284844 - DNA, 1038 bp, Morganella morganii
atgcaagatttttatactctgataacaatttccgatgagggattaaagaaagaaataaccattccctccggaagatacagcatcaacaacactattaatcatgaaaaacatctgattaacctgaatatcgcgggtgcagagttactgcctgaaaagacagaggctgagttatatgaaaataattatagcgtctcttttaaaacctttaatggtgaattagtaatacaagaaatcagttataacaccccctttatctttcagggaaaagtcctttttgccataaaaaaacaacaggataaatggcgtaaaaacatcatgttatgtgaaaaaacaacaaaacgcgcagccctgcactatcttctgcctgtaatatttctgttatttattataccggcaaccggatttatgctctttcagtacgatagcaataaaaacggaaatccggctaatatagatagcagaaatattataagtcagtatattaaaaataataattacatcatcaacggaaatgacatccttattttctcccctgatgaaaaatcaattgatattatcaggaataaaatgcccaactatcaaattcacacaataaataaatcaagattaaaaataaatgatagtgatatcattctggttcatgacctttatcataaaaaaaagattacatatatacaccgcgatgataaaaaaacactattaaccatcccggatatattcagaaaagatattaccatacaatacttttcattcgatgatacaattaaattaataaataacagattcagccatctgttaatcagatactctgtaaaaaaatcaggtgacaacattattatttatggcgaaaaaaggagaagtaaggaaacagacaatattataaaggatatcaatacgaccatatccacagcaccggaaaacacactcgtacagtacagggaaataccttcccgcgatactcccccgggagtatacggttcagtaaattatattcacctgtctgacaaccatacaaaattcatctctgataatgaataa

SEQ ID NO: 284845 - DNA, 264 bp, Morganella morganii
atgccggatatagcaaagaaaaatgatgcaattacatttaacacattattagtgaagtttaagtcacccattcatgaagataataaaaaactcaataaactgatggatagtttgcaatcaggagataaagataatgcgaatgcctatgatatggcgatgctgcaagcttgctcatcatcactgaatatcaagtgctcagcactttcggcgatgattcgccagcataaagaaaatctctcaacacctatcggcaatatgcgctga

SEQ ID NO: 284846 - DNA, 306 bp, Morganella morganii
atgtcttcatttacccgcgttttacctgtcacaaatatcaccggtgtctctgagttactggccgatttcgctggtcaagaaaaatttgtgcatcagagcctgacactgcccgggagtaccggaaacagtctcagccacaaaacaaaaacactcacagaaaagagaacatccgcagacactaacgatgtcatgatgattctggaaaaccaggccgtgatggccaaatggcataccgagatcagtttttattcccgtatgctgcatctgaccctgaatgctgcagataccgtaattaagggtcagtga

SEQ ID NO: 284847 - DNA, 822 bp, Morganella morganii
atgttgaaagcatatgtttctcttattgcactcgccgtttcttcctgttattcagtatccgcttttgcaaacactactgtatccttcggcagacaggccatcgctgtggcgtcacatactgttgctgttggtgacaatgccagagcagaaaaaaccctgtctgtcagtctcggttcttatgccaccgctgaggcatatgattccgttgctatcggacatttagcttatacaaatcgggagcatacagtatctttcggtagtacactgtcccggaaacagctgattaacatagcacccggaactgaagacaatgatgcagtaacagtgaaacaactacagcaaagtaaacacagcatcatttcagaaaataataaaaaaacagatgcagcaaaagctgaaataatcaatatggccgcaacctatacaaactccgctaaaaacgaagccatcaataccagtgctgcctatacaaattctgctaaaaacgaagccatcaacaccagtacacaatatacagataccaaattccgtcagctggacaaaaaaacaacctcacaagttaaacaaaatacacaacgcattgatagcatcgaaaagaaaattaatgccggtattgcaggtgtcactgctatttcctccattccgtatgtgacggcaaataatttctcatttggcgttggcatcggtaattataaaaacggaaatgcggttgcggtcggtgcacaatatacaccttacgggaatactaacctgcgtgtaaatacgtcatttgatagcaataataattccgttattggtgccggtgttgctatcggttggtaa

SEQ ID NO: 284848 - DNA, 1485 bp, Morganella morganii; identical to SEQ ID NO: 120018

SEQ ID NO: 284849 - DNA, 321 bp, Morganella morganii
atgtttgaaattgagatccacgaagacgcactacaggaattatacgggttaccacccttgttacgggctaagatgaccaggcagcttgataagctggcagcatacggcacatcactccgggaaccggatacgaaatccgtaaaagacggtttctttgagttgcgggcaaaagccggtgatgtcggtcgtgcgatctatgtataccggaaaggaaagcggatttttatcctgaaaatctttgtaaaaagcaccgcgaaactcccttcatctgtattaactgccgcagcacggcggttagaggagatgctgaacgatgagtaa

SEQ ID NO: 284850 - DNA, 540 bp, Morganella morganii
atgaaggtacgatttacagtgacgaatcacagtgggagtatgatccgtcaacttacgcttaacgcctgctgttggctcgcagaggacaggctgggtggttatcaggtctgttatgagcgaagatcggaagataaaccgacaagccctatgcttccagtagtaatttactcacctaaacagcaagatccagatccacgtacaacgaaaaagttatttgatttatgtattaattggttatcaactaatagtccgctaattatcggctctgtttcatcagtgataattcccaaatttaaacgcgtctgttgcatgataagtaacaccgtatcagggcgttactcatcatgcaacagtgagctctattccataaaacaaaacccgccttgcggcgggttttcagtgcttctcacagaacaggggattactgttcgaacatctctttcagccagccgggggcttcttcgccctgctgctgagccggggcctgctggccgcacagcgcctgtgcgtccgttgtccagaccggtaatgtccgggtga

SEQ ID NO: 284851 - DNA, 201 bp, Morganella morganii
atgcagactgtatcgggtatactaaaaataataagcaataacagtgataatacagatcaggtcttatgtgatttaatgccactatcctgcgccggaacttgtgataaatattatggtgttatttcttccgctgaggctgaagctcttttactgcatatacaggaacaaaagaaaaaaaatatatttactgattgcgtttaa

SEQ ID NO: 284852 - DNA, 4452 bp, Morganella morganii
atgaataatacagagcaggtgagaatcgaaacgccatcattgccgaaaggaggtggtgctattaccggaatgaccggcacaccgggaatcatcgggccggatggtgcttccgccttttccgtgccgttaccggtcagtcacggacggggatatttccctgaaccggtactgagctacagcagccggaacggtaatgatgccttcgggcttggctggacagtcagtatggcagcagtcagccgcagagcggtgaaaggtgttccccgctacactaatgaagatgaatttaccggcccggataatgaagttattgttcctgttttggggagtgacggcaaaccggtatcatccctgaaaagtaaactgcttgatacagacctgagaacggaataccgggtaacagagtatcgttcccggctggaaacctcatctgacctgctgcaatactggcaggcggtaagggatactccggggagcccgcctgaattttgggttatatttgccgcagacggacaggtacatctgttcggatatgagaatccggctcgtatatataaaccggataacccgcagcacatcgcccgctggttaattaatgcgtcggtatccccgcagggagagcagatttattatcgttacagaaatgaggataatgaaggttgttctgaagatgaaattcgttttcatcagaaacaatccttccgttatcctgaaaaagtctgttacggcaataaaaaaagcgggcgcaattttccttgtgtgaataatagcgctgatgataaccagtggctgtttttcctggtatttgattacggtcagcgcagctgtacgctggctgatattcccggatggcagattccggcagggaagcagtggccgctgcgtcaggatatcttttcctcttatgaatacggatttgaaattcgtatccggcgtctgtgtcgtcaggttctgctttttcaccgtactgctgatttggaggccggtaccgatcaggggagtgaccctgagctggtatcgcggcttgttctgacctatgacgagtccccggttatcacaacactgattgccgtacgtcgctccggttttaatgacctgaaagataaaaacgggataaccgtattaccaccgcttgaatttaactggacgaaaccggaaaaatggtcagaacatcaatgggaaacattggatcatatcgggaaactcaattcgcaccagccctatcagttcctggatttatggggagagggcagtaaaggcatattgtataaaaatcgcggggcatggtggtaccgttcccccgtaagaaataaaaacagcagcgatattaatgctgtcacctggggcgaaccacaacttttaccggatataccggcattggataaacacactctgctgatcgatctggatggtgacggccgcctggaatgggtggttattcaccggggtgcaaacggttattatccgcaggataaagataatgcggaacaatggctgcgtttctcctctctcagtggttttccgacagaattccattatccggcagcacaattaattgattttacgggtaaagggttgtttgaccttgtggttatcggtccgaaaagtgtccggctgtatccgtcagatcgtaaaggctggaagggcggtatgattattaagcagcccgatgatgtaacactgccggtatcagggggagatgagcgttcttttaccgggttcagtgatttaccgggaaccggccagcagcatctggtcaggattaatatggatggcgtttattactggccgaatataggtaatggctattttggtcagcctgtttatattccgggctttattccgggagagaattttgatccggcaaacctttatctggctgatattgacggtaacggttcggcaaatattatttatgcgcattcagatcacctcgatatttatattaaccagagcggtaatcgtttttctgagccggttaaattaccgttacctgaagggatccgctatgaccatacctgcgaactgcaatttgcggatattcggggaaacggtgtggattgtatgatcctgaccaggccgctgccggtactgcgccattggttgtttgagttttcagctaaaaaaccgtggctcctcagtgaggtaaataacaatatgggcatgaattacgcgctgagttaccggagttcggcgcagctctggctggatgaaaaagcagcatcagattatcaggaaacgcctgtctgttatcttcctttcccggttcactgtgtatggaaaacggaaactaaagatgaaattaccggcaatacgctgaccagtacagtgaattaccgccacggagcatgggatggttctgaacgggagttccggggttttggttatgttgaaataacggattctttgctgacagaaaatgaggaaggtaaaccggaaacaacgatgccaaaacaaacccgcagctggtttgcgacaggtattgaatcactggataaacggtttcccggggaatactggaataaggatgaggctgcatttcccggctttaaacacaggtttacgcaaaattacggtgatgaggaaaccgaatgcagggatgattgtaaaggcgccgcgaattattggctgcacaggggattaaagggacaattactccggcaggaaatttacgggattgataaatcagaattatcagcagttccgtatgaggtcactgaacagcgggttgctgtccgtctgactgaaacgcgggggagttatccggtaatacgcccgtcagttattgagcatcgccactacctgtatgacaggttcgcgactgatccgaaatgcacacaacatgtgatcctcagcagtgatcaaaatggtttgccactgaaacaggttactatcagttatccacgacggaaacaggatattaatccctatcagagtattaagagcctgccggaaagtacatggcggagcagttgtgatgcacagcaaatgaaactgcattttgtattacagaaaaacagttattacgatcttgataaaccgaaagactgtatctaccaactggcgatagaaaatgaacaacggcaggattcggtagaatttgacggcagcaggctgccaaagggtggttattctctggagagtttatcacaggaggacagcctgatttctgaacagggtgattttatattttcaggacaaacccgggtggtgtatctgaataagtccggagaaagcggactattattgcctgactttcctgtacgggttgcttatacggaacacgctgaatttgatgaaaatcattttgaagaaatggaacgctatttcccgggaaaagatatagcagagttattatcatccggcggatacaagaaaacgaagtatgcatttccggcagaaaatgagaaaaaagaaatcatctatgtagcacaacgggatatgacggaatacggaactcaggaacaattttataaaccaatatcttaccgtgccacaaacctgacagaattcaataaacttgagtgggataaatatttttgtgtggttgttaaatatacgaattcagccgggggagtaactacacctgaatataatgttaaatgtctttctcccgctaaaataacggatgttaatgataatatatccactgtgacgtataacggagccgggcaggttatcagtattcgcttttccggtacagaacagggggaaaataccggttattctgatgctgtattaacgatacctgattctataactgatgcacttaatcttaccgcacgtttaccggtatctgaattgtttctgtatgaaccaaacagctggatgctaaaagtttcccccgaatttatgacgccagagtataacgatattatctcaaggctgaaaaatgatcatatcattactgaagatggttatttcagtgcattttcccgtgatcatatttgtgaaaaaaaccgttgcttaataaaagcggtgatgatgccggataaaaacagattaccaccacatatattacagttacaaactgaccgttatgataatgacaatgctcagcaaatacggcagaaagtgactttttttgatggcctttcccgccagttacaaatatctgtcagagtagaatccgataataccactgtaagaagtgataaaacgggccacaccctgaagataaatggttctgattttcgctgggcggtaaccggacgtaaggaatataataataaaggttatattatccgtgagtaccagccttattttattgatgactggagatatgtccgtgattatgtcttaaaaaaagatcagtggtcagatactcactattatgatccgcttgggcgccttatcagcgtagtgacagcaaaaggttatttacgtaacagcatatataccccctggtttattgttcaggaggatgaaaatgacacagagaaattaccataa

SEQ ID NO: 284853 - DNA, 2415 bp, Morganella morganii
atggatgagagccggtgtgaacgtattgaacgttttttacgtctttcccgtgccctgaatttaccgtataacgagctggatacattactgacttctgttatacgggctgaaaaaaatcaggcagataaaggcctgactattaccggaaatacattgcgggcaatcggtttatttgtgagccttaacaggaaactaaaatgtactgtcagccagttttctgttctgtatgatggtatttcgatttacagtcagggaaaaaatatcagtgattttgaccggttatttaataatgatgaccgcttcaattaccgttttattcttgatgataaaaagatggaagagcgggatattaaccgtatatgcagtgtatttggtattaactatgataccttttcctatctggcactgcttacccgggaagttctggggctggatgtattaacccgtagccggaatgttatttctgctatttatcgtcctgtggttttggctgacttgctgaaaataaaaccactggaattactcgcattactgaaatcaatgaattccgatgctcagtttgatcgtttatttaccgggataccggaaaaccgggtttacagagtatttgagcaggcggatattaccagtgcgattagtgctctggtcagtatccatgcatggcggacagagaataaattatcggtagctcagatctttaattggattactcctgcaattgttgatgagcaggaagataatactgaacgggaactattccgtcagattaaacaaaatacagaaaatatgttattcagtaatgagatattacatcttgccggggtgccaaaggatatagaatgggtttcattattgcatgttttgattaatgatcagggaattgttaaggacacggatgacggtcttgattgggaaagttataaaggctatgcactgggtattatcacacctgtggtgagaaaagaattagtaaatgcagcgccggaagaacaggataatgttattaatacaattttatctgtgcttttagaaaaaaggtctgctcagtggaaaagtgtgagtgggttacttgagggatatctcggaaataaaacggacagtattatcccggcattgtactggtgcggaagtaataccagcgattttttgaaaaatatcctggatatacctgacgataatatgttgtctgcggatggtaataagataatgaggttattgtcatctctgcggcgttatagtgacattatttcacatttccgtctcgagccagccatgatgtcacagttattatctcatgataataatcagctctggtatgaaatgaaaacagaaaaaccagatttacagttactttaccggctttcggtatatcgaaaacttattgacgatggtaaacaaccggctgaaaaattattaaattatctttctctgattaattcactcccgatagacagtcgcagtgatgaaatacgcctgtatcgtgatcaggcgctgaataaactatcactgtttatgggatggagtattaatgagttattaattgcagcgcaatatgtcgcgccggaaaatgccattatccggacattaccgcaaattcttcttgttaaacaaattcattcagtttgtctgaaaacggggatgagtgcccgcagtattatttcgctgtttaatctgaatgaagatagtaaatcatcactgtatcagtctgttgctgatcaggtaatggaaagtctggcaccgcaggatgtatcactttacagcaatgatgaatccagtcagggtgacctgaccgtaagtgtttcagccgggaagacaacactgctggtttacagtgaaagtcaacaagaacagcaggtggcggaagatgaaacacgactgactgttaccttgcagacactggaaagtacgccgctggagggaatacctgttttatgggaaaaaatatctgaccagggtgaattatccggaactgaaagtacaacagataaatcgggccgggcttcaatgatattaaaagccgggcagcagcagggggttgcattaattaaagcacattatggtgtgaaaaatattccgttacctctgatcagaattgattgtgatattagtacgctgggtacaacaggtattgagaccgtaccggaacatccggttgatattccggcagacggtaaaacacaggttgaaattactacattcttccgtgacaaatacaataacccgggaatagataaaaatatccgctgggaaacaaccgggggccgttttatttataaagacggaattacagatgatcatggaaattgtcacgcaatattggtcagtgatgaacctgctgatgtcacggtgcgtgtattttatgaagatatacctgaagaatacactgaggttgatatttcttttatttcagcatag

SEQ ID NO: 284854 - DNA, 2832 bp, Morganella morganii
atgattaaaaaatataatcagggagaagttaaaggtcataactttatatcagatccttattttgaaaaatgggataatggtgactggaaaaagggagagccgaataaatacacaaagagaaaggatggggacaaaacgtatctttttatcagtggtaaggggagtgtttcacagtctgttattttaccgaaaaaaagttccggaaagtctgatgagcctcctttttactcattgacctttgattactcaattaaaaataatgcatcggcgtcattaattctgacatatatgagcggggaacgtgagtgggataaagaagagattccgctaccggatgaaaaagagtggagtcaacataaactgttacttgatgtatcagaaaaatatactgaaataaaatttgaattttatgccggaaaatcagcagggaataaagggattaacctgacagccgttgatatgcagttacatattggcggattcagtccgaaatccattgtactcgatcatgaaaatattccggcagataaaccatatctgcaacttaactatggacgtaagcatattcttaatatcaggccatctgatgacagtgcgtggcgtgaccttggttgtttactgaagtggaatagtgatactccggcatctaactatccgatcaattttgagcccaaactggacaccgcgcaatctttagaaaaagaggggagtaattggaatatatcctgtttagctcaaaaaatcagcggaattccggagacattcagcatcatgctggcgtcagaatacagtgcagtaccttttgtttttaatgcggaaataggcgattacctctataaatttacggaaccggcaattaccgggattgctgttattgctcaggatgtgcgggctgaagtcagcattcgtgttatctgtgattatgatgaggagtatccggatatacagggcgtgcccgatgttgatgtttgctggaaattggatgacgatgagtgttgcggtaagaccaaaacagacaatgatggtatgacgattctttcatttttacctgagaaaagcggagaccataaacttgttgcatcaataaccgataagaaaggacgagaaagccgtcatacgtttgatattactgtttatgaccgttccccgtggctggataatacccggattgctgtcaataataccgatgttgatttatcgggagaagccgaatatctgatgaacggaaaggttactgttcttcacctgaattgtgatgaaaatcgcgatattttcggacaggttaaacttgaaaataaagaaggaaataccggcgtaaatatcaccccggcggaaggccgtaatatttcaccagaaggattgttatgggatattaatatcacaggcagcgacagcagagaactgacgttattattaaccagtgaccagttcggtataccacaggaaattcatgttattgcattacaggatgataccgggaaagagattcagtcactgaagattaatggaaaagaaataaataaaaaggcaccgttaattatcacgccggcaaaaccggtaacactaaattgtacggtcaataaattattgtcccgtttgcaggctgaactgaacagtgaagaaagtaaattgctgacagcagaaccggctttcggacaattacaggcactgaaaaataatgcagcagaatgggtattaaaaagtgccgacccgcagggcggattctttaatctggatctgaatattccgccactgacaattccgctgacgctttccggccgtgcactgccgcaggaaatcatctcaggaattgagagcattaaactgaataatacatcggtaacaatcccggggaatttggttcttgcgccgggaaggacctgtacactaacagtgaaacctcatcctttactgaaggatattcctgtttcattagtatccgatgccggtaatgaaatttctgttgtcagcaatccgccgtttggtcaggaaatccggctggcagaaaacggaacttcttggcagatatctgctgaccctgcttctgcacgcggaaaattctcattgcagattcagagtcagtggggaggagcaccggttcatcttgatggcgtagtattgtctgcggatttacgggatgaaggctctgtctgtgtcactgatggtgacatgggcagaaaatacgatattgattttaatattggttttgcttttctggctttggaattctattcactggatttgaaacttctgccggataatttaatcagcggacaaaccgtttcctgggaactgacggaaggagaccatcaccgggatgctgtttcgtttgatccggagacaccgatagtattagatttaccgggtactgattgggaattcaattataccgaagaagaaagtactcaattcgatgtagtattaaacagtcaggggaagttcagttataaaattccgtgccatattttcagtgatgaaaaatatctggaggaaagtcaatgtatttttatgttgaatgattcagttattgtccccggtataaagtataacgatcttgaatataagaaaaaggtgtcgcttaaactgaaattatcacaggaagtatcagcgtttctgaatggaatggtattagcattagttgttcataaatcagatgatgaaggtgatagtcttattataacctccgatgaatttattactgttgataaaaataaacctgaccttgaatggaccgttgaaaccgatgtggcagttggtcaccgttttacgctggagatcgttttggagaatttaaaaaatatccgtgccgttatgaaatttacctcagtgtga

SEQ ID NO: 284855 - DNA, 2805 bp, Morganella morganii
atgaacttatctgaaattggtgaactgtgtgcagatacgccccggatgacggtatttgaccccagaaggctgacagtgcggacagtggattttaaccggaaaagcagtacagatatacccgacgcactgataacccgctatcagtacggagaacggagtgaaatgcagatgtgtgctgatccgcgtttcagtgtccctgcacagggaaatgaacccggatatcagaatctcgtttctgccacggatttactgcaacgccctgttcatcaggtcagtatcgacagcggtgaatcattaagtctgttgcatgcggatggccagcctgaatggataacaaaaaatccgggagaggaggttgtcagtcagcgttttacttatgatcgtagcggacgtttgttgtcactgcacagtattaacggaacagaggagatcttattacagacacggcgttacagtgacggggttgataatgccgaagaatataattgccgtggacagtgtaccgaaatacagaatggcgccggaactgaaacatttacggagtttgatatttccggcaaaaataaaacgttcagccgccgtttctggtcagtacgtgaccggagtgctgatttgaatcatccgcctgaagcggaaacgcggatgtggattaaccgtaatgatttatcggcatcaggtagtgtccggcagttatcgttgtcttgtcatgaagcggagcaggaacgctctgtttatacacgcagcaacgggtacaaccggcgcggacagcttatcagcagtcatctgacggatgagggcggaaacctgcatgcattactgatatcggcagattatcatgcgaatggtgcttgtcagcaggaaatgctgggtaatggtgtgacccgttattatgcacaggaacatttcacaaaacggctgttgcgtatttcaacctggcgtccggacgctgataaaaaacgttacccgattcaggatatttcgtatcagtatgatcctgcgggaaatgttactgagcgttatgatttgggccgggaggatcagtatttcgataacctgcgggtcacagcacataatcagtatcattatgattcctgttaccggctacgttatgctgcgggccgtgaagcactgaatggcggaaaaagcacgataacgccgcttatcagcgggtcacaccagctggtgaattatcagagatggtatgattatgataatgcgggcaatatgacgcaacttcgccacagtgccggacaaaacaactggactcaggttttctctgtctcgccggagagtaaccgcagtttaccgcagccggtttcaccgtatgaagtggaacgcttctttgacagtttcggtaacctgaaagaaagtaacggcgtgcgcttttcccgtgattcacagcagcagcttgtccgcgcggatggtgcacggcgggcaaacggcgcgtcggactatgagttttatcagtatgacagcagtggtcagcgttgcagcaaactcagcagccggattgctgacggtatcactcaggcccgccgccgggaaacggtgacgtatatttccggcatgcgtttgtgtgagtatgattatgacggtaaaccacagggcagccattattcactgagttttccgctggccggccattcggcggtggtatgcctgtctgagcgggagccggagaaaaaagaaataccccttactctcatgcgttataactgccttgatgcgcagggctcggtcgcgctggaactgagtgcagagggcgatattattacgcaggaggaatattatccgtttggcggaacctcactgttcagttcacggagtgagagtgaggcagactataaatatcaccgttacagcaataaagaacgggataatctcaccggactttacgattacggattccgttattatgcgccgtggttgtgccgctggatctcgccggatccgctggggatagcagatggcatgaatgcttactgtatggtgcataataacccggcaacatacagggatactgccggtctgatgggcactgattttgagttgcaggactcgcggacgtcacaaaaatatagaagaatagagtcgaagccatacaggacgtctcctccgttgcgccggggtatcggtgatcggttaggcaatgtgagcagaatattaacccgtccgttggtgcctgtgtaccatgcgattgcccggatatggcgggcaatcagaagtgttatcagcgggatccgttcggcattacagcgtttccgtggcgcagaaagtggggatgatgatctggacatgcaaccattgctggctgaggaaataagtgatttttccggtgaaactgaaccgggaaactctccgggcagaattcgtttagctgagttaacgttgatgagcgaacctgaaaataatgaagatgagtttgactgggatagtcgcgtaacaggagctctcggaggcaatggcagttttaaagctgatattgaaacaatatccgagatatacgagatgggggatcaatggcaattgatagaagctcgctgggatgctgactggaacgacatcaaagatataaccaccgagtatgatttcggcgaatctggcacaactccccgcatatctgacacaactccccgcatatatgaagcgtttgatattgcggaagggtctgatgatgaaaactcaccacttttggcgggttcagataacagaatcacaccagcggccatttcatcactggcattatctgccgcaatattcagcttgctgtggtggtatcagtctcagcatacttaccgtcgctga

SEQ ID NO: 284856 - DNA, 651 bp, Morganella morganii
atgtcagtaaatgcaatagggcagcaaccggttcgtgagacacagattacaggtgaaaaccggaatatttttcaggcgatagcggataagtttgtcgcggttgtgaacagttgtaagacattctccacgggatgcagtacacagaaagatcataatatacaaaaagcgtgtgaaaggctggctgctctgacgctggttgaaccggagcgctatacaacagatgctatggagcggggtgcagaaaaactcggtatggcattgccggataataaggttgctgtcagcagtaaagcggatctctccggtgctgcgtctatcggtaaattatctgtcctgaaaacatctgcatactcagcacaggaattacatgacatgctcagcaaacaacgggataaacccggaacttcgcaggaaatgcgtgaaaaaatacagacgacactgaatatggttaatacaggtatcagcagcaatgacattgcgggaacagaatacgccggaacagttgaacgcggcacggataaaattaaaaatgccgcaattactgaaataataaaacagagccgcataaatgagattaatggtaaaaacggattaaatgacacggctattgctgagcttgaatcagcgcgaaatacagtgtttgaattataa

SEQ ID NO: 284857 - DNA, 336 bp, Morganella morganii
atgtcttattatcaggaaataatgaaagaaatctcaggcaatatgcaggatctgagcaaggatattccggcagtcatgaaagcattctccggcctggtgggagccagcaccgctgatggtgctctggataaaaaaaccaaagaactcattatgatagggatcgcagttgcaaaccgctgtgacggctgtattggttttcataccaaaacgctgatcgaactgggtgttacagagcaggagctggcggaagcgctgggcgtcgcggttgccatgggcggcgggccgtccgtgatgtatgcggcgaatacattaaaggcatttaaagagttctcataa

SEQ ID NO: 284858 - DNA, 1326 bp, Morganella morganii
atgtataaagaagatgaatgggagtctgcgcctcagccgaattatagtgtaaataaaaatctgaaatattattattcagacttcccttatactgaaaaatataagacagttcctttggatggcgataatacatcggtaaaaattaaaatagttgattattggggggagggaagaatctacgatagtgatatcatcacaggatttactgagtcctataatgttaaccatcagcatcaggttgtcagtaatggtgatgataaaggttcacggataccgaacagaattccggtaaaaaattatgatttattggataccacaaactatattaaaaatgattttgctgactatattacagtgatgggagcacccattacaaaatcgtgtgctgatgatatcaggagaatgttaaataaagacaatgggagggttatattatatggtgttgatgacgatagcttaaaaaatacaatcgacgcattaaaaaaagtcggcttctattctttagttaaggatactctggaatcaccgtttaatcaaatcaaattatttggcgattacaatgtatattcgttttatcgggaggatatttttttaaaaagggcatctgatattataaatacagattatatgtctggtgtggatattttgcgttatatatatgatactgagaaggatgataattatcagtttttgggtaaagtaatggattggtcaatatccaatttctccagtgggttaattaaatgcgctcatgtacttcatttctctgatgataaaaaagatgctgatttatttcttcagtttccggacgatattcgtgcactatttaacggtaaggataagcatattgtaaatgggaattattactcaggcaatgcatattctgtttatctgaaatcagcaaagaatagttacgcagatattaaggtgtatggtggtaaaaaggaattggctgacagatttaaatggacgataagaactataagccaggaaaatacgaatttctttatccacaatgaacatcagacaacaaacaatgacagctattatttatatctgtcagccgatatggataaggatgatgaccaacaagcatgggttggattaattacttccgatcatgtaccaactaagaaaacatatcagtgggaaattttttgtatgatgagccctgaacgtatttattttaaattcttcaatgcagaataccattctaaatttttgaaagtaatagaaaataaagatggccagggcgatcggaaagcaatggggtctacatttctcgataatgtaaattacaaacgaaattggtggttttttatttag

SEQ ID NO: 284859 - DNA, 1899 bp, Morganella morganii
atgcagttaggtcactacgagttagatacgactattgatgagtaccaaagaaaaatagcagaaatagttagtaataaaagaacactgattttttttgacactaatattcttgcctatttatacaaacttcacgcaaatgcacgtaacgagttctatgcttggtctgattcagttatcaaagataatcgactatttatacctggttgggctgcgagcgagtattcaaatcgagtaaccaccaataaacttgacgactacacaaataagagcaacaacgcatcccctgacaaagccaaaaaaatgtatgaagcattatatgaaattgcttctttgtttgtggattcagatattttagctaggtctaattttgaaggaggtcgggaaaagtttttagatgattttctacgaactatcaaatcgttggatacttttacacgtgtgttcaacacgcagtttaaagttggcgatgtccataatgagatcacgaaacatttttctacagttgttcttaactccaatcttacagaactatgtgtaaaagcaaatagagaaggtgatacaaggtttgaacatcgtttacctcctggttttaaagatggaggtaagggggaaaaccgtttcggtgatctaatcatatggtatgagattctaagcaaatcgaaagaactcaaaaatgactttgaacatgtagtatttctctccaatgatgaaaaatcagattgggtttatgcgcctaagtttagggcaaatactaactctggagctaaaaagtttgtatccaacaagaaccctgtcattaaaattgctgacccacggttggttactgagttctctaatagcttaggacattcaaatttcactatttgtagccttgctttacttatagagagtctatctaaaactgaaccaaaacgttttactaacctagcaggtgctatacagataaatattcaagaaacttcaactcctgagaaagaagtcattgagtctgctgagttggcagctgaacctgccgaggtggttgctggacctgctgaggtggttgctgaacctgctgaggtggtcgctgaacctgctgaggtggtcgctgaacctgctgaggtggtcgctgaacctgctgaggaagaaaccttaatctttgaatataatcaagaagcattacaggatagcctctaccaaacagatgcgccttcagaaattaacgaaattatacgtgatctaaaaagttataactggtatacgcaaaatcctgccatttcaaaaataggcttacttgcggggaaaagccttgacgcatcctcatgttttgtattgggtagaaatatttatcaagctgcttgtggaaactctcaaaaagcaagtgagtatatggcttcgttacatagaaaattaagcatattcccaaatgaaatcgctaatcatatacttactggaatggtatatgaaatttactttgactcaaaatctcaatatcgtgaaagtgctaaatttgattatgccagtagtgttttaagtttattaattaaagatgaatttaaacaggctgagagttttatcagacaccatttacaagatcatatggagcaattattgtttatacctggcgatcaaggtgaaccaaagaaagaaattgctatcatagtaactatggataaagatgacgaaactagttttgtacttgattcagtaatgtttcagggtaaagaactaattactgatgatgatgcttcttcgtggttcacaccaagctataatgtgtcacaaatcagagccgaagtatcatctaaactcgctattcccgaatgggctttaacattgaaaatcaatgaaaacgttggtgataaacaccttcagctaccagagggaaaaatactttccccccagcatgctctgaactaa

SEQ ID NO: 284860 - DNA, 276 bp, Morganella morganii
atgaagtctttaggtgtaagtcgcggtttgaaaatgcatggaaatgtaaaccgcattcttgagatggtcgaaggtggagctggtgacaatgcgatttcaggccacttcaaagatgaaggcgtaaatatatcgcctgagtttgttcgcagtatcagaactgaagttgaagagttttcaaaaaaagctgtccctaaaaaatcaactcaaactgctattcaagcaattcagactgacaagcaaagtggcgaagttgctgcaggtgtcctacctgcatga

SEQ ID NO: 284861 - DNA, 147 bp, Morganella morganii
atgctcagcattgtcttattcgaacctgaaataccaccaaacaccgttaatataattcagttatgtgccaataccagcttgcatctgattcatcttctgaggtttacctggaatgataagcggttgtgccgggctggattacagtga

SEQ ID NO: 284862 - DNA, 438 bp, Morganella morganii
atgtttaatatagcaaacgatactaatcagattaattttaatataagtgacatacgcgatttttctgtttcaggtgatttatgttcagaatatgacaaatcaatttactttaatgttgaattggttctggaaaacggtttttttaatgtcctggattgtcagttttattattttgagttagaagaacttattgaagggctcttgtctgttttaagaaaaaccagagatgaatatttgttttcagatgaaagaaatattgtcaatatcagttttaaaagagatggtgactctgagaatttttcagtgtgctataagttatttgaatattttgatagtgattgctatataaccggctcttttattatttctggagaaaatctctgtgatattatcaataatatcaagccttatctggaagaaaagagggtgtctggttag

SEQ ID NO: 284863 - DNA, 1200 bp, Morganella morganii
atgttcagctcttatcgcgtcatctttcagcatcccggcaccaaagccttttcaggggcgggatttatcgcgcggatgaccgtctccatgatggggattgggatcattaccatgattgcccaattgcgtgattctttctttatggccggggtaactgcggctgtttataccttttcggcggcattctgcgccccgctgatcgcccggctggtggatcgctacggacagaaccggatcctgccgaaaacgctggtgatcagtgttcccgcgactgccgccctgctgttatgtacagtttatgatgctcctgactgggcaatctggctgtctgctgtttttgtcggggcgatcccgagcatgcctgccatgatccgcgcccgctggacacatatctataaaggtgacccgcgtttacagaccgcttactcctttgagtcggtgctggatgaaatcagctttattatcgggccgccgctgtcagtcacactttgtatcgcgctgttcccgcaggccggtccgctggcggcaattattttcctgatcatcggtaccgcgctggtggtctgtcagaaacggactgaaccaccggtgcataaacgcgacgggctggcaaaaggtaccgtgctgcgcctgcctgcgattcagttgctgatggtggtactgcttgcgctcggggtgattgtcgggacggtggatgtgctggctgtcgctttcgccaatgcacaggggtatccggagggtgccagctacgttctgtctgtgtatgccgccggttcctgtatcgccgggtttatcttcggtgctgtccggctgccgttcagctatacaaaacaatttgtcttcaccgccgccgccacactgctgaccactctgccgctgctgctggtcaccaacctgaccgggctggggctgaccatgtttgtcgccggtttcttcttctcgccgaccatgatcctcgctatcggctttgtcgagcgtgaggcaccacctaatatgctgacagaaggctttacctggctcatcaccgggctggcggtcggtgtggcactcggctctgccggagtcggtatgatcattgatacttacggcattgatgccgggttcctgctggctatcgctgcggggatctgcgtactgctcactgcctgcatcggttatgttttcgtcttcaaagatgataaaaacagcgctgataagtga

SEQ ID NO: 284864 - DNA, 588 bp, Morganella morganii
atgagccacaagccacgtgcagagatgatagaagaaacgcggaccaagcttatccgtgctgcacgccagcagtttggtaacgccgggtacgccgcgactgtgatggatgacctgacggctcaggcgggtctcacccgcggggcgctgtatcatcactttggtgataaaaaagggctgtttctggcggtactgcaggatctggaccgggagctggatgcgcgcctggataccgcagaaaaagatgaagcggatgagtggtcagctttcaaatcccgttgtcagggctatctggcgatgagtctggaacctgaagtccagcggatcatgttccgcgatgcggcctcggtactggatttctccattctcaaatcccacgaactggcctgtgtgcaggggatcacccggcgtctgacacacctgatggaaaccggacggataaaacaggtggcaccggatgtgctggcactgtttattaatggcgggctgtatgaatgtgcgatgtggattgtgcacagtgataatccgcaggctacttatgaaaaggtcagagtctcttttgatcagcttctggaaaatttacgggtataa

SEQ ID NO: 284865 - DNA, 1251 bp, Morganella morganii; identical to SEQ ID NO: 120056

SEQ ID NO: 284866 - DNA, 810 bp, Morganella morganii; identical to SEQ ID NO: 120057

SEQ ID NO: 284867 - DNA, 207 bp, Morganella morganii; identical to SEQ ID NO: 120058

SEQ ID NO: 284868 - DNA, 300 bp, Morganella morganii; identical to SEQ ID NO: 120059

SEQ ID NO: 284869 - DNA, 183 bp, Morganella morganii
atgtatgataatacacctcccgaacttgatgagttaatcgatcagtgtcgtgcactcgcctatgctacagtcactctcgattcacaacaggcgaaagagatacttagttttgtactgtggaaaaatatagatttaatgtatgaaaaatatcatcaggatattaatgataagtctatttattaa

SEQ ID NO: 284870 - DNA, 537 bp, Morganella morganii
atggttaagtcacaagtaataaatagcagtgaaattgtttttatattgtcatgccctggtcaaaaagaacaaaaaaatggaaggccagcgtctggtaaaactggagataacttagagtacctactgagtaagttagttagtttaggcttctttaaaaatggtactgcgaaaaataatgtgacgattattaattccagtgaaaatgtttattctggtaaagataattcagaaccaaaatctgatgaggttttggaagatgggaatataaatagaataattaaacagttgagtggtgttgaaagtattaaatatattttctgttgtggagatgtagcgagtctattattgtctatgttgttttttaagtaccataagagtgatgtaaaaatttatcggataaagcacttatctgcacgaggcataatgcattacaaaaaaaatgtagtaatgactactactgaacgattggatgaacttgcgaaagacataaataaaatgaaaacgtctagcaatataattattcacctcaatacctga

SEQ ID NO: 284871 - DNA, 462 bp, Morganella morganii
atgatttccatcaagggtttaatttgctcgggcggtatagtcgtggataattcaattaaggaaaaatttaatatagccttcggagtttttttgttactcattgtttccactgtttttatatgggtatcatctgtttatttttttgattttttaaataaaaaagatattgttaaagttcactttagtatgtttttcattctgtgcgtccctcttttactttacttttcatttggtgggttcatgattcttatgaataaagagagtatattaaggaagtatgggttgtttaaaaaaatattaaatgtgttactgggtattgccgcgctttcttttttatttttaatcataggtcaaagatatatggatagtgaacttatatcaaagggttataccaaatgtcccaaagcttcattcaggtcatctgcaatttatgtcattgacgcagagctatgtaaaaaataa

SEQ ID NO: 284872 - DNA, 855 bp, Morganella morganii
atggatctctatttcgggcgaaatgaagctgaagaagaatatgtacgtaagtatgcagccgatgagcagtacaaaaaattagaggctcaattagccggaattgctgatgaaaatattcatgcgctcctgacaatagaagaggctgaacaatttgtttcaataatgaaagatcccgcatcttacaagcaggaaagcggaaaagaaatttttttcagatatgccggtatagctacttctttcacgggtaactatttggacgcttatggattgggaaagttgattgctgaagtcaaaagctttggtgtcaaagaaggtgagtatatcggcagggatggtagcaggtatatcaggctaacaggagaagctagtttaaggaaatatcttactgcaacgatttatcttataactgatccgaaaatgcttgaatttggtatcggggaagtcggctttgaaaccaatctggctaagggaacaagattctgtatttatttttcagcagcatacaggggcattgaattgttattcagagatgaatatgacttgactgatttttttgtcaacgtttcaatggatgcagcaaaagcgttgattggaatgggaattgcgttattagctaaaggcttgattactacatttgtgggaattattgggggagggcttattgccattagtgcaggtgttttcgttgtgagtttatttgttgcgttgggcctttacatcttggatgattattttggtataagcaaaagtataattaatgaattgaaaaatagtaagcgagggtctaaaacacaagacttaaggcatgatttccatcaagggtttaatttgctcgggcggtatagtcgtggataa

SEQ ID NO: 284873 - DNA, 840 bp, Morganella morganii
atgttgtatcacattgttatatcaaaaaaatctgtaaaagcaaataaagcgagtactacggaaactaaaacggatttaaccaaagagcaattaattgctcgtttcatcgagccatacgaattaggcaatccaattactgtaaatggtacaacaattcagccctcagaaatcgaacgaattacagtaaaagagtctgcgaatcttattgaatcgtatgtcccagcaatagaggcggaaaatgacaggattggttttatctcattcggagtgtcttctgtagagcaggctgtctggcaagcaaaggatgtaacagatgaatttgtaaccggacctgttgggcacaaaaaagagttatctcaaaagaagcagcccgcatctccagttaataaaggttcagataaagtattcattgtccatgggcatgatgaaggtgcaaaaacaaaaacggcaagagttatagaacagcttggttttaaagctgtgattcttcatgagcaagtgagttctggcaggacaatcatcgagaagattgaacaatttactgatgttggttttgcaatagttttatatacgcctgatgacttaggctatcaaaaagatcaatcagataaaataaggctccgggcaaggcaaaatgttgtgtttgagcatggttatttaattggcaagcttggaagatctcgggtgatggctcttgttgatggcgaacttgaactacctaacgatattagtggtgttgtttatactaaaatggatgaggctggtggctggcgtttatctcttgctcaagagctaaagcaagctggttacaacgtcgatatgaataaactttttgggtaa

SEQ ID NO: 284874 - DNA, 993 bp, Morganella morganii
atgaacttaattatttatatggtaatttttctttgtgtaatttcttgcgtatggaagaaaaaaaaatatttttcattaaacgctaaaagcttacataaacaacggctattcatattagttattctttttccttttttttctagcctttattttatgctatttcttggtcagccttatccttttaaattggatgcaggcggatataataattttttagaaataaataaattttcattaggtctaatggcattatcacctatacttggtgcatttgttgttagtgcgcatcgttcaattcagacagaaaaacagattgaagagactgaaaaaaagaataaggttgatatttattacgcaaataaaaaatttatatttgaacaactgagcatgtttactgttaataagaccgaaaaaatatcatcaataacgtctttttatatgttattttttcatgcaaataatgagtatagtgatcattttagaaatgatagcattgataagttaaatagttatattaaaaatattatcaatgaaattgagttgctgagaaaatgtgattttatttatgtattatctaaaaataatactgttcttgatgagtctaatattcacattgaaaataaaatacgagacatcgaacatcaagttattgatttaaaagattttttgaaattatcttgtgagcaaaaatataataatctagagattgtatacaaagatattttaagagggagagatgatattatagctaaaaataatatggacaacctctttggaaagtccgttggcgataataattttattatatcccaagagcaggtcaataatctttatgataaattatgggttatgtggatttatgaaatgaaaacattttctaatattattattgagttgatattaatcattaatataaaacactcgcctttattctcttctttaaaacgtttagatttattattttgtgaaattgaaagagaaattaatggttaa

SEQ ID NO: 284875 - DNA, 813 bp, Morganella morganii
atgcgactgctgaaatccgtttttgcggctgccctgcttactgcgtccggccttgcatacagcagcagtcagaactgtgcggataaatccccgcccacgccgcaggaagccgcacagcgcaccgctcaggccaaagtgctgaatgactggctggagaaacagggcgaccgggtcgttctgctggtccgccagggtcaggcactgagtgactacgggctgagcttttcccatgccggttatgccgtacgggaaaggaacggaacctggcgggtgtatcataacctcaatacctgcggtactgcgcagtctgagctgtggatccaggggctttatcagtttattgatgatgacctggccggaaataccatcgccaccctgcacttcccgccagccttgcagtcccagctgctgaaagtgctgcgtgacccggagctgcgcaaagccctgcacaatccggcttacaacatggtggcgcatccgtttgcgaccgacagccagaactccaacggctgggtactgatggtatttgccgccgcccgctccccgggcgtgaattcggtttctgccggagtaaactggctgaaatcagaattctatatcggctcctccgccgaggccgggctggtcaaacgggcactggcagacagcctgatgccgcatatgtccactgacgggcagccggtaaccgggattgtcacctttaactccggcgacagcctgctcgggtttctcagccgctacggcaaattccgggttgagtgcagtcacggcagcttcggcagtgccgtctgtatggtgccgctgccggaataa

SEQ ID NO: 284876 - DNA, 1407 bp, Morganella morganii
atgagcaaacacgaaacgtcatccgcgcctccggcgcatgaccacgattttatgtttacgcccataccgatgacacaccgccgcgagacctggaaacaggtactggtctggataggtttcggttatgtggcaaccgggttatttatcggcggcgccctggccggagccaacggcgggccgggaatgtcatttccgatggcactgctggctatcgccatcgggatgggattgttgtttattctcacctcgctgctcggcattatggcgcagcgcaccggactgagcctggcgctgatcagccgtttttcctatggccgtttcggcgcaaacctgccgatgattgcgatggggctgctgaccctcggctggtttgcggcgataaccgggatggtcggggatatctggggcacattcctgggcaatcccagcgggatcatcgtctttaatcctgcagagcacggctacagcggtgtgccgatcacactggaagtctttctttcctgtgtcgtcgccggtctgctgtttacctacacctcactgcacggcatgaaaggactggaaattatcgccattcctgtatcgccgattattatgattatcgccgtgatcaccggctatgcgatgttgcaggagggcggcgggttatcggtctttattgagaattccaaccgcaatgaagggctgatgctctccaccgcgatcacgatggtggtcggcagctggattgccggggcagtgatgggcgtggatctgttccgctttaataagagcatttctgcggtattctggggatcggcggcctgttttatcttcaccaacccgctgctcaatgtggtcggttatatcggcaccatgacggtcgggatgccgaactacattacctggatgattgagaaaagcttcctgctggcgctgatcggggtgatcacctggacactgtcactgtggaccaccaacgacgcggaactctactgtaactcgctctataccggaccggtgctggattccgttggggtgaaggtcaataaaaacgtgctgatcctgaccaccgggattatcggtactgtgctgggcgctatcggtttttaccaaatcttctttgctgattttattaactatctcggcattatggcaccgccgctggccgggccgctgctggcggattactacatcacccgcaaatgccgctacgacatcacacagattaacagtcagccgaaatacaattacgccggagtgatcagtgcgctggccgggatggcttccggtctggtgatggcactgaacaatattctgtctgactggccgaccggcctgctggcattagttattaccgttattatttatctgatattgcatccgctgctggcggcaaaagccacctcaccggccacagggagatcataa

SEQ ID NO: 284877 - DNA, 357 bp, Morganella morganii
atgataaccctgacacccgccagtgtgttaatccatgtgccggatgtgacagcgggactggcctggtatcagcgggcgtttccgcaggcggaggtgcgttatttgcctgagtttgatttcaccctgttatgtctgcccggttttaacctcgaaattgttcaggccgatgacaaagtcagtaacggcaaacggggtacagtgctgtactggcagaccggcagtcttacacaggcgctggcgcattttgagtcgctgggcgcccggttataccgcgggccgataagtattgagtgcgggttgcggatgtgtcaggttgaagacccgtttcagaatctgatagggttaagaggtgcttaa

SEQ ID NO: 284878 - DNA, 123 bp, Morganella morganii
atgtgcgtcttcgttttctttctcacacgacaaaaagcctcattaacagaagcgaaaaaagaaaaagaagaagcggatacggggatacatggtcagtgcgttgtccgttgtgtcatcagatga

SEQ ID NO: 284879 - DNA, 240 bp, Morganella morganii
atgatatttcaaaatatatcttattgtctcatgatgctgcttttattcagtggaaaaacatattacatcaataatatttattgtattttagttaatcccatcacgaacctaaaaatcacagcaatcagcaatatcacccgtcatttttcgggttttacggataaaaaaatcaaatgtattacatgtcatattattgtcagtgaccgcagcaataacattttttattatatttatgtctga

SEQ ID NO: 284880 - DNA, 477 bp, Morganella morganii
atgaataaccgattatttaaaaaagtcatggccgcttgtgccgccggggcgattgccggtgcactggtgctgatccccgcgtatgagggtgttgagtacaaaccttaccgtgatgtggccggagtgctcaccgtatgttacggccataccggtaatgatattcagcccagcaagctgtacacggacgctgaatgtaaggcgctgctgcatgacgacctgacgaaagtccggcgcgcggttgacccgatgatcaaagtaccgattgacgataatacccgggcggccatctattcatttgtctacaacgtcgggcccggtgcgttctcgcgttcgacaatgctgcggaaactcaatgccggtgacatcgcgggtgcctgtgatgaaatgaaacgctggacatatgccggtggtaaacagtggcaggggctgattaaccggcgcgagacggagaaagcggtatgccacggaaccctttaa

SEQ ID NO: 284881 - DNA, 141 bp, Morganella morganii
atgctgatcatcattgctatcattctgctgacggtcagcctgttggcaagctgttacctgtattcgctcgagactcactgtaagccgctgccgggcaattcgctggacggtgtgattcattatgagtgtgaagcgccatga

SEQ ID NO: 284882 - DNA, 300 bp, Morganella morganii
atgaacaactcagttaatgaaaaacaaatcagtagcgccgtaatatacaaactgatgctgatagggttaagcattccgatgatgtttctttctgttctatttggtgttatgggaatgtttggatacggtactgttttaataaatggcgaaatgataactggtattgctgcgcttcctgcttctcttcttttcggcctaatttttattgctatattcacaattatttttggaacgatgattttcatcggactatggtgttacagcaaattcagaccattaaaaataaaaaccattgattaa

SEQ ID NO: 284883 - DNA, 1008 bp, Morganella morganii
atgaaaccggattggggggtgttacagcaacagttcctcgccgagcattcagtaacgggaatatccccgaaagaatggtgtgagatacagggactgaattacgcaacagcgcgtaggtacatcaaaaagccaactgtgcagagtgcgcaaaaaactgcgcaaaacaaagtgcgcactgcgcagaaaaaagaatgcgcaaatgaaccggtgcgcaatagtgatataccggatgcgcaaggcaataaatccgacaatgcgcagaatgatgaaacagagttcgatctgcgcaaatacgggcttaacgatatgcaggcacgttttgtcactgagtatcttatcgacctgaacagaacagcggcatataaacgggctggctataaaggcgaagggaatacagcttatgtgaatgcaagccgactgctaagaaatgctaaggtttccaaagctattacagaagccctcgcagcgcgggaacgtcggactgaaatcacccaggacgcggtattaaaaatgtggtgggacattgccactgcagacccgacagagctgacggaataccgccggttatgttgccgtcactgctggggctttggttttaactatcagtggcgtgactcgatagagtttgaggacgctgtcagtgaagcggttgcaaagaagcagaaggagccaaacgacaggggcggctacggttatgacagcacactggacccgaatcctgattgcccccgctgcaatggcgccggtatcggtcgtcctcatttccacgatacacgggacttaaggggcgcaagccgccggttatttgccgggataaaagagggtaagttcggtaccgaggttatcacccgtaatcaggatgaagcgctgaaaatggttgcgcagcatttggggatgttgaaaaaccggacggagcttaccgggaaggatggcgaacccatcaaggcggaagtggccaacctgtcatcacaggaagccgcagacctgtataaaaaactgatggggtaa

SEQ ID NO: 284884 - DNA, 1026 bp, Morganella morganii
atgtcaaagaatatatcaatgacacatgatgaagagacaacggcactccgtataatggatctcgcaatgagttttactctgcccggatgtttgcgtaccgccgcgcaactgtgtcttgctgaccttcttgcagaagggcctcgttctgttgattggctgtctgaacagacaaaaacacattctgcattactgcataaagtattacggatgctggtcgctaatggtattttcagtgctgttgatgatcataattatgccataaatgctgaagcaaaatttctcaaatcagatcatccttactcccaacgccacactattcttatgctgacggatgaaacattatggaaaccggttggtcaggttacagatgccattcagggtaatccgccttttgagagttattatggtgaatcattctatgagtactgggaaaaaaatacgcgaagcgattacaactttccgtccggaatgtccgcattgtctgaaattgaaaaccattttgttgtgaatacctataagttcccggaaaacagccgtgtgatagatatcgccggaggactgggcggattactgctgcatatcctgcggctaaacccgtcacttcacggtatcctgcttgatcgggaacatgtactgcagcagaaccgtttgggtgacctgaacgataattcacgctggcaggcagtctccggtgacctgttcggcacactgccggaagctgatatttatatactgaaaaacatcatgcaggactggcgggatgaacgcgcacttgtcatactgagaaactgccgggaatctatgcatggagacagtaaacttcttattattgaaccagttatctacccggttgagaaaacagattcccgttatgcgatggatatcctctgcctggctgctttccctgaagcaggtgaacgaaccattcctgagtttgaaacattactgacaaaagccggactgaaaatcaataaactgatcccgacaggttgctatgtttccatcctggaagtggttgccgcctga

SEQ ID NO: 284885 - DNA, 807 bp, Morganella morganii
atggaaaaatgtaacctgacacaatggctgactgaagcagacccgatgcgggtatatctgatggtgaacagaccggcaaatccggacccggttgaaatactgtatgcacatgactggattgatgatgcattccggatttatgacagcacgccactggcacatattgcagagcagagcccgtggctgatcctcctgaaaccgtcatcatatccggtacccggaaaattaacagatgccggtgctttcagtgatccttcgtggggctgggcataccgcagcagtcagtcattacaggataaccttgagcactggcgacggcggcaaattgtgatcctgaaaggtcattccgtgatccttcgtcttgcggacagccgggttgcgtctgtcctgctcccggcaatgaataaggatgactggcggttactgatgacaccagtaaaaagactgttaatcagcacgccggaactgaaagaatttcattcactggttacagattcagacttaccggtaccggaaatacagaatctgccgtttgaactgaaacctcatcttgtcagggcatggcaaaactcaccgcaggcactgatattttatgcggataatatcgcctgtgaattgtgggaaaatcaaccggaaagcgcactgatactggatacaccggaagggatgctgatgcagcgcgtaacatcatggctgaagcagcagttaatacaactgactgatattaattacctgacatacgatgattttatccggcatgcagaatatcaaaaatggatacctgcagcaggcggagggatcgcatga

SEQ ID NO: 284886 - DNA, 1653 bp, Morganella morganii
atgagtgatatcagagactgtattaattgtgataattaccgctactggctggaaattcagttagttgatgatgccggacatccgctggataacgtctctttcacactgaaagaacgggggaccgataaatcgctttccggcgtgactgatggccggggcttgttcaggattgacggattatctgcacgtcctgtgatggtgacagctgatgcacaggaactggcagataagctgacaacccgtatgccgcttcaggcagtacactacccggacgattcgctgaaagactggtgtctgacacaagggtatattctcagtgagaacaataatgcggggatgttcaataccgcattacccggacatgtttatgatatgtctccggcgcaaatagcccgcctgcgtgaatattccgcccgtcatgacgggtatacttttatctggccgtataatcagcgacgggttattgccatccggcgtattaccgggaaagtgtttgctaaatccgttctgcggggagcaggaaactcagatgcgggaacagagccggagcggctggataatttcggtcagcacaatcatgcccggaaagttgagccgaccgaacccgcgcaggccggattcccgctattgtatcttttgggggggctaatcagtttgatagccggcggtggtgtttacagccagacgactcagaatgctcgccgaaatgacggagacgactttttttcacagggcagtccggcagggagtgaaaaatcacaacggcctttcatgctgacgctgatgagcagcgtattaccggtcggtgtgctgatggcccgttactatgacggggattcactgacctatgaggacctggcggaaaaagcacacgcccggggtaccgcaacgacccgtgtgcggattaaatatcaggaaaatacagaaaccggccgcccggatgtgatgtctttcgcgactgaaggcagtaacgaccaggtgcgggtacgtatggggataaaagcgaccgaagaggaagcgaataaaatacggtacagcagtcaggcgtaccgttcagatggtctgccgaccccgcagtcactggcgacgatttataaatttgagctggatgatggtaatattctttatcttggtgtagatacagataataagtttgttgaactgacatcgacaacccacccggatggattcgggggcagaggctggcataccggcggtgatattgcgccggttgatgtaccggtgaataccggtaatcatgacccctatattccggagcgaccggacagctccggcgggtttcaggcgcatgaagataacggtccggtcattctcaccacgccggcaccgggtgagctggattttaatgattatatcctgatcaccccggttgctgatataccggcgatttatgtgtatttgagtgaaggagctggagataatggagaagaaagacctaaaaatgtaaaaatgttaaacgatagctacctggaaaaaaatgggatagatgcccatgaattaaaagatgaattaatgggtgatggttccaactcaagatacgatctatatttagataaagatactggtcaaatatggatattcaggaaaggtgggaaaggatcaggggttccaaccggaacgtacataaaataa

SEQ ID NO: 284887 - DNA, 396 bp, Morganella morganii
atgtctaaagtaaaagtaacttttgcaatttatggcgatgagtttaatatcaataatgtatctgaaatattaaatctatcaccatcaaaaaccagaattaaaggggtgactcctccgggtggtaaaattcccagcccaacaacaggctggtcattatcaactgaatatgaagattcacatgatgtaatggatcaaataaataatttatcttccactctgaaaagaaaaacttcagagctaaaaaaaataaagaaaatctatgatgtaaagtatgtttttatgctttccattaaaattgaagatggaaaagcccccggatttcatttggatggagaacttctttcatttgtaaatgaaatagatgctgcaattgatttagatatgtatattctgtga

SEQ ID NO: 284888 - DNA, 201 bp, Morganella morganii
atgaataaaacaacagtgaaagcagaattttcaatttatggtgataatttagatcctaatgaacttactgatttacttggaattcaacctatggaaataaatttaaaaggtgttataactggcacaagaaaaagacccaacgcagaaacaagctggtcaatatatacaaaaaaagaagagtcttatgatgtaaatgagtaa

SEQ ID NO: 284889 - DNA, 273 bp, Morganella morganii
atgagaggcaaaataaaaaaccggaaaattattcttaaaaatgataccactaatacagacggaacggtattaaccggtcggtgtgcggcaaaacaacaaaatgaaattgcctgtatgggtgattcagtttattgccctgagtgtgattcaaccggtgttattgctgaaggggatgccatgatgaaaatagaaggggctcctgtcgcgctggaaggacaccgggtggattgcggttgttccggcgggtgtgtattagttgccgcagaacaataa

SEQ ID NO: 284890 - DNA, 270 bp, Morganella morganii
atgcgcagtcagattaacggccgtaaaatcattttaaaaaatgataccaccaataccggaggaacggttctcagaggttcccctgccgccagacaaaggcaggagattgcctgtctgggcgatccggtgtattgcccgtcgtgtgaccaaacgggagctatagctgaaggtgacagtttaatgaagataaagggaataccggttgccctggagggacataaagtgacgtgcgggtgttccggcggatgtgtgcttgttgcggcagattaa

SEQ ID NO: 284891 - DNA, 936 bp, Morganella morganii
atgaccagtttatataccgctacaaaacatccggaacaactggagacaaccctgctaaccggggaaagttatttgtatgatgatcctttagagccccaaaaactggtttttttggatgcagtgaatgaacagcgttgtgtgattaattcaccacaacgtaacagccaattaactaacacgattcctttttttatagccatactgattatggcttgttatacattatttaacttttttgataatcacatggataataaaaaatatttccaatatagagttcaggaagtagagaggaaatatagtaataatttcaatttagataaagtgacattaaagtatgtgaaattatatgagccattttttggtaaagaaagtattagttggtgggaatatattaaagcgtataactcaggtgagttttttacagatagtcagtatggtaaatatcttgtgattggctggcttattttattcccgggagcattatggttgtttggttatctggcattttttacgccaccggtttatttaacagcagacagaaaacggggtctcctgtatagccatggcaggggaaaagtgcatgtcacccgttatgaagaggcacaaatcgggttagccggtaaaatgccggctatcaagctgtatgggattgatgaaaaatccggtgaactgaaaacgattatattccggccgaatgtttcccactattctgcgtttctgaccagtactgacagcgaaaatcaccgctttattacgttcctgaatgcctatatgcaacaaggccgggatgcggtctcccccgtggattatcaggcacgaaaacctttcctgtcgtttggtaaaaacccgctccccgaagactttgaacagcaggttgcacagattctggcagaatttgataaaaggaagcagcgtgatgcgcagtcagattaa

SEQ ID NO: 284892 - DNA, 270 bp, Morganella morganii
atgcgcagtcagattaacggccgtaaaatcattttaaaaaatgataccaccaataccggaggaacggttctcagaggttcccctgccgccagacaaaggcaggagattgcctgtctgggcgacccggtgtattgcccgtcgtgtgaccaaacgggagctatagctgaaggtgacagtttaatgaaaataaagggaataccggttgctctggagggacataaagtgacgtgcgggtgttccggcggatgtgtccttgttgcggcagattaa

SEQ ID NO: 284893 - DNA, 3249 bp, Morganella morganii
atgaccggaaatgtgaattctgacgtttcaaccccggaagaaaaacacctgcgtaacatggtggagtcggtcaacaaggccgctccccggaacctgccggcggacgcagtggtctgcccgtgtgagaatgaacaccgcccggtctatccggtacggtatgcgtactcaaatttatttggtgatgaaaatgcccgggcggctgtgccgccttctgtttcagcattgatgacggcatcctcaatggcggagacaaagggattttctgtcagattactgcgtcccggatgggtttatgtttttgaggaaggacaatttccgacccgggtaaatacgaaagggcagttgctgatttttaaacacatcgtccggtattatgatgacggatatgcttatacggatgatgatttaacgccggaagcacaaactgcgaaagaagccggtgacgcagaagaagggtttattccttatctgcgttgtgcttcagacaaaacattgcaggaacaatcctgtcagtatccttatctgccgataaaaaaagatgtcataaatgcactgttcctgttcagtgatgtccctttgtctgattatgtattaaataaaattgagacagatgaatcttaccggcacgcatttatgcaaaaaatcaatgtggttgatttcagcagcaatccgcatgcacttgaactcaacgaagagcacattgaacaccttgttgaagaatataaagcagaatcagagcagttttcggtatttaccgaacacacaaaagcgattggtcattcactgccgaaagagtatttttcgcatattgcaacacttggcagtgcaacaaaaacaacagacagtctgttaaatcaggtggaacaactcctggattatgaagaaaaaagctgtctggctgtgctttatgatccggtcggttgtcagaaggatatcttatcgctttatacttttgtaaccaccgcatatgccatgtttcagaaccactgggagtatcccaacaaaattggccgccatctttcgtcattggaaacacaatttaaaagtggcgatatgaaaaatactgaacaaggccaaaaattactggagaaattcaataaacatatcgatgtggagggatggaaaacatactggccgcaaattgatgcgggttatcaggagtttgaaaccttacagagtaatattattcagctttacagtgattttttgacgaatccggatgtttcacaaaggaactgcgggattaaacactatattgatcatgcttttttaattaaagagcaatacatgaaaggagatttttggcatcacgaattttttgatgagcttattacttattgtgaattacatggtttgctttttacgccgttaaacagttcaccttccggccgtaaagcactcgatttactgttttctgtagatgtaaaagaaggaagtgtctggaaaacatttatcagaaatttactgagtgtgctgaatgaagatgaaataaaaaataaaacactgaccgaatttaaaaagcgggtactgccggcattgcgttccgctgctatgatttgctgggatgcactgggttatgcttatgctgaagttcattcccggcttggtgaggcaaaaaatcaggttcgccatatcagtaaggctggtctggattttcttgcccgcaaagtgttacctgcatttttatcttattacggtgtcgaactgagctttgatgaattagaatatctgagtgctgaaaaattccggaaatggatgaattcactgaacagtacacttcagccattcaaatcgacagctaaaaaaatgaggaaaatgtttgactgggataaacggttgcagtctgcaggactgcaaaaagtcatcgcgacagcaaagtttaaattaaaaagcagctattatgcatcgggattacccgtggataaacattcattaatgatgcatattaaatttggctctgatgtttatacactcatcagtagtgttattgaattaagtactgtttcccgtaccaaagaatttgaactcaatacaccattacatgcagctgctgtcagtattttccggattcagatagtatcacatatattaaatacagcagattcagtaatcggaatacgcaaagcagcgggtatatatgccggaactgttacttttccgcctcttcagcggttactcacacaaataaagcttccggaagtgcagactaagtggggtaaagccgggctgaaagggctgggatatactgtggcgtttatcgggtttgcattaccggttgcagaagcatcgtcagagtttatgaacagtaactatattaccggttcagctaaagtgacagaagctgttggttcattagctttttctgtcggattggcaggagcgggaataacggaggcgggcggtgccgtcactgcttttattagtcttttcgcctgggagttggctattgctggtgtggtactgatgggaatcggaacagccatttatctctggtttaaaacggatgattttgaggaattactgaagcaatgcttttggggtaatggtgataagttttttgctggtgggtataaaaaaaatgataatgaagatgttacaaggcctccatcaaaaataaaacaaatggaaaattatatttatttttttagtgcatatgaaaattattatcaggtggagcttcaggagttcaaaaatttatttttcacatcacaacttcaggttaatgccgtctcgaagtccaatatctctcgtgatgagatatattatggggcggtacattatatgattcagtatcaatttaagttatctaattttcagtgtggtatttctgatattgagtatcagttagttgaaaagaaaactctgtatacgtatccgtcaggcatgcttgcagaccatgtacccgaacgtggtaatgtggttgtaacacatcgcggaatggaatatctggtctctcagaaggaaaaatttaacgttgcatttgaatcagcactacaatgtgctctggaaaaagcattggaacatattgaaacttcacaaaaatcaaagttctataatggtaatattgaactgaaatttgaagtggatgctggtgttttttccggagatccgttagaaaaagccattccttcagtttactggtattatctggtagaccggattaacggggatgttgctccgttgcgttaccgggataataatccggatgataaaatttatggctgtattgacggagggggaacagaatga

SEQ ID NO: 284894 - DNA, 1230 bp, Morganella morganii
atgccggtatcatatgaggatattttccggaatttctgggtggcgcagtgccgttacaccagggataacacgcagtacagtggtatgatgacggttgcgggatccggtaaagatcaggctgtcgggaatatgcgccgctatttttcagcgtatccggaacattacagtgctgctcagtatgacacgctgatcccgttaattgcttatacagaagagagccggcagccggaattacccttactgcggcgggttctccgtcagcatagtgatggtattccggcagtattgaccgatgaacataacctgaccagtcctttgccgtctgaaaaaggcgatattcactatcagccgggtcagccggaatttatcaccggtacctctctttttgcggtgcttgacagtggtgaatatcatcgtcagaccggacagcatcttgttccggtactgcacgggatacatctgccgtggcggtcgctgtatcagggcgaaactcaggacagccttgaagaccgtgcgccttatctggtgcaaatccacgctgaccgtgcgggggagcagtttcttgcgcattgcctgaatctgccggataaagcggctgccggtttttttatcagcagcagccgatcgtttacggagatgcaccggcaactgcgtaaaatgacatatctgcgcaatcaggccacagatagctggaattttttccggttttatgatgtccgccattttattccctttatcgaatcgctgacgaacgggcagttactcaatattgccggtggcgtgaccgcatttacaggctacagtccgcaataccctgatggcgtaaggatcacgttttcgcctgaatattcagcggatgccgggcggcgtgaagcgttatttatcaatgaacggctctgccggcattacgcccggctgacgctgatgagcacactggtaaagacacggcaacttattgagcaaaatgaggccgtaccggcgacggaaaagaaccgtgatgaaaaagtatcagaacagtatctcatccgtgaagccaacctgagctttctggcgggaacgacccggatgcaggccttaatgtaccggttatccgcccgttatctgtgccgtcacgatatatcactctggaaaacagcctgtgagcacgccatgccttatcagcacaatcaggtgttattcaactatcattgttatgctttttgtctgcagacacagggagtccccgcatga

SEQ ID NO: 284895 - DNA, 2121 bp, Morganella morganii
atgtttgctgaatatcccaaaaagaaggcggcagatatcgccgcactgaaagattctcttgttcaacaggccgccccgcaggtgcagtcagcggcatcactgctctcaggctattcaccttccggactggtgtttacctgtaaaatcggccggttaccggagcagacctttcaggtcaccgaattctcgctcagtgaatccctttcttcgctgttttcactgaccatcagcgcggtcagcctgctgccgtcgatcacatttgaggatcatttaggcttcgccgcctcactgaccgtgacccgtgacggcgttaaaatccgtaccgtacagggactgctggcttctgccgaacagggcaataccgacggcaacaaaacctggtatcactttctgatccgcccggaaatgtggatcatgaccctcaaccaggacagccgtatctttcagaaacaatctgtgccggaggttctcgccactcttctggatgaagcgcatgtcaaaaatgacctgaaattttatcaggaagagttgcatcagaagcgggattacatcactcagaagcgcgaatcggcctttgatttctggtgtcgcctggcctttgaggaaggaattaatttctggttcgaggaaggcccgaaactgttttacagcgacaatcaccttggtatgaccgccggaatagacctggcttataacccgcaggcggataccgatatcagcgacagcaccgcattttcctggcgctacgctgaacagttgtgcggcgatattcagatccacaaagattacaatccgcagaatccgtcctatccgctacaacaccagataacaggtgaagtacatcagcagcacagcacctttgaaagctacgggcgttttcagcaggatgtgccggggcaaccttttactcaactgcgctacgaacaatctcagaaccagcgtcagaccggcaccgcaggcaccaactgctttgcgctgatgccgggcaagatttttaccctgaaaaatcacccgtctgacagcatgaataaagcctggcaggtgattatggtgaaccatcacggtatccagccgctggcggataacagtggcggagaaggaaccaaattcagtaacaccgttcagtttatccccggtacgcaggaatggcggccaccgtaccgctataaaccgacagctgacggcgatgagctggctacggttgccgggccgccgggcgaggaaatctataccaattcagaaggcgctgtcacagtccggttccactgggacagacgcggcaggcctgatcacagcgcctcctgctggatccgtgtagctcacggctggaacggtgatggttttggttttatgtcaatcccgcgtatcggtcaggaagtgattgtgtcgtatcttaacggggatattgaccgtccgatcatcaccggctgcacgtataacggacgcaaccacccgccgctggagttaccgaaagaaaaaacccgcaccaccttccggaccaaaactcacaaaggggacggatttaatgagctgcggtttgaggatgaaggtgggcgtgaagaaatttatctgcatgctcagcgggataataatatttacattaaccacaataaaactcagcatgtcgggcatgacgagatgcataccgttgtcaatgaccgcaaacatgaagtttgtcatgacgaattcattcacattgtaaatgagcagacactgaaaatcggtgttaatcagttcgagcacattggcaaagatcgtatcacccgtattgataacagccggaaggaagtgattcatgccagtcacttccaggaagtgggcgaaaataagcagtgtgatgtacagaatgactacaaattaaccgctgcaggcggcattcatacacatacaaaggtgcatacactgcaggcgagcgaaaccgttattattaaaggaaaagcgggctccattcagctggacgcgcagggcgtcacaatcaccggtaatattacgctgaaagggaatgtatcaatcacggggggcgctcctgattctgttgctttattggatgctgccgttaatgaaggactgccgctggcggaagactgcagggccaaagccatgaagaaagaggtgtcctga

SEQ ID NO: 284896 - DNA, 357 bp, Morganella morganii
atgatgcgtgaaaatattgctgctgatgatgatgttaatgttcttattaaaaatcagaaatggaaaatcattgtttcctgttttgattattgggctgttatttcaaccgtagaacgtgtaaagctttttttatttcaaacaaagaaagcatggagccaaaaaaagtatcgtgatggagttaaagataaggctgtactcaatacatatatttcaaagtcatctatgttgaaattaaaagaaatagctaaaaatcataataaaaatattaacgaaattatcgaggcgatgattgaggaaattgttttgccacgagatccacttaaagaacttatatcgttagttgaaaagaaaaattaa

SEQ ID NO: 284897 - DNA, 549 bp, Morganella morganii
atgaaattttcaaaattagctttagtcaccgctattgcagcgtcagccgtttctttcagtactctggctgaaaacaccggtactattaaattcatcggtactgtggttgattctccgtgtaacattacgcagaaatccctgaaccaggaagtctctttcggtacgttatcacgccgtgctctggaagccggcagcagtgcagaagtgaatttcgatatcgaactgaccaactgtaacttcaaaacttacggcggcgataaaaccactccggatgcgattaaaaccatggaactgaccttcaccggccagaactatgccgatgcaaccaatactctgctggcaacctctaccggtaataccaacaacctgggtatcgcaatcgacggttttaaattcggtgaagcaaaagacgtgttaccacgtatcgtcaataaaatcggtgataacacactgtctttcaaagcactggcaaaagccattgatgcatccaaagatgttccggaaggccagttcagcgctatcactaacttccgtatcacttatcagtaa

SEQ ID NO: 284898 - DNA, 612 bp, Morganella morganii
atgttccggcggtttcagttcagcagagagacattcactgtgagaagataccggtatcccgtacgccgtctcatcacggcaatcattctgggatgtatcacctcagccgcttatgccggagatgctgttctgcgtaaagccggctcggcccgtctcaccggtaccgttatttccgccccctgcagtattgccatgaagaaccgttttcaggcggtcaatatcacccctctgacattaactgtcctttcttcatctgctgtccgtgaccgttacactcagccgtttgaaattgaattgcgtggttgtggttcccgtttttcttctgttgaccataagacatggataatacgcttcgacggtatccgggcagacaatactgatgcatttgagttacagggcccctcacgggggttaggtatttctttgtctgataatacccggcaattgctgacgccgggcaacaattacccggttcataacagtatattgcggactgataaatcaggtaattctttgtttttgcgctatttcattaagccggagctgacggggatgccactcgaagccggcagttatcagggactgatacgtttttccgttaattatgaataa

SEQ ID NO: 284899 - DNA, 2385 bp, Morganella morganii
ttgcagaatgttgacctcagccagttctcggttgccggttatgtccccccgggagagtatgtgctgacactgttcagtaacgggatgcgcctcggcgcaccacgggatatcacggtttttccgccgtcagcggctgaaagcgatgccgggtccgatatctgtattccggcagataccgtggatttactgggtatgactccttcctccaaagaaaaaatcaccctgtcccatgacggaaaatgtctgaattttactgcgttaccgggtgtgcaggttaaagcggacctgccgtcactttcagtaaaactaagtattccccaggcatggctggaataccgcgacccggactgggttccgcccgcactctgggaagacgggatcagcggcgcatttattgattacaaccttaatgccaatgttacggatgaatcttccggtaataaacacacctatgcctccgccaccgggactaccggggttaacctgagcgtctggcgtctgcgcggggactacagtgccggttaccggaaagtcagcggcaatcagaacagcagtcaggatagtcattttgatttcagccggttatatgcctttacctcgctgaaaactctcgcggcagtattaaccgtcggcgaaaactatttttattcggatgtgtttgattcctggcagtacaccggtatttcactggaaagtgatgaccgcatgctgccgccgaaactggtcggttacgcacctgaaatcatcggtgtggcatcgaccaacgcgactgtcactgtccgcagccaggatcgcgtgattatggaaaccacggtgccgcccggtccgttccgtattcagacactggacagcgggatccgcggggtgctggatgtcactgtccgcgaagagaacggggaagagaaaaaattcagcctcaacacggcgtcactgccgtatctgacccggccgggccgcctgatctataaactggctgccgggaaaacccgttatgcagcccatgacctgaccggttcgccggttgctgccggagaattttcctatggcctgaccaatgcctggtctctgtacggcggggcacaggtcagtaaagattatcagtctggcgctatcggtatcggccgtgacctgttcgcgttcggggcattatccgccgatattacccagtctgtcgccaggctgccgcagaataccctgcaggggcgttcttaccgtgttaattactcaaaatcatttgaagatatccgcacagatgtcacctttgccggttatcgttttgcggatcgggactaccggaatctgagccagtttacggaagaagagcggaccggtggaatcggccgtgcacagaaagaaaactatcagatttacctgaacaagcattttgatgatttcagtttatccctgaattatcagtacagtacttactgggcggataaaccgcagacacagtatggcctttacgccagtaccaactttaatattccggggctgtcacagcaaaacgtgaacctgtcattatcagcgtcgcggacagagcgtcagaacggctataaagatgatgccatcaacctgtatctctctgtcccgctgtatgcagggcacagtctgacattttctgaatatgccaaccgttccggcggcagaacacaatacaatcatactgtcggatataatggctacagtgatgaaaacagctacagtatgaatgtggggtatacccacggacaggccgcagacagccagaccagtttcagcggttactactcccgtgatttctcacaggcctcagtatcggcgaatgccggttatgtgccggggcagtatcacagttacggtggttcggtcagcggcgggatcactgccatatcgcatggtgtggcactgcaccggaatgctaatggtgatacccgtctgatggtggaaaccccgggcgccgccggggtaccgctggataacggtgtgaccaaaactaactatttcgggcttgctgtcctgccgaatgtcagcagttaccgcaagaccacagcatcaattaataccagccgtctgccggataatatggagacactggaaaccaccacggatatcactctgaccaaaggcgctatcggttaccgcgcgatgcaggtgatgaaaggtgaaaaactgtttgctgtcttctccctcactgacggcagcaaaccgccgttcggtgccagtgtccgcaatgcggataaccgggagctgggcattgtgggtgaagatggcgtgacatggattgtcggcgtttcaccgaaagaaacactttctgtttactggagcgataaaaaacagtgtgaagtcacattgccggacagccttgaagccgcatccggtatgttattactgccatgttcaggctga

SEQ ID NO: 284900 - DNA, 738 bp, Morganella morganii
atgctgaaattctgcctgcgcaagagtgtgttaactgcacttatttctgtcactacactgatgtctgccacagcttacagcgctgtcacacttgatcgcacccgggtgatttttcccggtacggaaaaagcggtcaatgtcactatcaccaacgataacccgtccgaggcgtatctggctcagacctggatcgaagatatggacggtaaaaaactgacacagggcgcgattatggcgacgccgccgttacagcgtatggagccgaaaaccaatgcgctgatccgcctgagcaccacgtctttactgagctcgctgccgcaggataaagaatccgttttctattttaatgtgcgtgaaatcccgccgcgtgccacagagagcaacacattgcagattgcgctccagtcacgggtaaaactgttttaccgtccggccgccattgtgccggaatccgaaaccaggtgggcgcagaaagttacgctgaccaaaacggcaaacggctaccggatcaataacaccacgccgttccacctgacggttatcggtatcggcaacagcaaagcattgtcagaaaacagcgcattcactacggtgatgattccgccgaaatcgtcacaggatattgtgagtggcgcactgagcacgccgcatatctcctatatcaatgattacggcggtaaaccggcactggaattcagctgtaaaggtgaaacctgtacggtaaccggtgaaaaataa

SEQ ID NO: 284901 - DNA, 396 bp, Morganella morganii
atgaaaaacagggtgttatggggaatagccatgattgcgggcttatctgcgctgcatttccccgctgcggcaacgacgtttccggtggcggaagaggatgtccgtcagggggaaattgtggtgaatgcggtggtttttaacgcgccctgtaacttacggattcagcatttctctgaaccggttctgaccggatgcggtgccggggatgactaccggcggatgaatctccgccatgtcacggctgacagccccgcgtctgtccgtatatatgatgctcaggcacgccgttactctccccgctatcctgtccgcctggcgaatggtgacaatgtgctgaaaagcgagggagaattacaggggtataccccttcacggctggaggtcagctatgaatag

SEQ ID NO: 284902 - DNA, 534 bp, Morganella morganii
atgaatagaatagtgaccgttacggcactgacagcgctgatctccgcgcttggtatttcaacggcattcagtgccaaagaactgattattgaattcagcggcgagctgatgagcaccgcctgccaggtggcgccggaatcactgaataaagaaatcaggctggaaaacctgcactggcgcgccattaatgagcagggctacagctatgtcacgccattttatattgcgattgaaaaatgtaatgccacggacctgcagaaaagcatcagactgacctggaaaaacagtcaggtgacagatgttggtgatgaaaaagcgattccgaccaccggcagcagcggggtgtatctcagcatccgtgatcagcagggcaagccggtgacctggaacgcgccgatgacagcgggtgcggtgactgaagccggtaatcagcagcaccttaattttggtgtggttgtccgtaaacccccgcaagttgaggcgaaagtcggtgatttcagcagcacagtgacgtttgccgtggagtatcagtga

SEQ ID NO: 284903 - DNA, 531 bp, Morganella morganii
atgaaaaccaccggaatgttcagaatgatgatactgctgtccgcactgacagcagtgaacagctatgcggacgttattatcaacgtctctgcggatatggtcgaacctatctgtgatatccgcagcaacgacagcagcgcgccgctgaagattaatttcgggccgcagaatattgcagccctgaataaagctactgcggtacaacaattcccgctgtatttatcaaactgcaactttaataaaaacctggcgatcatgattacaccgaataccggaaaatcactggtctataacgggaaaaaagtcctggaaaccagtatcgccaatctggggatcagctttaatgacatgaccggcggaacggccaaatcactgtctgtcggtgaggcactgcggctcacaccggtgaaggtcagtgataccgagtactgtattgatttacaggctgatctggtgacaccggttgaaccggagaaactggcgctcggtaaatttaccgcatcagcggtagttcaggttgtttacgattaa

SEQ ID NO: 284904 - DNA, 1167 bp, Morganella morganii
atgtccgccctgatgcaccacactgaaaaacaacgctgcataccatccgcagcataccgcctgataaggtacaccgggggcgcggcaatattactttctgtgatctctgcgctgccggtaaaggcggactatgagtcttacaccacgaatccggctgatggttatgtggttcatctgaacgcaagtactacgctgtctgataaaccttttatcacagcggaaggaaaacaatactatcagataggccagccggttactctgagcccgggcagaggtaatgtgacggttaccggccaggtaaaatgtctcgggcatgtatacccgcgcggcccgaacgggggaacctacggcccggcaagcggtgctttttatacatttggtatgaccggcgcgttacagcgggaattgctgtcagggaatactattggttaccatgtctcaaaaaacctggttgtcgggatagactattctgtcagtacatactggaaatcggcgacgataaatacttgtgcaggatcaggcagtaacagacctaccgtggttaatgcttctgattttaatcagatatttccgttacgtctgacattttatcttgtcaataagccggttgataatcaggtttatatcccgcagacggatctcggcggattacggatttattattcttcccagggatcgggttacggaccgattgcaccatcagcttccacaccggtgccgatgagtgaaacggcagtaccattacgccttgccgcatcggttatcaatattccttcatcctgtaaaaccagtacatcgtcgggaaccggcggggcactggagattcgccacggcaagctcaacagtatgaattatgacagtactatcagtgagaaaatcacttatacctgtaactttactgcactgactaatatccgcctgcgtctcgattatacggggaatacggatccgcaaaaccggctgccgctggtgaacacggcggataagagccaaaaaatctacagtgaactgacgatgagaaatgacactaacgggcagtccggaaaagagatccgtatggatgtccgggattcacagtcagttaccatcagtagtcatctgaaaggcactaacgccacgcccggccattatcagggggccgcctggctgatcgccacatacgattaa

SEQ ID NO: 284905 - DNA, 438 bp, Morganella morganii
gtgaataaaaacacaccatataataatacattatctcataattttgaagttatcagaggaaatttatctggtaagctatgtagagatttagactgtaattacattcatactacaaatatgaattctgatatggatgaaataattttcgatgagtcaaaaatatcgaaaaatcatcgcattggaatatctggagatattatcatatctcgggtaggcacacgagttttaggaaaaacaaattatctttctaaaggaagtgctgttatttcggactgtgtctttgcagttagatttaaaagagaatttgacagagaaaaatttattaaatattggtcaaaacaccgtagcaattggataaatgaaaatgccacagggacatgtgcaaaacatataactaaatctagtttagcatctctaattatttccattatttcttaa

SEQ ID NO: 284906 - DNA, 267 bp, Morganella morganii
atggccggtaaacaggttatctgtctcggtgatacgactgaccacggcggtgtggtcatctccgcgttggataattacaacatcaacggccgtccggtggcaacggagggggattcagtctcctgtccgaaatgcaatggtgtttttcagattgtttccggttcttcccttatgacctttcagggcaaaaaaattgccctggagggcatgaaaaccacctgcggtgccacactgattgcgtcacagtcattgatggtatcagagtaa

SEQ ID NO: 284907 - DNA, 1179 bp, Morganella morganii
atgactgaacaggaagctgaactgaatgctatccgggaaatcaccggatttttgctgatagatgataaaaaacggtatttaacccgcctcgggctggtgatgacgttcttctttaaaaatgggtataccccggagaaaaaagcggccattctgcgctgttaccgccggttccgtgagctgtacgcagggaaactgaagtttcattcccatgaatttgacggtatgaaaaagtattctgaagaaaatatcgccaaaattgagaaaaaaattgaggaatccggagttaatgaacgtatcggatggtatatcagtgatgccaaaaataaagacgaggcggctgagcatattatacgatgcctgacttcttatgaagtagatggtgcttgggggacttcctatttaagcctgtatctgccgtggaatatcctgttttcagcggaaggtaaacaggaatttcaggactgggtgcagtatttatgtcaggagctggaaccggatcacggtgactgtggttatacgctggtgatgccacgtgactattatctgtttatgccacaggagtgtgagctggcacagcgctatcccgctatggtggtgaattccaccgttcatatggcatcgtctgagtatgaaaatgctatccgcagcgtgcagtggctgacgttcctggctgaccgttatattgagcgcctcggtggtgagactcatgtccgcaaaatattatccgctgatccggaaattaccctgacccgctatccgggcgggctgataattcaggccggtgattatccggatctcacccccggcacaccgccggaaagctattaccggattaatgaactgatccggccaatccgttatgtcataaaaaaagatgattccttacatttttgcggagagggccattttacagaagaaaccagcaggcagtggtatgagcgttatgaccgtggtccgatggtcgtttctccgttgtatgcgggtgaaccggcccgggttgatggctactggacgaccgaaggccgcgagagtgtggagaccatttttcttcagggcacaccggcgattgatattgaaggcaatccgcccggacggacagaatggcggcttatccgcgaaattccgcacgatgatgaacgggatctgaccctgctggagcaaaaacttaatggccggtaa

SEQ ID NO: 284908 - DNA, 1497 bp, Morganella morganii
atgaaaccggtgaaacccacaaaaccaatgaaagaagtgtgtcccggtggtacgacagtgacctgccgggtggagggggcacagcttccctcccttgaaaatgaatgctatctgaaagctaaagcggtgtttgccagctattttccccgggcatcatacaccaaagacggggcaaaacgttctctgaaacaactggtgatgagcgggcttatccgggcggaggaatcactggctgattggttgtggccctataaggcagaagtggtatttgcaatgcggggaacaaaacgaatacctttaccgatactggccaccagtgcagataagcgaaataagtacgggaatgatttgccgcattcgtcaaacccgtttgccatgccgccatccggccagtgggtccctaaaggggtaacagggaggcgacgtccggatatcattcttgttaaaaatgagacaaaccgctggcccggccggggagaaaactgggaaggaccgtgcattgacaacctgcaccggcttattgaagtcaaatttcccggagattttcttaaagaaggccaggaatatgactacaaactgatatccacgcctaaacgattttctgtttttcatgttgaagaaaatcgccgctcccgccgtaaagagcgggaaaaagcttgggaagcgcaggaacatctgctggctgaatacaggaaaaaaaccggacataagccggtattttcacaggaggcactggaaaatctggtgttagtggatttcccgctggtcagtgaaaatctctggcgtgttaaaccggtggcgagtctgtggtgggcgctgaatgttgatgtgccggcctttggccaggccgtgctggctgattcacagccggtatcaggctggcagatgtttactgatggtatacaggaggccggagagtaccttgttcatgaagcacgcgggtatattgtctccggttatgaatatacccgtgatactgccgcagaggcctgggcggtgtcctgtgattacatcggcagcgggctggattttctgagtgaggagctggcggccgcctttacggctaccggcgtctggttccgtgagtccggaaaatgggtggtcagggaagtcatcgagccgggaaccaacgcactgatgtatggggtgtactggctcagtgatgttaccggcgaattgatccagataagtcaggattatctgcttggggaatggcggaaagtttgtttttataccgatctgactattgaagtcctgcaaaatgtgaaatggtcgcagattatgactgatcttggtaatggtatggtgcaggttgcactctgggttgaagaccatgtgtttgaaattgtagccagtgttgcggtggcggcagctattgttgtgctggttgctctgatcccggccacaggcggtgccagcggcgcaggagcagtcagcctgagtgaggcattagctgcctttttggtcggcggtacgctgacattatccacccagtaa

SEQ ID NO: 284909 - DNA, 519 bp, Morganella morganii
atgcttaatggatttgctcgctatgctttgactgctagttcggttgccccagtttgcctgacattggcattcttagcttatattaatgataattataagattcttgtttcctcaattcttttggctgtcgtaagtgtggttttttgtgtctttataatcaagcaagcacaaaaatataatccggtcacattgaaaaacttagaatcggcatctccggcagataaggaaataaccaactatttcttgacttacttatttccacttatatctgggccgaccacttttatggattggcgattagccctgtttttttatttaagtcttttcttctacataaagcactcgtcttcgtatagtttcaatccaattttgtctatcatatttggattcaagttttatgaagccgaagatgacactggggtgagttttgttcttttgtcaacaaaacctcttaccaatgcgaagatcaaaggtttgagggtaaagaagcttactgaacatacctatatgattgtataa

SEQ ID NO: 284910 - DNA, 414 bp, Morganella morganii; identical to SEQ ID NO: 120251

SEQ ID NO: 284911 - DNA, 1152 bp, Morganella morganii
atgaagggtatgcagaagatcaaaaggggtaagagcttcgctggtgtcgttcaatatgcattgaaaccgggagcacatcataaaagtgatcccatcatcattggcgggaacatgttaggtgattcagcccttgaactgatcgctgaattcgatagcaccaagcatcttcgccaggatgtcgcaaaatcagtttggcacaactcgcttcgcttacccaacggtgaatcactaacgaatgaacagtggtctagtatcgcagatgactatatgaaacgaatgggattcagtgatacccatctccgttgctatgtcttacatgacgacgagggccagcatatacacattatcgccagcagaatcgacatagccagtgggaagctctacttaggtaggaacgaaaatcttataagcacgcggatcatcagtgaacttgaaatcactcataacctgacagtgaccatgacagcaccaaagcaaccgaagcgaagaaaggtttcccgcaatgaacagatgctttcagaacggactggccttccctcccccaaagaagctctccaacagatacttgataaaagtttatctgataagccggaccttctaactttcacaaaacgactggaagaagcagaagtcggctggacggcgaatgtcgcttcaaccgggaaaatgaacgggttctcattctcttaccgcgatatagctttcaaggcttcgcagttaggtaagggttactcttgggctaatcttcaaaagcaacttaactacaatcctgaccacttagaagctatacgagcgaccaagaaggctatccctgctcctgctcctgctcctgctcctgctcctgctcctgctcctgctcctgcaatagttttgaaaaccgctgagagaaaggaaagtatcggtaaaaaaattgcagaactggaactacggctcagagaagacaaacggaacgaaatcgtagaaaagatccttcaaaagaatgcagccaaacagcaaaagcatctcaggctcaccggctggattccctttttacaacggctcatagagcttctcagaaaatatggaaagagcatcctccacaaggttcctacaaacttctcagaagtctattcaacacatcatctgaaacctacaagaaaaattcgtttatag

SEQ ID NO: 284912 - DNA, 318 bp, Morganella morganii
atgaaaacatactcaattctcgcagttatcctttctacttttctattaacagcctgtaattcagaaccttctgaaaaagatatatttaatgtttttaaaagtgttgtagacaggtcaaatgcaagtatgaaagctctgaactcaagtattcccgaaaaagatcttttaagaatcgattatgtgaagaaagtaagttgcacagaagaagcaaacaatgtttataactgcattgtcgatgcctcgattagcaatatgaaacagacaaagcctgttaagcttgtgaaagctgatggtatctggaaagaaatacaacaatag

SEQ ID NO: 284913 - DNA, 231 bp, Morganella morganii; identical to SEQ ID NO: 120247

SEQ ID NO: 284914 - DNA, 702 bp, Morganella morganii; identical to SEQ ID NO: 120246

SEQ ID NO: 284915 - DNA, 936 bp, Morganella morganii
atgaccagtttatataccgcaacaaaacatccggaacaactggagacaaccctgttaaccggggaaagtcatttgtatgatgatcctttagagccccaaaaactggtttttttggatgcagtgaatgaacagcgttgtgtgattaattcaccacaacgtaacagccaattaactaacacgattcctttttttatagccatactgattatggcttgttatacattatttaacttttttgataatcacatggataataaaaaatatttccaatatagagttcaggaagtagagaggaaatatagtaataatttcaatttagataaagtgacattaaagtatgtgaaattatatgagccattttttggtaaagaaagtattagttggtgggaatatattaaagcgtataactcaggtgagttttttacagatagtcagtatggtaaatatcttgtgattggctggcttattttattcccgggagcattatggttgtttggttatctggcattttttacgccaccggtttatttaacagcagacagaaaacggggtctcctgtatagccatggcaggggaaaagtgcatgtcacccgttatgaagaggcacaaatcgggttagccggtaaaatgccggctatcaagctgtatgggattgatgaaaaatccggtgaactgaaaacgattatattccggccgaatgtttcccactattctgcgtttctgaccagtactgacagcgaaaatcaccgctttattacgttcctgaatgcctatatgcaacaaggccgggatgcggtctcccccgtggattatcaggcacgaaaacctttcctgtcgtttggtaaaaacccgctccccgaagactttgaacagcaggttgcacagattctggcagaatttgataaaaggaagcagcgtgatgcgcagtcagattaa

SEQ ID NO: 284916 - DNA, 270 bp, Morganella morganii; identical to SEQ ID NO: 284892

SEQ ID NO: 284917 - DNA, 153 bp, Morganella morganii; identical to SEQ ID NO: 161747

SEQ ID NO: 284918 - DNA, 681 bp, Morganella morganii
  misc_feature (652)..(661): n is a, c, g, or t
atgagcagaaggcaagcatacacgagggttgaaaggatcaacttcaatttacctgaacatgttaaaggtaaaggtgatgtaggatatcgcgtatttgaatgcttgaatccacaatgtcgtaacatgatacagattcaaactgaggatttaccacctgattttgagtttgaatgcgaagaatgcggttttcaacataaagcaggtgaggtgattaacatttatgaatataatttaattaataatacagaaaaccgtgttattgaaaatggagagttttcaatattgcatgatgattatatagctgaagcattagagtataaatattgtattatttgcggcttattaaagcctttgcaatcttttgatatacactcaagacgtaaaaccggtaggcagggcgaatgtagattatgcaagcatgtatataattctataaaaaatcaaaccagattgactgagcagcatagagaagcgtctcaaaaaagaagactatatgtgcaattcgattctaaaaataaaattgatgttaacgagatatatagaagatttgataataaatgtttcaaatgtggtttggatttaagtgctgatttagtagccaactctgagaaaaaaatgggtaatttggatcatacattgcctgtatattacnnnnnnnnnnatattacttatggcctttga

SEQ ID NO: 284919 - DNA, 429 bp, Morganella morganii; identical to SEQ ID NO: 120245

SEQ ID NO: 284920 - DNA, 387 bp, Morganella morganii; identical to SEQ ID NO: 120244

SEQ ID NO: 284921 - DNA, 636 bp, Morganella morganii
  misc_feature (590)..(599): n is a, c, g, or t
atggatatagaaaaaagcttagataaagaacaattggattctttgtttagcactcttgcaccgggtagtaaattaaatcctttttcagaaaaagtgcaaaaaagaaacaatctaatattcttgctattatactgctttggcctgagagcaggtgaacttttgaatctgcgaattggtgatatagattttgcagaatcgacaattgcaataagaagaagagcaaatgataaaacagatccgcgagtgtatcagccattagttaaaacttgtgagaggaaattaattgctgatacaaagctcatgtttgaaattttagattatattatgaatgatcgaagaaagataaaaaattctaacaaacatgacttcctgtttattacttataaggaaggaaaaactcaagggcaacctatttcattttcttcatatcacaaagtggtgagtgttgttcgtcaatcctcctcacttctagggggattgacaggccacaaactcagacatacatggaattatgagttttcgaaagcaatagacaagaatcaggacatatccgatgaaaaagagcaacaaatccgttcttatctcatggnnnnnnnnnnctcatgggatggcgaccgggttcagaaacttcaataa

SEQ ID NO: 284922 - DNA, 174 bp, Morganella morganii
atgggtctgctgtccgctttccgttaccaggttcttatccgcgcgggtatgctgctctcctttgatatgcagcgagacatccccgctggtctggtgtttttgcgagcctttgatgatcacatgctcatcaccgatcagttcggtgtggctgttgttatcaatccgccgctttaa

SEQ ID NO: 284923 - DNA, 378 bp, Morganella morganii
atgctcctgcttaccctcaacggaggtgcggtaccatttcagctgcactttcggcagcatttctccggcggccagggcgttgtacagcagcggaaccgctttgttcagcgcaacggtaaatttaaacggacggtgcgcacgctggccggatggctgaccggactgcgggtctgtcgggacggtgacgatatggtcaaactgctgcaccagcatctcatcttcatgaccctgcacatagatgttgccgacggattcagcggtaaacgcaccggcagtgatattgccctgagttttaccttcgatggagatatagcatggagttggcatgataaaattccttatttattaacaggtaacaaatcgttaccggacgagtga

SEQ ID NO: 284924 - DNA, 1854 bp, Morganella morganii
atggccgcagagaacagaacaaaatttattgttgatctggtcgggaatgtcacccagcgtgcccggcagttcggggccagtatccgcagtttcggtgctgaaggcagccgctcaatgcggctgttttccggtgcggtaacgggtgccaacagcattctggataagtttgacaataagctggtcgggttcgttaccggcggcggtctggcaatggctacaaagcgcgtagccgaacatcagcaggcaatggttgaactggggacacaatacaatctgactgccgaccagatgaatgcactggacgcgcagattaccagagtggccggtaaccggaaattatcgtcttcagagctgatgcaggctgcaaatgccttcctgctgcagacaaacaattacgatgccactattgcccaactggataacatcgcgtcactgataaccggtgtcggcactcagtcagaagtggccggtgcaaaactgggcgctatgtttaactccgggtataaatcaccggaagaaatccgcaggtggcttgacggtgttatcacgctgtcacaggtcggcaccggcgatataaaaacacagcttgatgccctgccttccatgggaaaaagtaccccgtggaaaaatctggaagaccagatgcagatgatggcactgatgcggattgccaaccaggaatttgacgacccggcgcaggcatctgctgccgttcagggtttttttgatgcagtcagtactaaggatggtgagaaattactgaagtcacggggcggtgttaacaccagaggtaaagacgggcaactgaagtctcctgcagacctgttggcagaaattgtgaaagcaggatatggaaaggaaaaaaacctttcacaagcgttttccggagatacattaaagttggtgatggcgttcgccgaccccaaaaagcagactcaactccgtgatgccgcaaaccccgccaatatccgtgatggttttcttgatgagaaagccacacagaacgtacagaccttcaatggtgccatgacctcactggtgaatgccggggaacgttttgcacagctgaagctggcaaagccggtgcaggagctggcagatgccattaatgacctgtccccggaagaactggataaatacgcggaaaccattgaaaaagcggcctacgcgataggtgcggccgttgcggcccgttatgcatggcgggcgggtaagagtatttataatttcgccaaaggtggcaggggcgccgccggtggtcccggagccggtggtcttggtgacggtggtgtcacttctgtgtatgtaaccaactggcctgcaaactttggcgggcgtggctcatctggcggcggtggtggtatgggcggcgggctgggcaagacagccaatatggctatgaatgttccctttgtgggctggcttgcaagtgaagcaacaccatatgttgaaggtgcactggactgggggtttggggaaaatgaacaatacaaaaaaatgcgggacgctaaaacctggggcgaactctatgacgccacaataggtgatgctattaattccgtgtctgactggtcgtcagagcgtgatgacaaactcaaaaatgaaggtgtaaaacgcatttccccgtatctgaccggcgaaaataacaactcgttcggcaactggccgtccgcctatcccagccagcagctggcagcggccgccaaaccgcctgagccggtcaaaccgcctgacgggcaaatccgggtgattgtggatgcagctcctgatttggtggtgaaaacaaaatccgtggagtcagagaacgttgatttacgggtcaataccggatacagcggcgggagtaaaatgtaa

SEQ ID NO: 284925 - DNA, 255 bp, Morganella morganii
atgaaaaaaaatgaagttaaacattctgactggccacctgcaaaagttaagtatgaactccagatgagggggctttcatttcgctttctatcccgtaaagccgggttggctgaagattcactcaaagcagtacaacggactccatgtatccgttatgaaaaggtgattgctgatgctatcggagtgcctgcagaagaaatctggccaagtcgctatgcggcgcgtaataacagctatatcaacaaggtaacctga

SEQ ID NO: 284926 - DNA, 663 bp, Morganella morganii
gtgcacaaattgattcctggctgctgtcttgacaggcaccgcaactacagtaatcctgatcatgaaaaatcgggccggacacagcaatccattacttcgctggtcagctggcaggtatcgtattcactgacactgaaacagaacctccgctatgcggatgtgaaaacgcatatccgccgtgattttacgcgcggatttgtgcaggataaccgcctgctgacagcggtgtatcaggattccccgtcccgggccagaaccctggcagcagataaccaactgatttacaaaactctcaccggcccggtatcccatgaaattctgaccggctttgatcttcagaccggtaagcaggataaggactggtcaggctcgcaaacggtaacatttgatccgtacggttctcactaccgcccgcagtttacgccgcacatgacatcatccacctccaccggacagacttaccggcgctatggtgtttatatgcaggatcatctgcgctggcagcaatggagcctgattttaagcggccgttatgatgattcctcactgaaaaccaccaacaacctcagcggaacaacacaaaacagtgatacctcagtttacagccaccgtgcggggctgacctacaccttcaccagcccgaataatcccagccccgagtaa

SEQ ID NO: 284927 - DNA, 1131 bp, Morganella morganii
atgttagagtttgttaaaggaaacttctttgattttgatgccgatattagagttaacacagttaattgtgtaggtgtcatgggggcgggggtcgctctagccttcaaaaataaatatcctgagatgttcaaagagtatgtccgtcaatgcaaggctaatgaaatattgcctggaaaacctagcgtatggaaaaaagaagacatgttttcgaaaggaattgagatcataaactttcctactaaggatcattggcgaaacccatctgagtacgaatacattgaaagtggtctcatctggctttctgactacgtaaagaacaaagaaggtttgacgataacactacctgctctcggctgtgggcatggtggattggattggaaaaaagttaaaaagctaattattcattaccttgcagaaacgaaaagtaatatcttggtctttgaaccagaatcttcaaaaaatgctgagagagagtcatccattacatctaacaaacttgcagaccttgaaaatctaggtgtaagtgtaataaggaaaaatgaaaaatcttacccgccagggttgattcgatacacagaaaaagatctctggtttttcggtaaaataattagagagttcgatatttctttgatctcaagtaccaaacctaatgagcaagaaataaaggtcatcctaaaattaatagaacactgtaaaataaaccgtcttagcattttgtttggcggatcttcttttgataagaaaatggccttgcactctattagacaaggagttgaaactggaatttttttgccgagcggaatttcatactcagcagaaaaaaatcgggaaaaaggtgctacggataacatatctattctttcaataggtgatccttttaaatcatttgatagaaaagcctacatgccgtctgttatgggccgaatatttatctgcaagtcagttattttcaccactgaaaggttgaaatggctagaaaaacagaggagcaaaatcataagtggtgggataaaatcgtatttcataaaatacgaaaaccttcaagaggaggattgttttgctgctatcaatataaatgcaaaaccaatcaaaccatttgatggtgagcaagtatcggagatcaacctctga

SEQ ID NO: 284928 - DNA, 1344 bp, Morganella morganii
atggagtttccagcaagtctcaaaggcagatatgcatatcattttacttatctaggcaaccttgaatcgataatcgataatggactattgtgtacaaacttgaaaaatgatcggaatataactcatcataatgttgccgagcatgggatacaaggaagaagaagtactatgcaggtaccgtgttctaatgggaattttgttcacgactatgtccctttttacttctcaaaaagaaactccatgcaacttggagtaattaataaaaaaaatgtagaccaagcatttcttatttactttgcaattcccatagaaattattattggaaatactgacgttgtattttcagatgcttcagcaaacacagatgtaccgccgaatttttataattctcaatcactaaatatgcttaactctttaaactgggatgctattgatagtaagaaatggtcgtgcccgtcagagaggtatcgtcatcaaaagatggcagagttacttgtccccggtagcattgacatatcagaactggatcacataatagtttggaatgaatggattaagaataaagtagcggatgtatttaaaaataaaggaatacaaccacctaaaatcaaatatgatgaggatcactattacataaatttttacgataacaaagaaaaatcaattgtaactgggccatactttttgaaaaaaaatatggaagaaacaattgaaaaaatatatgaaaataataacaaaaccaataaatataaaagccttcgtgatgcattagatgaaattaaaaaaaacttctcatcaataaaagaacttgatgatatagacgggttaaaggccagctattggccgcacactgatgatgttggcacgcatagcaaaaaagttgcaggtgctctcgaacagttcaatgaatataatgaactgtctgatgcggataaagaaattgttcttatttccgcatatctacatgatataggtaaaggaccgaagtctcgctgggggcaaaatggaatgactaaagctgataatgaccatgctgcaaagtctttgcctatgctaatgcgaattcttactgaagatattggcgggctaagtaaagaatctgtaagaaagatagtaacattagtaacttatgacgacttaattggtgacatcgttgcgaagggccgagatgagaagcaattgattgatataatcaaaaatgaaaatgacttgaaaatgctcattgctctatcaaaagctgacatgaatgcgatcaatcctgaatgggtggcaacccacagtaaatcaatagcagatttagaatcgagagtactgtgtgtgattaggagtaataacatatgttag

SEQ ID NO: 284929 - DNA, 192 bp, Morganella morganii; identical to SEQ ID NO: 278991

SEQ ID NO: 284930 - DNA, 2598 bp, Morganella morganii
gtgaaaaaaaactttgcttacaggaaaaataactgctttcccctatcgctatttttagcttacatctatttaatattctgggcggtaccttatgatgtttatgcgtcacaatccgatgaagcagaatttgattccagctttttacaacatgctcagggaagaccaataattgatgtaaggcgctttagttataataaccccatccctgcaggtcaatattattctgatatttacctcaacggagaaaaaaaaggccaaactaatttatatttttccgatacttctaaatcaggttcggcgacactttgtgccacaccggaatttatttcaactctcgatttaaccgcagatatattaaaagaatatgaaaacaaaaaaataactaaagataattgtattgctattaatcaaataattcctttagcaaagacacatttcaagttatcaactcttcgtcttgatgtcgagatcccacaggctttaatagcacagcgtcccagaggttacatttcacctaaccagtggcaatcaggtgtcccggctgcttttgttaaatatgatgtaaatcattatcaataccgttcttcaggcacagaaaaccgccaaacgtatttaggcttcagaactggatttaatttcgctggctgggcattcagacatcgtggaaatgaaagctggagtaatggtgatgcttccggctatcgcagtattgaaaccaatcttcagcacgatattccgatgttacgggggcaattgacgcttggcgatttcaccaccagcggacaacttacagatagtatcagtttacggggtatgcagttagcttctgacgacagaatgctaccaagctcacagcggggttatgcacctgtagttcagggcattgcaaataataatgccagagttactgtctggcaaaatggtaatattatctatgaaacaactgtacccggcggccctttcactattaatgacctctaccccagcggatatggcggggatttgaccgtccaggtaacagagtcgaatgggcaagtacgctccttcaccgtaccatttgcgtctgtcgcacagctggtgcgccccggttatgcacgctaccaattagcaataggtcgctatcgttacagtaatgaaactatcgatgatgttattttccagggaacacttcaatatgggttatttaatgacattacattaaatagcggtttaactacggcgccgcactatactgccggattaatcggacttgcattcaacaccccctatggtgcgattgcatctgatattaccctttcagatgcaaaattgactaactcagataccacacataaaggatatagtctgcataccagttataatattagtgttccggaaaccagtacaaatataactttagctgcttaccgttattcctcaaaagattattacagtcttcgtgatattatgtgggctaataatacatcttatattgataatactactattaaatatactagttatcgtcccagaaatcagtttcagctatccataaatcaaaatatgggggaaaacaacgggaacatttatcttgccggaacaacatacagttactggaaccaactgaagaacagtaatgagtaccaaattggatatagtaatttctttcgtcaggtaaattatcaactcggttactcaaaatcccaaaacaataatacaggtcgtagtgatgagagggtttattttaattttgctataccacttggtgatggtccgcaaacaccattattgtcaacaacattaaactataatcaaaatggaaataacagcgcccagacagccattagcggtacattgggcagtaacaatcaatattcatacggaatatctgctaatacacaaaaaaatcactcatcaggttattctgtaaacggacgttatcgttccccgtttgcagtcttgtcatcatccgcaggcaatgatagtaatcataaccggcaattttcatttggtgcctcaggtgcaattgttatgcacccatatggcctgactctaagtaacgacctgagtgatactttcaccattattcatgctaatggtgctaatggagcagccattaacaatgcccccggcaatcgattagattattggggaaacggaattatgccttatgtcactccttatgcaatcaaccgaattagcattgaccccagcgatttacctttgaacgttgagttatctgcgaccgaacgtgaagtcattccaagagcaaacagtattaccttagtaaattttactactaacacaggaacaacgatgctgtttgatatcactactaatgatggttcatttccgccaatggcatcagaagcatttaacgaaaaaggtcaatctgtcggatatgttgtacagggtggacgattattcactaaaggattggcagaaaaaggaagactggaaatcgtgtggggcacaaataatactgaaaaatgtacattcgattataaaacacagataaaaccatcaagttatatacctgacatccaacccgtcacatgcataaaaaatgatgacaccactatttccaccaataaaaaacaaccgggccttatgtattga

SEQ ID NO: 284931 - DNA, 1713 bp, Morganella morganii
atgacatctatcatattcagaggaattgaaaacaatacattctcgataatagaattcctaaaatcaagagctaaacgtatcattccagcactggcttttgttgttgccattgtgttagctattggctatctgatatttgatccgtcattatatagaacagttggtaagcatgccgttgccagccttttatttatatcaaatattatttacaacagagaatctggttattttgatattgactcacatgataaattattcttacatacatggtctttatctgttgaatggcaattttatataatatatccaattgcattgattatattatcaaaattactcacaatagaatcattaaaaaaaacagtctggatttctttttttgtttttttatcaatatcaatatatgagtcaagtatcgataaatcttcatcatattttttactttactcaagagcatgggaattactaattggtggcattgcatatatatatccattgaaacataaaataatacatgaaaaattcatagaaataattgggttaactttgataataacatcattatttttgttttcagagactacggagtggccaagttataacgccttacttccagcagtaggaacatatctatgcattgttgccaacaataaaaattcgatattatcatttaggccaatacaagaaataggcttattgtcttattctatatatttatttcattggcctatccttgtaatatcaaataaacttgactttaatttaaatatactatcattcttagtaataacaatattactatcgcttatatcttataactttattgagaaaaaaagaaactactcatctatatcattgctagtatatatttctatcattatatttagttatgtgatttttaaaagtgggttgccagcaagaacaaatggtgaagatacagtagacttccacagtaaatattatgggggtgtcggaatacctgataattcaaaagctattaggtttaatgaaaacaaagaagttgagtttattttagtcggcgatagtctatcaaggcaatacgcaaactacttaaatgataatggtattgggtttgttggaatattcagcaatggatgcttttcaatgaatggctattatgacgtatatactgaaaaattaagagacaaatgcatctcgagatataaaaacttaaaggaagcgattggcaagtataaaaatgcagatataataattgcccagcgctgggatgacaaaatcaatcttaaaagcatagagtcatccactccagttgataaatccaagattatttattttattgagtcatatttacttgatatctcagcgtcagctggaaaaaataacaacgtatatatacttagcctagcgcaaggaaccaatagaaatacatttgaatgtcagcaaaaaagcaaacttccaatatattctataattgaaaaacctaattgcagcatcccagagaaaaagaaggagatgataataaatacaaaaattcaaaacattgtcaaaaaaatgaaaaatagttatttcatagatataaacgatttcatatgtgatacaaatgaatgtaatgtagtagacaatggagatcagccaatttactctgacaataggcatttatccttatttggtgctgagtacataggtgatagaatactaaaattaattaatgatatagagtcaaataaataa

SEQ ID NO: 284932 - DNA, 459 bp, Morganella morganii
atgccggaacaggttaaacaaaaaatctttaaggatggtttcgttaatacaggtgcgcgggggatccggaataacaatccgggtaatatcgattatcacgcctcgaataaatggcaggggcagctaccgttagacaaatctatcgagccgcgtttctgccgctttcagtctccggagttcggtattcgcgcactgatctcactactgcgaaattaccaggtaaagcacgggttgaagaacgttgctggtatcatcagccgctgggcacccagtaatgagaaccagaccagtgcatacattaacggtgtctcgaaagagctgggggttgcaccgactgacactatcagcatgacgagcaaggatacagcgatcgcaatggctaaagcgattatccgccatgagaacggaacgcagccatacgttgaagaagtgttcgaacgcgcctgggtgcttctgtga

SEQ ID NO: 284933 - DNA, 1593 bp, Morganella morganii
atgactaatccgcaatcatcagcctggtcgccgctgcgtaaccgtattttctttgtgttatggatggcgacattattttctaacatcggaacatggatgaatgatgtcggtgcgggatggctgatgaccaatctgagtcctgatcctgtcatgattgccaccattcaggcgatgaccacactgccggtctttttattagccttaccggccggggcgattgctgatattttcgataagcgcaagctgcttatttttgtcaatatcatgatgttttttgccgctgcattactggctgttctggtttatttcaatgtggtcagtatcggctggttattgttaattacctttattctcggatccggtgcggcttttttaggcccggcatggcaggcgattgtcccgggtattgtggcgccgcatgaattaaaagcggggatcgcactgaacagtatggggattaatatcagccgtgccatcggtccggcgctgtctggtgtgctgatttcgcaggtggggctttatcttccttttatgcttaatgcactcagttttattgccattattgtggcggtgtggtggtggaaaggggagaaacacaaagaaaataccttaccggcggaatctgttgtcgccgcgatgatttccgggttgcgctatgcccgttacagtccggcattgattaaaaccattatcagagccgctgccttctttgtgttcgccagtgcttactgggcaatgctgccgctggttgccagagtgtcgcttcagggggatgcaacgttatacgggattttaaccaccagtatcggtatcggggcggtcgccggggcattcagtttatctgcgctgcgggccaggttcagtaccggaatattagtgactgccgggactgccggaacggtcattgtgctggtgatctttgctgtgaccacatcaaaatatctggcaatcgccggcagtattattgccgggttcagctggctgatcacgctctccacgctgatggtgtcagcgcagacagcactgccggactgggtcagagcgagagggctggcgctgtatctgacggtattctcggggtcaatggcactggggtcattaatctgggggcagattgcctcacacacatcaataacaatcgcgctgcttgcggcggcagcaggtattattgttgtctggttatgtgtgctgaaagtgaaaattgaccacgacaatatcaatctatcaccgtctgaacatctgacaatgccggaggaattaccgtattctgaggaagataaaaaaccggtgatggtgtgtattcagtataaagtggatacggaacatcaggcgcaattttttgcactgatggagcaattaaaacggatccggttacgggatggtggttattccagagggctgttttcggttcccggtacgcaggatgaatttatggagacatttatggtgtcatccccggcagaacatcaccgtcagcataaacgggcaactgtggatgatcgccggattgacagccagttaaatgccattatccggagcaaaacggttgtgcattatctctcatattctgcggatacgggaaaacagaaataa

SEQ ID NO: 284934 - DNA, 300 bp, Morganella morganii
atgtcaaccttcgatagggagaagttaaaattgattcgggaatctgagcgattaaatgttaaacaggtagccgaactaattggtgtcaattatgttacttatcatgggtatgagagtggaaaagcaaaaatgtcgttagagtcagcgatgaagtttttttcaatccccatatttcgaaaatacatgacatggttcatgtttgacgaaatcaatcccgaagctggtcagatagcaccggccctcgcacacagtgggcaagacgaaacaatgtcaccccgctcagacaagaaaattggctaa

SEQ ID NO: 284935 - DNA, 408 bp, Morganella morganii
atgacacgcggcatccgaaataataatccgggcaatattgactaccgcccggcgaataaatggaaaggacagcttccgtacgataaaagcattgaaccacgtttctgccggttcagtgcgccggaatacggtattcgcgccattatcgccctgttacgtaactaccagggtaaatacgcgctgaaaaccatacgcggacttatcagccgctgggcaccatccaacgaaaataacaccaacgcttatgtcagcggagtatcgaaagcccttggtgttgatccggatgcatctgtcagcctggtgtataaagacaccgcaatcagcctggcaaaagccattatttaccatgaaaacggctgtcagccttattctgacgcggtttttgaaaaggcgtatgcactgttatga

SEQ ID NO: 284936 - DNA, 1446 bp, Morganella morganii
atgacagcaaagtatttcgctatcctgacgaactacggcgcggcacagctggcgaacgctgtcgcgctgggtacgcagatgaatattaccgcaatggcagtcggtgacggcggcggcacactgccggttcccgatccggcacaaacaacgttaatcagggaaaaccgccgcgcagcggtcaatcaggtatcggttgatgagaaaaacccaaacatcatcattgccgaacaggtgatcccggaaaatgaaggtggttggtggattcgtgaaatcgggctgtatgatgataacggcggtctgatcgcaattggtaacgtcccggaaacctacaagccgaatttacaggaaggatcaggccggacgcaggttctccagatggcgctgattgtcagcagcactcaggctgtcaccctgaaagtcgatccgtccgtggtgctggcaacgcgggagtatgtgaccaaaagtgttgcggcagcaattcaggaatcagaggctaaagccgcgaaaatttacgccactaaaagcgagttaagttcagggttatcgggtaagcaaccgactggcgactatgccacaaaaacagaagtcggtttaaagctggacaaaaccgcagtggttcagggtaccggcacatcaacaacaaccgtgataagtcagaaagcagtgactgacttagccgcaaccaaactggataagaccggcggcaccattaatggccggttaacacttaattcaacgtggggcatcctgagtatcaacgcccttaataaagagggtgctttcatttcgtttggtgagaacgctggtagcacggaaacggctctggttggtttcgccagcgaggacagcaaacatttccgtatatccaatgaaaagaccggaacggtgtttcacattctcgacgggtatgcacagattgacgggaaacgggttcttaccgctgatgataaaaatagcattgtaccggttggcggaacgataatctggaactcatcagccccttatccggataacttctggcctaacgagggacgctcattttctgccgcagactaccctgagctggcaaaaatattcccgaacttaaaactgcctgatgaccgtggttatgctatccgtgccgccgataacggcaaaggcatagattccggtcgcgttgtgggtacgtatcaggaagatgcgggccgccgtcttgaaggtaaattctcactgaggggaacgaatggtacaggcggtcgcacagcattcttcggaagtggggtttttaacccgattggagtcggtgatgggtctgttcagggttatgcgtataacacatttaaagacgaaaccccggaagcagcaggcggccagcgtattattttcgattccgataacgtatacccgtcagcaaaccagttcagaatgaaaaacgtagcaaaaattttaattacgagggttaaataa

SEQ ID NO: 284937 - DNA, 618 bp, Morganella morganii
atggcttatacaaccgatatccagaatgcacaatttgacgaaaacggactggcggttattccgggctgggccaaaatttaccgcgctcacccgtatacccgcgaatatattggtgctgcaatggataatgtcccctatggcggctctgtggtcggtgatgcttaccttgatgagcctgaaataccgaccgcgcccaatatggctatcgtccgcgcacctgaagggaaatcatggctgcatgttccggattatcgtggctccgtagcatatgacaaagagacaaagcagcagactgaaattacagagttgggtgaattgcctgataacctgacgctggatgtacccaaaaccccgtttgataaatggaacggtaaaaaatgggtgacggataaggctgagcagcaggcacatgaggttgctgttgccgaaagtcagaaacagtcactgttggcggaagctgagcaggcaattgccatgctggagcgcaaagtgcgcctcggaatggcaaccgatgaaaacaaggcaaaactgaatgagtgggaaattttcagtgtgaacgttgctgataccgacaccaccaccgcaccggatatagactggccgcaaaaaccgcagtaa

SEQ ID NO: 284938 - DNA, 219 bp, Morganella morganii
atgatgaaatgccctctctgcggccatgccgcgcacactcgtacatcacgcgagtttacgaacgaaaccaaagaacgttacaaccagtgccagaaccttaactgcggcgcgacgtttgtcagtcatgaaacgtttgtgaaatatattacgaagcctagtctgattaatgaagtgatcccgcatccgataaatgaaagacaagtcgcaatgggattctga

SEQ ID NO: 284939 - DNA, 645 bp, Morganella morganii
atggctatgattgccggggcgcttttccctgatgcaaaaaatgagcctctgcctccacagaaacagcagacggaaaaagtacagctaaaaccgactgaggccgcgccggtcgaatctgaacaacaggttgacaagtcacaggtatcagctgatagcgacctatgtaaatcagattacaaaaccgcactggaagcatttactgacctcggtgattactatactgaaaataattcccttgagatcattagtgaaacaccgctgcatatccgtctttccagccccgcattaaaggatgattttcctgatgtaaaagaaatgctggtaaaacgtgcaattatttacggtgtataccgtgcattccttcatacaaataaggatgaggtaactattacgtcataccttgttgacatgaacagtaaaaataagctcaccggaacatctgagttcactattaaaataacaagaaaacaggcgcttgatattatcaaaaagtatcttcctgttcagagttatgctgatttaatcgcgaaagatagtggcgggtgctttttttcagatggttttaatcaattaagatatgacgataaaaataaaaatgtcatttttaataaattctttaatgacctgatatctgcaaataaataa

SEQ ID NO: 284940 - DNA, 498 bp, Morganella morganii
atgaaaactaaagatgcatatatctccaatgatgataagtataggtacgatctatggagggtgtgggatgaatcaaagccaaaaattatgtttattggattaaatccatctacggctgatcaagaaattgatgataacaccattactcgctgtattgatttttcagttaaatggggtttcggtgggctgataatgtgtaatttatttgcattcagagcaactgatcctaaagagatgcgcaatgcgtcagaacccgtggggagcgaaactgatatggttcttcttaagcgagcagaagaagttgatgtcattgtagctgcatgggggaataatggcggctttatggggcgttctggatatatgttaagcctattatcagacaacttactatcggataaattgtactacttggaactaaataaaacgggtgaacctaagcatccactttacgtacatggcgaaaccaagctgacaaaatggcaacatacgaaattgtga

SEQ ID NO: 284941 - DNA, 402 bp, Morganella morganii
atgaagctttcattgaaagaaaataaagtaaaccagctaattctggttgatgccgaagacaatcagacgttagattctgactttagcttaagttttgagccgattttctatgaggaagacgctagaaaattcaaaattgtgttcgattttgaatatataactacagatagaaaatacttaagaatagattatcagagctattttattactgattcagatattaatgaagcttttcgtaattctaagtttccagtaatcaatgcgccggctatcgcattcccatttttaagggcttttttggccaacttacttattagtggaggccatccgccggtgcttcttccaagtataaacttccttcattacgcccaagaaaacatctctaaacctgaagtgttttaa

SEQ ID NO: 284942 - DNA, 234 bp, Morganella morganii
atgctttcctttgaagaaagaatgactttattagaagcggctctcagtgagtatactcctgagtctctttttgaagaactgtctaaattcccagcatatgggagatctttagctgctcatgtagttgaagtatctgagcgagtaactgtcatcgagcctagtaatctcgatgctcctagcagaagaaatattattttttcttcagaaacttacgacatgggtgaagcagcttag

SEQ ID NO: 284943 - DNA, 576 bp, Morganella morganii
atgggtcgccaaattcacattggataccataattgtcgtgatgaaggtggttatgatttcctccgtgaaaatgttccttttttaagcggagagggagataatcagtggctgactcaaggctactacttctggacagatgatacctactgggctgaacggtggaatcaagggaaacaggtaacaataagtaagtttactattacatttcatgaagatgatgagctactagatttagtcggcaacactagacaaatatgtgaatttcaaaaaatgcgtacgcaagttgcgcaaaaattagacattaaagatgtgggtaaaattacggtttctcaggtgatcgctttttttagaaaactgaacaaggaaaccaaatcttcaggaatttttccctatttagcagttaaagcacaagacgctccacatgatagcaggttcctcaaaatgctatttacccgttatcggcgagagcatctttgtttagccactaggcagcaaatgtgcgtttttgctcacgcgaaggacagaattgattttagctgtttcatgtccccaaaagagtacactgaacaaaattag

SEQ ID NO: 284944 - DNA, 222 bp, Morganella morganii
atgaaaatgacctaccgaaccgaaggagagacggatgtaattgaactggaatattcaatatttgagcttgataaaattaaatatgcaatagaatcaatcaggcgaatagcagatgttaaaattgaaacaaccggcttttttctgaaacgaatgaaaattaaaggtaccccagaacaggtcaaaatagcaggaaaggcattaagacgcagatatcatcattaa

SEQ ID NO: 284945 - DNA, 198 bp, Morganella morganii
atgaatccggaacaaaaataccagataaggcagttactggaagtcccacagatgaatgctgctcagatgattacattgctgtccgtctggctggatgctgaacgcgaccctgaagttgtcaatatgatatgtgttgcgctgaacgttgccagagagattgacaaatccctgtcggtggctttggagggcaagatatga

SEQ ID NO: 284946 - DNA, 1218 bp, Morganella morganii
atgatgactatcgcctcagcaatgtttgatacacccaaatcggcgtatcaaagcacaaatattaatcaattaacctcggtattggggaatattgccagccaggggaaaggctctctcctggacggcggggagtcggttaaactggacaccctcacgaatactgtaacttcaacttacggtattaccggcaatcaatcagacaaactttcgtccgggcgttcggctttgactctaacttcaggttatacccaaaagaccagcggccactcagccaatattttggctcaacactcagcaaaactatttgctcagtcatcggctaagggttcagcaggtcaatcagcgaaattttacgccggtctcaaatatgaaaccctgagctgtccaaatccggatatcccaaatcgtggggaaattacaccatttaaaggttttatcggggtcactacgcggggcgaaattgagttttgtcagcccataaatgataggcgtgtagagttttcggagtccataaaaaaggactgtgtagagttttgcgagtccataaaaagtgatagaggcgtagagtttttagagtccataaaaaagggcagcgtttccaccgccctttgcgtgttcgatattaaatatcgagcaaatcagccattacagattagtcagcggctgagtggcggcatatcggatatttccggggaagccgaaaactttgatgataatcacttgtttttatcgtcagatgttcgttatagtgatcgggcaccggcaaaatccggtgccaggattgagaccctgaatatacaaacggcgacacatgacgcgccttgcgtctttttttgtgtccgtgcctacgcacacctgcaaaatacggtattatgccgtcctgattcaatggtggcgttggtggggcagccttcgggctggctggtttccgtttgtgccagtagtctcaaccctgtcaacgtcaccacccctatagagattgagacctctggtggtgactccgcgttaatacaaacggagatcatcgttatgatggctatccctgcccaaactcaattcaaattcctgtttctggcggtaaagcgcacagacagcacagatattccgcaccgcatcgaagccacagcaccaaacgagcatagcgcccgcatgctgctggtacgcgattacatcctctcttttgccggacgtttaccgattcgtgaggtgtccgcatga

SEQ ID NO: 284947 - DNA, 690 bp, Morganella morganii
atggaaaagaaaaataacagcttaattgctggcggattcgctcaccctgaaatcagctcggagactattttagttcagcacaaaacagagcctagaattgatagccgcctgtttgctaaacgcatcggaattaaacataagaacctttttgaattagtaaaaaagaatacaaagaatttacgtcaatttggaacccttccgtttcaaacggagcgattaaataccgaacaattaggttcgcgtgaacataaatacgccttactcaatgaaagccaatttgattttatgtgccgtattgttcgcggtcgcgatcacgaaaaaatgactcagtttaagctggacgttaccaaggcattcagtaagaaacgtgccgctgaccctatccgccgtgaatacctgccgcattatcatgaatcacgggacgcactcagagacttaggcgcagagaaatatcattacatcaacctagcccgtacagagaaccgattaacagggttactcactggcgaacgtgccagcgcagacgagcaacaattaggtttattagtctgtatgcagaaaatcgaacaggcagcatttcaggacgcgattgattcgggtttatcggctactcaggcattgcgagaggtaagtaaacgcattgagcagttcgccagcttaatgagtcctgcggcacggattggtggctaa

SEQ ID NO: 284948 - DNA, 219 bp, Morganella morganii
atgccagcaattactacgcagaaagaaagtcttatccgtctgccggaagttatccggcgtacaggttgctctaaaccgtggctgtacaaactcatagatgccggtcaattcccaaaacaggtaaaaatcggctcccgctctatcgcctttgttgaatcagaggttgatgcgtgggtagcgaataaaatcgcagaatcccgcactggtgaggtggtgtaa

SEQ ID NO: 284949 - DNA, 663 bp, Morganella morganii
atgagtgaacggcagttccatctacttgattcttttggggagtcaataaaaaacaaaattctaagaattaaagaagaagatgatattatttatcaatcggatgagttcgatggtgtaattaaaggattattttttgatattaaagaacaattacaaatagctacaagcaatatatttacccctgaagagctgattattacagttgagctagagagtgcgctttctgtttttttaaatgatatacgagaacaaaatatcattggctatttgtgcttaagcaccaaaagtgtgtgtgacgaaattggattgtcattccaaacatacggcatgagcattttttgctctctttattacataatgaaaaaattcgatcatatttcttatgagttttttttggtggttgttcaaccgatattgacggcgatgagactggaagatgtccctaaagaaattgggaaaatgggaggtcgccctgaacacccaagaaaagaagaagctcttaaaacagcaatggaacggtggagtaaaataccctacgcaagcttatctagtgtagcaacatatgttaaatccaagcttgaagaaaaatacacagatgcccctaagttgccatcaataaagtcatggttgaataaagcaaatttaaagccagtaaaaaaataa

SEQ ID NO: 284950 - DNA, 1788 bp, Morganella morganii
atgaatagtaaccttaaaaactacttagattattataccaaattagaaaacccaggttatgcccttttaataacgggagggtggggtagcggaaaaacatatcaaataaataaatattttgaaagaaaaaaagatgatatctgctatgtcagcctctttggaattaactccatacaagatatttattcttcaatatttattaaaatgtttcctaaaaaagcatttttaaaaaaaatactaggaagcgtagaaaatgtagatgccgaagtttcagcaatgaccttaggtctaggtggtttgctgagtaacctaggcagttcactaataaaagaagaagtagataataaaaaaataataattttagatgatttggaaagatctataagaaaaaatattattagtatcgacgatatcttgggtgtcataaataattacattgagcatgaaaaatgcaaggttatagttatcgctcatgatgaaaaaatattagatgaattaaaggaaaaaagagaaaaggtatttggtcaaaccataaaaataaatcctgacatagatagtgcaatagcttgttttttatgtggcaaaaacatccatgaaaaattcccagaaatagaaactttattaaaagaagtgtatttaaagtcaacctactcttcacttagggttcttaagtatataataaacgattgcgaaagattatttaactgcatagtagaaaataatttaaatctaaaaaaagaacaattatgttatttattccattattttattatttcctgcattgaattaaaatcagagaaactaacctttgatgattatatgaatttctttaatattttagtaacgcattactcaaataataaagaaaacaataaaaaaccacctcatatattagtagagatattagaaaaatatgaaatatcaacattagataatgaattaataagcaaagaatctattgttgatattattagcaatggtcactttgataaagataaaatagtttcttacatcaaaaaatctaactatataaaggataagccaaatgctccatcttggtataaattaaaagaatttgataaattagatacgaacgaaatagaaatagcattaaatgagttacataatgatttcagtaatagaaaatttgaactattaggtgaaatatttcacatgattaatcttttattactagaagaaaagatatctaacactaaacctaattatgataaaatagaaaatgaatgtaagaaatacattgatgatgtatttataaaaggcactctcgaaaaaacaaatccacataaatactatggctttgtggatagcactagttatgatagtgtaccatattggatagaaaatgattacagatcgaattcgaataacctaagagattatttatataaaagatcatatgagttattaaaaaaagaagcatctacatataaccctcttaaaagaatgaaaactgatttagattcattaataaatgactgtactcaagatggtgataattatggcgagttatgtgatattccattattccatacaatcccgccaagagaatttgtatcgacttggctaactctacctaataataaacaaaatgaaatatatatgatgcttagacgtcgctattcaaacggaaagttaaattctactttaatggatgaagaaaagtggatcaataatgtgctcttagaattagatagagctgccagttcgatggaacattttcataaatacagggttgaacgattaaagatgcatatacctacagaatag

SEQ ID NO: 284951 - DNA, 5916 bp, Morganella morganii
atggacgttctgcgttttatcctccgcttaccttttattttgctgcgtctggcggctcgcagtcttgtttatctctttactctgctgggttttctgctgcgcccgttcaccggacggatccgctgggcggtgccgggctgggtgacctttgccggtaatcagcttgcccggctggagcggggtgtaaaccgctatccgaaaaccatatctgccttattattgctgactgctgcggtggcagcgggcagttattacacctggcactggtatcagaacaaaccgaagccggtggatgttgcgccgctggtggtgcaggatatttccgcgtctgtgcagcgcccttcggcggttaattataaccgtgacgataattcagcgcagattgtggtggtgacattctcccgctctgccgcaccggtgacactgatcggcaaaccggtcacggccggtattaccctgacccccgcaatggaaggtgagtggcagtggcgtaatgaccgtaagctggtattcacggcgaaaaaaaccttcccgatggggaaaacctacaccgtcgatatggatgccaaaacactgctggctccgcaggtggcgttaacagagaaacaaaaaacctttaccacccctgagttttattatcgcggcggccgggcggagttctatcaggatccgcaggatccgatgaaaaaacacgccattatcggcctgaccttcaatgccccggcagatgtcaaaaatctggaatcgcgtctgtccatgacccgtgacggcaagccggtgccgtataccgtcacttatgatgataaaaaactcaaagcctggatccactccgggcagctggcactcaatgatacagacagcgaagtgttgctgacagtcagagccggtgtcggggcggccgttccggccaataccacggacaaagatgaaaccttccgcgtgatcgtgccgaaccgctacagtctggatgtgacgggtatcgacagtcagctggtggaatcagatgacggaaaagatcgccgcgccctgattgtgtcattctctgacccggtgaatgaaaaacagatcacaaaagcggttcgtgcccgtctgctgccggaaaaacaccctgattataattctgaggggatttacgacgactggaaatcagatgatatcagcgaaaaagtcattgccttatcagagccggtgacgctgactccggatgacagcgagcaggagaatcaggcggcattcagcttcagttataacgccccggccaaccgctggctgctggtggaaatcaccggcggtatgagttcggcgggcggttattacctgaaaacatcacgctatctgccggtacgcatcccggattacccgaaaacactgcgttttatgtctgacggggcactgctgtcgatgaaaggtgaaaaacagatcaccgtcgcggcacgtaacttcccgggcctgcagctggatgtgaaacgggtgatcccgggccagttacagcacatcgtctcctttaaggataaaaactttacctcaacggattttaaccgcctgagtgatgaatactttacggagcactttacttatcagacggcgctgtctgccgccaatcccggcgatattcagtacaaaggtatcgacctgagcaaatacctctcagctgacccatccgcaaaacgcggcatattcctgctgagcctgcgggcgtgggatccggctaaaccggcggaagccccggaagcggaaagctatgacgaaggggatgaggattacgaagaggatgcggttctcgactcgcgctttgtggtggtcactgatatggggatcatcgcgaaatcctcccccgacggctcgcgggatgtgttcgtgcagtccgtgtataccggtgagccggtcagtggcgcgaaagtttctgtagtggccaaaaacggcaccacactgctgagccggacaaccggcagtgacggtcacgccgcattcccgccgctgcatgatttccgcaatgagcagatggcggtaatgttcctggcggaaaaagagggggatgtctccttcctgccggtcaatgcctggtatgaccgccagccggatttctcgcgctttgatatttacggcgacgaaaccccggaagatccgcgcaccctcagcagctatctcttctcagatcgcggtatttaccggccgggggaaacctttcatgcaggtcttatcacccgcacctatgactggaaaactccgctgaccggtattccgctacgggcggagatccgcgacccgcgtgatactctgatgcattcacagcagattattctggatgccaccggtttcagcgaactgagctacaccacatcggaaaactctccgaccggcgactggaatatctatctctatctggaaggtaaagatgagaatgacctgcgtctgctcggtaccaccaccgtggtggtgaaagagtttgagccggacagcatgaaagtggcactgaaactgacgccggatcgtcagcagggctgggtgaaaccggaggaattacaggcggcggttgatgtgcagaacctgttcggcaccccggcgcagaaccgccgtatcgcgacaaaaatgaccatgcggccggtttatccgtcattcacgcagtatccggattaccgtttctatgaaaacagccgcagtacggataactttgaaacccagctggaagagcgtaccaccgatgaaaacggtgccgcactgctggcgttaggactggaaaactacgcggaagcgacctatcagttacagctgttcaccgaagcgtttgagccgggcagcggccgttcagtcacggcagcagcgcgggtactggtctccccgcatgactcgctggtgggtatcaaagcggacggcgacacggattacatcagtaaggatgcagtgcggatgctgaatctgattgcggtggatccgtcactgacccgtattgaaaaaaccaatctgaaactggtgcttctggagcagaaatacatttccgtgctgatgcgccagccatccggggtcttcaaatatcagtccagactgaaagaaacccggattgatgagcaaccgctgaccatcagcagcgccggcactgatatcacactgaacacctcgaaacccggccactttatcttacaggcggaagatgcggacggtaatgtgctgaacagaaccgactacaccgtcgccggtaacgcgaacatcacccgctcgctggatcgcaatgcggaactgcagctgacgctgaataaagaggaattcaaaccgggcgaagagattgaaattgccgtcagcgcaccgtacaccggcagcggtattatcaccattgagcgcgacaaagtgtatcagtgggtgtggttccgcgcggacaccaccaactcggtgcagaaaatccgcgtaccggcagaactgaccggcaacggctatgttaacgtgcagtttgtccgtgatattaactccgatgaaatctttatgagcccgctgagcttcggcgtgcagccgttccgcgtcagccatgaggcgtttaatgcggggatcacgctggcatcgccggacgtcatgaaaccgggtgaaaacctggcggttcatgtgaaaaccacctcgccgcagaatgtggtggtctttgccattgatgagggcatattgcaggtggcgcgttaccgcctgaaagatccgctcgactatttcttccgcaaacgggcgctggaagtgaaaagcactcagatcctcgacctgatcctgccggaattcagcaaaatgatggcgctgaccgcagcaccgggcggggatgccggagagggaatcgatctgcatcttaacccgttcaaacgtaagcgggatgaaccggtggcatactggtcggggatcaccgccgttgatggcgacgcggtctttaattatcaggtgccggattatttcaacggtaagatccgcgtgatggcggtctctgtttcacctgaccgcatcggccacacacagagcagcaccacggtacgggatgattttgtgctgacgccgaatattccggccatggtctccccgggggatgagtttgatgtctccctcggcatcgccaataacctgaccggcctgaacggcgaagcggtgccgctggatgtcaccgtcagcgccgatccggcactggaaatcaccggcagcagccatgagcagatcacgctcggtgagaagaaagaaacggtattgtcgttccgcctgaaagccaatgcgctgccgggcacggcggatattaccttccgcgtcacttccggggataaatcggcggtccgcacacagaatctgtcggtccgcccggcctcggcttaccgcacccgttcgtctctcggacggatggacggtaaacagcagcgggtgacggtgctgcggcagatgtttgataactatgccaagcgggatgcgcgggtctcatactcgccgatggtgatgagtgaggcgctgtcgcagtatatggataattatccgtataactgttcggagcagatcaccagccgcgccattccgctgctgttcagtcagcgtaatccggaaatcagcacactgcagtcacagacggaaatccgcaaacagctgcaacagaccatgaccacactgctgacgcggcagaacggtcagggtggtatcggcgaatggcaggcgatgccggaaaccgatccgtttgtcacgctgtatgtggtgcagttcctgctggaagcacaggatgcgggttatccggttcaggaatcactgctcggctccgccaatatttacctgaagaaagtggcggcgaacccgatgctcaatacgcaggatgatctgcggatgcgcgcctttgccgtctacctgctgacccgccagggcgaggtaaccaccggactgctggctgaagttcagacacagatgcagagcagttatccggagtcctggcaggatgacccgggcgcactgtatctcgcggcatcctacaaaatgctgaagatggataaacaggcggatatgatgctggcaccgacgtggaaagccctgaacatggcttacaataaagcatggtggacacggagctatctcgatccgctggtgcaggacagcacacggctctatctgatcgtccgtcacttcccggaaaaagtgtctgctatcccgccgcaactgctggaaaacatggtgctgcgctttaaagaggagcgttacaccacctattcggcagccatgagcattctggcaatggaatactacagccgtcatatgcagcagagcggggcacaagccggtgaactcactatcagcgttctgaaaggcacagaagcgcctgaagtgatttcggtgatgaaaaatgcctctgcgaccggaaaattcagcgacggtgtcagtgaaatccgctttgataatccgtcggataacccggcctggtatgtggtgacagaatccggttttgatcgcacaccgccgcaggctgcggtggcgaaagggctggaaatcagccgtgattacctgaatgaaaaaggtgaggtgataaccagtgcggcacagggcgaaaaagtctatgtccgtctgcatatccgcgccaatgccagacaggggctgaataatattgtggtggcggatctgctgccgggcgggtttgaggtggtgcgtcaggatccggaagcagcggacagcctgcaactgtcacagctcccgttcagcaccggccgccgctgggtaccggacttcagtgatgcccgcgaggacagagtgcttatctacggcagtgccgcggcggatagtcaggagtttatctatcagataaaaccggtgaatacagggcgatttatcattccgccggcgttcggcgaagccatgtatgaccgggagattcaggcgcagtctgcggcagccggggtatttacggttctgccgcctgccgcagataaaccctga

SEQ ID NO: 284952 - DNA, 420 bp, Morganella morganii
atgagccagagaattacgattgatccggttacccgtatcgaaggacatttacgcattgactgtgaaatcggcgatggtgtggtcaccaaagcctgggcgtcaggcaccatgtggcgcggaatggaaaaaatcgtcaaagggaaagatccgcgtgatgcgtggatgatcctccagcgcatctgcggcgtctgcaccaccacacacgcactggcatcagtacgtgccgtggaaaatgccctgaacctggatgtgccggtaaatgcgcagtatatccgcaatatcattctggcggcacacaccacccatgaccatatcgtccacttttatcagctctccgcgctggactgggtggatatcacctccgcgctgaaagcggatccggcaaaagcctctgccatgctgaacggcgtttctgactga

SEQ ID NO: 284953 - DNA, 540 bp, Morganella morganii
atgctcgacaaggtatggtttacctataaggcacgaattcaagcacaccatcggttagaatggatggataagcattcccaatttcttcttgtttggtacgctatcttaggtgctgcgttagcagttgttgcaattcgataccctacattactgggtaaaaacacagatatttttggtgctattttgtctattgcattgcttggtgtatcgctgtctattgcaaatcgagatttccgtggcagagcgttgaatatgctaaagaattatttagcattgcaacatctatacaatgttatatatacaagaaatgccgttcaaccagaagatatcgttaaatatgatgagttaatgagcgatgtagaaaatcaccgagatatggacgataaaacgttcagggtacgcaatgcatctcagttgacgtctcgacatccagggaaaacggaatatttccaagtctatttttttatagtgttcaagtatgttgttttattcattttctatattatcccggttatcgttgcgtggtacctctatgagtag

SEQ ID NO: 284954 - DNA, 1428 bp, Morganella morganii
atgttgttttattcattttctatattatcccggttatcgttgcgtggtacctctatgagtagtgctgtgcgtagttttaaacgatgttttacagtaaagaatttaaagaaaatttatttcgaaaaaattaaagaatcaggtgctattggcattgatcgagtcagaccaaatggttttgaaaaaaatcatgctactgaattgtccttgattgctaagaaagttactaatggaagctataattttactgcctataaggaaaaattaatatcaaagggagcatattcattacccagacagatttctattccaactgttcgagatcgaatcacacttcgagctctatgtgagtccctctcagaaatctttccgaatgcaaaactatcacttccacaaatagtaatagaatcacttaaagatgctattaactctaggcaatataccgaatttgctaaaattgatctcaaaaatttttacccttcaattccccacgaattaattaaaagctcgataagaaacaagatcagaaaagttgagttcagaacacttattagtaatgctatttcaactccgacagtctgtgagtctacaggaagtaaaggttcagtgaaaaatggcatcggagtacctcaagggctatctatttccaatattctagcagaaattgcattacaaaagattgatgaaaaaatcaatctcattccaaacatttggtataaacgttatgtagacgatatccttatccttaccaagcctgggaaatctgctgaagtcgctgatgcaattataggtaaactggagcatataggtctttccccacatcccattggtggaattgattcaaaatcgaaagtggggatattgagtgaggcttttaattttttaggctatgaggtaagcgaaaaaggtattgcaataaaaaaagatagtatattgcgctttgaatcatcactggcaaagatatttaccgcttatcgacatgcattagctaaagcaaaaagtaataaagataaacaacgggcaatagcgtactgtcaatggaagcttaatttacgcattactgggtgtgtgtttgatggaaagcgtatgggatgggtggcttatttctctcaaatatccagtacaacccagctccgagccgttaatcatactataataaagttgattaagcggtttgaagtaaaagatattataaaaccgaaatcactaattaaaacattctacgagtggcatcgaggggataaaagctctcacaaatacatcccaaactttgatgatttatcagtcgtgcaacaaagagcgatagtttctttatgggttggaactgatgaagcaagtaagctaagcaatgcagcagtagtaagaatatttaattacaaaatttcctcatctgttagggagcttgagcaggacatcgccggtttttcatag

SEQ ID NO: 284955 - DNA, 1176 bp, Morganella morganii
atgcaaccaaaccccgagaagtgtattttttgtgatatttcctttgataaaggtagtctggagcatgtattccctagtgcgttaggaggaaggattactacaacacatgcgacatgcaaaagttgcaataatttattttcagaagctagctcagatgcagttgagatcgctttagctgataattttctttatatcagaaatgctttaaatatttggtctggaagaggaaaaccaccaccaacaataaaggaagcaggtcagtttgatgatggaattaagtatgatctcgcaccaaatttgacacctattgtatctaaatcaaaaatcccctcaaaagaagaaactgataacaagacagtctttaatttagttgctcaagatgtaaatgatgctaatagaattgttgatattcttaagaaacgcggtcttaacatagggaatgttaatgcaaaatgtgttacaactaaagctcctattataagagctagtattaaatttgaaggaaataagatttttcgagcgatagcgaaaatagcagtagtttcttatgttgttttgtatggtaattcacgagccagaactgatatttatttgactcttagggaatccattcgaaatggggttcctaacattacaaaatattgcggatgggactatacaaatgacttccctaccattgagaatttacatccacacgaaaaaaccccagatgccattcaatgtggatttgaacacgcaatatttatcacaaatgtcaatcatcaattagtagcttatataaagctttttggtgaatttaatttctctgttattttaggaaatcgttcgggtataacacctaaatgcttgagcttgaatcctacggcaggaaagtcttcaaggtttaacatcgtgtttactccgccattaagttacatacctaaacatgttgactcattcaaaattgagcatgaattagtttgggaaaaggtacagctagcgatgagtactatagtagagcactgtcaaattgtatcaacgcaagaatatattaaaagcctcagccaagagctaatgatttctgttcaaactgcatctagtgattctgaaatacctgaaataataagaacattttctgagaaactttctcatatagaaaatggattggtatgggaagaagaaattgatattgaataa

SEQ ID NO: 284956 - DNA, 2832 bp, Morganella morganii
atgattgaaaaatataatcaggaagaagttaaaggtcataactttatatcagatccttattttgaagaatggggtaatggtgactgggaaaagggagagccaaataaatacatgaagaaaaaagaagggaacagaacttacctttatatcagtggcaaaggtagtgtttcacagtctgttattttaccgaaaaaaagttcgggggagtcaacagttcctcctttttattcattatcgtttgattactctgttaaaaataaagcatcggtgtcattaattctgacatatatgagcggagaaattaaacgggataaaaaagaaatcacattgccggatacgaaagagtggtctcagcatgagttgttacttgatgcctccgctgatgatactgatatcaggcttgagttttacgccggaaaattagcagggaataaagggattaacctgactgccgttgatatgcagttacatattggcggatttagtccggaatccattgtattcgatcatgaaaatatcccggcagataagccacagttacggcttaactacgggcgtaaacatattctcaatatcaggccgtctgatgacagtgcatggcgtgatcttgactgtgtactgaagtgggggagtgagactccgccatctaactatccaatcatttttgatcctgaactgaacactgcgcaatcattaaaaaaagaggggtgtgattggaatatatcctgtttggctcaaaaagtcagcggaattccggagacattcaacataatgctggcgtcagaatacagtgcagtaccttttgttttcgatgcggaaataggcgattacctctataaatttacggaaccgaaaatcaccgggattgccgttattgctcaaaatataccggctgaagtcagtattcgtgttgtttgtgattatgatgaagaatatccggataagccgggcgtacccgatgttgatgttctctggaaaattgacggcggaaagagtatcagtacgaccaaaacagataatgatggtatggcggctcttacatttttaccggagcaaggcgggaattataaacttgttgccgtaataaccgataaagccgggcgcaaaagccgccatcagtttgatattaatgtttatgaccgttctccatggctggatgatacccgtattgatattaacagtaccggaatcgactatcaggatgatgcggtttatctgatgaccgggacaactacggttattcatcttaactgtgaaaataacgaaaatattttcggccgggttaagctcgaaaataaagagggaaatacaggtaccagtatcataccggcggaaggccgtgatatttcaccggaaggattgtcctgggatgttaatatcacaggcagcgacagcagagaactgacactattattaaccagtgatcagtttgatatttcacaggaaatcggtgttattgcattgcagcctgattgtgataaagaaattcagtcgttgaaagtgaatggtgaggaagcgaataaaaaaacaccgttaattatcattccggcaacaccggtaacactcaattgcagggtcaataaattattgtcccgtttgcaggctgaactgaacagtgaagaaagtaaattgctgacagcagaaccggctttcgggcaattacaggtactgaacaataatgcagcagaatgggtattaagaagtgccggcccgcagggaggattctttaatctggatctgaacattccgccactgacaattccgctgacgctttccggccgtgcactgccgcaggaaatcgcctcaggaattgagctcattacgctgaataatacgccgctaacaaccccgggaaatttatttcttgcgccggggcggagctgtacactgacagtgaaacctcatcctttactgaaggatattcctgtttcattagttgcagaaaccagcaatgaggtttcggttatcagtaatccgccgtttggtcaggaagtcagtctggcagaaaacggaacctcctggcagatatctgctgacccagcttctgcacgcggaaaattctcattgcagattcagagccagtggggcggagcaccggttcatctggatggtgtggtattgtctgcggatttacaggatgaaggctctgtctgtgtcattgatggtgacatgggcagaaaatacgatattgattttaatattggttttgcttttctggctttggaactctattcactggatctgaaacttctgccggataatttaatcagcggacaaaccgtttcctgggaactgacggaaggagacaatcaccgggatactgtttcttttgatccggagacaccaataatattagattcaccggaaaatgattgggaattcagttattccgaagaagaaaacactcaattcgatttagtattaaacagtcaggataagttcagttataaaattccgtgccatatttttagcgatgaaaaatatctggaaaaaagtcaatgcatttttatgttgaatgattcggttattaccccgggtataaataataataaccttgaatataagaaagagatatcacttaaactgaaactatcacaagaaatatcagcatttctgaatggaatggtattggcattagttgttcataaaacagatgatgaaggtgatagtctgaatataacctcagataaattaatcactgttgataaaaataaacctgaccttgagtggagcgttgaaaccgatgtggcggtcggtcaccgttttacactggagattgttttggaaaatttaaaaaatatccgtactgttatgaaatttacctcagtgtaa

SEQ ID NO: 284957 - DNA, 813 bp, Morganella morganii
atggtgttcagttgctgtctgtatctgcggaaaactccgctgcctgaatggtcggttaccgtactggatatcgggcacgggctggcggcggtggtgataaaagacggcagggcggtcgtgtatgataccggcaaccgcttcgggacacgggatgacgggttgcgtaccgtattgccttatctgcgttatcaccgcctgaccccggactggattatgatcagccatgaccaccgtgatcacaccgggggactgggctctctgcgcagtgcttatcctgccgctgtggtcaaaggcaacattccgcaggccgatacaccttgtcgccgcggggagcgctggctgtggcagtcattgtattttgaggtgttatggccggatgaaaaatatcagatgagcaaaaatgacggctcctgtgttatccgcatcagtgacgggaaacatcaggttttgctgaccggagatatcgaaaaacaggcagaaaaacagctgattaagtataaagatgagctctctgctactgtactgcaagttccacaccatggcagcaaaacctcatcatcagaattttttattcgtgcggtaaatcccgctttcgcactggtttctgttgcgcgctatagcccgtggcgtctgccttctgataaagtacgccgtcgctatcatgatctcggcgtgcagtggcatgatactgcgcacagcggccagatttctgtgtccttttttgctgatgaggtatccgtcgcgacttaccgtacccatctctccgcccgctggttcagcgcatggtttggagatcagccggtaaacgggtaa

SEQ ID NO: 284958 - DNA, 234 bp, Morganella morganii
atgaatgagttatttaatgagtaccgtaaccggttaatggtgttattaagtaatcagataataaggcgtagtcatacaaatgttttaatgcatattcagacgtattttacacgttatataacactcggacagcataattatatcagtaaacttatactggattatcgccgggtaatacaaccaatactggcaccactgacattattaatgtcattactttacggaatatcctga

SEQ ID NO: 284959 - DNA, 276 bp, Morganella morganii
atgaataatattaatttcgttgtaggcagaaacatacgaaaattaatgcaatctaatggattaaccacaaggcagttagcaagcatacttaatgtatcgcagcagcagatctccagatacgaacgaggagataataagatagatgtaaatattgcatttaaaatagttaatttctttgatgtttgctatgaagatatttttcccgaaaaacaaaaaacccctaaggtaatgcttaaacaattaaatatttatattaacccaatcgcaattccataa

SEQ ID NO: 284960 - DNA, 276 bp, Morganella morganii
atgagacgaacatttacagcagaggaaaaagcctctgtttttgaactatggaagaacggaacaggcttcagtgaaatagcgaatatcctgggttcaaaacccggaacgatcttcactatgttaagggatactggcggcataaaaccccatgagcgtaagcgggctgtagctcacctgacactgtctgagcgcgaggagatacgagctggtttgtcagccaaaatgagcattcgtgcgatagctactgcgctgaatcgcagtccttcgacgatctaa

SEQ ID NO: 284961 - DNA, 615 bp, Morganella morganii
atgaagcgtgtcgggataaaggccctgcttggataccggagcccgcgggtacgcaaaggtgaagtcagtatcgtgtcatccaacaggcgccagcgacagttcagtccggatgctccggatgagcgttgggtaacggacataacttacatcaggacccacgagggctggctgtacctggccgtggttgttgacctgttctcacgtaaggttatcggctggtcaatgcaatcccggatgacaaaggaggttgtcctgaacgcactactgatggctgtatggcggcgtaatccccaaaaacaggtgctggttcactcggaccagggcagtcagtacacaagccatgagtggcagtcgttcctgaaatcacatggcctggagggcagcatgagccgtcgcggtaattgccacgataatgcggttgcagaaagctttttccagttactgaaacgcgagcggataaagaaaaagatatacggaacgcgggaagaagcccacagcgatatttttgattacatcgaaatgttttataacagtaagcgtcggcatggttctagcgatcagatgccaccaactgaatacgaaaaccaatattatcagcggctcggaagtgtctag

SEQ ID NO: 284962 - DNA, 723 bp, Morganella morganii
atgtggattggctccagggcagacgaaggtaatgttgccacgcaaagtggttatgtcagcattgacggtaccggcagtgaattaatctccagcggacgtattatcgtcggaacttattcacggggcactctttccgtgactaacggaggatatgttcacaccggtgatcgtttaaatgtcgggaatcagccagaaaccaatgcatttgataatttactttttattgacggagcaggctccgaagtatctgcagaaaagtcagttcaggttggcctgcaaggtaaaggaaccgctgttgtcagcaatggcggcacactccgtaccgacactatctttgttgcaaatggtgcagatagtaacggtgaactggctgtcggtgcccgggaaggagattcctctgctgccgcaggcaatattgatgcttcagtcattacttttggtaaaggtaatggccggatcacattaaaccatactgactctgatttcctgttatcctctgatatcacaggcaccggtgtaattaacgcattcaatggcacaactcggcttgccggaaataatgcggcatactcgggtgatatcaatatcagcagtccggcgacgattattgtcagtcatcagaataatctgggtgacaataatattatcaatgacggtgaacttcgtatacaaagtgacactgactgggttttactaatcccctttcaggttctggtatgctga

SEQ ID NO: 284963 - DNA, 561 bp, Morganella morganii
atgaaatttccaattatcactgaactgcaaaagtcactctataaacaacaagagcaactctttgaacgttactcaaaaatattaatgataagaacggatttccattggcatgaacataccgatagatatcactatggagatgagcatcagtttagctacgagatgagtactatcatgcttcaactgtctgagtatgaaggtgtggttggttatgcttgggtactcgaagaaggtcacgatagagggttacatgctcatgccatcatttacattaacggtcagcagcattgtaagaaatggggttttgaatcactattgaatagcctatggcgtgaaataactgagtctgagggttatctccatcattgtcgtgataagaaagaataccgagcggatatcagtaagccgatccactttgatgataaacggggtaaaaaagatatgcgatatgtcatcaattacttagctaaatccgaccaaaaagggggaaatcctatctaccatttatcaactccaccgactgaaaagcggataggtcgtcctcgtaaatcatcttcgtag

SEQ ID NO: 284964 - DNA, 222 bp, Morganella morganii
atgactaacccaactatcccaaccaccagcctgttaaacgaccaattcgttgatatgaaatttctgacacagtttactggcctaacagacaaatggttctataaactgatacaagacggtgagtttccgaaaccgattaagctaggtcgtagctctcggtggttaaagagtgaagttgaagcatgggtacacgctagaattactcaatcgagaggtgagtaa

SEQ ID NO: 284965 - DNA, 1557 bp, Morganella morganii
atgacaagcttacaacaacgagccgagctacaccgtcaaatctgggcgattgccaatgaagtccgtggctctattgatggatgggattttaagcaatatgtactcggtgcgttgttctaccgctttatcagtgagaactttgtaaactatatcgaagcaggtgatgagagcgttcagtacgctaagttagatgacagtatcattaccgatgatatcaaagatgatgcggttaaaaccaaaggctactttatctatcctagccaactgttctgtaatgtcgcagtcaccgctaatacgaatgaccgacttaatgctgatttaaatagtatcttcgtttcgattgaaagctctgcttcaggctatccatctgaatcagatattaaaggcttatttgccgattttgataccaccagtactcgattaggtaatacggttaaagataaaaatagtcgtttggctgcggtactaaaaggcgtagaagggctaaatctcggtaactttaatgaccatcagattgacctgtttggtgatgcctatgagttcttaatctctaactatgcggctaatgcagggaagtcaggtggtgagttctttaccccacagcacgtttctaagctgattgctcaattagccatgcatggtcagacccatgtaaacaaaatctatgaccccgcagcaggctcaggttcgttactgctacaagcgaaaaagcactttgataatcatatcatcgaagaaggtttcttcgggcaagagattaaccatacaacttataacctcgctcgtatgaatatgttcttgcataatatcaactacgataagtttgatattcgtttagggaacaccttaactgagcctcatcttggtgatgcaaaaccatttgatgctatcgtgtctaacccaccatactctgtgaagtggattggtagtgatgaccctacattgattaacgatgagcgttttgcacctgctggagtactcgcaccaaaatccaaagctgactttgcctttgtacttcatgcattgaattatctgtcagccaaaggacgagcagcgatagtgtgcttccccggtattttctatcgtggtggtgcggagcaaaaaatccgtcaatatctggtagataataactatgttgaaaccgtaatatcgctcgcgcctaacctgttctttggtacaaccattgcggtcaatatcttagtgttatcgaagcataagactgacacgaacgtccagtttatcgatgccagcaaactgtttaagaaagagacgaataacaacacgctgacggatgagcatatctcagtcattatgcaggtttttgatagtaaagctgatgttgattacttagcgaaatcagttgcctttaagcaagtggctgagaatgactacaacctttcagttagtagctatgtggaagcagaagatacccgtgaaatcatcgatattaacgaactgaatgctgagcttaaaatcactgtcagtaaaatcgaccaactccgcaaagagattgatgcgatagtcgcagagattgaaggtagtgaggcatccctatga

SEQ ID NO: 284966 - DNA, 1218 bp, Morganella morganii
atgagtgagttaagctatttagagaagctactggatggagttgaggttgaatggctatctcttagtgatgtgtcgtcattacagagaggtagggttatgtcaaaaggatacttagctgatcatattggtgagtatcccgtttatagttctcaaacagcaaacaatggtgaaatcggctctatcgatacattcgattttaacggtgaatatgtcagttggacaactgatggcgctaatgctggtacagtattttatcgaacgggtaggttttcaataactaatgtttgtgggcttataaaagtaaataattcaataccgttatgttataaatatcttttttattggttgaccactgaagcaaaaaaacatgtttactcaggcatggggaatccaaagctaatgagtcatcaggttgaaaaaatacctgttcccattccttgccccaacaaccctgaaaaatccttagcgattcaatctgaaatcgtgcggattttagatagctttaccgcccttaccgctgagcttaccgctgagcttaccgctgagcttactgcacgaaaaaaacagtacaactactatcgtgaccagttgttcaattttaaagaaggtgaggctgagtggttacctttgggagagatcggttcagtacgaatgtgtaagcgagttttaaaggctcaaactaaatctgagggtgagatacctttttataaaataggaacctttggaaaatctccagatgcatttataagccgagaactatttgaagaactcaaatcaaaatataattaccccaaggtaggtgaaatacttatttccgctagtggcacaatagggcgtacggttatattcaatggagaagcatcatatttccaagatagcaatatagtctggatagagaatgatgaaaccttagttttaaataaatatttattctatttttacaccatagctgattggaatgtagctgaaggaggaacaattcagcgcctttacaatgataaccttcgtaaattacttatccctattccttattttggtgatagagaaaaatcaatacttgcacaaacccgaatcatatctatcctagataaattcgacacagttaccaactctatcaccgaaggcttacctcgtgaaatcgagctacgccaaaagcaatacgaatactatcgtgaccaactgtttaactttcctaagccgagcaacctcgagagctaa

SEQ ID NO: 284967 - DNA, 3114 bp, Morganella morganii
atgactcaacagacacacaccatcgctgaaacgggtaatttcattattctcgataagtacgttaaagcatgggaagccgtagacagctatcaaagtgaagctgaccttgagcgtgagctcattcaagacctgcgcaatcaaggttatgattttatcaagcttagctctcaacgagatatgttggcgaatgtgcgtatgcaacttgagacattgaacaatatcacctttacagaaagcgagtggaagcgtttctgtgagcaatacctcgatagccccagtgatagcatcatcgataaaacccgtaaaattcatatcgactatatctgtgactttacctttgataatggacaactagagaacatttatctgattgataaaaaacatctggtacgcaataaggtgcaagttatccagcaatttgagcaaacagggactcaccttaatcgctatgacgttaccatacttgtcaatggtctaccgatggtacaaatcgagttaaaaagacgaggtgtagcgattagggaagcctttaatcagatacatcgttacagtaaagaaagctttaatagcgataactcgctgtttaaatatctacaactgtttgttatctccaacgggacagatacccgttattttgccaataccactcagcgcaataagaacagcttcgactttacgatggattgggcgaaatccgataaccgcctgattaaagatttaaaagactttacggcaactttctttcaaaagaacaccctactgcatgttctgtttaattacagcgtatttgatagtagcaacaccttgctggtgatgcgtccttaccagattgcagcgaccgaacgtatcttgtggaaaattaacagcgctttcaaagcaaaagcatggtcaactcccgaaggtggtggatttatctggcataccactggctcaggaaaaaccctgactagctttaaagctgctcgtctggcgactgagttagagtttatcgataaagtattctttgtcgttgaccgtaaagacctcgactatcagacgatgaaagagtaccaacgcttttctcctgatagcgtcaatggctcagataacaccgcagggctgaaacgtaatctagataaaaatgataataaaatcattgtcacgactatccagaagcttaataacctgatgaaaacggaagctgagctgcctgtttataagcagcaagtggtgtttatctttgatgagtgtcaccgtagtcagtttggtgaagcacaaaaaaacctgaaaaagaaattcactcgtttctatcaatttggatttacgggaacccctatctttcctgaaaatgcattaggtactgaaaccaccagcagcgtatttgggcgggagttacacgcctatgtgattactgacgcgattagtgatgaaaaagtcctgaagtttaaagtggattacaacgatgtacgcccacagtttaaatcgattgaaaatgagcatgatgataaaaagctaaccgcagccgaaaacaaacttgcctttcttcaccctagtcgtattgaagaaatcactcgttatatactctctaactttaagcaaaagacacatcggctctattctgaagcgaatggttttaatgccatgtttgcagtcagtagtgtggatgctgcaaaagcctactacaccatgttcaaggcgtatcaagagcgtctacagcaacaagatacccactatcgtccattaaagattgctactatcttctcgtttgctgctaatgaagagcagaatgccattggtgatattaacgatgagagttttaatactgatgcactgaataaaagtgcgaaagaatttctagactcggctatcgatgattataacgattactttaaaacgaatttcagtaccgatagtaatggctttcagaactactatcgtgacttagcccagaaggttaaaaataaagagatagatttactgattgtggttgggatgttcttaaccggctttgatgcacccacacttaatacactgtttgtcgataagaatctacgttatcacggtctgatgcaggcattctctcgtaccaaccgaatttataactcgacaaaaacgttcggcaatattgtcactttccgtaaccttgaacgagacaccattgatgctatcaccctctttggtgacagaaacaccaagaatgtcgtgttagagaaaagctacaaagagtatatggaaggctttactgatatcgtcacaggtgaagctaaacgtggctttatgacgattgtcagtgaactagagactcgatttgcagaaccggcttatattgacagtgaaaaagaaaagaaagcctttgtgaagctgtttggcgaatatctgcgctcagagaatattctgcaaaactacgatgagtttgccaccctcaaagcaatacaaacactcgacatcaataaccctgatgctgtcgcagcttttaaagctgaacattatatcgatgatgagaagttggcagagttgcaaactatccgacttccagacgaccgtaaaattcaggactatcgttcagcctataacgatattcgagattggcagcgaaaagagcgagcagcgaatcaaaaaaataacgcaacggtagaatgggatgatgtcgtttttgaagttgaccttctgaaatcccaagagattaaccttgattatattctcggtcttatctttgagcacaataagcagaagaaaagtaaggaatcactgactgaggatgtgagacgcctgattcgttcaagcttaggaaatcgtgccaaagaagggctggtagtcgattttatcaatcaaactaatctcgatgagatgccagataaagccagcatcattgatgccttcttcacctttgcacaaaaagcgcagcaagaagaagctgaaaaattgatagcagaagagaacctcaatgtagaggcagccaaacgctatatcaaaaactcattgaagcgagagtacgccacagaaaatggtaccgagttaaatgaggtgctccctaaactaagcccacttaatcctcagtacaaaaccaagaaacaaactgtgtttcaaaagataagtacgtttattgagaaatttaaaggcgttggtggtgtctaa

SEQ ID NO: 284968 - DNA, 1269 bp, Morganella morganii
atggccttgagtgatgtaaaggtacgtactgccaaaccacaagaaaaagcttataagctgaccgatggtgatggcatggtattgctagttcatccgaatggttctaaatattggcgttttcgctatcgctttggtggaaaagaaaaaatgctggcgttggggaaataccctgaggtatcactcgctgatgcaagagcaagacgtgatgaagcgcgtaaacaactcgctaatgatattgatcctagtgaatctaaaaaagctgtgagggtagagcaagaaaaagaagccattacttttgagaaggtcgcaaaagactggcatgcgagtaataaaaaatggtctgagtcacacagtgcgcgtgtactcaaaagtttggaggataaccttttcgctgcaatcgggcattacaatatcgctgagctaaaaacccgagatcttcttgcgccaattaaagccgtagagatgtctggacgtcttgaagtagcctctcgtttacaacagagaaccacagcgattatgcgctttgctgtacagagtggcttaattgactacaaccctgcacaggaaatggctggtgctgttgcgaccagcaatagacaacatcgaccagcactagagcttaatcgaacaccggaactcctccatcgtatagatcaatattctggtagaccattaacaagacttgcagtacaactcaccttgttagtatttattcgttctagtgaactgcgttttgctcgttggtcagaagttaattttaaaacagcaatgtggacgatacccgcagagcgtgaatcaattgaaggtgtaaagcactctaatcgtggctctaaaatgaaaacacctcatttagttccactatcgcgacaagcgataaagatcttggaacaagtcaaactcattagcggtgatcatgatctgatctttattggtgatcataatcctcgtaaaccaatgagtgaaaatacagtgaataaatctttacgagtcatgggatatgatactcaagtggatatctgtggacatggttttcgtaccatggcatgtagttcgctgattgaatcaggtctatggtctagagatgcagtagaacgtcaaatgagccatcaggagcgtaactcagtaagagctgcttatatccataaagctgaacaccttgatgagcgtagattgatgctgcaatggtgggctgatttcctcgatgccaatagagaacaagctatctcaccgtttgactatgccaaagtgaataacccatttaaggtataa

SEQ ID NO: 284969 - DNA, 867 bp, Morganella morganii
atgtccctttatggattcaaagaaaaaacaactccacatatcgatgagatacccaagaaatacatttctaattacatcagtacggccataaatacaacattatctgtaccgagaattctcgctcatagcaataataaaggcaaggtaagagaagaagataatattataacgctggcaaagatggctgggtttaaaacttactggatatcatctcaaggatatactgggaaatacagtatatcaacaagtagaatatctaatttctccgactataagcattttaatgattgggatgattacgcactattaccgatagttaagcgcgcgttgcgatctcctgaaaaaaaagttgtatttatacatattgttggctcccatgaatatccatgtgatagggtaaaagactacggtgtaatatataatagctcacacggagagttaataaactgttatttatcaacatataacaagacagatgatttcattaacaaagtatacggatatttgaaagaaaatgatgatacattttctttagcatatttttcagatcatgctttaaacattgttggagaagaaaataattataaaatttacaggaatgatagcatagcccaatcatataaaattccatttttcattgcatcgagtgatgataagagtacagaaaaagtagatgtaactcgtagtgcttataatttctttaattattttcctgaatggataggtgtaacaacaaatttgacaccttctggttatgatattttctcaaatgaagatgataacccagtagttatgtcatatgaccaaaaattaaaattactatcagaaaaatcagatggattaacagcatcagaaatctataagtaa

SEQ ID NO: 284970 - DNA, 2709 bp, Morganella morganii
atgaccgtatcgaccgaacttagccatgaagagtacaccggcaacggtgttaccaccgatttcgactttcgtttccgtatccttgaagccaaacaccttgttgtgtccgtagctgaccaagacggaactgagcgtatcctgacgaacggcaccgactacacgctgcgtggtgtcggttcataccgtggcggaaaagtaattttgaaaatgccactggcaaccgggtggaaaatcgtgattgctcgtgaccttccggccgttcaggaaaccgacctgcgtaaccaagggaaattttttgcagaagtgcatgaggatgctttcgactacctcaccatgctgatccagaagtcgctgggcttcctgtcgctgtgcctgcgtaagccgagttttatctctgatcactacgatgccaaaggaaataaaatttccaacctcggaaagccggtaaaagacggtgacgccgttaacctcggcacgatgaaggatcacatcagcgcgaaagataaacgctctctgcgcgttgcagataaggatattccggtactgcctaataccgctaaccgagccaataaaatgttggcgtttgataatgacggtaatccaaaattggttctccctgaatcaggaagtgcagctgatgtattgctcgaattagcaaaaccaacaggtgctggcttagtaggtactgaatccggtaaaaccgtgcaggagtctatcaatttgagtggtgtttcaaatactttttgcaaaaaagattatgtgtcaataccaatcagaaataaatactatgatgagatcatttctatagtcggtggcgattatggatttcctcagggttttgacattgatgatcatggcaatttttggatgaatttcccaactggaaataatcaaaaaaggccagttattgtattcagtaaaactggtgagatgataacgtggtttacgatacctgaaagctccagccagagcattgcggttaccggcgctgttcccaacattaaaatatatgaccgccaatttggtgatcaaggttatttatatgagtacgatataggtaatttcccagcaaaaggcctgaatataaccacaggcacaaaaacaaacgccttagtttcatcatctatgttcgccgtaagaaatggcgttgtaattacccaaactggaaaaccatatattaataatactggtgaaagctcaactatatatacaatagatcttgcatcaggaaaagttatcggattgattcgtttatcaacaatgttggttggatttccgacgccgagagatgacatctctggatggtatcaacaatcatggaagatgcagggattgacactatcagacaccggaacaattttaattgcatacggcggttcgtacaaaccatacgttgaatggctatccaaagaattagaatctgttcatgacataggcattgcagaaatatcaatgcagggtgagttgcttaggcacagcgtttgtaaggccggtaagtttttacgcaaaataaatagttatgggtatgatgcaatcagaacagaaaatgaaggaatttccataactccggatggcaaaatcatttctttaaatgctatatcagatccagagaatggaagcattgactacagtaaaggaatattatttttggaggagttcgcatcaaaatatgatggaatggatttctcagaatgcaggtcaaattacgcaccactgagtcgactgtcattatctgaagtgggtaggaatataaccggacggtactaccatccaatgacaggggaaccgttcattgacatggcagatttaattaagtatatggtttactttgatatatttgaattcaaatggtgtccaagatttgagcctcagctaaccattccaggtgcgttatacagtcaagaaggtgtgtgtgtattaagacaaggagatcaaagtaattttacattatattgttctggtccaactaacattgcaacgtatgcaataacaggaagcgtatccaccggctggaaagtatccaacattgtttcgagtaaggaaatactcttgaaaaataccgggcagggtgcgatggatatcaaagcaacaaatgacgtaacaggcaatgacactatatctgttctgaatatagctctgttaaatgacgcatcagtcttgagaattggtggggatggcgggacatacagcccaagaactttatctttcatggctgcgcagtcacatctatcaaagacaaacagggctccgttaaacatacaatatgatcaaatctatcctggtgttggtggagttgttaaccttgggtctgcaagtagtaaatggaaggatatccatgcaactaatggaacaattgtcacatcagatgaacgaaagaaatgcaaaataagtgatttaagtgatgcagagaaaaatactgcaatcacaataaagtcactgattaaaaaatataaaatgaaagacgcagtggttgagaaaggagactcagcaaggtggcactttggtatcattgctcaggaagtagtgaaggcatttgaagataacggcctaaatgcatttgactatggtgttatttgttatgatgagtggaatgatactcctgctgagtacgatgacagtggaaatgaggttgcaccggcagttgtagccggttcgtcttatgcaataagatatgatgaacttttatgttttataatatcgataatatag

SEQ ID NO: 284971 - DNA, 807 bp, Morganella morganii
gtgtttattgaaaggttggagattgataaagaaaaaataattattggatggggggatttgtgtaacttcgcatcatggatatttgataattggagttggggtttttttattgctgttctgtctttatggtttacagctaaagctttaaagaaaacagataaggcaaataaactagctagtgattcattggaattaactaagcgctcaactgatattgcagaaaaatcattgcaagcagctaagaagtcaataaacacatctatagagttatatgaaaaacaaaaaaatgatgaagaagataggaaaaacaaaattgaagaaagggaaattaaggcaataagaaaatctgttgcgaatgagttagcgagagctagttatttgattgttcagatgtatgagttaagaaacaaattagatggggaggtgtcaaaagtaacatgtgatattgttggtaaaatatttattattaaaattcattatttcgatgaaaaaatagaaaatatatatcttcacgcggatggtagcaatatcccatttgatgttattttaaaagcatcaaccttagatgataacctatacatggatcttactgacgtaaaattgcaattaaatattttagagaaacaattaaacttttgcattgatactacaaaaattaataattatcttttattaaaaaattatttagatttaaaggagtttaaggatcttatgttaaggcattatgacgtcattaattatttttcaaatgaaatggagggttatgatatatatcaaaaattaaagaatgctataaccctgtggtaa

SEQ ID NO: 284972 - DNA, 666 bp, Morganella morganii
atgaaatgtgaaaatctaacaatagaaagcttcaatgcatcattgaaaaatgaaaatgtaatgatcttccactcattacgtgcggccaatagagaaaaccgcccattacttgagtcccttagatgtattattgaaaatcaaaacactaacaaacgctccttaagttgctcagcaataaatgttaactctgaatgcgccaaacattactatgacggactaggtgttttagttaaaataaataacattaatgaccttataaatataggagagagtgaccttggaacaataaatagccaaacaacaggaataaatatatcaaaaaatgaatttgataatttaattaagaatataaatgccgaatcttataatgaactcgttgtaatcaactatatcatagttggtatatttgttaaaataagcgatatagagcttggatatattaacgatacacatgtcactccccccgatatagactacagttctattagcaatgaagaattaaataaactcaacaaagaaatagaacgaaaatcaaaggttgacatgagagaaataacaaacttatctaatgaaaataacataaaaatattttatttggaaaataaaacattatattgccacactcccgctactaacgatgaatttaaacctgccaacctctattaa

SEQ ID NO: 284973 - DNA, 363 bp, Morganella morganii
atgcgggttaacgagttcgatatcacgccggtaccaaagccgcgaatgacgcagcgggacaagtggcagaaacggcctgcggttatgcgttacagagcattctgtgatgaagcgcggttacgccgcataacgctgccggaatccggtgctgaaatcgtgtttcagatgccgatgcctaaaagctggtcaggagtgaagaagcgcagcatggacgggcggccgcaccagcagaagccggatgttgataacctgcttaaagcccttatggatgcgctgtttgatgatgattgcaaggtctggaatgtggcggtttccaaagtgtggggtgagtccgggaagataacggtaaggttaccggaataa

SEQ ID NO: 284974 - DNA, 639 bp, Morganella morganii
atgtacagcaaaataatgtggacctcatctgctgtttcagtctttatttgtgtaactttagctattttcttctactggaatattgatgatggtagtaaatggagtacattttttggatttacttcaacatttgggattactgcaacaatctgggtttactttaggcaactttctacaaaaaaagaggacgaaaagagagaattagaatcacatataatggtttactctaatgaatttaatgacaatacgattaacatcatgaatagaattgatgcagaaatagaaagactagaaaatatttacgggcttgattttggaattaataactttgacttcatgaatatcttaaaagaacttggcgataaaaataaaataatagaaatcaatattccttctgttcgtggctatagtgaacggattgacttctcaataattagaaatggagatccagcattatttgaacagataacactagagtcgtcatttatagatgaaataattagggtgatagatgagctcaagtttgagataggggtgaagaaaaaaccaaataatttttatatctatggatatattcaagatatttaccttgctaacaactcactcagaaaattaattgagggtaattattttttgtga

SEQ ID NO: 284975 - DNA, 852 bp, Morganella morganii
atgaataacgtaattacctgtattgatggctcaatctatgctgattccacttgccgtgctggcatttgggcatcgaataaattgaataaaaaattgttgttgttacacgcaattgagaaaacaccatcaacccaagccgaagatcttagtggtgctattggcttaggcgctcgttcatctttattaactgaaatggccagtttagatgaacaaaaaagcaaattagccttggagttaggtaaagagatgctggaacatgcttctcaattagcgcaagcacaaggttgtcacacaattgaaaaaatgcaacgacatagcggtatcgttgaagccatttatgatctggaagaagaggctcgtttaattgtgattggacgctctggtgaaagccatggtgataatttcaatgtggtgggctctcacattgagcaaattattcgtcaagttcatactcctgttgttattgccaataaagagtttgcagcccctaaaagttttatgttggcttatgatgggcgtgaaaccgcagataaagcggtgaaaactattattgaaggaggcttacttcatggtttgacatgtcatcttgtcagtgtgaaaaacaatcaacctaaacaacaagaaaagtttcagcaaaccgaagctatgctgaaagagaatggatttgaagtatgttcgagtttattggaaggcaatgtatttaattcattgatggaatataaatcgagtcatgatgttgaaatgcttgtgatgggcgcattttcacgctctaagctggcacaggttttccttggcagtaatacacttaaaatgatggaaagtactcaactaccaatggtaattcttcgctaa

SEQ ID NO: 284976 - DNA, 1488 bp, Morganella morganii
atgttagaaaaaataaaacttgaatggttttcgaatgttcgtggcgatttgctcgcgggtattgttgtggctttagctctgatcccagaagctattgctttttctattattgcaggtgttgaccctaaagttggtctttacgcttctttttgtatcactttcattatctctattgtgggtggccgccccggaatgatttcggctgcaacgggtgcgatggcgttacttatggtcactttggttaaagaccacggtttagagtatttgttagcggcaactatgttaacaggggtattccaaatcatagccggatatttaaaactcggcagcttaatgcgttttgtatcacgctctgtcgtgacggggtttgttaatgcattagcaattcttatctttatggctcaattgcccgagttaaccaatgtaacttggcatgtttacgcgatgacagcagcagggttaggaattgtttatttattcccatatgttcctgctatcggtaaagcgatcccatctcctttgatttgcatcatcgttttgacaattgtagcaagcgtctctggaatggatatacgaactgttggtgatatggggcaacttcccgatacgctgcctattttcttatggccagaagttccacttaatcttgaaactttattcattattttaccttattcattgggcctcgctatggttggtctgttggaatcaatgatgaccgccacgattgtggatgaccttacggataccaaaagtaatcgtaatcaagagtgtaagggacaaggtattgctaacattggtgcaggcttaatgggcggtatggctggttgtgccatgattggccagtcaattattaatattaaatctggcggacgtggacgattatccaccttaagctccggtatttatcttatcatcatggtagtttttctagatgaatggcttaagcaaatcccgatggcagcgttagttgcagtaatgattatggtagcaattggtaccttttcttggagttcaattagagatcttaaaaagcacccattatcaacaaatattgtgatgataacgaccgttgttgtggttgtggcaacgcataacttagcaattggtgtttttgtcggggtgttattagcgacgttattctttgccaataaaattggtcgttttatggtggtaaaaacagagtcaccagtagatgcaagccgaacttatcaagttatgggacaagtcttttttgcatcatcagagcaatttattgaatcatttgattttaaagaggtggtgaataaagttgtgattgatctcactcatgctcacttttgggatattacttcagtatcatcacttgataaggtggtgattaaattccgacgcgaaggaacagatgttgaaattattgggatgagtgaagcaacagaaaccatcgttgataagtttggtgtgcataatgatcctaaagaagtcgaaaagctcatggcaggccactaa

SEQ ID NO: 284977 - DNA, 1227 bp, Morganella morganii
ttgagtagttattttcgttttatgagccaagaatggccgcttttaagctttggctttattactgtttttatcggtaatattggccaatcattttttttgagttggtatggcgcagatattcaacaatcacttaacatttctgctgaggactatggtttcatttatgccattgccacgttgtgcagtagtgccgtcatttttatggttggcggccttgttgaccgttgggctttgcataaagtggttattgtcgtgtcatttttactttgtgtttcctgtttattaatggcgaacattcaaactgtgtggatgttattttttgcattttggggactgaggctcgctggacaaggactctttccacataccgcgcaaacaaccatgcttcgagtttacactcaccaaagggggaaagcgcttagcctttctgctagcggagttgccttcggtgaaatggtgcttcccataattttaatgacgactatcgctttgcttggttggaggtggagttggttgatgttggcattgatagtcatgattatttatttaccaatggctttaactttattaaaaaagtcgaatacatctgataagaaaaaacctttggaacccaaaagcacaaaaacacaagagcaagggcgtagagatgtcgtgaaagattggcgattttggtcgattattcctgccgttttatccgctccatttattgtgacggccgtatttattcaacaaaattacttactggaacaaaagggatggcctgcaagtttattagcgagtagtttcgttgcatatggttttttacattgggcaagttctatggtctctggctctttgattgatcgttttcaagctaaatctttattaccatttcttccattacctttaattgccggtttattagtcttaacgttattggataattactgggctgcacctctatttatgtccttatttggtctaggcattggtagttccagtcctgttattagtgcattatgggtagagatttatgggactcagcatattggagcaatccgctctatggtgacctcaatgatgatcttttctacagcagctgccccatggatatttgggatatttattgaaaaaggctggacagcttccactctatttggtttgtttagcggcctaactatgatcggattattacttcttatacctgcttatcagtcctttaaagataaacagtgtcatagtgactaa

SEQ ID NO: 284978 - DNA, 825 bp, Morganella morganii
atgataaaaaataaagcacttgtggttgaaggcggagcgatgagaggaatatttgcagctggagtactagacgcactaatggctcataattattatgattttaatttttttgtaggtgtttctgctggttctacaaatcttgttggttatttatcaaagcaagttggccgtagtgaaaaaatcatcaaaaaatatgctactagctctgaattcattaatctgaaacgttatattaagggggggcacttgtgcgatgtcgggtggctgtggagaagctcatatgacaatgagccgttacatagaccatttttcatgccgctttgggtagtgacaacaaatattactacgggggagccctgctattatcaaacttcgagtgataatattaaccattctgcgatcatggcttcttgtgctattccgttagtttatcgttattatcccatggttgatggtataccaatgactgatggagggatcgctgatgctattcctgtcaagtttgcttatcagcaaggcgcaagagatattacggtgatattatctcagcccttaggctatagaaaaaagaagccatatattttaaagtggatgaaatcattagaaaaagagtatcctcaattatatactgcgatgcttaagcgtcatgaaatgtataatcaagcgttagactttattcaagctcctcctaaagattgcaaaattaatgtgattgcccccccaccttcattccctgtttctcgttttactcgatctaaaggaaaactagaattagggtatcgacagggattggaaaaaggtatcttatttctagaaaacgtatga

SEQ ID NO: 284979 - DNA, 213 bp, Morganella morganii
atgtcgaataaaatgactggtttagtaaaatggtttaactctgacaaaggtttcggttttattacgccagctgacggcagcaaagacgtttttgttcatttctctgccattcagagcaacgattacaaaacgctcgacgaaggccagaaggttgagttctcgattgagaatggtgccaaaggtccggctgccgcaaatgttgtcgcgctttaa

SEQ ID NO: 284980 - DNA, 837 bp, Morganella morganii
atgacccgtttagcttcccgcttcggcagggtgaatatcattcgtcgtgaccgcccgttaaccaccgaagaattatactgcattgtacccagtgtcttttcagcagaaaaacatgaatcccgtagtgaccgctatacctatattcccaccatcaccctgcttgagagcctgcagaaagaaggtttttatccgttctttgcctgccagacccgtgtccgtgatgacagccgccgggagcataccaagcatatgctgcgccttcgccgtcataaccagatcaccggtgtccgggtaccggaaattattttgttaaacagccatgacggcaccagcagttatcagatgctgccgggattgttccgtgcagtctgtcagaacggtctggtctgcggtgatacctttggtgaggtcagagtgccgcacaaaggtaatgtcgtcgataaagtgattgaaggggcgtatgaagtactggaaacgtttgatgcggtggctgataaacgggaacagatgcagtcgctgttattaccaccatcggcacaacaggcgctggcgcatgctgctatcacgtaccggttcggggatgaccaccagccggtcaccgaagagcaggtgctgcaaccccgccggtgggaagataagaaggatgacctgtggacggtgtaccagcgtttacaggaaaacctgattaaaggcgggttgtccggacgtacagcgaaagggaaacgatcacacacccgggccgtaaccggtatcgatggtgatatccgtctgaataaagctctgtgggtgatgacagagaaaatgtatgaacacttcactgatcgtcggcaaatctga

SEQ ID NO: 284981 - DNA, 222 bp, Morganella morganii
atgcgtatggacaaaataactaccggcatttcatacggtacgtcgggtgccggtgctctttactggatgaaacagttactcggtggttttacaccggatgaatgggcggcgattggtgtgcttggcagcttactgttcgcgtttctgacgtttcttaccaatttgtatttcaaacagcgtgagtttaaacggcgtagcaaagagggtaatcagcatgaataa

SEQ ID NO: 284982 - DNA, 207 bp, Morganella morganii
atgtcacctgtagataaattacttgaattatgtgatgaccgaattaacgaagtaagagtagcggccgcttatgcattaggtgaagcggcattcgaaaaccccaaagtgtcaattaagttaatggagatgacaggtgatcgattcagagaggtgcaggttgccgcaataaaagctctgggaaggcactttcgccccagtgaaaaataa

SEQ ID NO: 284983 - DNA, 1113 bp, Morganella morganii
atggctaagaatgaatttttacctttcggtacagccgaaggggccaacgtgctttccaatcaggaatatgaagctctggcagcccgacataacgggtttaacagcggcgtggccaaatccaaagagctgaacaaagtctggcggcaggcatcattaatcgcgtctgcagtcgcacagtttattgtggataccgaccaggctgatttactggatgatggcaatgtgacgacaataaaaagtcggctggtgtccgcaatgaaggaagcatttaaaagtgagatgccggcggtaccaaaaattgttcagacgaccggaacgtcaacctcagatgtaatgagccagaaagcggttacagacattgccgcaacaaaattcgacaaagccggcggaacaattaccggggcgacaataatcagccgctcatgggaagcactgaaagtctctgccacggcatccggagccgcgcattttatccgcctggctgacaccggcggcaatacagcatcactcgggtttctgtcagataactctaataacctctctctgaataatgaaaagacatcgacgatgtttcatgttgctgacggagaaatcagggtaaacagcaaaagatgcctgacaaccgatgacttgtcggctgcggttccggttggcggctctgttatctggaacagctcatcacctatcccggctaatttctggaaacatgacggccggtctttttcagcgtcagaatacccggaagccgcaaaagtgtttaccgacctgaaagtacctaaagacggcgggtacttcctccgtatcgctgatgatggcgccggagttgaccctggtcgccaggttggtacttaccaggaagatgcggccagaaagctcgaaggtaaaatcgcattacgcagcgtgggtaatgcgggtgaggctttgtatttcccgacaggggcattcaatacagcgaaaccggcaggcattagcgccagggctatgtccccaatgaacgatgacataaataccggcggcatggacttgcttattgactcttcaagagtatggccgacagccagcgagttccgcccgaaaaacgtatctaaatatcttattgtgaggatgaaataa

SEQ ID NO: 284984 - DNA, 615 bp, Morganella morganii
atgtataacactgatttgccgatggctgaatttgatgaagaaggtctgtccactaaagcaggatgggcgaaagtataccgggctaatggcgtgactggtgagtatatcggtcatgctgatatggacagcgtgccatatcgtgcagggctggcagcggacgcctaccttgacgcgcctgaaattccgtcagcaccaaatctggcggtggttcgctcatctgatggtaaatcgtggttgcatgtgcctgattatcgcgggtgtgttgtgtatgacaaagagacaaagcagcaagctgaaatttccggatttggcgaactgcctgataacctgacgctggacgcacctgaaaccccgtttgataaatggaacggtaagaaatgggtgacagataagtccgagcaacaggcgtatgaggctgctattgccgaaagtcagaaacagtcactgttagcggaagctgaacaggaaattgccatgctggaacgtaaaatacgcctcaacatggcaactgaaacagaccgggcaaaactgacagaatgggaaatttacagtgtgaaagtcactgataccgacacatccgccgcaccggatattacctggccgattaaaccttaa

SEQ ID NO: 284985 - DNA, 1506 bp, Morganella morganii
gtgaaaaaactattaatagcagtttgtttttttgtaatatcaatatttgttatgaaattactaaatctccatccaagttatattttttcagctggagtgatatttttaatattttcattaaaaaacaacttcctatccaatataactcgagtggtgttaatatttattatgctatttgaaattttattcttcatttcttttggtgaaacattaacacagccaatattagactcaataattgaaactaatatgcatgaagccatttacatgataggtgatatgtggtggcaactgctcactcttattttatccacagccgctattttttacctttctaaaaagacctcttataataaatttcgcccataccttcatattatatccttgtcttttattttatcatcatcaattaaatatgcttactcaaatatatatcatagctatgattactataatataaaagaggatataaatgtattagctggcaaactgcaagaagatttccctttatttatcggcgactcttcatacatactatctaaaatggtaaaatatgatagatataaaaatatagagtacgcaacaagaaacaacatagctataaaatcactcaataacaatggaagtgaagttgtggttttaataatgggagagtctgcattatcagaaaggcattcaagctatggataccacaaagatacaagccctaacatgagccgtatatttaacgagcaagacgcatgtattttgaaaaaaactcattctgcatcagcggttacacgcgaagctttaccaatgaatatttcattttatacgcctgaaagtgaaaaagaactcttcgatgaaaaaaacgtaatacttatggcgaaagatgctggatataaaacatactggattggtgcacaaacaatagatggtttatggtctgctaaatatggatttattgccaaacaaacagactctctcaaaatggtaacgtggggaaaagatcaagaaacaataccggaatttgaaaaaataataaacacatccgagaataataaattatttattgttgtgcatttaagaggaagtcataagccatatgtaaattatgatgaaaaagataaagccgctctgccatcagcggatgattatgacctaacaattcaccacactgacagagttgtatcagaaataaacagaatattatcagaaaataaaaaacaatattttttatactacacatcagatcatggtgaaatagttaataaaggacacggattctctaaaggaaaacaacaatactttgtgcccgtaatgattaaatcaaataattttaataacttatgctcttctgcagagttaatgcgaaaatataacggttattatagcacaacgtcaacaaaatacattctggctctggctatggggtattcccttgatgataaagttgtaaaaacacaaacaatgacagataaagtgctaagtggaacaggaaaactcgtcaactttgatgatatgtaa

SEQ ID NO: 284986 - DNA, 1038 bp, Morganella morganii
atgacggatttataccttgagggacgggtagccgaatgtgtcgatgacctacctcaaaaacggcctcgctacgacattgatagatccatcggaattcctcaatctcagatccaatatactcaattaaacagtttatctgtgacgctccatagtaataacgacttcacaagaaagcctaaaggtgggttgctcagtgcaatgaaattatgggtaagggagaaaatggaattttatgacgagatatacgaaacatactcagcaataaggaaagagcacaaagatatctatttattaccgataagtctgagggtcaactttgaacattatgatgaagatccggtggcgagaattaatcatcagagtgccctattaacgagtgcatttaagttgctcatcacaaagataagctctcgtaaagactatgaggtatttcttcattacactcgtgtcattctactggataatcgtcaacagccttttttacatgttgtgctttactataaagagtctgatatatctgatttctacctacgagatttaactcggatttggtgtgaggtcgtcgataaaacgatacaagaaaaatgctctgacattaagctccagacgaataaagataacgatgatttgagtgttgaagtcgattatgtgtattttgataaaccatttccatcaatgcataatgatgaatacgaagatgagtggaaaaatggtaaacattacagcttaactgatagtgaaatacgatatggctttgaggtatctgcaacggatttaccatctgcatttaatcccctacaccacaaaaacatcatcgctccacggagcagacgacctactaggaattctttaggttatgtcggtcgtttttctgaagcagatagctactttaacgaagcagagtttaaaaaatggatgaaaggtattaaacaagaccaaaaataccataccgattacctagaaaggatcgctaagcaatatgtaaaaatacccgacttgaataatctaagtcacggtgtttttacttacaaaaaataa

SEQ ID NO: 284987 - DNA, 441 bp, Morganella morganii
atgaaggttcatatcgctgttgatgcggctaccggactgacagaaaaagtggtgacaacatcagccaatgagcacgacctcaatcaggcagagaacctgataacagagcccgtggaatttgtctttgctgacgcgggatatcgtggtgccgaaaagcgcgaatcattaatcggacgggtaaaggactggtttatcgcaaaaggccctcatgcactgaaacagctcagggcgcatccccgccgtcataagcagacgcttcacgatgagtatgtgaaagccagcatcagggcaaaggtagagcatccgttcaggatactgaaatgtcagtttggtttcagcaaaacgcggttgcgcgggctgctgaagaaccataaccgactttctatactgtttgccatgggcaatctgctccgggcatcacagctggcaggcatagcataa

SEQ ID NO: 284988 - DNA, 2517 bp, Morganella morganii
atgacacagcaagaaagaaaagtactatgtacgatagaaaaaggttatagctctgaaagagaagaacaaattggaaagttaagagtatattttgaagtttttgaaaatggagatattttaccaataaataaaatggattttttttgcgacacggagcaagttttcgtcactagtggatattctgatattaaagagaaatttaaaagtaatttatttgaagccatttgtattcctactaactttgagcaaaaagatggtaactgcagatatgtaacacgtgcaaattcgtgtgatgaaataaagggattacaagtttctcaagtctatgatgttagcttacctacaccaaatgatccattgatagctgttgatgatctccccttaactaaaacattaatgattaaagagaatgattttatttatggtccatttgattacacaaataagtttgatgaaaaaacagaaagttatattctttcattgaaatcaattaatacacctttaagtaaaataccacaataccatataggtaaagtcggtattcagaaatgtattgctcatttatccaatgaaaaaagaacaccattatttttatcaaatataaagagaatattagagactatcgatgaagaaattgattttataactgatgatcaaatcttatcaatatatgggaacaaaattgcattaaatgcagatttcagatcattcacaaaaggtacaattgctcaaatcagaaaacatttttcatcagtaacggaatacagaacattcccacaaagatttaatagattatttcaatgccttgaagattctttagcatgggattcgactaaaacagagttaatacagaccttcttaggtaccaaagaaggaaagcagatattaatagattatatatctcaaaataaagatgactatttcaaagaagaaaaagctaattttgcaaagaaaatggaagaagagacgaaaaagcaaaaaaatgcatttgatgaattaaaggaaaaaaaagaggcattagaatccgaaattagaaaaaaaaccagagaaagaaatgattttgaagttaacaatacaggaaatttatcatcattaactgatgaaaagcgaaaaattattgaaagccaaattgcaagtgaaaggagtaagctcgatagtttgactggcgaagtcaaagcattagaagataaatatagtaaacttaaagactacgataagcttcataaagagattcagacattagaagatgatcgagatcgtgccagagacaaaaagaaacaaatggaggaacaggttgatgaagttagagcaaaactcaaggaaaacaatgaaacattaacaagtcgtttagttaaactcaaacctgatgttgacgcgctatgtggtttgagaccccgaattgctgtccagcagcttgattacaatgttccgataagatcgaattatagttcgggtgatatagaagatattcgcgaggacttgattgatacagttttagactctttaaacaaacagggtaggaaaactgattatgcaacagcagctaatatattaacaacgatatctcaatgtcagtttactttatttagtggattgccaggcaccgggaaaacatcacttgctaagatgttaggaaactgcttgggtttaggtaatcgattccttaatattccagtcgcgcgggggtggacctcatcaagagatattcttggtttttataatgctttatctcagtccttttctccggcttcaactggtctgtatgagttgatccaacatttaaactctgaaattgaggataataaagattccgctgcatcaataatattgctagatgagtttaacttatctcaacccgaacattattttagcccatttttagaaatggcagatcctgagtctaagcgagtattaactacaggtaatccagataaagcttactttaatattcctgactatttgcgattcttaggtactataaaccaagatgaatcagttcagtctttaaccccgagattacttgatagagctgcaatagtaaattttgatgattttgagccgaattatgaagtaagcatgattggttctgaaaacataatcaattctacttcggaagctataagtggaaaaaaattcattgatatttttaaagctaatacattagagctaccagcagatattgaaaaagtattgcagtcagttgttataactttgagagatgatcggccagaatatggtaatccaataatagtctcatatagaaaaattaaagctattagatcgtattacaatgtcgctggcccattaatgtctatggaaagtaaatacctagggttggattatgctataagccagcatgttattcccttacttaatggttatgggcaaggttttggcaaaagattggaagctttgattcttaatctccctgatgaaatggaaaagtcccttaaaatgctgaaaaagattttaagtcatggtaatcagaatatgttcagctatggacataatttatga

SEQ ID NO: 284989 - DNA, 1836 bp, Morganella morganii
atgattaagtggaaggtatacaccaattcctatgatgaatcagcatgtctttatcttacacatggtgaaaaaatccaaataaaagaaactgataagcttgtattttcagttgatatggatgctgaagtcttttctagccacggtgctccaactatagtgattggagatattccattgttaatggttttacaggatgatacgggtcaagattgttataattttatatcgaaagagttaataacttcccacacatctagatacttctataattttttcggagaaagtgaggtttttttattttttgataatagtcttgcagacccgatatctattacctttgatatattagcacgaaaagaaaatgctttaattgctaatgaaatgttatgctacttaacagagaatcttgaagatgcaattacaatctgtttttcacgtagtaagcgtggcgcagatttgttaggtgatgacgaacataatttcaataagatagatgcaatcaatcaggcttttgattatttaagtagtacagtgcatctattcttaaaggatagaaaatcacaaatacagtccgatttgattctatcagaaaatggtgctccaacaggtcctgattcagtctattgggcattgactaatctagataagttgtcaccagcaaaccaagatagtgtaaatattcattttaataataggggatatcattacgagcaattgccaaaagaaattacatttgaaaactatgatgtttatgagaatagagtcataaatacttttataatcaacgcagtaaattttttatattctcttaaaaatgaatatagctcacagtctaattttactgtgaatttatcaaatactgattatgtacggtttgatcatacaatgaaaaagttttcaaagatggtgttagacgtaaaaataaaggagattgatattctaatagctaaattcagtgagttaagaaatgtatactcgaagattatcccctccaaaattaaggtaacagcgatacctaaaatgtcatcatacgttattaagcacgctcattacaaagaagcatttcatctgattgagaaatgctacaaaacacggtctcctgatttttctagtaataatttacttttaggattaaagaacctttctgtcatttatgaattaacagttctattattactctacaaagaaatagaaaatgtctttcaggtaacatcatcgagtcagaatttcagatatcatgcagagtcaaatccatttggcggagttgatgctgaacgtcctgatggttctattaataatcactttgtattttcaagttccgaatttttaatcgatttactctatgaggctaaaatatatccttacagtgctgatagtaagcctggtgatttgattgataccagcaatacgtatagctctgtgttgtatgggaagcatcatttctgccctgatttcgtgctgaaaattacttcaaaagagaaaggtcagtcttttactgttatccttgatgcaaaatttaaagatttaaataccattagagagtacgatatagatgcccttaccaataaatatttaatgaacattcattcagttggtgataatggtaaagtcaaaatatcatcagttgatatgctgatcatactatttgcgcatgcaaaatcaggatctttacttagaagagtagcctctcgacattgtgtaacaggtcaatatcctgtttttccacaatcaacagccatagctcttcatactactgatgtttcattactaaacacacatttatcaagtataaagaaagtggttatgtccacttcccttaaaatggaacaactataa

SEQ ID NO: 284990 - DNA, 441 bp, Morganella morganii
atgattaaagggaaagatgtttacctgtattttacatgtttatttatcactttaacattcgcttttgttggtgttctcgtggcaagtgattctaaattttattttgtgaacaaaaggaatgaagaagttaaaaatttcgtcactgatattaactcattttttgcatcttctggatttgaattctctactgatggaataacatccgagaatgttgatgatttatatgtaagggctattaaatatccaaatgtctttttaacggatgattttataaatatcgcaagagatatatattgccgaaactatagtgatataccatctataaatgttggagagtatacaatagctaagcaaaatgatgtatttgcttgggatgatagtggttctaagtggcagacgtggtacaaattccgttctggtgaatgtaaggttctaagatga

SEQ ID NO: 284991 - DNA, 399 bp, Morganella morganii
atggcaggcagcaagtggcagattagcgatgaactctgggataaaatggctccactgattccggcacataaaactcaccatcctctggggacacatcgcagacgcgtcgataaccgagctgcaatgaacgccattttttttgtactcagaacaggttgccagtggaacgcgttaaatgagacgggtatctgttcatcaagttcagctcatcgtcgctttcaggagtggcgtgatgccggtgtttttgaacggttctggcaaaacggattgctggtcagtgaaaagctggatgttattgactggtcatggttgtcgatggacggttgcatgactaaatcgcccctgtcaggtacaaaaaaacaggccgtaatccaacagaccgaggaaaacaaggcgtaa

SEQ ID NO: 284992 - DNA, 396 bp, Morganella morganii
atgaccgatgcgaacggattgccgctccctgtggtggtagcgggagcgaatacacacgatataaaactggttgctgatacgctagataccctccagacaggaaaaacgggcaaaaatctacgcctctgtctggataaatgctacgaagccgaatggctggaatcgtatttgaaaaacaatggctatgaacctcgcattcagtcgagaaaagaagagtctgaggcgatcagaaacagcaattttaaggcacatcgctgggttgtggaaagaacacatagtaggatgaactgcttccgcagtgtactcacccgctgggagaaaaaggtcgaaaactatgaggcgatgctgcattttgcctgtgccatcattgtctggaataaaatccttttgggatag

SEQ ID NO: 284993 - DNA, 402 bp, Morganella morganii
atgaacaatcagaattatgtggtgatcaccggtgccagcgccggtatcgggcgggcaatcgcggctgctttcgcacgccggggtaataatgtggtgctggtggcacggcgtgaggatgcattactgacactgaaggcggagctgatgcagcagaacccggacatcatggttgaaatccgcgtgtgtgatttgtccgtgcccggcaatgcggcggcgctgtatcactcgttgtcttcactgaatattattgcgtggattaataatgccggtttcggctattacggtacggtggcagagcagccggtggcggaagcggagaagatgcttgccctcaatgtgaatgccctgatggtgttgtcggcgctgtatgtgcaggattatcagcatacggaaggtgcgtag

SEQ ID NO: 284994 - DNA, 1173 bp, Morganella morganii
  misc_feature (709)..(718): n is a, c, g, or t
atgataactcaagaagcaagttctaaatttttaggttttctttatcagatagaacgagttctctatcggatattttcgagcgaacatagttcagccgcatttagcgttgagactactgatgatgttgtagaagagatcacatatagaaacggtgatcgccatgttatttttgagcaagataaacactcaattgctttaaatggtcagccctaccaagatagcaataaaaatttctggcatactctgcatatatggctatcgacaataaatgattacaaaaataagtatgaaaaaataacttattgcttggttacaaataaatctgttggggaaaagacgctagccaaaaaaatttcaattgctgaaaatgatgaagacattattaaagcaattaaagaattaaaaaatcaagcggcgactatttcaggaaaaacaaaagaaatcgctgaaaaagtaattaactattctgaaggtgatttaaaatatctaattaaatgtattatcctacttgataacgatggaactacatctggtgagtcactaaaaaaagcaacaattaatttattccatttaacatcagagtgtaatgaacatgctgaccatctctatcaaacactgatcggttttattgtagataaatgccaaatatcttggagaaaaaaagagccagttctactaacaaaagatcctatttttaaattattagatnnnnnnnnnnctgagcaaccattctttaaaacttcatttcaagaatacttaaataatgataataattcaaaaaaacatatgtttatagaacaattacaaagtattggccataatactgatgcatgcaatttagcgctaaaaaactactgggctttttattcagaaaagataagattacaagaagcaggtgaaacacctatctcagcatgggaagatcgtgatgaccagttatataatcgatgggttaatataaatttaaacacaatggttgataataatggaaaagacctatctcattatcaaaaaatatattctaaaacagtaaatcctgattataactcccccataaatgggcatgaaacaactaattcttattttacgattggtaattatcatgcgctggcaaatgattctgaaagtgattgttttatctattggcacgataattacaagaagggtaagtaa

SEQ ID NO: 284995 - DNA, 483 bp, Morganella morganii
atgttttatactgataagaatataatcaataatagttcttttgctagttttctatttgtaatatttactgaagaatatgaaaagctgtccattgataatcgccgacctgatttaatgcaatttttacttatccttccatttatttggcacaggcttagttgtgatgctataaaatcaaaaaaaagaacaacccctttaaatactgtgattcaagataatcctcttattaaatttaattttaaaaatcgcatgaataactactcgggaataacacttcaaggattaaatttagccgtttcatctggattgctaatgcgagaaaataaaaataataaaatatcatttcaacgaagcaagacaaaatggcctgctaatataaagacacaattaccttcagatatgattagtgcgatcatacgattagcttactggttttatcatatggatacaccagcagcttataatttaattttagagaaataa

SEQ ID NO: 284996 - DNA, 1410 bp, Morganella morganii
atgattgagcagaataggtcgtttccagatgactttggctttgactactgtcttatgtggattagtacggataaatacccctcatttatcagcaggccacaccctgacagtggtgagattatccatgaagttaaggataactcaaaaccttttgctcatgaacttccaattttaatcgactccgatggcctcaatgtaataccggttaatctatatcttcactctttgctagcagacccagatatatcctcggataaaacactccaatcccatgcagttgcgctcttgagcttttatcggtggttgaacacggaaatccctgagcatacccacccaagaactggcctgctggttgataaaaaatctccgttaacaatatacgactgcaccgacaaggtagaggaaagtccaatcgtgagatatcgagactatttactggagaacctttataccaaggatgaaggtggaaaagtcggtggttctccaagtaccgcttctaactatgttttgaaggttgttaattacttcattttccttcatcgccaggggatcatttcaatcagaaaaacctttcgaccatttgagtttaaggcaaagacggttcacataagcagtaaaggaaacagatcacagcatgaaatgctctcacatatcaaccgctgtcacagtaaggaaattactgtatatactacaggtctcactagaccatttaaaaacatcaaaaaacctcaaggtgctgatataagagaacttaatccacttcgtgaaaatgaaaagcaagagttttataaacaccttgatgttgaaaactcaactgatactaaagccctcatgctgtacttaaaaactgaaacaggattgagattggaggaattgataacatttccagcatctgccgtggacaagccaaaatctaaagtagttaaagtgcaaattggtgagaatattaacggttgtttaaccaagtttaaaaaaaacagaacaattgaaatcccagctaaggtcatggaactgctgtacgagtacaaattgagtaacgagagaaagagggctattcaaaatggactacttcgccataaccacttattcgtaaaatcaaatggcaatatctatgctccaaacaccattcaaaagtatgtagaaactatccgtaacgatttagcacacagtgggcttaatatttatttttcctctcatgatttacgtgccactttcgcaaccgactggctgtacagcaaacatatggaaacagctaagcccttcgaagccctgttacaggagttggctgatttgatggggcatgaaagcacatctaccacccaaaaatacgttaactacatgaatgataataaaacatggttggaattcgctcagcgaaaaaatgaattcgcacaacaatcgttgaggtaa

SEQ ID NO: 284997 - DNA, 2469 bp, Morganella morganii
atggccaaaagtcgattagcagcgtcaagaaatcaaaatgcatcccccattccgccaatggctcagaataatgttacttcattagatttgaacgttgatatacggcctgaaggggaactaaacagcacaaaacacaattttctttattggtgtcatgaacagtgtgatccaaaaaaaacattagctaaaccctctcgattagaaaaaatgcaaaagctaaaaagatgggttgatcaagagaagaaaaatgaaaccaatgcatggtctctagtggttaaattaagcgtcttaaaggcttatatagcattttgcgacattaagaagttcgacccttttagccaggctggatacctttcttacgctggtaactcaggagagttacgccgcttagttgatattgctaatgagcctaaaaaataccagtttcaatatcataatggcgaagagtttggtttgttggaatcttcagctcttcaaaaaaagatgaatctcgactcgctgcttccagtacttggttttgatgtatcagacatgcaagccacgctcaagagctttaatggtgaggttgcagattttactacacaaccttacacatcaagcgaatggtatgcactagtcagacgtactcagcttttctttttctctttagtagctcaacttattgcatataaagaagaaaaccctgactctcccccccctcaacaccttgataatattgtggttgaaagaaaagataatcgcgacatcacgattacacttgggagaaaaaatggttcagcgtcagatggtttagcgagtccttttaatcaatgtatggcagcagcttacactttgtttgcctattacactgcatttaacgattcagtgattaaacaagttcgccgcccaattaaaatggttacgtcaaataaagatggtcggacatcaaaggttgctcaagttcgcgcctataaaggccgcgcttcaaaagatgtaaaagcgttattttcaggagcagaagaaagctctcatcccgaagccaaagatgatgaggctggatttattgtcgctgacatcaataagcgcgactctgttggagaaactgacggaatcacctttcttcgagcactcgaactcctctcgaaaacctacagtaaagacccttatgacactttgatatatttcctcaatagcgaaggtgataaaggcaaagttaatgtatctggagcttcattccaattatcaaagaacctaaatttgctttctgatagtagagctgagttgatcgagcatctagtaaaaacctataccgacattgttgaagatcatacgatgaccacgtttaacaggattagacgagatgatggtgcacacacgatggaagcaaaagtcaccgctctcaaaaagcaagttgtaacaataagagcaatgccgattgcttacgcagcgctgtcatgtataactgatgtttcactgcgaaacgcactgatacctcttcattattcagggaaagattccgatggttctatcaccgtttctttcaaatacgctgatggctcgttaggtgagttcattgttgcagctaaataccgaccttttcttcaattggtcgaacgctatgctgcgagcaaaaaccctttacctagaaaaaattatggttttggaggcgggagttcaacaaccagacttccgtacttactaccgctgggtggtaagcatgttacttatcagtggtcagagggtgaggttccgattcgaaaaactttattaaatttgtgtggtattggtcgcggtgattattttctaaatattaccgccagtaggattcgtattactcattctaacttagaatataaagcagaagaaagggggtggacagcccgaaaaatcttgcagcacaatattgaaacaacagaaagatattaccccaacggccaccctgtttcaaacaacaagcaaatatcacaaggaatgatggggttagtctacatagtccagggcaagagccgcagtgaagctatagaatcggttaagaaagaattgaaaattcccgtcttagaatacgatgcttggaaacaacgtaatgtaccgacaaaccccaatggcattagctgcggtggggaaattgatttggtgtcagagaaagattggcactatgcagcacgcaagttcgcagaaaaaaaaggaattattgaagaaggtcaagatattacctgctatcaatacgatctttgtgtcttttgcaaaagtgccaaactcgttgatgctccctacgctatttataaactattgagctttctcgatgcgttacgtgaagccattgaccaatacccagaacgcgcttcggtaattcaattaaagataaatcgctttcaagctaatcttgacggcctcccactagaaactattgaacaagctgaatatttgctcgaagaaaaaggacgttatccacttttcaactcgttaccttccattacccaatttctataa

SEQ ID NO: 284998 - DNA, 2109 bp, Morganella morganii
atgctgtcttttgaaaactcacaagatatggattcaaccttagataccatgcgttcgattggtgatagaggcgactatttgcaacaggaacttctccctgcgatactgcgaggcgattgggaagagttagataaaatggtggtctatcaagatcaaaaaaagaccatcttgtttggcgaggatatatgggcgtttagagattctgactacaaagggagtgggatcgcgaacttgatttttaatattgagccaaagcaagaaaaaaatgtcatggcacttcatcaaaaagggcgtcaaatgcttaatcaaatgaagtgtgtagcattggcagagatgtggttttctattaaatatacagaactggcctcaattaataataaaaaaaactctcttcgaacggatattgctcaactaatcaaacgtggcatcaattcgtttgaggaattgaatcaagagtatttagaaattttggttattgagggatggtatgatatttctagaagctattgttttatagggttgaatagccttgttcacttgaaagggctgctacctttcaaggtcaacttttcacatcaaactcataagatatataacgtgaattctgatgcgcaaaacggaaaagtagtgattcccccacgaatctattttgcggcattaaaagggtacagtgaagacatcgtaaaagcctacagattaagagatgaaatagagcaagctgttgagcagatgatttcgctttatgagaatgaattagaaagaaaaatcctgaggattagaagaggttatagccacaaacctggtagcagctacgtaaaatcatgggaacaatttacgcaggctctcaataaaaatggaataaccttagtggataaaggtgaggatcatcggtggatgcaaatattcacatctattcaaccccgaattcaaataaacggaggacgtcttagcaccttcagagcacacattgacaacacttgttacggctggggtgattttaggcgatatttgaggagcttaaatacaaaatcttcatggctttgtctggcattgtcaggaatgcgtgtagacgagctgtacaaaatgagccctgtttacggtgcacaaagaatgactttcgataaaaatggctgtgagtcggaaacgggcaaggaaaccatctactttctaactacacgccaatcaaagattacgctcagtagtcaaaccaaaaatgacacgtttgtaaccacggaagctggctggaaagcattccatatactgaatgctattaatacgccctatcgcaacagatttgcaaagaaatataatcatcgaatgtttgcaaacttgaaggatatcgcttttccctaccctataggaaagagcgcattgcacacagtaattaatacgaagtttaaccgcgataaatttaattttacacttacagcagaagatatggggtatttacagacttcagacccaacccaaacatcttttaatcagggcgataaatttcacttctctccacatcagacacggcgctccctcgcatactacttaattggttatgaattgtgttctttccccgccttgaagcaacagttttcgcatttgtcgatggcgatgacgcgatggtatgcccgaaatgcctattcatttgaaaaactatacagcgaaatacaaaaagagcgtgtcacacaacaagctgagatatttgctcgcatatatcaaaaaatggcgaatggtgagcgtatcgcgggcggtaaaggtcaagcagccgttgctgaaattagtcgccaaggtgaaagttattttgaagatggggtaagcaaacgcaagctatcaattgactactggatagatcggttgaccaacgggaaagaacacttacacgctattgctccttcgatgtattgtactaacactcaatgttcaatgcgtatcaacattgatttaagtgaatgtgtagactgcgaatatgactttattgaaaatgctgcaaccaaatacatgatgcaggtaaaagctgcggaagcgatcatggatgatctagggtttaaatatgaaaagtatgaatttgcagaagatgtgctgaatttagtgatcgaaacgacaatggggacgtaa

SEQ ID NO: 284999 - DNA, 537 bp, Morganella morganii
atggcagacaagtttggattaaactcaacagaaaggcagttaagagacgcattggcgcgacttgttgatcaaaagccgattaaccgggagttgaaacaaaagcttaaagctaacaagcttaaaattgttgtttctaatgttgaaaaagaagctgggttatcaaatggatcggccagacgctatccagaaataaaagcgctgatcgaaggcgctgaagcaacgcgtgttcatggtgcaagcaatgtgtccgataatgtgattcgcagtcaccctctccacataaaggctaaggaagacttagacaaagccaaaaaagaaatcaaaaagctcaagggcgaaattaaaaagaaagaacaaaagcttggagattataaaaaacgcttaaagtctcaagccgtgagaatgcacgaagtcaccgttgccatgtggaaacatatacctgaagaatgcaagcatattgagttaatgatcaaaatggaaaaaacggggtcaacaaacaacgttctagaattcaaaaaacgagagaagctagattag

SEQ ID NO: 285000 - DNA, 348 bp, Morganella morganii
atgagtgaaaatgaattgcgattagcctatttcaaaaagaagcttttagccatggaacgagagttattcgatgagttatctgtagggatacaaactggcggacatgcaacagtacagcttgatcaacaaagtgtcgggcgtttatcaagaatggatgcgatgcaaagccaacaaatggctttagaacaccaaagaagacgagaaatgcaactggttgctattcgaggtgcattacataggataaaagaagatgattatggctattgtgttcaatgtggtgaagatatcaaccccaaacgcttagacgttaatccttgtgttattaagtgtataaactgtgcaacctaa

SEQ ID NO: 285001 - DNA, 288 bp, Morganella morganii
atgaaaccaatactcgatatgtgctgcggcagccggatgtttatgcacgataagcaagatccgcgcgtgttgttcagtgatatcagaaatgaagaacatactctgtgtgatggccgtctgctgaaaattacaccggatatcattgctgactttaaaaacctgccgttcccggatcgaacattttaccaggtgctgtttgaccctccccacctcgtccgggtcggtaaaaatagctggatgtttaaaaatacggcgcactggataagcactcatggcgttgtgacctag

SEQ ID NO: 285002 - DNA, 897 bp, Morganella morganii
atgtcacgaccatcaattaaaagtgctattatatttaaggctgagttaccctccgccgaggcattaagtaagcatttatcggaatgtttatttactgatattttggaatctcactatttcagttgtgggtttattccaaatatagttacaaatgaagttgttaccccgattgagggtggttttttattatcatatcgtattgatgaaaaaatactgccaaaatctgttattgcgcgagaattgcacgaccgatcacaaaaactacgggatgaaggtattgagtttgacgaaatggcactcaaagaaacaacctgtgcagagctacttaagcgtgcattcgtcaaaagtacgcacgttctggcgctatacagcgaaaaggatcagtttcttgttgttgcaacctcacggaaacaacacgccagcatggttatttcttccctcgttaaagcctgtggatcggtaaaaaccgaaacaatccatatcgacggcatttcaaaaggggttacagcccggcttgataatatgctgaacgataaagactccggtgactgctttggtgataaccttgagattggtagtttcttcttactggagcgaaagctggataagaaaaaagaagtcgttaaatacgatactgatttttattctgttcgtggtgagctggaagaaagcctgaataataatttcaacgtttcaatgatcgaactgtcaaccggagatattacctttaaattaactgacaactttacatttaaaggcatcaagccagtaagcaaaattgaatttgatgataaagaccgtgtatttcgttatcgccatgaatgtgcactcatgctcttttatacatcaaatgcaattaacatcctgattgatttactgaaatacaaagaaaaataa

SEQ ID NO: 285003 - DNA, 429 bp, Morganella morganii
atggcagctgatgctgaaaatcataaattattcacagaagcctgccggaaaaatcttgatacctatcagtccttatatgacgattcatccaaaagtttatatgcccgcgttgatctgatttataactttgtctataaccaggaattaaaaaattaccgggccagttttaccggcgaacttcacgcaccgatgtatcgttacggcaattcaaagaataatacggaatatgattttgtccggaataaaatccggggcggactggatgaaaccagtaatgagatcaataacctgatctatgaacaaatgattgaaattctctacaaacccgcatatatgggtgaatcaaggcaccccggtaatattatgctgtcactggacagtgtcagaagagaaatggcaccggaactggtgctgaaactggttaaatag

SEQ ID NO: 285004 - DNA, 1101 bp, Morganella morganii
atggaaatacaagaaatcgcactccgttttaaggcactgaagaaaaaaagcaaaaatacattcattcagaacctttctaacttatttaatcagattgaaagtgcggtaattctcgatggtccgtacaggttagtattagattccaacataatcatgcgcctagagtcttaccggcaagggaacgtctcagaagggctcctgtcaatccttctggcatttaaactcataaagcagctaccttttcattttgatttggtggttagaccgactgtattttatgagtatcttcgacaaaaaaacttgaaaagcactcatgagcactgggtaaaattcaaagaattgaaagatctgatagaggaagagttaggctcaaagttattctttgatggcattgaaacatatcagggtgctgaaaaatatctagaattgattcaaagtgatgctaaaaaaataaaggaagctttgattttatatcaaaatgaaaactggcatataaattttgttcagcgtgctggatctggtgtggctggactccctataactggcacaggatacatactggtcccacctatttttgcagctgatgctatttttcaacctctaggacttgaatattttgatgaagttaaatccagtcaattctttactcagtacatacacaaatacattattgagtgcaaacttaacgacagggatgttattgataaatataataaggaggaagagttcttatttactcaaattctaaaattaacttctaaaggaaacttgatggggcttgcagatttagatatttatacaacctgcaatattcgcagtcaattctctaatcaaagtcattctcgctatgcccccgcttccgctgccttaaccatagataggaatcttgcgagagcattgagaaattcgaattctcatcatatcacttctgggggtatggtctgcgggcctgaaaataaagatgataataatgctaaaatggaagcatttattgaagaacagaagcgtatgcgggaaagtgaaaaacgccaccgcattgccattgaagtaagcagagggtttgtgaaagatcttctctcaagtggagatttttcggactaa

SEQ ID NO: 285005 - DNA, 729 bp, Morganella morganii
atggcaacctaccgtatcgaccctgacctcgcgtttatcggtcagtgcagtaatgaggacctcggtctgctggtctccgttctgactcacgacagtaaagacggcaaaaaacgtctggcggaatctctgaccacctcaccggaatatcagctcttttaccctgaccatcagaagtactggcctgccatctgtgccgagctgcaggccttcggggccaacagtctggtcacgctgctgcgcggcaacaagggcgtgctctaccgtgaaatcctgcacgatgtttgcgacaagctgaaagtgaactacaacaaagaaagtccggtggaaaccaccgaactaaacctgctgatgaaagtactggagaaaagcctgcgggagatgtcacaggacgaactggtccgttttgcggacgggctgaagctgaatctgtccgcaccgactccccagcttatcctgctcgcggtgcaggccgccgtgaccagctccggtgtcgcagccctgcagtttgccacgattgccgctgtcggggtgattgaagcgatgggcggtattgccacctgggggacactctttgccgccaaccgggcactgggggtactggccggtcccgtcgggattgccctgagctccgcctggctgatagccgatatctccggtcccgcttaccgggtcaccgttccggcctgcatcattgtggcgtacctgcgccagaaggccctggcggcctga

SEQ ID NO: 285006 - DNA, 906 bp, Morganella morganii
gtgaataaaatctatgacccggcggcaggctccggctctctgctgttgcaggctaaaaaacactttgataatcacattatcgaagacggctttttcggtcaggaaattaaccatacgacatttaaccttgcgcgtatgaacatgtttctgcacaacatcaactatgacaaattcgatatcagactgggtaacaccttattgtcgcctgagtttaaagatgaaaaaccgtttgatgcgatagtgtctaacccgccgtattcggtgaaatgggtcggcagtgatgacccgactctgattaacgatgaccgttttgcacccgccggggtactggcaccgaagtctaaagcggactttgcgtttgtactgcacgcactgaattacctgtcagccagaggccgggctgctattgtctgcttcccggggattttctaccgtggtggcgcagagcaaaaaatccgtcagtacctggtggataataactatgttgaaaccgtgatttcactggctccaaacctgttcttcggtacaacgatagcggttaatattctggtgctgtcaaagcataaaatagatacaaacgtacagtttattgatgccagtggtttatttaaaaaagaaaccaacaacaatattctgactgacgaccatatcgctgacatcatgcgggtattcgacagcaaagccgatactgactatcttgccaaatctgttcctgcagaagctgttgccgccaatgattacaacctgtcagtcagtagttatgttgaagcaaaagatacccgcgaagtgattaatatcaccgagctgaatgctgagctgaaaaacaccgttgccagaattgaccagttacgcacagatattgatgcgattgttgcagaaatcgaaggtaatgaggcacagttatga

SEQ ID NO: 285007 - DNA, 1293 bp, Morganella morganii
atgagtgagctgaattatctggaaaaactgctggatggggttgaagttgagtggttatcaataaaaggtgttgctgaagttcgtagtggctggggtttccctaagatttaccaaggtaaatcagaaggtatttaccctttctacaaagttagtgatatgaatacgattggcaatgaaaccgtgatgtccatagctaataattttattgataatggtgctgttaaaaatttgggtgttacaattgcaccggaaggaaccgtgatttttcctaaaattggagcagctatagcaacaaataaaaaacgccttttatcagtaccttctgcttacgataataacattatgggattagtagtaactgaaaaaatcatttctcggtatatgttttattggatacaaacaattaacttaagtatgctggcaaatgattctggtgcagttccttccattcgtaaaagtgacgtagaggagttaccaattccaattccttgccccggtaaccctgaaaaatctcttgcgattcaatctgaaatcgtccggatactggataaatttaccgcccttacagctgagcttacagctgagcttacagctgagcttactgcacgtaagaaacaataccattactatcgtgaccagctgctgagttttgatgagggagatgttgaatggaaggcgttgggagatattggtcagtttattcgtggaaggcgctttactaaagctgattatgtagaagaaggaataagcgtcattcactatggcgagatatatactcgtttcggtgtttacgctactaattcgttctctcaggtcaggacggatatgaaaaagtcattgcgctatgctgagcctggtgatgtggttataaccgatgtcggcgaaacggttgacgatgttggtaaagcagttgcgtggattggggatgaaaaagtggctattcacgatcactgttatgcttttcggcattcaatgaaccctaaatttgtttcctattgtatgcaaactgcatcatttattgctgaaaaagcaaagtatgttgccagaacaaaggtgaatacattgttgattaatggcttttcaaaaatatcaatacctgtgccgtatcccggaaacccagaaaaatccttagcagaacaagccagaattgtcgccattctcgacaagttcgatgcgctgaccaattccatcaccgaaggcttaccccgtgaaatcgaattacgccaaaagcagtacgaatattaccgggatttactgttcagctttccgaaaccggagtcggtgaacaactga

SEQ ID NO: 285008 - DNA, 906 bp, Morganella morganii
gtgaataaaatctatgacccggcggcaggctccggctctctgctgctgcaggctaaaaaacactttgatagtcacattatagaagacggctttttcggtcaggagattaaccatacgacctttaaccttgcgcgtatgaacatgttcctgcacaacatcaactatgacaaattcgatatccggctggggaataccctgctggcacctgagtttaaagatgaaaaacccttcgatgcgatagtctctaacccgccgtattcggtgaaatgggtcggcagtgatgacccgacactgattaacgatgaccgttttgcacccgccggggtactggcaccgaagtctaaagcagactttgcgtttgtactgcacgcactgaattacctgtcagccagaggccgggcagcgattgtctgcttcccggggattttctaccgcggtggtgcggagcaaaaaatccgccagtatctggtggataataactatgttgaaaccgtgatttcactggccccgaacctgttcttcggtacgacaattgccgttaacattctggtgctgtcaaagcataaaacggacacgaacgtgcagtttattgatgccagtggtttatttaaaaaagaaaccaacaacaacgtcctgactgacgaccatatcgctgacattatgcgggtgttcgacagcaaagacgatactgactatctggccaaatccgttccggctgaagccgttgccgccaatgattacaacctgtcagtcagcagttatgtggaagcaaaagatacccgcgaagtaattaatatcactgagctaaacgccgaactgaaaacgaccgtcgctaaaattgaccagctacgcaaagatattgatgcgattgtcgcagaaatcgaaggtaatgaggcacagtcatga

SEQ ID NO: 285009 - DNA, 1293 bp, Morganella morganii
atgagtgagctgagttatctgaaaaagctgctgaatggggctgaggttgagtggctgccgttaggtgatatcgctgatatttatggcggactaacaggtaagagcaaagctgattttgaagaaggaaacgctaaatacatttcatataaaaatatttttagcaatataaatattgatgagccaccgacagattttgttaatattaataatggtgagaggcaacacacagttaaatatggtgatgtactttttactggctcatctgaaactgctgaggaagctggtatctcgtccgcaattacatctcaatttgatgagccagtttatttaaatagtttttctttcggcatacggtttaataaaaaaattaaaatcaaacctgagttttcaaaatatcttttcagaaccaatctaatgcgtgaacagatatccaaaaccgcaagcggtgtaacgcgttttaacatttcaaaatctcggttcaaaaaaattttgattcctgttattagtcctgaaaatcaggaaaaatctcttgcgattcaatctgaaatcgtccggatactggataaatttaccgcccttaccgctgaacttacagctgaacttacagctgaacttaccgcacgtaagaaacaatacaattactatcgtgaccagttgctgagttttaatgactgcgaggtggagtggaaaacactaaaagaaattggtacttggtatggaggggggacaccatcaaaagctaggagtgaattttgggagaaaggtagcatcccatggatttcaccaaaagatatgggaaaaccgatcgttgataactcagaggactacattacagaagccgcgattaaagaatcgtcaacaaaacttatcccggccaattcaattgctattgtagttcgttcaagtattttggataagtatttgccaagcgctttaattccagtaccggcgacatttaatcaggatatgaagattgtaataacgcatggaaatattttacccggttttattgctcatatgctcaggtctcgcggaaatgacatattgagaatagcaaaaaaaacaggtggttcggtagcttctattgacagtaagaaactattttcatttcgtatcccaatacctaagcaatatgagcaacaacgtataacaaatatacttgataagtttgatacgttagcaaactcacttaccgaaggcttaccccgtgaaatcgggttacgccaaaagcagtacgaatattaccgtgatttactgttcagctttccgaaaccggaatctgtgaacaactga

SEQ ID NO: 285010 - DNA, 378 bp, Morganella morganii
gtgtatctggttaaaggcttcccggatagccacaccgcgctttttcagctcaatctgcaccagcggcaggccgttgaccagaatcgtgacgtcatagcggttggcatgggttccggtctgctcaaactggcggataacctgcactttgttacggaccgtttttttcttgtcagtaaggtaaatattgtccagacgaccgtcatcaaaggtaaaatcacaaatataatcggtgtgaattttgcgggttttatcaatgatggtatcgccggggttatccagatactcctccgtaaaccgccgccattcattgtcagtaaaaaccacgttattaagcgcctgaagctgagttctggcattggccagcatagcagacggtga

SEQ ID NO: 285011 - DNA, 858 bp, Morganella morganii
gtggtagcgcaggttcttgtccacaaacagggtattcagtgccggggcatcaaagccggtcaggaacatcccgacgacaatcagcaggtcaacctcctgatttctgacccgttcggtaaggtcacggtagtagttctgaaaattatttccgtccgtactgtagttcagtttaaaccgggcgttgtaatccccgatggcggattccagaaactctctggcactgctgttcatggccgtgacatcaaagctctcatcgttaatatcaccgattgcatcctgcgcttcattggcggcaaaggaaaaaatcgtggcaacggtcagcggtttatagtttgtgttctgcgccgccgcctgctgctgaatgactttaaaagtttcatagtaagcttttgccgcatccacactgctgacggcaaacatcgcattaaacccttttgctcccgggtaagcccggtgtgttttctgccggaagtttttcagaatgtagtgcgtgacttcggcaatccgctgcgggtgcagcagggcgtgtttattttcagcggcactgagtttctgttcgtccgtttccgtttccagtgccttaaacatcgggcggacatcattgtaatcgactttaaacttcagcaccttctcatcacggatagcatcggtgatgatgtaagaatgcagctcggtgccgaagacaccggcggtgtcctccgcacccaatgcgtttttaccggcaaaaataggggtgccggtaaacccgaactgataaaaacagttaaatttctttttcaggttcttctgtgcctcaccaaactgactgcggtgacactcatcaaaaataaagaccacctgctgacggtaaaccggtaa

SEQ ID NO: 285012 - DNA, 369 bp, Morganella morganii
atgtggtcatttatcggtaacaaaaaacgtcagcgttggttgtggtatgcatgggagcctcgcttaaagcggattatcgctcatgtatttggttcccgaagcaagaaaacactggggaaattgttaaaactgctgtctgggttccgtatcgctttttggtgtacggatggttacagggcgtacaaagagacaccccctagcgaaaaacatattttaggaaagctatacacacagcgaattgagcgtgaaaacctgacgttgcgtaaccgattgaaacgacttaatcgcaagacgttagggtattcaaaatcatccggcatgcatgacaagatcattgggactttcattgagcgagagtattacgtttga

SEQ ID NO: 285013 - DNA, 519 bp, Morganella morganii
atgagcaggtttttaccttttattggccgtcagtatgaagacagtatctacggggccagagtgatgattctcggattgtctcattatggcgacccggaggatgcatatccggaattcacaagagacgttatcaatgagaatgcgtactcaccgggaaaccggtttttcacacttttgactaatttactgcgtttatccaaagacgcgccggatgatactgaacgaagggcggcatgggagcaggtggctttttataactacatacaggatatcgtcgggataacaagccggatatcgccgacaccagaaatgtgggatgaggccaggcagccatttttaaacgttgtgaaagaattaaaaccgcaaatcattatcgtcctggggacccagctgtgggaccagctaccggagatagacggtattgagtggtgctgggtaaaacaccccagttcaggaagcttttcctatgatgaagcgttcagcaatttcaaaaaagcgcttgaaaatataagaaaataa

SEQ ID NO: 285014 - DNA, 1080 bp, Morganella morganii; identical to SEQ ID NO: 278108

SEQ ID NO: 285015 - DNA, 450 bp, Morganella morganii
atgaaaagaagtctgacactgcttggttgtttactgctgtccgccccggtttttgcactacgcatgcccggtgaggtacagcctgaccgttacacttattacctgaccccggaatacgggcagcagctgaaaatgcagaacgacggcaaagaccggaaacctgcgtttcagccactccctgccggagagctgaggagtgagaccagagcggatttgtccaaaggctatccggctccggtggccatgacctgtatcagcagtatttactataacaccggtgcccgggccaactggctgaaggtgggctgtatcgacaataacggtctggagtatgaggcaaaccagaagtggccaccgaaatccgtcgcggagcgggtctgtaaagccggagagggagactgtgagtccttcctgcagatggatactgacagctggtccggtccgcagtaa

SEQ ID NO: 285016 - DNA, 450 bp, Morganella morganii
atgaaaagaagtctgacgctgcttggttgtttactgctgtccgctccggtttttgcactacgcatgcccggtgaggtgcagcctgaccgttacacttattacctgacccccgaatacgggcaacagctgaaaatgctgaacgacggcaaaggccggaaatctacgttccagccaattcctcacggagcactgagaagtaatatgaacgtcggcgcttccaaaggacaccctgcaccggtggcaatgacctgtatcagcagcatttattataataccggcgcccggacagactggctgagggtggggtgtatcgacaataacggtatggagtatgaagggaatcagaaatggccaccgaaatccattgcggagcgggtctgcaaagccggagagggcgactgtgaatccttcctgcagatggagaccgacagctggtccggtccgcagtaa

SEQ ID NO: 285017 - DNA, 438 bp, Morganella morganii
atggtcctgaccgtcacagcggaagctgagcagacgcctgcggacaatcgcctgtgtcacgacataaaagccgccgaacagcgtcggggcggattgcggcggttcatggtagaccagacagggggcgccgttttccggactgagcagaacggacagcagcctgcggtcaagcgaggggaacagcggggtgatatgggtgatatcggcaaagtacaggatatcgctgtctgtccggtaagggcgctgaccggcggccagccggtatccgccctgatacggctccgtgtccagaaagaccaggcgctcactgaaatcccgctgcagtgtgcgggccgagacattaaactcacgggcaagctgtgccggatacagtgtttcgccgcggaacaggcggctgataatgatggccagccggaacgcaagccggtcatggcgtga

SEQ ID NO: 285018 - DNA, 489 bp, Morganella morganii
gtgtttgaggtggatttactcaaatcgcaggaaatcaacctcgactatattctggggctgatttacgactaccacaaaaaaaataccgataaaaccaccatgaaagaggaagtgaaacggttaatccgggcgagtctggggaaccgggccaaagagggactggtggtcggttttattgaaaacaccgatttcagtgacctggcggataaagaaagtatcattgaggccttctacgcctttgctcagcaggcacaggagcgtgaggcagaggctttaatcagggaggaaaatctcaataatgaagcagccaggcgctatctgcgggcatccctgaagcgggagtatgcaaccgaaaacggcacagcgctcaatgaaaccctgccgaagctgagtccgttaaacccgcagtacaaaacaaagaaacaaacggtatttcagaagatggtcgcttttattgagaaatttaaaggtgtcggcgggaagatatag

SEQ ID NO: 285019 - DNA, 834 bp, Morganella morganii
atgcaaactaaagctgaagtattaaccgatcatagcgagctgatttgctcgaccagtattgaacgcatagtgactggccgcgatgccgcactgaaacagatagaacaactcattcagcagcttgatgccatttcacggctaacctcagaaattggcggtggcacagcgcaagactgggcgatgaaggccgggcaccgttacgatagctggatgaccgaaaaggtagacaaagcgctgccttccgttacccgcaatattgaccgtagtatctggcgagacttgatgttgaagtctggcatgatggccttgatggatgctcaggcccgtgaccagtggcataagaacctggaggagggggatctgcccgccatcagcgaggcaaatatcctcagtacttttgagcagctacatctgaacaaaatggatgtgtttgagcgtggcattatcaatgtcttcaaagggctgtcgtgggattacaaaaccaatagtccctgcagctttggtaaaaagatcatcgtcaacaatctggtgacgcatagccgctggggatttagtttgaactggggatggcggcgggatcaattagcggacctggaacgaatgttatttctgctggatggtaaaccgatacccgataaccgtggcgatgttactactcgattgatggaacatattcgggataacccttcgaaggatatttacgaagatgattttttcagtatacgttacttccagaaaggaaccgcgcacatcacttttaaacgtatcgacctgacagaaaagatgaatgatatcgtggcgaagcactatccggggatgctggcagcgagatga

SEQ ID NO: 285020 - DNA, 342 bp, Morganella morganii; identical to SEQ ID NO: 144251

SEQ ID NO: 285021 - DNA, 318 bp, Morganella morganii; identical to SEQ ID NO: 144252

SEQ ID NO: 285022 - DNA, 222 bp, Morganella morganii
atgaaaattatcagtaaacgccgggcaatgacgatataccgccagcatcctgagtcccgaatctttcgctactgcagtggaaaatatcagtggcacggtagcgtctgccattacaccggcagggacgttccggatatcgcaggtgtcctcgcggtatacgccgaacgccgccaggaccgcaacgggccttatgcctgcctgatgagcatcaccctaaactga

SEQ ID NO: 285023 - DNA, 477 bp, Morganella morganii
atgaaacagctttcctttttacccggcgagatgacgccacaggaccggcgtctcatccagcgggcactcagggctctggaccgacacctgcatgagcccggcgtggccttcacctcttcacatgctgtccgtgagtggctgcgactgcatatggccgcacttgagcgggaagagttccgggtgttgtatctggacaaccagaatcagttgattgcccatgagacgctcttcaccggcacgattaaccgtactgaggtgcatccccgggaagtggtcaaacgtgctctgcacttcaatgtcgcagcagtaatactcgcgcacaaccatccttctggcgagacaacacccagccaggctgacaaagcccttacgcagcgactggtgcaggtgcttcaactggtggatatccgcgtccctgaccatctgattgtcggcggcaggcaaatctattcgttcgcagaacacggtctgttgtga

SEQ ID NO: 285024 - DNA, 459 bp, Morganella morganii; identical to SEQ ID NO: 135476

SEQ ID NO: 285025 - DNA, 240 bp, Morganella morganii
atgtcccaatacgtgttgctgccaccggggcctttcacccggagacaagcgcaagcggtcactaccacgtacagcaatatcacactcgaagacgaccagggcagtcacttccgcctggtggttcgtgaagctgaaggccggatggtctggcgggcatggaactttgagccggatgccggtgaaggtcttaaccgctatatccgcacctcaggcatccgtacagacacctccacccgctga

SEQ ID NO: 285026 - DNA, 468 bp, Morganella morganii
atgacaatacgttcactaagtcgatttatgctggcgggtgtactgctcgcgagctttaatgcctctgcgatcccggggttctggcagcagggttacggtcagggcaatacggaatacagtgtgaccgaagccagcgggaagacgtttaccatcaactgcacagggaacccggaccagaatggtttctatcagcattctgtttttcttacccttgccgatgacaagacggtcagttcgcacgatgacgacaccactatcaccgtagtgatggatcaccagcagtacattattccgtccagcctaggctggcgtaacggcgataacgcctggtttgacttcatcagcaatatctctgaggccgggcagttcgacgtctacgtcaatgaccacaaagcagggagcttcacggcggaccggaagaacgctgagaaagttctgtccactctcggagactgcagcaacgactga

SEQ ID NO: 285027 - DNA, 444 bp, Morganella morganii
atgaaacgtaaaacactgtctctgctggtgctggttgccatcacgctgtttctcagcgcatgcgataacagaagtgatgacctgaaggccatcagcaaatttaaggatctcaccccaccgcgtttcagtgatgtggtcagccaccaggatgatgtcagcgaagaatggtcacaggttgactacttatccggtcccaccttgcaggttttacgtgcccaccagtcgcccgatggctgcgagggtggcagttactactacctcgtggatatgcaggaaaaaaccgtccagccactgatgaatgcgctgtgtattgccgataacatcaaactggaataccaggaggtgacggacccgtataccaaagaaagatactttgagtacgcccatgacggcaaactgatgggtcgactgctgataccctcaaaccctgagaaccaggaataa

SEQ ID NO: 285028 - DNA, 237 bp, Morganella morganii
atgccatttattgccattatcgccattgttgtcatcgtcatcattctgaacaaaaccggggtgtccgacagcctcacggccctgacccttgccaccgttgccgcactgctgacgggcggaggggcagccggtgcggccagtgtcgcactgacaccgttcgtcggcgtgccggtgggtattttcgtgggcatttatgtctttgccaaagtggttcgtctgatttcaggaaaaaaataa

SEQ ID NO: 285029 - DNA, 702 bp, Morganella morganii
atgacacaggcagaacgccgccatgaccggctggctgtcaggctgtcactgataatcagccgtctggtggcaggggaaacgctgagtgtgcgtaagctggccgctgagtttggtgtgtcggtgcgcacgctgcggcgtgattttcgtgagcggctgatgtatctggacctggagtatcagtccggatattgccgcttacgtactgcgggcagtgagacgcagatggtgcccgacgtgcttatctttgcccaccgcagcgggatggccggtcttttccctggctttgaccgtcgtctggtaaacgcactgctgatgtgcgatgagtctccctgcgtaatcgcacccgccagtccggctccttcgctatcaggcgcattgtctttctggcgactgattcaggccattaccgggcgcaggcgggtgacgctgattgccgaggggcagcgctgtgagcggctggcaccctgccggttacttatccaccagcaggcctggtatctggtggcagagcacgacggacatatcgccgtattcaccctggatgaaatccatctggttcaacccctgcaggagtcttttcgccgcaacgacagtctgtgcagtctggttgaagacccggtgtttattcaggccttaccccattttcgctttatccagcagtcgctgcttgcgtttgttccggccgacagcccaccggaatag

SEQ ID NO: 285030 - DNA, 822 bp, Morganella morganii
atgacccgtctggcttcgcgctttggcgcagcaaaccttattcgtcgcgaccgcccgttaacccgcgaagagctgtttcgcgtggtgcccagtgtattcagtgaggacaaacacgcatcccgtagtgagcgttatacctatatacccaccatatccctgctggacagcctgcagcgcgaaggcttccagccgttctttgcctgtcagacccgggtacgcgacccgggtcgacgcgagcacacaaaacacatgctacgccttcgtcgggaggggcagattaccggtaaacaggtaccagaaattatcctgctcaactcccatgatggcaccagttcgtaccagatgttgccgggtttatttcgtgcggtttgtcagaacgggctcgtctgcggtgagtcatttggcgaggtgcgtgtgccgcacaaaggcgatgtagtgagtcaggtgattgagggggcctatgaagtgctgggcatttttgaccgtgtggaggagaagcgggatgcgatgcagtcgttgctgttgccaccacctgcgcagcaggcactggcaaaagccgcgctgacgtaccgctttggtgaggaccaccagccggtgactgagtcgcagatcctctccccgcgccgctggcaggatgagagtagcgacctgtggaccacgtaccagcgtattcaggagaacctgattaagggtgggctcagtggccgtaatgccaaaggaggacggtcacatacccgtgccgttcgcggtatagacggggacgtgaaacttaaccgggcactgtgggtgatggcggaagcgatgctcacgcaactgcagtga

SEQ ID NO: 285031 - DNA, 864 bp, Morganella morganii
atgaacaattctgaaggtttgaagccgtttcagcagtcgcttgatggtctgccacaatgggtatctgaacgtatattgcagcagataaatcagttaacccgctacgagccagtgatcggcattatgggtaaatccggagccgggaaatccagcctgtgtaatgccctgtttgccagtgaggtatcgccagtcagcgatgttgctgcctgtacccgtgagccactgcgctttcggctgcaggttggtgagcggtttatgacgctggtggacctgcccggtgtgggtgaaagtggcgctcgcgataccgagtatgctgcgctgtaccgcgaacagcttcctcgcctcgacctggtgctgtggctcattaaagccgatgaccgcgcactggcagtggatgagcacttttatcatcaggtaattggggaggcataccggcataaagtactgtttgtgatcagccagtcggataaggccgaacccaccagcggtgagggactattgtccacggcgcagaagcagaatatcagccgcaaaatctgtctgctgcatgagctgttccagcccgtacatccggtgtgtgctgtgtcggtccgtctacaatgggggcttaaggtgatggccgagcgaatgattaagtgcctgccacgtgaggccaccagcccggtagtgtcgcaactccagtcttcctttcgcacgacggtagtccgggagcaggctcgtagcgactttggtgaaaccgtcggtgctgtactcgatagcatcagtgcctttcccctgatacccgccccggtgcgggccgtcattcaggccgtgcgcaacaccgtggtgtcagtggcccgcgccgtctgggatttcttcttctga

SEQ ID NO: 285032 - DNA, 906 bp, Morganella morganii; identical to SEQ ID NO: 135477

SEQ ID NO: 285033 - DNA, 690 bp, Morganella morganii; identical to SEQ ID NO: 135479

SEQ ID NO: 285034 - DNA, 1881 bp, Morganella morganii; identical to SEQ ID NO: 135480

SEQ ID NO: 285035 - DNA, 1410 bp, Morganella morganii; identical to SEQ ID NO: 135481

SEQ ID NO: 285036 - DNA, 1971 bp, Morganella morganii; identical to SEQ ID NO: 135482

SEQ ID NO: 285037 - DNA, 2205 bp, Morganella morganii
gtgaccttagaacttaaacacccaagtgagatctatcagattatcactgaagaactggaccacattatacattcattgcagagccagagctgtgataaggattttgatggtacccaagccgatgcgctcgaacaattagccctacatcagacagaattacgtgctcagttagctcgattggaaatgaatgctgagtggaatacgtttactgtcgctttttacggggaaaccggagcagggaaatccagcatcattgagacgctgcgtattctgcttcatgagtccggaaaaatgaatgagcaacttgctttccgggcagtgcaggaaaaatattttttaagtgagaactgttttcagaaactggtacaagagactgaacaggctgagaataaactcgctgtgatcacggagaaaatcgcggccgtcagactggcttttgatcaacagcaacagatagatctgaaacatattgagtctctgcaaaatcagatcaatgaacataagcgtacggcttcactatggcagaagctcctctcctggtttcgaaagatgccacaagaaatcgaactcaagacggccagacaacaggtgcaggataccgttgactcacatgaatgtgctatccgtaagttactcgatgagcagggtgaagctgagcagaaaaaaaatgagttgattcagagacagcaacagtcagagagccacttgaaggaactgaatgcaatggccgatggtgccatcatcggcgatggcagttctgacttcactcgtcaaaccaagcgttacaacatggaactggatggtcataagttcgctttgctggacgttcccggtattgaaggcaaagaagggttagtgctgaaagagatcgaggatgcagttcaaacggcacatgccgtgttctatgttaccaaccagccagccccgccgcaaacaggtgatgatcaacgtcagggcacgctagaaaagatcaaaacacatctcaaagatcaaaccgaagtgtggacgattttcaacaagaaaattgtcaatccaatggccattaagaatcagccactacttaaagatgatgaagaaaatagtctgattgaactcgataaaaaaatgcatgaacaattgggtaaaaattatcgtagcgtattttccctcagcgtacttccggcatttgtagcctctacagaccactttgctcccgattcacaatatgctaaacgacgcaaaaaatttcttgatagctttgatgccgacgagcttttggaaatttcgcacatgcgggcttttatcaggatgctcagtgaaaaattacttgggaacagtgccgccagaatcaaagccgccaacttcagccaagccaaagggagggttgatgaaagcaatgccaaagtccggcatattcacgagatcttctccacagtggccgaacaactggaacaggatagtgaaaattcatgtaaacagctgcgtcaaagtttcagtttgttccggcaccgcctggaagccctcagaaccaaattagttgatgaactggtcagctccgtacgtgcttcggtctactcagtgattgaacaagatatcagtagcgatgaatttaaaagtagcctgcacagttgcattacgcagcagcaggaggcattcagcgaaaagttgattaaaggcattcagcaggacgttgaaatcttccagcaagactccaaagatatcctcacaaggtttgaacaatacagtcaggaattgctcaactcctatggcaagcttcgtgctgaaaagttcaatccagcctttgatatcaagataaaaatggataatggggttaatggatggggattgctagctgggctgactgggattgcgcttgcccctttcaccgcaggagcaagcttctgggtgggtggagcggctgtactaacatctttgatttccgtcggcaaagccttggctagattttttagcacttcatacaaacagtcccagcaacgcaaagccacaaatgaaaatcttgcagtgatacgctcactcctgcagacagacattgattctgctctggagggcatcacaccacaaatgcaaaaaacaattgatcagcttgaacaggctttgaaaacaccaggtcagcaggtcgcatctaaagccaagatccttaaacgatccacccaaaaacttgaccttctatctcgccagatcagtaatgtaggtaacttgccatga

SEQ ID NO: 285038 - DNA, 1701 bp, Morganella morganii; identical to SEQ ID NO: 138483

SEQ ID NO: 285039 - DNA, 756 bp, Morganella morganii; identical to SEQ ID NO: 138484

SEQ ID NO: 285040 - DNA, 645 bp, Morganella morganii; identical to SEQ ID NO: 138485

SEQ ID NO: 285041 - DNA, 627 bp, Morganella morganii
atgacatacgatagtgaatacggatcacacgtatccctatatcgggatagaatcaaacaggttattgatgactctctcaatgaacatcctaattcaatgattctacgtgttgatctgcatgacccaattgatacagaaaatatggataacccattctttcaacccagggttgactctggtgctatatctcgctttactagtgcgttaaaagcaaagcttgaacacgataagcatattaaaactcaacgaaaagactggcctgagagtcgacattctaccttacgttacgcatgggttagagaatataccaaaaatggaaagcggcattatcatttaatactgtgcttcaatcaggatgcttattatcatgtaggtgattacgatttaaaccgtaacactctaagaacaatgataacaacagcttggtacagtgcacttggcatcccgcttgatgactctgggaagttagttaattacccgtcaaatggcaaataccttctcaatcgtaaaaggaacaacttcgagcaaacttacaacgatttgatgaacagggtggattacatgaccaaagtaaggactaaaatagtcggtgatggagaccgtaatttcggttgcagtcgcgggtaa

SEQ ID NO: 285042 - DNA, 1422 bp, Morganella morganii; identical to SEQ ID NO: 138486

SEQ ID NO: 285043 - DNA, 237 bp, Morganella morganii; identical to SEQ ID NO: 138487

SEQ ID NO: 285044 - DNA, 1011 bp, Morganella morganii; identical to SEQ ID NO: 138488

SEQ ID NO: 285045 - DNA, 1317 bp, Morganella morganii; identical to SEQ ID NO: 134512

SEQ ID NO: 285046 - DNA, 363 bp, Morganella morganii
atgaaccctgttccatggctccagatgacaaacatgatctcatatcagggacttgttcgcaccttccctaaagcactcgtattgaccgtggcggctaccacattctgtctgatgaccagcccggcgttcgcggttgaggaaaccacgccgcagaatatgacctgtcaggaatttatggatatgaacccaaaaagcatgaccccggtggccttctgggtagtgaatcgcaacaccgactttagcggcggcgactatgttgactggcatgaagtcgagaccgtttcggtaccgaaaatgctgcaggagtgccacaagaaccccgccgctaaacttggcgatctcagcgcggtcatcaaaaaataa

SEQ ID NO: 285047 - DNA, 804 bp, Morganella morganii
atgaaccagacttctaccttaaccgggcagtgcgtggccgagtttcttggcaccggattgctcattttcttcggcgcgggctgcgtcgctgcgctgcgggtcgccggggccagctttggtcagtgggagatcagtattatctggggccttggcgtcgccatggccatctacctgacggccggtgtctccggcgcgcaccttaatccggcggtgaccattgccctgtggctgttcgcctgttttgaacgccgcaaggtgctgccgtttattgttgcccagacggccggggccttctgcgccgccgcgctggtgtatgggctctatcgccagctgtttctcgatcttgaacagagtcagcatatcgtgcgcggcactgccgccagccttaacctggccggggtcttttccacgtacccgcatccacatatcacttttatacaagcgtttgccgttgagaccaccatcacggcaatcctgatggcgatgatcatggccctgaccgacgacggcaacggaattccgcgcgggccgctggcgccgttgctgattggcttgctgatcgccgtgatcggcgcgtcgatggggccgctaaccggctttgcgctgaatccggcgcgcgacttcggcccaaaactgtttaccagtctggccgggtggggctcgatcgcctttaccggtgggctggcgatcccttactttctggtgccgctgctggcgccggtggtgggggcgattatcggggcgtttttgtatcgcaagcttatcggccgctttctgccgtgcgaatgcggtatcgatgagtaa

SEQ ID NO: 285048 - DNA, 1812 bp, Morganella morganii; identical to SEQ ID NO: 201275

SEQ ID NO: 285049 - DNA, 429 bp, Morganella morganii; identical to SEQ ID NO: 128822

SEQ ID NO: 285050 - DNA, 585 bp, Morganella morganii; identical to SEQ ID NO: 128821

SEQ ID NO: 285051 - DNA, 1668 bp, Morganella morganii
atgagaagatcaaaacgattcgaagtgcttgcgaagcgccctgtaaatcaggatgggctgattggcgaatggcctgaagagggactgatcgccatggaaagcccctacgatccggcttcgtcggtgaaggtagagaatggtcgtattgttgagctggacggcaagagccgcgccgagttcgacatgattgaccgttttattgccgactacgcgattaacgtggctgaaactgaacgggcaatgcggctcgacgcgctggagatcgccagaatgctggtggatatccacgtcagccgggaagagattgttgctattaccaccgctatcaccccggcgaaagcggtggaggtgatggcgcaaatgaacgtggtggaaatgatgatggcgctgcaaaaaatgcgcgccagacgcacgccgtccaaccagtgccatgtcaccaacctgaaagacaacccggtacagattgccgccgatgcggctgaagcggggatccgtggtttttcagaacaggaaacgacggtcgggatcgcccgctatgcgccgtttaacgccctggcgctgctggtcggttcccagtgcggtcgccccggcgtgctgacgcaatgttccgttgaggaggcgactgagctggagctggggatgcgcgggttaaccagctacgccgaaaccgtgtcggtatacggtacagagtctgtgtttaccgacggcgatgatacgccgtggtccaaagcgtttctcgcctcggcctatgcgtctcgcggactgaaaatgcgttacacctctggcaccggttcggaagcgctgatgggctattccgagagtaaatcgatgctctatctggagtcgcgctgcatctttatcaccaaaggcgcgggcgtacaggggctgcaaaacggtgcggtcagctgtattggcatgaccggcgcggtgccgtcggggatccgcgcggtgctggcggaaaacctgattgcctcaatgctcgaccttgaagtggcctccgccaatgaccagaccttttcccactctgatattcgccgtaccgcccgtaccctgatgcaaatgcttcccggcaccgactttatcttctccggctatagcgccgtaccgaactacgacaacatgtttgccgggtcgaacttcgacgcggaagacttcgatgattacaacattctgcaacgcgatctgatggttgatggtggtctgcgtcctgtaaccgaagaagaaaccatcgccatccgcaacaaggcggcacgcgccattcaggcagtgttccgcgaactgggcctgccgctgattagcgatgaagaagtcgaagctgctacttatgctcacggcagcaaagatatgcccgcgcgcaatgtggtggaagatctggccgccgtggaagagatgatgaagcgcaatatcaccgggctggatatcgtcggcgcactaagccgtagcggtttcgaagatatcgccagtaacatcctcaatatgctgagacagcgtgttaccggtgattacctgcaaacgtcggctattctggatcgccagttcgacgtcgtcagcgccgtcaacgacatcaatgattatcagggacctggtaccggctatcgcatcagtgccgaacgctgggcggaaattaaaaatattgcgggcgtggttcagcccggctcgatcgaataa

SEQ ID NO: 285052 - DNA, 429 bp, Morganella morganii; identical to SEQ ID NO: 77556

SEQ ID NO: 285053 - DNA, 1164 bp, Morganella morganii
atgagctatcgtatgtttgattacctggtgccaaatgtgaacttttttggcccgaatgctatttccgtcgtgggcgaacgctgcaaactgttgggcggtaaaaaagcgctgctggtgactgataaaggtctgcgagccattaaggacggcgcggttgataaaaccctcgaacatctgcgtgaagccggtattgacgtggtggtgtttgacggcgtcgagccaaaccctaaagacaccaacgtgcgcgacggcctggacgtttttcgtaaagagcaatgcgatatcatcgttaccgtcggcggtggtagcccgcatgactgcggtaaaggcatcggtatcgcggcgacgcacgaaggcgatctctatagctatgccgggattgaaaccctgaccaatccgctgccgccgatcgtcgcggtgaataccaccgccggtaccgccagcgaagtcacccgtcactgcgtgctgaccaataccaaaaccaaagtgaagtttgtgattgtcagttggcgcaacctgccgtcggtttccattaatgacccactgctgatgctcggcaaacctgcgccactgactgcggcaacaggaatggacgccctgacccacgccgttgaggcctatatttcaaaagatgccaacccggttaccgacgccgccgctatccaggcaattcgtctgatcgcccgcaacttacgccaggccgtagcactgggcagcaacctgaaagctcgcgagaatatggcctatgcctctttgctggcgggtatggccttcaacaacgccaaccttggctacgttcacgcgatggcgcatcagcttggcggtctgtacgacatgccgcacggcgtagcaaatgccgtcctgctgccgcacgtggcgcgctataacctgatcgctaatccggagaaatttgccgacatcgcggagtttatgggtgagaacactgacggtctgtccaccatggatgctgccgagctggcgattcgcgccatcgctcgcctgtcagccgatatcggtattccgcagcatctgcgcgagctgggcgtcaaagaagccgatttcccgtatatggcggaaatggcgctgaaagacggcaatgccttctccaacccgcgtaaagggaacgagaaagaaattgccgggatcttccgtcaggcattctga

SEQ ID NO: 285054 - DNA, 354 bp, Morganella morganii; identical to SEQ ID NO: 128819

SEQ ID NO: 285055 - DNA, 531 bp, Morganella morganii; identical to SEQ ID NO: 128818

SEQ ID NO: 285056 - DNA, 1926 bp, Morganella morganii
atgacggcgcacacgcatagcatcgggcaggaagtctcttcggttctcgcccagtcctggcatcgttgcagcaagtttatgcagcgggaaacctggcaggcgccgcatcaggcgcaagggctgacctttgagtcgatttgtcgtcgcaagacggcgctgctgacgattgcgcaggccgcgctggaagatgcctgggagtttatggacggtcgtccgtgcgcactgctgattctggatgaatcagcctgtattctcagccgttgcggcgatccgcagacgatagaacagctggcggagcttggatttcgcgacggcagctattgcgcggaaagcattatcggcagttgtgcgctgtcgctggcgacgatgccggggcagccgacaaaaacctctggcgctcagcactttaaacaggcgttgcatccgtggtcgttctgctcgacgccggtgttcgataaccatgggcatctgtttggctccatctcattgtgctgtctggtagaacatgagtccgtttctgatttatccctgacgctggcgattgccagagaagtcggcaattcattgctgaccgacagcctgctggcagaatccaaccgccatctgaaccagatgtacgggctgctggagagcatggatgatggcgtgatggcctggaatgagcagggggtgttgcagttcctcaatgcgcgcgcggcgctgcttttgcatctcgacgcgcaggccagccagggcaaaaacattcacgacctgctcaatatgcccatgctgctgcgtcgggcaattaaacatgcccgcggtctgaatcacgtcgaagtcacttttgaaagccagcaccagtttgttgatgctgttatcaccctgaagccgattgttgaggagcagggcaacagctttatcctgctgctgcacccggtggagcaaatgcgtcagctgatgaccagccagcttggtaaggtgagccacacctttgagcagatgtcgacggacgatccggaaacccgacgcttgatccattttggtcgccaggcggcaagggggagtttcccgatcctgctgtgtggggaagagggcgtagggaaagagctgctgagccaggccattcacaatgaaagcgaacgcgccagcggaccgtatattgccgtgaactgtcagctgtatgccaacagcgtgctggggcaggattttatgggcagtgcgcctaccgatgatgaaaatggtcggttgagccgccttgagctggcgaacggcggcacgctgtttctggagaaaattgaatatctggcaccggagctgcaatccgcgctgttacaggtgattaagcagggagtattaacccgtcttgatgcccgtcggctgattccggtggatgtgaaagtgatcgccaccactacggttgatctcgctaatctggtggagcaaaaccgctttagccgccaactgtattacgcgctgcactcttttgagattgttatcccgccgctacgggcgcggcgtaacagtattccctcgctgatttatacgcgactgaatagcctgaaaaaacgcttctcatccagcctgaagatcgacgacgacgcgctggcacaactggtggcttattcgtggccgggcaatgatttcgagctgaacagcattatcgaaaacatcgctatcagtagcgataacgggcatatccggctgagtaatttacctgattatctgtttgccgagcgtcccggtctggagaccgcgtcttccctgctgccagccagcctgacgtttaccgctatcgaaaaagaggcgattatccatgccgcccgtgtcaccagtgggcgagtacaggagatgtcgcaactgctgaatattggtcgcaccaccttgtggcgtaagatgaagcagtacgacatcgacgccagccagtttaagcgcaaacatctggagtag

SEQ ID NO: 285057 - DNA, 1098 bp, Morganella morganii; identical to SEQ ID NO: 128817

SEQ ID NO: 285058 - DNA, 279 bp, Morganella morganii
atgtctcaattcttttttaatcaacgcccccatctcgttagcgacgtgatcgacggtacaattatcaccagcccgtggaataacctggcgcgtctggagagcgatccggccattcgcatcgtggttcgccgcgaccttaacaaaaataacgtggcggtgatctccggcggcggttcaggacacgaacccgcgcacgttgggtttatttgcgacggcagatcgattcaaaggtcagcccctgcgcctgatgcggcgcctgccaggtttcacgctgcataa

SEQ ID NO: 285059 - DNA, 153 bp, Morganella morganii; identical to SEQ ID NO: 128816

SEQ ID NO: 285060 - DNA, 1098 bp, Morganella morganii; identical to SEQ ID NO: 201282

SEQ ID NO: 285061 - DNA, 1071 bp, Morganella morganii
atgaaaaaactgattaaccgtgtggaagatgtactgagtgaacagcttatcggcctggcgaaggcgcatcctgaactgacgctgcaccaggacccggtctatgtcacccgcgctgatgcaccggtcgccggcaaagtggcgctgctctccggcggcggcagcggacacgaaccgatgcactgcggctacatcggccagggcatgctctccggcgcctgtccgggggaaattttcacctcgccgacgccggacaaaatgttcgaatgcgcgatgcagattgacggcggcgaaggcgtcctgctgattatcaaaaactataccggcgacatcctgaattttgagaccgccaccgagctgctgcacgaaagtggcgttaaggttaccaccgtcgtggtggatgacgacgtggcggtaaaagacagcctctataccgccggacgccgcggcgtcgccaataccgtgctgattgaaaaactggtcggcgccgccgccgaacgcggcgactcgctggaagcctgcgctgaactgggccgccgtttaaataaccttggtcactcgattggcatcgcgctgggcgcctgcaccgtaccggccgccggacagccctcctttaccctgaaagatgatgagatggagttcggcgtcggcatccatggcgagccgggtatcgaccgccgccgcttcagctcgctcgaccaaaccgtcgatgagatggtcgataccctgctggaaaacggcgcatacagccgcacgctgcgccagtgggataacgtcaagggagcgtggcaggaagtgaaacagagcaaaaccgcgctgcaaaacggcgatcgggttatcgcgctggtcaataacctcggcgccaccccgctttccgaactgttcggcgtttacaaccgccttgcccagcgctgcgaagcgtccggcattgtgattgaacgcaacctcatcggcagctactgcacctcgctggatatggcgggtttctccatcaccctgctgaaagcggatgatgacacactggcgttatgggacgccccggtccataccccagcgctgaactggggaaaataa

SEQ ID NO: 285062 - DNA, 633 bp, Morganella morganii; identical to SEQ ID NO: 197348

SEQ ID NO: 285063 - DNA, 1419 bp, Morganella morganii; identical to SEQ ID NO: 78942

SEQ ID NO: 285064 - DNA, 1650 bp, Morganella morganii; identical to SEQ ID NO: 128815

SEQ ID NO: 285065 - DNA, 732 bp, Morganella morganii; identical to SEQ ID NO: 128814

SEQ ID NO: 285066 - DNA, 630 bp, Morganella morganii; identical to SEQ ID NO: 128813

SEQ ID NO: 285067 - DNA, 1416 bp, Morganella morganii; identical to SEQ ID NO: 152469

SEQ ID NO: 285068 - DNA, 237 bp, Morganella morganii; identical to SEQ ID NO: 142261

SEQ ID NO: 285069 - DNA, 621 bp, Morganella morganii
atgataattatattcatcactgataaagagtcatttagtcttaaggctgattcatctggtgcggtatatgtctatagtgtttacgatgaggactatttgatttttgacggtgataacggcatcaataatgatgatctctatatcgatgttaatgtgctaaagtccgtctttccttcattcaaccctgatgataaatttaatggcgtaacagttgagaaaaaatcaaaagaggctgtttttgaaactaaaaaagagaattttgctgtttgtttgcttatgcatgaaactgtcgtgaggaacaatggcgttcctgttgtcagtaaatttaaagttgattatgatgaaatgtggaaagcaaatatatcagaaagtacacttcttgaatggtttgaaaaaccagctgcatttacagatagaaggcaaagaattaagggcgaaaaaataaaaggtctatatttgtttatgactatgttcagtcaaaaatatggaagtggctccaaaagtaaaaccgctataattgcagatgaactcaacaaattggcggcctcggacgattttcagttcccggtcgcattcactacaagtgatgtcagaaagtggcttaagaaacccaaaaactaa

SEQ ID NO: 285070 - DNA, 414 bp, Morganella morganii
atgaattctaattttttttcgttgtcaaaaataactgatcagcatatcgttcagaaaatactggatgcatggttttctaaacgtatacaactttttttgtattttggcggaaatggcaaaaaatatagattgtcacgctgtatttcgccttcgctacatataggcggagagcagcttattagtaatggggatgaattttacctgtcagaagacagtaaggcacattcaattttaaaattcatccctgacctgccgctaaaatcgcacttgaagataactaaaggttttaaaatatcaagatcaattcaaggtgagtatttcaactatgaatacgcagggactgcattgggatattgggttgttgtcccgactaaactagcagcctttaataatgataattatattcatcactga

SEQ ID NO: 285071 - DNA, 285 bp, Morganella morganii
atggaaaattacattcgttgcccggcctgcgattcaactcgcattcgtgaacgtcatatcgggaaaaagacaggagctgttgctggtggcgtatcaggcgcactagctggagcgtctatcggctctgctgttcctgttgtagggacgattgctggtgctgcggtaggggctctatttggacgtttagtcgctggagctactgctggggctgtgagtggttcagctttagatggcgtggtatttgatcgttatgaatgtatcgagtgtgaatatacatttgattga

SEQ ID NO: 285072 - DNA, 585 bp, Morganella morganii
atgcatataactgcgacggcttccccatgcctaaaatcggggatgatttctgtttttattacgaatttaggaaaatataacgaaggcgaactggtcggtgagtggcttgagcttccggcaacctcaaaagaaatagaacactgtttaatgcggattggcattgatggtattcactatgaagagtatttcttgaccgactatgaatcctcaattgatggcctttcttcttacatttcagaatatagccttttagatgagttgaacgagttagcctcgcgattagccatgttatcgcctgatgaaattgacctttatcaggcggcaattgaaatcggttcttcaacgagttcaatccatgatttaattcatttagcggataatttagattctttccagcaattagcgggggtcaataatgaatatgatttaggttattactggatagaagaaagtggttgttatgatttagcccaactgggtcatttatcccattactttgactatgaacgctatggacgtgatgtttgtcttgaacaaggaggaatttttcacagtggaggatatgtttatcatacgggtgggtag

SEQ ID NO: 285073 - DNA, 1092 bp, Morganella morganii; identical to SEQ ID NO: 283894

SEQ ID NO: 285074 - DNA, 660 bp, Morganella morganii
atggataacacggatctgaccagtcagctggcgcaaatcgccaccctggaaagcatgaacagcctgaatgacagtgtcagcggtatttcaaaacaaattaactccgggcagtcattacaggcaacacaactggtcgggaaaaatgtcctgatcccgggcagcgacctggtcctggtaccaaccggtgacggcaccacccgtgtgaaagccgataacccgccgccgggtgatgacacatcaattgcgccgtttgcggatgataacggtggtgatgatagcagcggcagcggatttgaatcctcgccgttcggtttcttcctcgccaaaccggcggacaaaattgagataaccatccgcgacagaaataaaggaattgtcagaaccatcacgattgacggtgaaaccaaaccggatatctacgacaagacctgggacggccgcaatgacaacggtgatctggttgccgataccaaaggaaaatacacctttgaggtaaaagccaccatgaagggtgaagagctcccgaaaagcggcgtcgtcagactgaaatacgcgaaagtgaatggcgtgacaccgggagcggatgcaccgctgctggatgtgggcataggcaacagcgtgctgctgtctgaaatctttaaagtgtatccgtcaaattaa

SEQ ID NO: 285075 - DNA, 291 bp, Morganella morganii
gtgacaactattgcgccggatgtggattttccgaagtggaacggcaaaaagtgggtaacggataagtcagcgaaaaaagaaagcgacatcgcaacagcagaaacccaaaagcaatacctgatagccgaagtcaccaccgaaacagaaatgctccgggcgaaactagcgcttggccgtataacagatgatgaaaaggtgctgttaatcgcctggatggattatctggacgaactggaaatggtagatacattacaggcaccggatattaaattgccttcaaaaccagtttaa

SEQ ID NO: 285076 - DNA, 186 bp, Morganella morganii
atgattagtgataccggcacgctgccggaaaccgccatccgcatggcgtccctgcaaccggcacaactgctggggatcaccgcgacacacggcagtatctcggcgggaaaacgggcgcatttcaataacctgaacagtgactggcgggtaacacaaacctggatccacggacaaccggtacgctga

SEQ ID NO: 285077 - DNA, 780 bp, Morganella morganii
atggaaatcagtctgttacaagctatcgctctcgggctggtagcctttattgccggattggatctgtttaacgggctcacccacattcaccgtccggtggtgctggggccggtggttggtctgatcctcggtgatctcaataccgggatcctgaccggcgggacactggagctggtctggatgggactcgcgccgctggccggtgcccaaccgccgaacgtgattatcggtaccattgtcgggactgcctttgctatctccaccggggtcaaaccggaagtggcggtcggtgttgcagtgccgtttgccgtggcagtgcagatggggatcaccttcctgttctcggtcatgtccggtgtgatgtcgcgctgtgacaaaatggctgccaatgccgatacccgggggattgagcgcatcaactaccttgccctgctggcgctcggtacgttctattttctctgtgccttcctgccgatctatttcggggcggatcacgccaaaaccctgattgatgtactccctgcccgcttaattgacggactgggtgtcgcgggcggcattatgcctgccatcgggtttgccgttctgctgaaaatcatgatgaaaaatgcctacattccttattttattctgggatttgtcggcgccgcctggcttcagctgccggttctggcaatcgccgccgccgcactggcgatggcaatgatcgatttcgtccgcaaaccggcagaaagcgaaccggcacaaccgtcacacgaggaatttgaagatggcatctga

SEQ ID NO: 285078 - DNA, 957 bp, Morganella morganii
atgaatacattattcggtaaggtattactggcagcggtaatgactttcgcaatccacaataatgtgcttgcggagaatacaccgaaaccgccggtaacagcacaggtgaatgaggcggattttcagcatcactatacggatgtggcggggcagcggatacattatgtgacggcgggaaaaggcgaaccggtgttgctgatccccggctggccgcagacctggtacacatggcgttatgtgatgacagggctggcagcacagggatatatggcgatagcggtggatccgccgggaaccggtttttctgcccggccggacagtggctatgataccggtgcggtggccacaacgttacataccatgatgaatcagctgggttataaaacctattcggtagttggtcatgatatcgggatgtgggtcggttatgcgctggccagtgactatccggcagatattaaaaaaatcgtcctgaccgaggctgttattccgggtctggcaccggctccgggtatttttgttgatccggaggagaatattttcctctggcactttatgtttaatcaggttcaggatttaccggaaacgctgaccgccggtaaagagcgggagtatctgaattttatttttgaccactgggcgtaccgccgtgaccgcgttgccgcacagacgtatatcgatgcctattcctctccgggcggactgcgtgccgggtttgcctattaccgggctattccgcagaccatcgcgcagaataagcggcgggcagagaaaaaactgactatgccggttctggccatcggtgctgatcacgcgacccgtgatgccccgcagctgacaatgcagggaagagcggtgaatttgcagggcgcgatactcagtgaatgcggtcattttgtgacggaagagtgtcctgaacaactgatggatgtagtactgccgtttttacgccaataa

SEQ ID NO: 285079 - DNA, 540 bp, Morganella morganii
atgaccacaattaattactattttgacgacaatcacccgctgcgcccatatttcggcgatgactatgcaaacaaagactcctttgcccctgtcaatgcgttgcgcgtcgcacctgaatttaaggttgggtttcatccgtgcgagcagaatggcgcctggattcttattcctgaccaccgtggcgaaaaagtgtatgacacggcaaccgctcaggagtcagagattaaagaactcggcgaactgccggacggagtgaccactattgcgccggatgtggattttccgaaatggaacggcaaaaaatgggtgaccgataaagcggcgaaaaaggaaagtgatatcgcggcggcagaggcgcagaagcaatacctgctatcagaggccgctgaagcaatagctccgttacaggatgctgtcgatctggatatggcgacaccggaagaagaagtgctgctgaaggcgtggaaaaaataccgtgtactgcttaaccgcgttgatacctcaaccaccccagatatcacctggccggtgaagccttaa

SEQ ID NO: 285080 - DNA, 2082 bp, Morganella morganii
atgattgtcgagcagatgaaatacaagctctccgtggaaacggggggctttcttgatgctacccggaagataaaaaacgaaacggaggacatgaagaccaaggttaagcgcaataccggcgaagtcacaaaaggctttggtgagcttaatctgggtattcagaaattcagtaccgaagggaagaacgcatttaccagtgtaatgagcggtgcggctaaattccttggtgtggccgtcactctggaaggtgcaagacgtgcatttgtcagcacaacggattccctgattacgctgggtacacaggcggcgtggctggggatgaacgcaaagcatctggatgcctttaatcgcgcagctgagtctgtcggatcatcaagagaggctgttggttctgcacttggtcgcatgaatgagtgggacatctggagtaaaaccaacgtagggccagctccggcatatctggctgcaatgtaccagctgcaaagtgagtctgcagtaaacatcatgaacgggaagaatgctgaggagaaaacgctcagggcattcgaggcaataaaaagcctcaaaaatgaatcccgcgcgcagcagctttatacatctgcattgggcctgagtgatccggcactgtttcaggctattcgcagcggtgaataccagaaagcatttgaggagtataaggggaagtctctgtacactcccgaaatggaagcccaggcgaagcaggttaaaaaactcatgaccgacctgaatgccgaagcaaataacttcatgaataccatgtacctgaactttgctccaagcgtaatgactggtcttagatcattgagctcatggataaatgaaaacaaagatggggttattgggtttttcaaagaatttaaagatgtggcaatagagttggtcgatgctctgggcgggatggataaggttcttgcgatacttgttgcttataaagtgggcggcccggcggcagcggcggcagttgcctacggtattgccgctgataatgccgacaagaatgaccagacatataacttaggctcaggactcaatcgtggcggaatgtcatcaccagtggttgctaaaaatacaccggggatgtttatgcacccacttaagcacggcactgaaagagaggccatctctccggaacaactgaaaagatatgaaagtatgttttctgttgaggatagagccttaatggataaagttggtaatttttccaaggagcaacagcaggccctgataaaggacggtgccgacaatttcctaaatatagacaagattctcgatgaaaagaaaaaatccgacaatgctcagcaccgaagggatgttttatttggtgataccgccgcaggtgaggcgggagaaaaagcaaagggggggagtgatactgattccatcggcggacggttgggttctggtagaaagctaaaaagtggtgagacgtataaatacgaaaccggtgagtattacgacgcgaacggcaacatcgttaaccctgtagaaacagattccggaacaatatccatggatcgcctgctggacgcggttgctttccgtgagtcgcgcggcaatccgtcggctaaaaacccacactcaacggcaacgggagcatggcaatttgttgaagggacggccagagataacggattaaccgtaaaccactccgcaggaattgatgaccgcctggaccctgaaaaggccagagctgcagctgatattctgatgcgtaaacttctgaagcaatacaacggtaacgttgctgatgcgctgtttgcgtatgcaggcggcggcgggggggtgaacagagttttgcgcggagatgcaggtgggttgaacaacgagtcggtggagtctgtttataagctggctgaatacttcgacggaattaatttcgaggcatcaaaggttcaccagactttacaggttaccggtcagacccagcctcagccacagttttatgtcaacaacatggaaataaacagccagcctgaatctgttgatgctctctcaaactccatccaagagcaagcatcccgcgccggaatgaatgtctcattcgatacaatggggaggtga

SEQ ID NO: 285081 - DNA, 483 bp, Morganella morganii
atggcggctaaaaagaaaatgggccgcccctcggactacttaccagaggtggcggacgacatatgcgcattgctcgctaatggtgagagtctgagaaaaatatgcaatcgccagggtatgcctgggaaagcaacggtattcagatggcttcgtgaagaggctgactttcgagaccagtacgcacgcgcacgcgaggagcaggcagaggctttgctcgaagaggttcttgaaatagccgatgactgcgtgccggatgcggctgagattgccaaggcaaaactgcgcgtagacacccgcaagtggtacatcaccaaagtggcaccgaagaaatacggcgacaagatcaccacagagctgaccggtaaagacggcggtcctattcagtattcagatatcaccgatgaagagcttgaggaaaggttaaaggagttggggcatggcaggaacaagtcgcagctcaatgagaaacttgcagactcttga

SEQ ID NO: 285082 - DNA, 177 bp, Morganella morganii
atggaatggattaagtgctcggaagaattaccgctggctggcaagagagtccttatcacaacaacacacggtaatgttgttgaggctacccggtacaagggctgtgagttcaaccgtttcgggcaaaagtgcaaagcaacccattggatgccactaccacaaccaccggaggagtga

SEQ ID NO: 285083 - DNA, 684 bp, Morganella morganii
atgaacaaaaaaactactgcgccacaattattaaaaactctctttatggcttcttttttattttctgctggatgctcaataacccctcccaatagcgaagatgagcaatttgctaaaatgggtgcagaaaaattcaagttagcaagtggtaactcagaaagcgttacgaccctcaggaagaaatatttagactattacggcagtgaactgacaaaaccggagaccctgtcatgtcgctgggattctaaatgttatttcaagaaatggctgattaattacaataatggcataggggaaatgaaagccaaggaatcggcaaacaagagaaagaaacaacaagaagaacgagccatacgcagggaagagtgtctgaaaaatccagagtgtgttcgtagtgaaaaaatagactcagccgcgcaacagttaaatatggggtataacgtccttcagggtatgtaccaatatgacaagggtggtgctgacgcattggcaaggatggtttgcagagaggcaggaaaggcgcagagagatagaataagcaaagggaacatcaatgaatgggttaactctctggatggcattccgccttatgttaggccatacgttgtccgggtggctgaatcatgctgggatttaagttcactgggtattccaaacggaacggttaaattacagcgttattaa

SEQ ID NO: 285084 - DNA, 696 bp, Morganella morganii
atgccgaatcatgtaacaaacgtagtggaagcaagtcctgaagttattaaggcaatgctgaatgcagatggattggttgatttcgaattaataattccgcgccacccagatttaactctgccggggatgggaatttataccgaggcagaaagcgcggcaaagttgatgtgcaaggaaagggttcctgatcatgagttgatggcaaggatggaaatggtctgtcgcctgagagcgtccgcccttgaaatgactgatgagcaatttgagcagtttgtccagatgatgcggaataagcgcaaccacgggttttacaacagcatggaattcgccagaggtggctggggaacgaaatggaatgcatacgggcagagcgcagaaagccacaccgaaacaacggttgagtttgaaaccgcctggtcacatccactaccggtaattaccaccctgtcaaagcgttttccggaagaaaaaataattgtcaaatacgcagacgaggacaccggaagcaattgcggacgatacaccatgcagaacggtgagtttgtcgagcaggatattgctccttcttggcgcgaccaatctgacagcgacaaaagaaagtggactgagtttgctttcaaattatgcaacccagacacagacccgaaagagtatgggtataacgaaaattgggaatatgtcgaaggtgaagactaa

SEQ ID NO: 285085 - DNA, 1140 bp, Morganella morganii
atgggacacccggcacatattatttcggtatctgacattccggaaaaaataaaagaaataaaatccgcataccaaaaatatatcgattcattcagaattccggacgaccacaaaatagtggttaatttttctgccggtaaagacagcacagcaactctcgctattgcgcacgccatgttcggagacagagttaaagccgttatggctgataccgataatgagcatgaactgacaatagcattcggcaaatcaatacatgagcaaatcgggtgttcacccgttcagatagtgaagaaagtttactccgaggatgactttgccaggaggcgttcatatcttcagaaaaactggcctaagcgtcaggccatacgcatgggtgcgtatcgtggtgttgtgatgccatctcttgaccgttcagacacgaaattcggtcaggcgtggctgcgcactgctgagcgctggggcgttgaatttaacactccgcttgaagcagccctttctgttatgcacccaagcggaaatagcttcttagacgcagcgcttcttcacggaaaatttccgatgctgcgtgacagattttgcactgatgaactgaaaatcaaaattgcttttgatgaagccatgaagcccatgctggatgacggagatgttgtcgttcagtggtctggtgtaagagcagacgaatcatccaaacgcgccgggtatgaaaggttttcaaaagaccagcgcgaccccagttttctctacaactttttgcccatacaccaatggacggccgctgatgtttttgcgcttcataagtatttcggcatcaaaccaaacccactttataagcaaggtgcggcacgggtcggatgcatgaactgcgtgctgtgcacaaaagacgaaatagctgaaacagcggctcgctggcctgaacatatagagaaacaccgacagtgggagaagctggtgcgcctagcgtcacgttgggtccactggatgagcgttggcactgaaagccaggcgtggatgaaaagacataatctcccactcggtcgctcagtgcagctatacggattagagcctgacgttcagcggattgaatggtctgggttttacggacccagggggggggatgggctcaccgtctgttcctga

SEQ ID NO: 285086 - DNA, 186 bp, Morganella morganii
atgaaactatcagtacaacaaatgactgcattaaaagaagtgtataacggaaaattcaggccaaaatcatcagcaagaacggtgaactcattggcgagtaaagggctgattaaatttgcagttggttttgggtgggttatgtcatctgctggtgttgatgtaattaagcagattcaggaggggtga

SEQ ID NO: 285087 - DNA, 291 bp, Morganella morganii
atggatatatcacgacagcagtttgaggaatacattaaattgcataccgacccggaagagctggaacagaaattaaaaaagtcgaataacggattaaattacgatgaccgggatgtagatttaatgtggattgtctggcaggcatcacgcgaaagcttaactgttgaattgcctttatctcagcacgtaagagcctatgactattacacggacggctataacagcggcgttgattactgcgaagttatattggaatctgcgggaataaaagcaataagaaccgaccaataa

SEQ ID NO: 285088 - DNA, 225 bp, Morganella morganii
atgaaaaaagttgaagcaattgctgcgctgatattaattgacggcgtaacttatcagatggcactaccgaagcaaattatagccatgtacgcaaaacatgcgcttggtgtgtgtgaggcattcgaaggtaaattaattccatgtgactttgccagtattaaaccaatggatgctgacgggatgccatttaatataaacgacagtggagcggagaatgaaagctga

SEQ ID NO: 285089 - DNA, 540 bp, Morganella morganii
atgaaagctgattacggcgggagcacaacaccaaaggaattgcgtgatttgtggcaaactcccctcccgttattttcagcactggacgctgaattcggattttaccttgatgccgccgccgataaaaataataccctctgctctcattatctcaccgaaaaagacaacgcattaaactcagactggcaaagctacggttctatatggtgcaacccgccgtatagcgacatacagccgtgggtacgcaaagctgccgaacagtgtggggagcaactgcagccggtcgtgatgctggttccggcagatacatccgtgggatggtttaaatcggcactggataccgttgatgaggtcaggtttattaccggtggccggatatcgtttattaacgccggcacaaacaaaccggtgaacggaaacaacaaaggttctatgcttttaatctggcgaccattcacccagccacgccggataattaccacagttaaccgtgatgacctgatggatatcggcaaccggttactggaagcacaaatctga

SEQ ID NO: 285090 - DNA, 654 bp, Morganella morganii
atgataataataaatccactggagaaagatcgtttttttaaagataaccttcccgtagatttcttatgtcatggttggatacctcgtaataaattatttttcttattgaaaggaaatgactcatgggttaaatccatcagcaataatattaagctaaccaaaaaattagtaacatcacttcctaataataatgattctttatataataaatcttatagtttaaaaaataaatttgcaaattttttagctaaaaatatatatcataattacttttggtttgaacattggcatcatcctcaagcatataaaaaagatactctttcttttgtttataaaacgtttgaaaaacaactactaaattgctcaaaaaataaatttagaacaaacagtgatcttactcaatatgtatatcgttatacacatttattaaagaatgagttttttccttgcaaacataatgatggtttaattaaaaacatttcgtccctagatgatttagaaacaattgcttcagaaataaatagtggggaatataattttctttgcctcaatgattcacctaaaatcggtgacaatgacttcccaataataaaaaatgcaatgaatacattgttagataatatgttgcctaataaatcatcctttgaaatctaa

SEQ ID NO: 285091 - DNA, 285 bp, Morganella morganii
atgctccgtattgatgttattttcagcagcaaccaaaaagagatgatgccaccaggcatgtttgaggcgttggaaaaggaaattgaccgaaaatttcgggctcagtatcaggatatgaacgttcgtattgcgtgggggaccaatgcggcaatgtcagtaacaggtgggaaaaacgataaggataataaaaaaataaaagagatactgcaggagatttttgaggatggcagttgggtgcctgaaacggcagacgcttctgatgatgtagaatattttgatatgtaa

SEQ ID NO: 285092 - DNA, 519 bp, Morganella morganii
atgaaaaaattaacagtatccataggcagtctgggtagcgcggctgccggtgattatgtgagctttaatatctggcagggtaaacgactgctggtcagtgacaagattgcaggtaaacattccggtacattccatcgtgagtatgaggtggattatacccagggtgagccactgcgcattgagagtaatgcaccggtgggttgttctgtttgtgtccatacggaactgggtgatggactattgcattcgcgtgatgccgctggtgtattgaatgcagtatctacagatatttataaattgatagcaaaaagatttgtatttcatcatcccaacggtgagccagtatcagcgacggggcgtctcggtggagatggcaatacattagaacaacgtgttgccgatctggaagaaaggctgaccaccaagcaacaagaagccagcctttgtcatgaaattgaaaacaagatttactcagtttcagtgaatacgaaatgtactatttcttatcagcaagactaa

SEQ ID NO: 285093 - DNA, 912 bp, Morganella morganii
atgacggcttttaatgttaaaagcatgtgcatatatcgcatgtcacgtagtatggatttatccagcctgagtgagcaactggagcactttaaatattcaccttgtggctctcaggatttaatgaaaaccggctttattccgccactcggaaagcattctgatgaaattcagcatgtcgcagcaggccagcaccttatctctattatgaaagagaataagattcttccgtcagcagtaataaaatcagagttacaggcaaaaatagacaagctggagtccgagcaacatcggagacttaaaaaaacagaacgtgattctttgcgtgacgaagttgtacattctctgctgcctcgggcattcagtaaatatttaagaacggatatatggattaaccaggaagaaagcttaatcatcgttctgacagcaagccgccgtcatgcggaagattgcctggctttactgcgtaaagcacttggctcactgcctgtgataccttttgcgacgaaagaactaccagaaatggtaatgactgattgggttaaaaatgacgagctcccaaacggttttatttttggcgaaaaagctgaattaaaatcactgcttggtgaaggtggtattgccagattttctaatcaggatcttatttcagatgatgtattaagtaatattgattctgggaaaatgataacaaagttatcacttaattatgatgaccggattcaatttataattaccgatgattttgtatttactggtatcaagttttcagatgatatcttagataaaaatgatgatatcgatcgtgaggatttcgcacagcgatttgatgctgatttcttcttaattacatccgaacttaagaaattaataaccaccacagcatccgcttttggtggcgaagcaaaattataa

SEQ ID NO: 285094 - DNA, 489 bp, Morganella morganii
atgcatatcaaccaaatagagttagtaactgctattgcagctgaaatacagcgacaaaaaaataacgccgtaactctggaacccagatatttcaataccatcatcaaagccgcaaacatggtttgtgaggaatttaaaaagccaatcgtccgagcaagtcacggcatgggtctcaagagatggatgtcatcagacgacacaggcctcagcagcctctacatggcttctgttctatctgacgggggtttcactgccgagtttgcgttcccgtgggacccatctgattttgggcgctgcattcgtttaattgaagcggttcctgaaatggccggatttatcagcaaaatgcagtctcacggcccggaatggactgcaatagtagccaactgggaagagtggaaaaaattataccacgatgaaaatggcgaagagctataccggcagatgaaagacgcatatgcaaaatacagagccgcagaggaaaaataa

SEQ ID NO: 285095 - DNA, 636 bp, Morganella morganii
atgtcaaataaagatactcagtttactcagcatgaagttccggatggttactggcgtgacgcaaaaggctgcctgattccggtcgatatgatcaaggatattgaccgtgcccgggataccgttgtcggagatattgtcacccgttcagatgagcttcaggcagcacttaaagtctttaaaaattatgcgtttgatgaagttgatgctttccgcgccttatcgtcggagcagtacggtgtggatatgggcggcaaaaaaggcaacattcagttgcacacctttgacggggagcaccgtgttcaggtggctattcaggaacgtattgcgtttgacgagcggttgcaggcagccaaagcactgattgatgagtgtattaaagattggtcagtaggtgcccgccctgaaattctcgcgattatcgaggatgcgtttaaggtggatgttgctggtaatatccgcactggtgatgtgcttaaactgcgtcgtctgaatatcactgatgaaaaatggttgcgggccatgacggctatcagtgagtctactcaggttatcagcagttgccgttatgtccgtatctacaagcgggacggcagcggtaaatatgtacagatttcattagatatcgcgggggtgtga

SEQ ID NO: 285096 - DNA, 597 bp, Morganella morganii
atgaacagcattgtgatccgttatggctttatcgttgtgactgcgctgcttaccggttacgggattggtaacgcgctgactgagaactcaatgcagaagctgattgataaagaggaaatccggcgtcaggcggcagaaagcacactcagtgatatgaagctggcgctgtcagagcaatatgccgaatcactgaaaaagattgtttatcagcagcaggaacaggcgaaacagaatgcagaactgtcagaaaaattcaggaacaccctcagtaccctgtcaaccaccacgcgccgtattgagcgcagtattccggccgctgttgccgctgatggtgacggctggaatggccttggtgacagcgggctgcaactctaccgcgaagccctcggttacggtgaatccggcagtgatagtgtcatcctgtccgctcccgccgccggaactgctgtaccttccgccccggccacagccgccggagtcaggcgcaccgccggtgctgctgaaacacgcggcgctgttcggggaatgggtgcagacactggaaaacaagctgctggcgctgcaggaatgggcagcgaagcaaaggcagaacaatga

SEQ ID NO: 285097 - DNA, 354 bp, Morganella morganii
atgtttatagcaggattgtctaccggttttattattattcttgttggtatatggaaatattataattctgaaaataaaacaggagaaataatcagccgttgtgtcgttatcgccggtattctggttcttgtcatagtcagtgttatggatttaacaaagaacaaaggaaaccctcatcaggaaaatatcggtaagtattacattgaagaatgtcagcctctggtattatccggcggggatacttacggtaaaattaatattattaactgtaatgaaaccatcctgcaggttgatgcggcagagtatgacgccgccgtccgtgcttaccggaaatcagtacagacacagaattaa

SEQ ID NO: 285098 - DNA, 360 bp, Morganella morganii
atgaaatttagaaacgaaaaaaccacgatactgactgacagagaaataaggacaaaccgtgcctttgacaacttcattatttacctgacggccgccgttgtcgtctggtttttactgaatgcgttgttttattttgtctggtcgcccggtgatattccggttccggaaaatgagctgcggctgaaagacatgctgaatgtgctgatgtacgtcataccgctgacatttgccggattagccgccggtaatgtggccgtgattttgcttaacgatattctcactccgctggcagaaatcacagtatacggtctgtccgttctgttccgtaaaatcacccgccgggggaaaagtcatgaataa

SEQ ID NO: 285099 - DNA, 384 bp, Morganella morganii
atgacactgcctgccggttattaccgtattgacccggaaatccgcgctctggttgccgccatgaacacccggggattccggacatatgcgtcgtgtcaggggcacggttttccgcgtatccggttactgccttatgtggcgtttatctgtcctgcgaaacaggctgcgcgtctggaacagcgtctgcggcaggattctgagtctgaaacaccccgtttatcctggggatggtcagtcagaggggcttttaacagcgactttcagctctgtttccggctgcagcccgaagccccccgcaactggtatcagtggtactgccgccgttcattacatgcggatttcagggggcttgtaccgttactgaaatcgttacctgaacggtaa

SEQ ID NO: 285100 - DNA, 219 bp, Morganella morganii
atgtcatctcagttaaaaagctgtatcgattgtggtaaggcattaagccgaaccgccataacctgcgggaattgcagttcggcagacccttttggcaaaaaaagacgcaatgaccgtatttatcagtggatttccggactgcttatcacagccgcactcattgcaggcgggttatggtacacagggtttattgatgtgccggggttaccgttcaggtaa

SEQ ID NO: 285101 - DNA, 234 bp, Morganella morganii
atgaaagaaaatataaatgtttttatcagacacctgaatattaatggtttcagaagactgagcaatcattgtttaacacagtctgttcccggtgtttccttatttaccggcaataacaatcattacccggccggttctgtgtttgcacatcagctgcaggcgcgttttcagcagaattaccggtttaacattgtctcaccggaaccgaaggggagtaacggcaatggcggttga

SEQ ID NO: 285102 - DNA, 774 bp, Morganella morganii
atggaaagtgataaacataatttacttttttcacggatagttgagcaggcacttccgggattttcagataaattatcagcaagaaaaaatgaaaaatcggttattacccgtctgaagcagggaaaaaaagggctgatggctgactatcccggactcggatatccggatgctgaaatattgcataatcgtctggcagttgcagttcatactgtggcccgtaaacaacgggaattacgtcagctcagtgagtttcgttcaccgcgcgaagaaaaaggactgaaagcattaacccggcaattaacttacgaagatcaattctcgccaaactgggcggaaaatactttaccggatgcgatagattcaggccacggcgctgttgcttatctttatgacctgcttacatttgtggaaagaatgattgaaccgaagggagacagtgataaagcgattacactcaaacagcgcagaccggatatttataatattttactgaatgaagagaatgtaaacggaagtatttccaaaattcagattattaatcaaatcatgagtactgcaataagtcagcaggaaaatagtgaagatcctgagaaactgatgctgaatgcacgctatccttaccagtttccgtttgaaaactatatgaatcagatttatgccgtactggatgaatatgacctatctataggtgatattaaacggcattgcgatcccgaggcgccttatttcacacagccggttttgcacggaaagcgttcagattctgctctctag

SEQ ID NO: 285103 - DNA, 1275 bp, Morganella morganii
  misc_feature (1243)..(1252): n is a, c, g, or t
ttgctggccggaccacaaatacaaaatagtaagaaagaagataatgagaaatattttaagagaaactttggtgttgaacagtttacggatttactgaataccacggttttctgtcagcaattaaaacttgagcgtgtggatctggaatcattgttttcctgtggtgaatatacaccacatttatccccgaatgttataccggaaataagtaacagatatgcggataaggagccggggcgtgaggtatctccggctgtttacggttcggtatttattaataatggtgtaatgcctgctattagtgttaatgaaaaaatacacagtttcaatgaactgaatgaaggaagatgcgaacgcattgaacgttttctgcgtctgtcgagggcacttaatcttccttatgaaaaacttgataccttattgatatctattttaaaagctgaaaataaccagagcggtcacaaatgggatattactacaaataccctgagagctattggcttgttcacgcaaatgaacagaaaactaaaatgtacagccagtcagttttctgttttatatgatggtatttcggtttacagccggggaaaagatatcagtgattttgaccggttatttaataatgatgaccgctttaattaccgttttattcttgatgacaaaaaaatggaagaacgggatattaaccgtatctgtagtgtttttggtattaactacgatactttttcttatctggcactcctgacccgtgaagttatgggactgaatgtattaacccgcagccgggatgttatttctgcaatttatcgtcctgtggttttggctgacctgctgaaaataaaacccctggaattactcgcattaatgaaatcaatgaatcctgatgctcagtttggccgtttatttacagggataccggaaaaccaggtgtacggatcattcggacaggcggatattaccagtgcaatcagtgcactaatcagtcttcagacatggcggaaagagaataaactgtctgtagcacagatctttaattggatcacacctgcgattgtcgatgaccaggaagataaaactgagcgggaactgttccgccagattaaagaaaatacagacagtgcactattcagtaatgaagtcttgtatcttgccggtgtaccgaaggatataaactgggtttcggcattacaggaactggtcgatgaccagggaattctgaaggatgctgatgatggtctcgacnnnnnnnnnncagttataaaaaaaatgcattaa

SEQ ID NO: 285104 - DNA, 804 bp, Morganella morganii
atgaataaaacaatcctcaaatgggcgggttcaaaagtcggtattttggaacagctgcgcccgtacctgccaaaaacaaaacgcctcgttgaaccgttcgccggttcctgtgctgtgatgatgaatactgactatgagcagtatttaattgcagatgtgaatcctgatttaattaatctgtataacactattaagaatgcagatgaaaatttatttattcgcaatgctcaatatatgtttttggatgcgaacgaaaaagggcaatatcttggtgcgagagatatttttaataaaaatgacacgtcaacatttgtctgtgcaatcttatttctatacctaaatcgacattgttttaacgggctttgccgatacagtaaaaagactggctttaatgtgccttttggcgattataaaagtacatattttccagagaatgaaataagaacatttgccgctaagtcacaacaggccattatccaatgccttgcatggcaggatactttatccttggtcgatttcggcgacggtgtgtattgcgatccgccatacatgggagccaatttcacgcaatatcatactgacggttttaccgatgcagataatgaggcgctggcctttgccctgaaagatttgaatgatattcagggcaacccggtcacagtgtcaaactcgctggatgcaaaagagctttatgcggatttaggcttcaccatccacgaaatagaggcgccgcgtaccattgctggcaacggtaaccggaagaaagcatctgaaattattgctgtgctgggcggttgccaatga

SEQ ID NO: 285105 - DNA, 321 bp, Morganella morganii
atgctgtggcgttacagcagtcatgtcccgtcgaagcattttaagatggtgcggtattacggctttctggccaaccggaaacggggcgttttattgccgaaagtgtatgcggctctcggtatggcgatgaaagaaaagccgccgaaaccgggctttgcgtcgctgatgaaacaatttacccgcgttgacccgtaccagtgcgtgctgtgtggcggcaggatggtgtttaacagcgcggaagcgggtatcagggcagaaagattgctggagatgcggcgtcaggaatttaagaaacaacgatggctgcggcaggcagcatag

SEQ ID NO: 285106 - DNA, 846 bp, Morganella morganii
atgtatattccccgacccgcaaaactcctctttcagattgatgacggctggaatcgccttctcatcaatcgcggtcatactatccccgaatggaccaaactggtcattgagcgcatgctcgcctgcggcaccggtgccatggggatacgccgttattgctgtgagtctgctcactgcacccacaccaaatatttctgtcagagctgcaaaagtaaaggctgcagtgcctgcggcatgaaagccaccgagcaatggatagcagagcagcaacacatcctgcctgactgcgaatggcagcacatcacctttaccatgcccgataaactctggccggcgtttaatcttaactggccgttactcaatcagttgtttgcctgtgccgccaataccctgctgaagtgggcagaaaaaatgggcattgaaattggattgtttgtcgccctgcacacttacggacgccagcttaaccagcatccgcatatccatttatcagtcacccgtggcgggttatgccgcaaacacggcgtctggcgctcagttttctttaaaaagaaggtggttgagcgttactggcgtcaggctgtcattgccctgcttcgtcagcactatgcggcgctggaaaattcactttgcgaagaagaccaaacacgtccggcagaatgtcaattatctggggcgttacctgaaacgtccgccggtagccgcgtcaaagctgcggcattacaacgggggtactgttgttcacccttattacgaccaccggacggggcagcacaaaacgcagcatctgagccaggaagagatgctgtggcgttacagcagtcatgtcccgtcgaagcattttaa

SEQ ID NO: 285107 - DNA, 321 bp, Morganella morganii
atggccagacctaagataccacgtaaaatctgtggccgccctgctgatagttgttttaagcccaatgctcgacctatgagtcaattggagcaggtatatttgaaagatgatgaatttgaagccttgcgattagtcgatttacttggcatgcagcagcaagaggctgctatagaaatgggcgtttcccggcagacacttgccaatgtcctgaaagccgcccgcttcaaggttgttgactgtttgactcagggcaaagcgctcatgatgcaccccgagaatgaaggaggttcaaaagatgataaccgctattccaatgaatga

SEQ ID NO: 285108 - DNA, 444 bp, Morganella morganii
atgataaccgctattccaatgaatgatgatcggatcgcaaaccattttaccaaggctaattacctggtatttctggatgagcgaggcattgaaattaaccgggctgataatccggccgtggtggcaaattgtgccgggaagcaaaaaatggttgacctgttggcagagcaacaagttgatcgggtcgttgttcgcaatatcggcgaacggatgttgaataaattgttgacgcagcagtttgccgtgtttcaaaccaacaatggtcgtcgctctgcccaagaattagttgatccgcgtaccagtggcctggtgcaattgcatcaggctaatcagggtcggcaatcgcttaatcataaaacgaagaaaaaatctggcggttgttgctgccataatccggatgaggaacacttatgctcttgctgccatgttgctaacagattttaa

SEQ ID NO: 285109 - DNA, 984 bp, Morganella morganii
atgaatccgaatgaaatcttaaatgaatcagcctcggttacacccagaatttcatattttccggtttcttttttttctgtaattatgggattgtctggttttacattggcatggaaaggtgccggtgatttatttttccataattcggtaatatggctgagtctggcttatgtaacttcagtggggatggctgtcatttctattatttatgctatcaagatatggcgctatccgggagctgttcttgaggaaatcagacatccggtccgtataaatttcttcccggcattttctatcagtctgttgttattgtccgtagtctggcaacagaaaatgatggttgcatcaaccttgtggggaacaggtaccgccttacaaattgcacttaccttgtatgtgatgagcagctggatacaccatactcattacagattatcacatgctaacccaagttggtttattcctgtggtaggcaatattattgttcccattaccggcagccaattaggttataccgagctgagctggttttgctttagtgtcgggatcgttttttggatcatattaatgacaattatcatgtaccggctgttctttcatgagcctttaccagcccgcatgacaccgatgttgtttattcttttggcgccaccctctgtaggatttatttcctatatcagcatggtgtctgacttagacatttttgcgcggattatttactacatggcgttattcctaggcttattgcttgcgctgaatatatttaaatttctcaaaataccattttttatctcttcatgggcgtattcctttcctttggctgctttaactattgcaacaatgaaaatggcaaacatgacatcatatctgtttttgcaggtattatcgaccgtgctgttgtgtttattgactgttttattgtcttggttagtaattcgtaccataaaagcagtgtttgctgctgaattgtgccggcctgaataa

SEQ ID NO: 285110 - DNA, 477 bp, Morganella morganii
atggtctcttatctcaatgctaaactaagtcatgaccagtgcatggtttgtggctcacgtgaaaacaatcctgactccccggaactcgttttttcgcaatacccggatggctcagtccgggctccttttgtggtgagtctgaaacatcagggatataccggacttctgcatggcggtatgatcagcactttacttgatgctgctatgactcactgtttgttcatgcaggggataaaagcgcttacggcggagttaaccgttcgattcatagctccggttagtgttggtcaaactattacgatctgtgccagtttgctcaggcaacggcgtggtgtctatgaactcgaagcatggttgctatctgaattgtatattgcagaagaccggcctctggctcgtgcttctgctaaatttattgtcccctccgatgagaatactgtcaaaatccagattaccgggatgaaacatagtttctga

SEQ ID NO: 285111 - DNA, 1134 bp, Morganella morganii
gtggtacttgatctatttggatttataaaaaaaataatgacagagaaagccctggcttgtgcatatggtttgatgagcaccattgtattgattgggtatcaatcaactacaaatgccgcgccaattattgttcaaaatgggcgtggattagtgggggtgattgaggaaaatttttcaattgcacctatgatggcggtaacagctatgaatgaagaatcaaaacctaatgtttcgtatgttcatttgcaagcgtatccaaatagttcaaattgcggagcattgcaaagtgaattgatgactattgatggtataaaaggattaaaatttaatgccgaaggcacattaatgctcgttcctgaaataacgtttatagatagtcgatcttgggatgctggaaaaaataatgatattattactggtatttttaatgggtatggttcgaataccaatgaaaatttgggatacgatcctggctgcatatggaatcctcttcaatcaacaccgacaacaggtttcatctctcataatgttagtgcaaagggacgtgttctcatctatggaacgggccaacaaactttatctcaagcgtctgggaatttaaaatatccttttcaaatcactgtaataagtccagcacatggagtttcagaccaaaaaattatcgttcctgctgggggatatattgtcatggtaagtgatttagggtgtaccttgactactcctacggtgattgattttggtccgcaaccggcaaatgcaactaatggtcagctattaaccacaaaatcagacagcaatttaacggttaactgccagcagaataccaatcccatgtctgccacactctcggtatcggcaggaattaatccgatttatttttccggcgacagctatcaggttaatttacttgacggcgaaaacaaaccgggcgcctatgtgaccatgagtcttaatattaacggaactccaacaaatattcctttcaatcgcacgcctgtggatattggcagcatcagcagcagtaattcggatgcgtcgtttagctatccgattacctacagtttatattcccgggggacaggctcaaccggtaaaattaaagggagcgcggagttatcggtcattttacgttaa

SEQ ID NO: 285112 - DNA, 2673 bp, Morganella morganii
atgaatcagcaccgttttgcggataatataatatcacgcgtcagacggagtccgttattatccgttatatcttaccggacagcactgcagcatctcactgtcagtacctgtgtactgacactgtctttgcccgttttttccgcactcagtgctgaaaattattttgacccggccttactgaacctgccggcaggagccgacccggcactgattgatctgtcagcattcagtcagccgggtaagatccccgccggacgttacgtcgtgtctctgtcagtaaaccgggaagatacgggacagcgtgaaatagaatttacggcagaccggcagggaaatgtcactccggatataacaccggcgctgcttggtgagtccggtgttaatattgcggtggttccgcagctgaaagcgctggccccggatacaaagattgaggatttgccggcagttatcccgggggcccgggtggaatttgatatggcaacattacggctgaacctcagtattccccaggttgccatgcggcctgactaccggggctatatcgaccctgctctgctggatcaggggatcaccgcattattactgaactatcagataaatgccggccgtcagtggttccgcgggaataatattaccggtaaaagtcagaacaacaatgaattcgcaaacctgaacggcggtatcaatcttggtgtctggcggctccgcagtacatttacctacagtaactcagaaacaacgattgccggccgggtaacccgtgccgttaataccaatttttcaaatacctacataatgagggacctgcagaaatggggagctgaattactggcaggagaaagcagtaccggtaataccgtttttgacagtatcccttttaaggggatcaaaatagcaacaaacgaacaaatgctgccggccagtttacggggattcgctcccgatatccggggtacagcacagtcaaatgcccgaatcacaatccggcagaacggtaatgttatttaccagacgtatgtggctcccggccccttcaatattaatgatttatattctaccggttctgccggtgacctcgatgtgactattaccgaagaggacggtacaacccggacattcacacagtcattttcaggtctgccggtcatgctgcgtcccggcggaatgaaatatgaaatcacagccggccgttacaacggcgggattaccgccggctcaaaagccgcggattttgtgcaggcaaccctgatttacggactgccgcattcagtgacattgtacggaggtgtcctgggagcgaaacaatataataccgttatggccggtgccggggtatcactgggacaattcggggcattttctgccgatatcacacattcatcggctcagttacctgacgtcaccgccaaaggacagtcttaccggctgcgttattcaaaaaacctgctggaaacaggaacatctgttgatttgacagcactgcgttattccaccgaagattattacagctttgccgactttaaccaggcgggataccagctgaaaaatgatgttgccccctggctggcagcacggcggcgcagcagttttcagacatacattaatcagtctctcggagatatgggcagcatatatttacagggaacccgtgatgattactggggaacggaacagacggttacctcactgggagccggttacagtaacagtttcaggggcgtgaactacaacctgaattacagtataagccgcactcaggggaatgataactggccggagaatcgtcagattgccctgagtgtcagtataccgttcagtattttcagccatcagccgttactgcaggatattcagagcagttttcagattacccgggacaaccacggacgaacttaccagcaggcagggcttaacggaaggttgtctgatgataagctatcctggcagctgacagaaagcggggataatcagtctcagcagagcagtaccctgaatctgggttaccagggagaacgcggctatctgggcggcggttacagttacggcaacgattacagtgcggttaacctgagtgccagcggtggtgttgttttgcaccggggaggtctgacactgagccggtatatgggcagttcagtggccgttattgaagctccggacgcggcaggtgccacgttaaacggaggaagtgcgactttcggtaccggggggtatgccgtggttccttatctgactgattacagcaggaatacagtcagtctggatattaataccctgccggataatgtgaccagtcaggaaacttctgtgaatctttatccgacaaagggagcagtggtaaaagcagactttaaaacccggaagggttatcaggcgctgattacgttacagaacgatacaaccattccgttcggggcggtggcagccgttaccggtgaagcggggaaaaatgacatacagacggaacagaataccggaattgtgggagataacggacaggtgtacctgtcaggattaccggaaacagggtatctggacgtgcaatgggggacggcggtgaaccagcggtgccgtgctgattttgatttaacgaaggcgccggaaagttcttacaccgcaatatgccagttaacggtagtctgtcatacaatcacagaaacgtcacattaa

SEQ ID NO: 285113 - DNA, 765 bp, Morganella morganii
atgttaatacagaacgggcaactgagccggatttctttcttcctgctgcttgtcagtgtgtttaccggtgcggcggcagacggcggattacgcttttcaacggcccgtattatttaccagcagagtgaaaaaggggggagctatgctgaactggaaaatgattccggcgccccccgccttattcagagctgggtcactccggctgacaccggcaccggactgccggtaacagagcggtccgttcacggggaaccgccttttatgatcacgccgccgcttacacgtttagcgcccggtgaacgttaccggtggcgtattcagcgggtgagtgacggacagttaccggcggacagagagtcggttttttacgttgccctaaaagtcattcccgccacggataatcagggagaaacagccggtgagtttgttctgagtccggttatttatctcaaaatgctgtaccggccaccggctcttgacggtataagcactgacggaactgccggtcagatgcactttgagcgcaggggagatattctgattgcccgcaatcccacaccattatcagtgacgtttgcctcattacaggctggaacccatgtgataccggatgcggaattaagcaaaatggttcctccttttggtgagcagcactacacactgccgcacagcacacgcggtgacatcatctggcgggtgctgaatgaatatggattggccaccaaagccggacaggcagcaccggtggccggggagttaccatga

SEQ ID NO: 285114 - DNA, 753 bp, Morganella morganii
atgtataccataacgcaagttccggcaaaatggctgttactcagcagccttattgttgtggtgaacaccggtgttccggtttccgtatcagcacagggactgagtctggatcagagccggattatctttactgccggtcagccgcaccgggttgtcacggctgataatgacagcggtacactgtatctcatccaggctgatgtgcgcgaaaccgcaccggacggtgcggtttcggaacagtggtttgtgacgccgcctttattccggctgtcaccacacagccgccagtcagtgaaaatcctgccgcagaagggaaccgaccagcttccggcagatcgtgagtccctgttttatttcagtgcaacagcacttccgtccattccggggcctgcatcagaagccgggcctgccgcacggatatcgctgggcacccggctggtgattaaaatgttttaccgccccggagacttaccggttacttatgagcaggccgccgccggcgtcacgtttacgcggtcttcgggtaccctgtgtatcagtaatccgtcaccatattacctgacgttcagtgaactgacctctgaggggcatcacctgacgtttccgcccggtttcatgctggcccccttcagccgggcgccagtaaaaatatcgttaacgcttaatcagatacactggcgtaccctgaatgactacggtggtaataccccccggtttcagagtaccgtccgggagggaggtgaaaaatgttaa

SEQ ID NO: 285115 - DNA, 540 bp, Morganella morganii
atgacccggaaaattttaccgggattgggcatcctctgcggcagcctgttcccgttgtctctgcctgccggcagtaactcggtgacagttcagtttgaggcatcattgtataaccgtacgtgcaaagtcagtgttccctctcttatcgaatacggcaatgtacaggccgcaaccgtggtccagaatgatgcgggaactacggacagccttaaccgggatatcgtactgacgctcacagagtgcagcggcacaggtactctggcaaacagccatgtggtcgtctccggccctgttgtgacagtcagggaacactctctgtttaaagaaagcggcagcgcgcaaggggtgggtattaaactgttgtccgacggggaggccagaacaaatggtgatgttgtgtggctgctgaacggacagaataacacaaatgatacacataccctgactgccgccctgtcctgcggcggctgcacagcggccggtgacattatgccaggggatattcgtgcagtaatgacctttactgttatgacttattaa

SEQ ID NO: 285116 - DNA, 732 bp, Morganella morganii
atgcggtttatgacaatttccgtttctcttttaaccggctttctgctgttattttccggtatttccggagtatccgcagccggtgtgggcattaatacaacccgggttgttatccaccagggcagtccggcagtatcagtaacgctgcgcaacagcacggaaaataacacttatctggtgcagtcctatatcactaacgatgaggattcacggcaaccggataactctccgtttgatgtcctgccgcctgtttttcagctggcccccggcagtcagggagacgtgagattagcggagaaagccggttctgtcgcccggcttcctgcggacagagagtcagttttctggtttcatgccagggcaatcccccgtaatgaccgcaaaccagcacaagagtatgctgaaaatcacggcgctgtcaaaattgcgcttgaaaatgtaatcaaggtattttaccgcccggcaaacttaccaatgacagctgaacaggctcaggcaggactccggttcgcgatcgtagctgaaggtctcagtgttactaatccttcaccctatcatgtcactctggccggtgtaaccgtagccagccagccggtcaaactgtcccggcaggatgccatgttagcccctttcagtgagcatacatatcagacacgggtaaaaacaggcgaagtatcatggacgaccattaatgacctcgggggatataatacccatcatgcccagttataa

SEQ ID NO: 285117 - DNA, 552 bp, Morganella morganii
atgtctttaaataaaacattgttgaccctgtcttttgctgcagctggactgatgacattcagttcagtacaggctgcaactaatgcccaggtcaccattacaggtcagattgcagcagcaacctgtgatttaagtgtcacaaaaagtaatgttgatttaggaacttacgtttctgctgatataacagcaaacgacgttatcgccggcagcagtaaagattttacattaaatttaaccaactgcagtgcggcatatgacagtactgacgcggatgccgttcctgtcagtctgtatgcaacaggaactgctttggcggcgaataacaattacttcaataatattgatggtggtacggtaggggttaaactcactgccgatagtggtgctgttgaggtaaaaccgaatgttgccgcagagatcggatctctcaccgcattaactgccggaggaagtgccacgatcccgatgacggcagcgctcttttcaacagtagcaacaccatcttcacaagtgattgaggcaccgatcacattctccgttgcctataactaa

SEQ ID NO: 285118 - DNA, 1185 bp, Morganella morganii
atgattaaccttaaccttcctttttctttagatgaatataagcagaggctaagaaaaaccagagtatcaatgcaaaataaaaacattgatgttttaattgtaacagatccatctaacatggcatggttgactgggtatgatgggtggtctttttatgttcaccaatgtgttattatttcaatagacgaagatcctatatggtttggtcggggtcaggatgctaacggagcaaaacgcaccgtttacatgagtcacgaaaatattattggatatccagataattatgttcaatctacagagcgacatccaatggagtttttagtaaaaaacatttttactgaaaaaaaatgggataaaaaaaatattggtgttgaattagataattattactttagcgcaaaagcattcttgactttaaaagaaaaactccctaaatgtaattttattgatgccacagctctagttaattggcagcgagcagttaagtcacaaaaagaaatagaatatattcaggctgcaggtaatatagttgaaaaaatgcatagtactatttttgaaaaaatagaaccaggaatgcgaaaatgtgatttagttgctgatatttatcacgccggaattaaaggaacgagtgattttggtggtgattacccagcaattgtaccacttttaccttctgactctgatgctagtgctccacacttaacatgggatgactctcctataaaaaacaactcaagtacattttttgaaatatctggttgttatcgtaggtaccattgccctatgtcaaggacaatatttttaggaaagcctcctgcatattttttagatgctgaaaaagcagtactagaaggaactgaaaaagcattagacatagcaaaaccaggagtaacaactggtgaattagctgatgcatatttaaacacactaaaaaaatatggaattgaatccggaaacaggtgcggttatccaataggaataagctatcctcctgactggggtgaaagaactatgagcattcgtagtgaagacaaatctattcttgaaccaggaatgacatttcattttatgactggtctttggatggatgactgggggcttgaaataactgacagcattttaattacagatactggagttaaaacattttgtaactacccaagacggttatttattaaggattaa

SEQ ID NO: 285119 - DNA, 1005 bp, Morganella morganii
atggcatcattaataccagaaagccctatatcaagtaatattgactttgataaagatggagttcaatacggttttttaaatcttccttattctcgtgatgattcagcgtggggggctgtaatgatccccattgccgtcattaaaaacggcaatggcaaaacggcactattgaccggaggtaatcatggtgatgaatatgaagggccagttgctttatcaaagctagcaaaaaatattaatgttaatgacgtaaaaggtagagttatcattgttccatatatgaatgcaccagctttttatgctggaagaagaacatcaccaatagacaatgggaatcttaatcgaagctttcctggtagaccaaacggaacagttactgaaaaaatagctgattatttttatcgttatttattaccaatggctgatgttgttattgacattcactcaggaggaaagacattagactttttgccatttgcagcaagtcatattttagatgataaaatccaacaagaaaaaacagaagaattagttaaagtattttccgctccttactctttacgtatgttagaaatagactcagttggtatgtatgataccgctgtggaaaatttaggtaaattatttataacaacagagttaggtggtggtggaacaagcacttcaaaaagtgtagctattgcagaaaaaggaattactaatgttttaaagaaaacagagatattacagggcgaattatatttatctaattcaattttattagaccaatctgatgatagttgtttttgctccagtgaaagcaatggtttattagagatgtgctttgacttaggagatattgtaaaaaaaggagatgttgttgctcgtgtgtatgacacttttaatctaagctcaaatcctgttgaatacagagctagaaaagatggaatagttaccgcaagatactttccaggtttagttaaagtcggtgataccattattgtaattagtgatattgtaaaataa

SEQ ID NO: 285120 - DNA, 1173 bp, Morganella morganii
atgaaaataaatactgcggtaattcatgcggaacaaaaattagatccttcttttggttgtcacgtaagccctctttatcaatcatcaacatttgtacttcctaattttgatgaggccgtaaggttaaaccaaaatattgatcagggatttgtttatagtagatttggaaatccaacagtagatgaatttgaaagaaaagttgcatacctcgaaaacgcagaggctgctcttggagtcgcttctggattaggcgcaataacaacagctgtaatgtctttagttaaatctggcgaccatatcatttttggtgatgtaatttatggatgttcctttgctttatttactaaaattctttctaatttcggagttgaatatagtattgttgatacaactaatgttaatgctatagaaaaagaaataaaaccaaatacaaaagttgtttatgtagaaacgccagcaaatcctatccttaaaataacagatataaaagcagtatcaaatgtcattaaaaaatttaataatgtgaagctagtagtagatagcacattcgcatctccatacttacaaaacccattagatttaggtgctgatatagtagttcatagtgcaacaaaatatcttaacggctctggtagtgttacagctggagttattgcaagtagcaaagaaataattgatcgatgtagaactccttttttacagtgttttggagctgttttagatccattcgcagcatggacaataactcaaaatatgaaaacattagcagtcagaatgcaacgacactgcgaaaatgcaatgaaagtggcagaatacctaaacaatcaccctaaagtagataaggtatattatccaggactacctgagcatccaacacatgaaacagcaaaaaagcaaatgcgtggatttggaggaatgatgagtgtagacattaagggggggataaactcagttcgaacagtaatgaacaatgttaaagtgtttagtctagccacgagccttgggaacgtagattcattaattcaacactccccaacaatgagtcattttgatatgaccgaagaagagcgaaatgcagtaagtatttttgaagggcaaattagattatcaattggaattgaagattcaagcgatttaattcaagacttagagcaagctctagatttaatttag

SEQ ID NO: 285121 - DNA, 939 bp, Morganella morganii
atgaaaattcatacttttttagggtgggctgcagcccttgctgtttctgtaatatgggcggtaactggtgcagtatcaaaacctcttgcaatggcagttgacccaatgacattggttttttttagatacataactgctaccattggtcttttaattatattttctctaacctataaaattaaatctataaataaagagcttgggaactcattatttattgacaaaaaagatatattgaaattgtctttttgtggcattattggtcagggttttttttcattttttaattttctttctttggatcacattggtgtcacggagaatatcgttgtacaaggaatgtttccttttgcaacaattatatttggcatgttgtttatgtcatttagaatgaataaaattcaatgggtggcttttgtaatatcagcgatatgtgtttatgctgtaagtgcagggccaacaaatataattaaaggtggagaacaatggaaaggatttatttatgttactatttcaatgctatctgttgcttggacatcttaccttagagcaagcttagctgataaatatggttctgttgtttctatgttttatcaatatatagctgtttctgtatcaggggtaatagttgtatttgctttagggttagatttatctcaaataaaaattatattttcaagccctcttttgttatcattgcttgtttttttaggtatgggcatatctggtggtagttatcttatccaactatattcttttaaacaaattgggattgaaaactcaacaatgttgattaacttaatgcctttagttggttatattgtatctataattgcatttaatgaacatatgactatgcataaaaatatacttatttctattatatgtgttagtttgtttttctttactaaatactcgacaacacctaatgaaaaataa

SEQ ID NO: 285122 - DNA, 252 bp, Morganella morganii
atgaaaaacgaaaaacaagcaaaatggctcacagacagagtgcattatatccgtggtttaaaatcagcgaatgagcaacaaggtttattggtgatattgcacgataaagcggataaaaccgcccaagaaataaagacgctctcattgttaattcaggctgagaaacgagcagaagctaaagccgcccgtaaagcacgtgaccatgccctttatcaatcagcgggattactcattatggggggtaacgggtaa

SEQ ID NO: 285123 - DNA, 297 bp, Morganella morganii
atgtcagaattagtcgtattcaaggccaatgaacttgtcattagtcgttacgatctcactgaacacgaaactaaactcattttattttgtgtagcaaaacttaaccctacaatagaaaccccaaatgaagaacaaagaactatcacgttttcatgtgctgaatatgctcaaataatggatcttagctatgagaatgcatgggggagattaaactctgctacaagtgatttatttaaacgctctgttgggggtcagtttggatatcgaaaattattgtacgttaaggctattttttga

SEQ ID NO: 285124 - DNA, 981 bp, Morganella morganii
atgcaaactaaacgaaagacgataggcagaacactgagtgctgtattacctgcatatcctgcatcagagaacggtcatgctcagcgttttatgctcaaatcaggaaaatcagctgtttttcattttgagaacattcccgcggatgaggtcggagagcgtacatttgtccgtttttcggttaacgggcgtgatcagaacgcattaaccccggagtcgctggctgatatcctgcggactatcaagctgcaacagtttttccctgccatcggttatcgtaacggcgacaaaattgaaattcttgacggttcaagaagacgtgctgcagcactgctatgccatgtcggactgaacattctggtgacagaaacagaaataagtaatgatgatgcaaggcagcttgctgcggatatacagaccgcgaaagaacataatctccgcgaaacaggattacggcttttgcagttacgtgaaaaaggcatgtcacagaaagaaattgcgttatcagaacagctatcagcagcaaaagtgaccagggctattcaggctgcgtctgtacctgatgatcttgtctcgctttttcctgttcagtcagaattagcccataatgattacaggcaactgttacttattgataaaataatacggtcagagaatttatcacgtgaaacgattttggctgccctgcatgagaaaattcttgaatttattgattccgggcaggttgccgcggatgaactgaaaaatctcattttatccggcctgaaagatatcacggataggcaggtattaaatataaaatcagacacaccaagtattctcccgctgaaaacatttgatgataaaaatacgtatgccagaaaaaggatcagaggcaggggattcagttacgaatttaaccgtattcccagacagttacaggatgaactggataaaggtatacagtcgattttatcgcagtattattcgcagaaaaataactag

SEQ ID NO: 285125 - DNA, 1218 bp, Morganella morganii
gtggttaatgtgaatggacagtttgataaaattgcagcgcgttctatgcgacttttgctgtcattaacgacacaggtacagacacagaaggaagagcttaatgaaacatcatattatcaggtttactcaaaagccgcagtggccaaactgccccggctgacccgtgccggggttgattccgcagtgagtgaaatggaaagccagggatatgaatttgaaaaacgtgaagcgggaaccgcgctgaaatatgccatgaatattcagaatattatcgatatttatcatcacagaaatgttccgaaataccgtgatcggtatcatgaggcattcacgttttttatcggtaatttaaaaggcggcgtctccaaaacagtgagtacggtttcgctggcacacggactgagaacgcatcctcatctgatttctgaggatctcaggattctggtaattgacctggatccgcagtcttcggcaacgatgtttctggatcacaagcagtctgtcggttctgttgaaacaacggcggctcaggcaatgctgcagaatgtgaccagagaagagctgctgaatgaatttattctgccttctgttgtacagggggttgatgtgatgccggcctcgattgaggatgcttttattgcgtcacaatgggaaatattatgcgctgaacatttgccggaacataatatttatactgtgctgcgtgaaaacatcattgaaaaactgaagcaggattatgatttcatttttattgacagcgggcctcatcttgatgcttttctttcgaatgcgattgcagctgctgatattttaatgacgccgataccgcctgctcaggtcgactttcactctacaatgaagtatctgacaagactgcctgaactaatcggtatgattgaatcaaccggtgcccgggtgaatctgataagtaatatcggttttatgtccaaacttgtaaataaaacagatcataagctgtgccacagcctagccaaagaaatctttggcggcgatatgctggatgttgcattaccccgcctggatggatttgaacggtgcggcgaatcttttgatactgtcatttcagctaatcctgcaacatatgtaggaagtgcggaagcgctgaaaagtgccaagtcagctgctgaggatttttccaaagctgtttttgatcgtattgaatttcttcgcctgaaccggggttattatgcaaactaa

SEQ ID NO: 285126 - DNA, 765 bp, Morganella morganii
atgatattatcaatattcggtacttttgatgttattatcataaccaaggtgaactatatgtccggtttttttccgtctgatccggaaacaggaaaatcagtaatccggcgccgctcacaggcattgttatctgagggttaccttgagcgtgcccggcaactgcgcagcctggcggttgcggcagaattagattgcccgaaatatttgctggcgccggaagtcaatcagttattacaatttatgccggatctgcatcagcgtacattagttgacacgttgtggaataccggtgcccgtattcatgaagcgcttgcattaacgaaaggtgatttttatcttgatgaggagacaccgtttgtggtgctgaagacactcaaacaacgtgcggatgtcaggcagaaaggcagactgaaaagagctgtgccgctttttgatgccggctttgttcagatgatgaaaagttattttgttacgatgcgttttaaaaatcagactcagatctggcctgttcaaagcgataatactgtccgcaactggctgcgtgcagcacttcataatgccgggtctgaaggggtttcatttgctgtcagtccggttacctgtcacacatttcggcatagttttgcgatgcaccttatttttcacggggttccccttaaggttattcaggcttatctggggcataaaaaatcaagttcaacggatatttatacaaaaatattcacgctggatgctatgttgcattttgatatttctttccgttag

SEQ ID NO: 285127 - DNA, 252 bp, Morganella morganii
atgccaaacatcattctgagtgacacaagcgccagtgtcagtgaactcaagaaaaacccaatggcgaccgtcggtgccggggacggatttcctgttgcaattctgaaccgtaatcagcccgctttttactgcgttccggcagctttgtacgaaaagatgcttgatgcactggacgatcaggaactgataaatctggtaaccgaacgcagcaaccagcggctgcttgacgtggatctggatagctacctgtga

SEQ ID NO: 285128 - DNA, 288 bp, Morganella morganii
gtgacttactcagtcaaattcagagaggatgcgctgaaagagtggcaaaaattggataaagcaatacagcagcagtttgccaaaaaattaaaaaaatgctgtgacaaccctcatattccgtcagcgaaacttcggggaatgaaagactgctacaaaataaaacttcgttcgtctggttttcgcctggtttatcaggtgattgatgcccagttaattatcgctgttgtagctgttggtaaacgggagcgtagtgatatttataatcttgcaagcgaaagaatgagataa

SEQ ID NO: 285129 - DNA, 633 bp, Morganella morganii
ttgggaggtaaaggcaacgataagctatatggcagtgaggggtctgatctgcttgatggtggggaaggaaatgatgtactgaagggtgggtatggtgatgatatctatcgctatctttcaggttatgggcatcatattattgaagatgaaggtggtaaaaatgataagctaagtttagctgacattgatttccgagatgttaccttcagacaggaaggtgatgaccttgtcatgtataaagcagagaataatgtagtttcgtttggtcataaaaatggtattacttttaaaaactggtttaaacaaacatcaaatgaaatttcaaatcataaaatagagcagattattgataagaaagggagagtcattaccccggactcactaaaaaaagcacttgaataccaaagcaaaaataatcatttaaactatgtggatggacataatgcagcaacctatgaaaatgaaaataatcttaatttattaagaaatgatattagtaaaataatttcagcagctggcagctttgatatcagggatacaagacctgctgatatttcatcattactgacttctcatggtatcagtaatttttcttatagcaacagtgcactgactgtaacctcattagtgtaa

SEQ ID NO: 285130 - DNA, 438 bp, Morganella morganii
atgcgtgatattcgccaggtgttagaacggtggggggcttgggttgttgataatcaggaatcagtatattggtcaccaattgctgccgggtttaaagggctgatccctgaaaaagttaagagtcggcaatcatgcagtgatgatgatgctctggtgatatccggcattatggcaaaactgaacatccgcaacagcgatatgcatgatctgctttttgattactatgttttcggtaagacgtttattcagttggccaagaaatacgggtgctcagacactcacatagggaaaaaactccagaaggcagaagggctggtggaaggaatgctcataatgggagatgtaaaactggaaatggacggtacatcacatcatggaggtatgcggacatttatgaacaaattacatgatttaaaaattaatactttacgatcgtaa

SEQ ID NO: 285131 - DNA, 213 bp, Morganella morganii
atgtctaatacaatgactggttcagtaaagtggtttaacgaatcgaaaggttttggcttcatctctccggcagatggtagcaaagatgtgtttgttcacttctctgcgattcagagtgacagcttcaaaacattatttgaaggtcagaatgttaccttcaatattgaagacggggcaaaaggtccgtctgcatcaaatgtggtgggtctctaa

SEQ ID NO: 285132 - DNA, 1128 bp, Morganella morganii
atgttaacagaaaaaatccatgagtatatacttgatgaacaaaatccatattttattgatttatcgactgtaactttaattaatcataaaaaacaagataaagtatgggaaaaaacattctataacttatctaaaaatatcaatgacgagtggattaaagcatgtagacctatagtaggaatagaaagccataggcaatcagctgctaaatacctatataataaaaaaaaatttataagtaaagatgacattgtcataacaaatgggtgctcccaagcaataatgctttcgatttcatccgttgcatcttatggcgatactgttttatgcgaaatgattactgataattcaattgtaactttatctcaattaattggctttaacattaaaggagttgaaatagacgataaaggaataatccctgaaagctttgaagagttatgtagtgatattaacattacggctttaatttgcactccaaacatgaataaccctactggttcaataatgccggaggagagaagagcaaaaatagctgaaatagcaacacgctataatgtttatgttatagagaatgatgtttttggttttttaataagaaacgaatcacttccatctatatcatcatatataccaaacttatctttttattgtacaagcctaacaaaagtattattaacaacgctaaggatagggtatttgatccctccatcatctctcctacctaaagtaacaaaatttttaagaagttctacttggatggcatcacctatcttaagcgagatagcatcaaagctaataaataatggagatgcatataagctaatagccttacaaaaaaaattaataaaaaaaagacaatccctggtttataaacatcttaataaatatttacttggtgacttcagtagctcattaagttgttggataaaaatacctgaccaatgggaaactaaatcattattagcctcacttaaagaaaaaaatatttttgtttcttcatcaactccattttgtatcaatgaagttgatgtaagggcaataagaatatgtataggtataaaatgtactgattattattttgaggaagttataaaaaccatattaaaaacattaactcaaaaatag

SEQ ID NO: 285133 - DNA, 369 bp, Morganella morganii
atgtggtcgtttatcggtaataaaaaacgccagcgctggttgtggtacgcctgggaaccacgattaaaacggattatcgcccatattttcggttccagaagcaagaaaacgctttgtacgctgttgaagctgttgtcgggattgaatgtgtctttttggtgtacagatggttacagggcttacaacggcacactccctgcggcaaaacatatcgttggcaagctttatacaccgcatattgagcgagaaaacctgacgttacgtaaccgactgaaacgtctgaatcgtaagacgctggggtattcaaaatcccccgaaatgcacgacaagatcatcggtactttcattgaacgcgaatattacgcctaa

SEQ ID NO: 285134 - DNA, 123 bp, Morganella morganii
atgaaagagcaaatcgttgacctcgcaatgaataatgccggtattcgtgacactgcacgagccttacatatcagcattaatgccgttgtgcgcactttaaaaaacgctcgccgcggaatgtaa

SEQ ID NO: 285135 - DNA, 756 bp, Morganella morganii
gtgcttaacgtacaaaaatttccgttctccaaactgacccctgttgaactgatttatcctagtggagatgtagctaaaagaatttttaactgggctgattatgcagaatttaatcgtaaaaatcagactgttactcttatttttagtaaatatatagttcctttattatttcatttaaaaaaattcataaaatataatttggagcacgtaaaagcctttgaaaataaatactccatgcgagtttatgagtggcttttaaaagaaattagtcaacgtaaaacaaataaggcaaacatcgagatcagccttaaagaatttaagtttatgttgatgttggaaaatagctatcctgaatttaagtttttaaatataagagttttaaaaccaatatccaaagatctaaacacctacagcaacatgaagctgactattgaaaagcgcggtcgtcctgctgacgcgctgatctttcaagttgaactagataaacaaattgaccttgtgactgagttagcaaaagatccagtatcaaaaaaagaagatgaggtaatccgtttaacgcctgaaaatcgtcttcatgagggactaaaaacaacattgcatgatgctttaactgcaaaaattcagcttaccggctttgaagctaaatttctgagtgacatgcagagtaaatatgatctaaacggctcgttctcatggctcactcaaaaacaacgtattacgctagagaaaattttagctaaatacgggcggatctga

SEQ ID NO: 285136 - DNA, 438 bp, Morganella morganii
atgtttacttatcccgtgaaggtggaaaaagatgcggagaccggtgtatatattgtgtccagccgcgatttgccgctgatgaactcagtaggcgatgatttggaagatgcgctttttgaatccgtttccggtctggttacagctatttcaattgagattgatgaacgccgtccggttccggcaggctctgctccggagaaaggcgaatacttagtgaccgttcctgttttggttgcgcttaaagcttcgctgcataatgcaatgattgaaacagggacacgaaaagccgatttagcccggaaaatggggaaaaatccgcagcaaatagaccggttactggatgcgatgcattcatcaaaggttgaatctgtggaacaggcgttatatctgctgaacagaactgtagcggtcaatgttatgcaccagaccggccattaa

SEQ ID NO: 285137 - DNA, 783 bp, Morganella morganii
  misc_feature (732)..(741): n is a, c, g, or t
atggcaggcatagcatcgttaggcgtcggcgcaaatatggaccttaatcagcaaatggacatgctggaaaaagcagaaatgcgccgtctggagccgttaactgcccaaaaaacagcgtgtgaagcacagattagtgctttcggaaagttacagtcttcactggaaaaattaaaatccgcctctgaagcactgaaaaaatacggtgatatcagtaccaccaaagtcagtgaagaaaataaatactttggtgtgtccaccacaggtaaagcacagccgggtcagtatgatgtcagcatcgagcgactggctaaaaaccagaccttatccggaaaaggtgttgctgacggtaagacatcaatgggtaacagcaacgctgaacgaactgtttccattaaaatcggtgacggcagtgatgcgaaaaagaattttgatataaaactgagcagcgataaaacatcgccgattgaagtcgctgatgccataaataaagcggataaaggcgtctctgctagtgtggtaaaagataaacagggtgaataccacctggtgttaatcagtaaaacccaggggaccaattctgctatcagtatttctgttaccggcgatgatgatctggataaagccatcggcggaaaatcagaaaaacaaaccgacggtaccgttaaatttatcagtaacggcggcatgaagcagacgaccgcaccggaaaacgcactgttcactgtaaatggnnnnnnnnnntgctttttttggtctgacactgacactgaaaaaaaccactga

SEQ ID NO: 285138 - DNA, 288 bp, Morganella morganii
atgacagcaataaacccaatcagatactttttcatcattattacccactttaaccgatatatacttggttatatatcgattgatttcatgggtcaactgtttccggtggtattacagcaccggaatgcgatattctgcatgccagtaaatgccccggaaaccaaaaatctgccgggacataaaaatcagcaacaaaccgataaatatcatgatgatcacaacaaagattggataaaggtacaaaatgaaaatttaatatatgggcttcggaataacgaaacatgctaa

SEQ ID NO: 285139 - DNA, 819 bp, Morganella morganii
atgaatatgtcattaggtgatggtttggaattttctactgctcgtatagaggctaattctggttctgttgggacggggttctttttgtttttccgtatggatgaggatatttctattcctgtacttgttacaaataaacacgtagtagagggagctagcgaaattagattccaaatatctggtaccgggaatggcttggatagagctgctattcttgttgataatgtgcaagaacgttttatctttcatcctgatgaggatgtggatttatgtgcatttcctattgccccagttttgaaacaactgagagaaagagggtttgaatttaatatatttccttttcatgaggatattatatttacaaataaaaataataaattaggaactatttctgcaatacaggaaatacatatgactggctaccctaatggtctttgggatgaggtgaataataaacctattactagaaaaggtgttacagctagcaatccaaaactttggtggcaaggtaaaaatagatttatgattgatatggcttgtttcccagggtcaagtggctcgcctgtatatatatataaggaaggtgcgcacatagatggtgacagcattgcattaggaaataggcttgtattgttaggtattttatttgcagggccacagctcactgcaaatggtgatatacagatagttgaggtgccgacagattacaaatatatggtatcgactaatttaatgatgaatttaggtattgtaattaaagcagatgagctatttataatcaaaaaaatgataatagattctgaaccgtatcataagtaa

SEQ ID NO: 285140 - DNA, 273 bp, Morganella morganii
atgtcgcgaccagtcgaattaatagcagatatcacggatgagtatatcgacaggcattttgaagggacgaactacgggcacaccaactatcgggacatcgttggtaaaggatgcctgaatgctatggccggatatcacaacggatataccacgcagttaatactgagaaatatggggctgacaacggagaggttgcggctgacgaaacgtggccgtgaattcctgttctggcattttaactatcagcccgtttatgggcgaaagattgattag

SEQ ID NO: 285141 - DNA, 576 bp, Morganella morganii
atgagcgagataccatcactggcaacagacaaagatattgtaaacatggttacagcacttataggggggctttgtttggttattggtggcgcaattggattttttactaaatatttttatgaaagtaaaaaaattaaggaaaacaaaaaagcactccgtcagcaaatgataacaaataatatagccccaatgaggcaagagtggattaacacactaagaacatcatcatctgagtattttactgatatcaatctgattgttatatatcaaaatagtaaagatgaaaaattcagagatgaatttagatcacaatatactagtgctgttcttaattatcagtttaaatactcaaatttagacctgatgcttcctttcaaaagagaagggaatgatgaaaatgaagcggagaaagtaagaaaaaaactagaagagcttgataattactttagagttgataaggataaaaggccatcaccaaaaataataaaatcaaaaataaaagaatgtcgcgagttattaaaaacccttctaaagaaagaatgggatgaaacaaaatctctaaaagagatagattaa

SEQ ID NO: 285142 - DNA, 180 bp, Morganella morganii
gtgactaattggtattatgtagccctagaaaaacatgatgaccctatcgaaattgaagcaacgattaaaaaccgattcagggtaaaggttccgtcatgggatatggatgtgacaacacaagacctcattgctattaaaaataagatagaggagatattacgtgatgaacaaatatcgtga

SEQ ID NO: 285143 - DNA, 333 bp, Morganella morganii
atgaacaaatatcgtgacaaatcagactttgagattagtttgtgcgtagctcagattattttcaatgactctgaatatgacgtaattaaacaatcaatggaagttgttaaatttcagaatggaaacggcaaaggtatctgccatgttttcgacccctgcaacaacccggcggatgcaatgccgattattaacgagtatggtattagtctcatatatcaagagggagaattccagtttgcaactaatgacggaaattattattccggcgttagtaatccattaaaggctgcaatggttattttcctgatgataaaggatgcggaggatgagtaa

SEQ ID NO: 285144 - DNA, 297 bp, Morganella morganii
atgaaagcccgcaaacgccttgttcttatcattatgtccggcattatgctggtctccgtcctgtttatatccgggatcattctggccatggataaaacaccgtattacgatattgaccggaacgggaaatcattcgggcactccgtttttacattgtatgacggccgggtgtatgccgctgttccgtctgacgggtattttttaatccccggtgcggacccggacagtttcagattattgcctgacaataacaaccacaatggccggcaatttgcagccgataaatatcacgcctag

SEQ ID NO: 285145 - DNA, 417 bp, Morganella morganii
atgaaacttatcaatatcaacgatgatacaattctgacattgcctcttttcctggagcatgtccccgctgggtttccgtcaccggcggcggactatatcgaggagcgcataaacctgaacagtgaactgatccgacacccggaaagtacctatttactcagggttgaaggtagttcgatgatagatgcgaatatctttgacggtgatgtggttatcgtggacagtgcggtaactgcggcggaaggggatattgtgattgccagttttgacggtgagtttactgtcaaaaaattgcaactgtcaccggtacctatgctgatcccgatgaatccggattatcagcctatcgtaatcagtagtgagcaggatttacagattttcggtgtggtcacctatatcatccaccgagcgcagtga

SEQ ID NO: 285146 - DNA, 300 bp, Morganella morganii
atgacagatttttacatttcagcaatccgtatggataataaagggcagcatatcgagtgggtaaaaacccataaaaatattgataataaatctcttgatagtaaaggttctgttaactcaagaaagtttgttggtgagttgatcagttccggtaaaattacctttagaaccgtaatttggaaccaatccactaagaaatgggatattggcgctgtcgttgaagttatggccagcgggtatattacgactgacccaaacaaaactaaacttgacaacttgggaaatttgccctcgttctaa

SEQ ID NO: 285147 - DNA, 600 bp, Morganella morganii
atgattaagcctatgaaatattttagttatgggaaaattaggtctatcccaatcgtaggctctatttttcgtattgctaatgcttatgcattcaagggagagccacagtgtaataaaattatcgcaccatgggtatgttggtgggataggattttaaagaaactccttttggtttttatttttaccgttgttatgtctttttttgaagtttcatcaaagagcgtaatgccatggaatccagctgacacaatattaggtatatttccaagtattttaggttttggaataggcgtgtacgcgttaatgtttattatgcctagtgattttatgagttaccttagaagacgtaatgaagctggaaaaagcaaaataagtcatcgtattattccagtagatatgggatatcccttatctgtttttatcgttgtcctgtgtgtggcttctatctgtaaattgtttaatctgaatggaataacttatttcataagtctactttctttgttttatggattaagtatgttaattgaactaatgtcgtttttatttaattcttcagtaatgattcagtcaataagaagtgtggatagaaaaaaacaataa

SEQ ID NO: 285148 - DNA, 825 bp, Morganella morganii
atgggggatatgtacttctctgcatactcctcatcagcatactcgtacccatctgatggtgaagatcagtacttgattcacgggtattttctaaaattcgatgatgtcaatacattggttgacacggatagcgggaaaattagttataaatcagttggtaacactagtagtcgtagatttcaatttgaatatgtttttgatcctagcttacatatcttggcgattcaggataccaagggtttaccgacgagaaatgcacttattggtgcgctaaatgatgtttttgagtatcatgtgaacatattatttccaaaccatagcttggaaataatagaattaacgtcagcagaatcgatacgagatttctttttagtacccaagaaggggtatcagacatacaaaggagaggtaacattctcaaactcagatgatttcgattttgattcagaggatgaattaagggagctggcaagtgaactggaattagaattgaaagttaacgaagtacataaatgggaagcaaattataaaagttttaaagggcacttgatgagtgatcttcctaagaatgctaaggcacaattaattttagctgctaaatatggtaatgccgaagttagttataaagataataataatgaaatgcaaaaatataaaatggaaaagtatcctgttaaggagcggcttaatgaatcaaatatagctcaaggaataaaaaatagggctttgagtataaaaaatctaattgttcaggcaaataaaaaagccaaaaaggcattgacagcaattaatattaatagaaatatctttaataaagataaatga

SEQ ID NO: 285149 - DNA, 150 bp, Morganella morganii
atgagtagcatcctgagtacggaaattccagcgctttacagtaccggcgaagcccttacctttagatgtaccagtaacgtcaactttcttaacgtcagcgaaaatttcaacgctgatgttctggccaacagtaaactcttcaccttctga

SEQ ID NO: 285150 - DNA, 774 bp, Morganella morganii
ttggtgggtagttatgatgattactataacagttatataaggagagcggttgaagtaaccgatgatatagtcataagtgaaaataattttcattggttaagaaataacaaacatgctgtttattacctctgggcagaaatcgaccaacttaaattcattaaagattatggtaagagagcatcactgataaaaaacatcacagaaataaagaatgcattgaatattaattactcattatctggtgataatatcaataccgataccattaaatttattcttaatcttattgatatgaataatagccagaaagtggattttgttaacaacattaaatattatttcaataatacacgtaattctcttggtgaaatttcatggctatcccttgacaataagcacatttgtagttgggcatgggagtatataaaaaaatacaatcagaaagaacagcaggaatacggaaggagtgccgggatttactcagtttgctactttgacccacttaatgatgaagaaaaatactttgcaatacatgcatcactgagtacatggcattgccatcacagtgagaaaacattattccttaaaaatataacaaaagcgtataagcagagagaattcagagaaaaacgggaaaataaaaaaacactgagttgtattctggatacagatgttaaaactcatcttgaggaactggctgaaacctatgaaatgacgatcaccgatttggtgacccggttaattgagaacgagtacagaacaccgaaaaaataa

SEQ ID NO: 285151 - DNA, 657 bp, Morganella morganii
atgggtatggtctcatttgatgaaacatgtccgcattgcctgagagaaaatgcggttctaatggcttttgctgaaatccctaagggagagaatgatcatagttttgatgtggcatttacatgcagaagctgcggtggctcaggaatagcaaccgtgcgttcgctcaataaccttggcccactatattcagtaagaaactccgggactgatatgaccatcccccctggcatggggagatatgaactggtgaaaataatccccgaaataaaaatccatacagccccagataacacgccagaaagagctgctaaatttttcattgaatcaaaagacgattttcagcgtggtagatatgaaacctgtgttatgaattgcagaaaaattatcgatatagccactaaggtccttatgggggacgaagccggaagtgagccactatcaaaacgaatatccatgcttcacggtaaagggaaaatcaccgaacaaatgaaagattgggctcacattgtgagaattgacgccaacggtgctgttcattcagacgaagaattcaccaaagaagaagctgaacaaattttaggatttaccgaagtatttttgatgtactcattcaccctgccagcgatgattgagaaacgccgatctgactctgaataa

SEQ ID NO: 285152 - DNA, 318 bp, Morganella morganii
atgcggatggataatggtccgaagcttatatcactgacactggcgcactgggcagaagagcatggcgtgatactggaatttattaaacctggtaagccgactccaaacgcctttatcgagcgttttaaccggacagaccagactgaaatactggatttttatctgttccggacactgaatgaagtacggaaaatcacagaacgctggctgagggaatataatcgggagcgtccacatgaatctctgaataatctgacgccggaagaataccggttattagctgaaaataacgaaatctcaaaaagtgtgtggaactga

SEQ ID NO: 285153 - DNA, 354 bp, Morganella morganii
gtgtatttttacaaacccgatacccagcgggatgaaccggtgatacaggcgctgacagaggcggcagaacgttatccccgttacgggtttaaaaagctgtttcagattctgcgcaggcagggcaacgggtggaatcataagcacgttcaccggatctattgtctgctgaagctgaactttcgccgtaaaggcaaacaacgtttgtctgtgcgtaatccagcaccgctggcaacgccggaggcactgaatcagagctggtcggttgattttatgcatgatgcgttgatctgcggcaggcgtttccggacgttcaatatcgtggataattttaatcgtgaagccctggcgatataa

SEQ ID NO: 285154 - DNA, 396 bp, Morganella morganii
atgcgcaaagcccgatttactgaacatcagattatcgccgttctgaagtccgtcgaagccggacgaacagtcaaagatgtctgccgtgaggccggtatatccgaagccagctactataactggaaagccaaatacggcggaatggaagcgtctgatattaaaaaattaaaagatcttgaggaagaaaaccggcgtttaaaacagatggttactgacctgagtcttgagtgccgggcactgaaggatgttatcgaaaaaagctttaaaaacagcggtaaaacgggagcttgtcagctatcttatcgaacagtattcgatgagcatccgtcacgcctgccgggccttatcgctgagcagaacggtgtatttttacaaacccgatacccagcgggatga

SEQ ID NO: 285155 - DNA, 123 bp, Morganella morganii; identical to SEQ ID NO: 280051

SEQ ID NO: 285156 - DNA, 591 bp, Morganella morganii
atgcaaaacctttataccctgataacaatttccgataaggaaccaaaggaagaaataaccattccctccggaagatactgcatcaacagtacaattaaccatgacgacgacctgattaacctgaatctcacaggtgcagaaccactgcctgaaaaaacagaagcagagttatatgaaaacaactatcacgtctcttttaaaacctgtgatggtgaattagtaatacaagaaatcaattataacgccccctttatttttcaggggaaagtccttttcgccataaaaaaacaacaggataaatggcgtaaaaacatcatgttatatgaaaaaacgacaaagcgcgctgtcccgcgctatcttctgtctgtaatacttctgttatttatcataccggtaaccggatttatgctctttcagtacgatagcaataaaaatgggaatccggctaatatagatagcaaaaatattataagtcagtacattaaagacaataattacatcattaacggaaataacattcttattttatcctctgatgaaaaattaattaatagctgtctcttatacacatctccgagcccacgagactaa

SEQ ID NO: 285157 - DNA, 540 bp, Morganella morganii
atgaatattttcaaacacttcgtgtgggattacagttactacggagctcaaggtaaatatttggttgatgttcgaggtgctgacggcagggataataaaatagtaacaaacttagagccgtctcttattaattttaatacattttcaaatatttttgaatcaacaaagtcacatgaagtcaatgctgtcggacttagaagaatatgtaatatttcaaagaaaaatggaacttttgttattaacactgacgcatataagccatgtggagtaaataaaataaccaatgatacaaatgatgattacaatattattattgaatatgggcaaggcgtagagaattggaggccatacattttcacacaatcgttgacacaaaacagagggtggaggtactctctcattccattatataatcagtcaggctccttttctggaaaagcattctttaatattttaaacaacgaaaccaataatattattaaggtatcagaacttcctgatggcgttgagtttcacattgaaatagtgtgcactaactaa

SEQ ID NO: 285158 - DNA, 1830 bp, Morganella morganii
atggccgcagagaacagaacaaaatttattgttgatctggtcgggaatgtcacccagcgtgcccggcagttcggggccagtatccgcagtctcggtactgaaggcagccgctcaatgcggctgttttccggtgcggtgacgggtgccaacagcattctggataagtttgataacaaactggtcgggttcgtcaccggcggtggtctggcaatggccacaaagcgcgttgccgaacatcagcaggcaatggttgagctggggacacaatacaacctgactgcagatcaggtgaacgcactggatgaacaaatagcaaaagtagcaggacgccgtaaattatcgtcttctgaccttacacaagcggcaaatgcgtttttgctgcaaacaaataattttgatgcaacccttgagcaactcgacaacatggcattgctgattaaaggcattggcgtcgaatctcagtcctcaggtgaaaaactgggggcaatgtttaattcgggttataactcgcctgaaaaaatacgtaagtggcttgatgggatagcatctgcaactcagttcggcaccggtgatatcaagactcagttcgatgcactgccctctatggggaaaaacacgccgtggaagaaccagagtgatcagatgcaaatgctggcactgatgcggattgccaaccaggagtttgatgatccgtcccaagcatcatcagcagttcaaggattctttgattctgtcagcacaaaagaaggtcgacagaaactgaaggtcaaaggtggtattaacaccaaaggcaaaaacggtgagttaaagtcacctgctgatttattggcggagatagtcaaagctggatacggaaaagaagataacttaaaagatgtcttctccggcgataccttaaagcttgctatgatttttgctgattcaaaaaagcaggctcaactccgtgatgccgcaaatcccgccaatatccgtgatggttttcttgatgagaaagccacgcagaacgtgcagaccttcaatggtgccatgacctcactggtgaatgccggggagcgttttgcacagttaaaactggcaaagccggtgcaggatttggcggatgccattaatgatctgaccccggaagaacttgataaatacgcggctacgattgaaaaagctgcgtatgccattggtgcggccgttgccgcccgttatgcatggcgggcgggtaagagtatttataatttcgccaaaggtggcagagggggtgccggtggtcccggagccgggggtcttggtgacggtggtgtcacttctgtgtacgtgaccaactggcctgcaaactttggcgggcgtggctcatctggcggaggtggcggtatgggcggagcaggtaaagccatgaacatgctcacaaatactgcggttgtcggatggattaccggtgaagtgacgccttatgtggaatcggctctggactgggggtttgaaggcaacgaacgatacagaaaaatgcgtgatgccaagaccttcggggagctttacgatgtcagtattggtgatgttgtggatacagccgcaggcaatatctccacagagaacggaaccaagccgtcaccttattctacgggctttccccgtaatcctaatttttctccagaatggccgaaagcgccgccattatccgccggggataataaaccggcggagccggtcaagccgcctgacggacaaatccgggtgattgtggaagccgctgcggatttggtggtgaaaacaaagtccgtggagtcagagaacgttgatttacgggtcagtaccggatacagcggcgggagtaaaatgtaa

SEQ ID NO: 285159 - DNA, 435 bp, Morganella morganii
atgacaaacccatctgatttacgcacccggggatttaaattcagtcagcgcagtgaaaataacctcagaggggttaaccctgttctggtcgcaattatccgccgtgcactggaattatctcccgttgattttgctgttatcgaaggactcagaacgccggagaaacaagctgagtacgtcagcaagggaagttcccagacccataacagccgtcacctgaccggtgatgctgttgatattctgccgtccgccatgaagcccggtatggactggaacgaaaacgcccatctttttgaaccggttttacatgctatcagtgccgccgcctttgaacggggtgtgatgctgcgtttcggtaaaaactggcaaagtgatccttctcttccggtacagactaaattccctgattacccgcatgtggaaatcccgcgatga

SEQ ID NO: 285160 - DNA, 474 bp, Morganella morganii
atgaaaaagttaatattattaatctgttttgctacattttcactttcagcatctgccgctaagaaacttcctcattttgatgaaataaaaaacaaaatggataacttcggaattgtatcggctacagagtggaaaaatacaggtgataccaatatagctatgagtgacggtgttcagtattgggctaatgatagagctgttgctgctgttcacttgcttaaaggtaaaagtagcaaggagctggaggggaaacttatcgatacagcatcggtgtgtttaaaactttcaaaagctgtcacgggtgaattatctgaagaacaagcggatgatattttgttaactgctggctatgccggaaaggttgatgacaggcaggtttccacttttattaatggttattcctttttttcatctatacaaccaaacaaatcggagattgtctttacctgtggtgttaggcagaatgacttctga

SEQ ID NO: 285161 - DNA, 378 bp, Morganella morganii
atgctggataaactggataacattccatcagcagaactgcgtgataaatggccgcaactgctggctgatatcgtagacttattttcagctgaacttcagcgacagggatacggtgaggatgaagcccgtttgtcaggcagtaagctggttggttcattggcgcattattacggcggcagagctgtctatttacctaccggtgatacgttaaaagcagcactgagagataatgttctgtttgatgagtggagtagctcaaaagggacaattgagtttctggcaaaaaaatactcactaactcattcaactgtttatgctattctgcgccaacaaatgaaacttcaccgtaaacggcatcaaattgatttacctatttaa

SEQ ID NO: 285162 - DNA, 489 bp, Morganella morganii
atgggcgatgacagcaaaagtaaagaccacatagaaaatgcagagaattttgacattaagcaatcagcaatgacaaatttttcagaccgtctctgggaatctataggtgatgaatctgtactatctttcgcaaaaagagcaggagtatcggagggtgtcgtaagaaaatacgtaaaaggaggggctgaaccgacagttagtcggttgatcgctatggctgatgcggctggtgtatctgttaattggctagctacaggaaggggatctaaaaacgaagatattgctaataaagcatttaagtcagatatagatataaattctctatctaaggcgattgaattattggatgaagccctgttaattaccagtaaaccaatgaatccaaagaaaaaagctgagttaatatcagccctctacgagttggaagtaagtgagcacgaagaaaaaagaagagatgcaatgctaatgttattaaaatcaataggataa

SEQ ID NO: 285163 - DNA, 552 bp, Morganella morganii
atgtctaaaaatgatgacaataaaaatcatatcaaggtactcggaagtaaaaactttgtaatcaatgaaagcaaaggcgttgttttaaacatcaactctacgcacaggaaaataaacaaaataacaccaagtgatgaacacataacctctgctcaagccagaagaatacaggagatagtgaaagccctggctgagaaagaggccgcatccggaattagcacaagacaggcatttgcgaagtggtataacgcaataagaaaaagatacgatgttcctagctatcacctaattcctaactatctaggcgaagaagctatcaaatggctacaacaaaactccgcaattaaaagaaaaacaacaccaagctccaaggcgtcagtaaaaaatgaatattatgctgccatatgggcgagagccaaacaggtcggcatgacaaaaggtgatgtttatcatatagttaatgaaaggctaggtaaggcaatcacctcactaacaagtttaagcgaggataacataaagaaattatacgaaataataatgaggatgaagtga

SEQ ID NO: 285164 - DNA, 861 bp, Morganella morganii
atgaatgaagactctagcatctcaaatctattgaggaagtgtctttttttagctcgtaaaactggtagtgatcagtttaagaaatgggttttctctgagctgaatggctatgacccagaaagtgatattcctgaatatagagtcttatcttgtcaatcaaaaggtgatttttcgcgagttgacggtatttttaaaaatctagatatagacatagatcagcttgatgatgaattttatgatttatatggtgagtgcattgtttcggtaagtatagcctcaattgcggatttagtttccggagctaaaaatgccgactcagcggttatcaggaggccttgggagccttcaatggtaagccgtgtatcagataaaatttatcgtgatatgaattgtctaagggcgtggagtgaaactccaacacctttatttttgggaatcctagacaaagtaaagaccatgatattagattttgcattagatttagaagaaaaattacctaatattgaggatgttaaattgtcaaagcaggatgaaaaaatagtcacccaaacttttaatacccatgtttatggtgatgcaagtattgcaaatgccagtgaaaactttaaccaaagtatccagtctcaatctgatgagttaattaataaattagtaactgagttggttcagttaaagggacaaggcacagatacaaatattattgatgctgtcattcctcatattgaagaaatcaagcatattaaaaatcagaaaggtgtcatggataaggtagccagcataatgactattgctggtgggtctgcttcagtatgtgctttgattgcgccatatatccccatgctttcaaacttgtttggttaa

SEQ ID NO: 285165 - DNA, 222 bp, Morganella morganii
atgattaaattaaaatcaggaataacggcctgtccgcagtgcggaaacgatgatgaattttatattaaagcccgcgtttccggaacactgaaaataaatcatacattttcaggcggtgaagctgacaacactcatttatgggacccagctaaactgacaaacaaaaataacgcctattgcagacactgcaattccgatctcggcggatggacagaggaatga

SEQ ID NO: 285166 - DNA, 501 bp, Morganella morganii
atgaaagacagaatcaaattcagcgacgaaatgttagccgctgttattgctggcaggaagacgcagacgcggagactgattgagcctcagcctgatgtcacggaagactcgttgcgtgaactaaatgcgtggcaagacggatacaccctgtctgaacaggtgtgcgcagcgtggcgacatggatttattgatgatgactgcccgtatggtcaggctggtgacgtcatcccgttcgcagacaaagacggcaacatcaaagggaaaattgcgattgtcgatgtctggttgcagcaggtgcaggagatatcacaggaagatgctcacgccgagggatttgaacttaccggctggattccgacttatagcgacccagatagcggcggcgagcaatttacaccagtcgataacttcgttgaggcgtggattgatatttatagtgaagaaagttggataaataatgaatgggtgtgggttattaagttcgtaaaactgaatgattag

SEQ ID NO: 285167 - DNA, 276 bp, Morganella morganii
atggttaattatgttttaatatataaagacggaaatatagataaaaaagagcttgctgagtacaaagaaaatgagtttagattaccagcaaaacctgtgttattcgcatcaaataatccacctgaaagctatgacttacctaaaacattcacctcacaaaaaataagtgacgatgagggaaatcaatatgctatagcttatgagactggtgccagttcagtgccaatggaagaaataatagagtatataaagcgagagagaataccttgtttataa

SEQ ID NO: 285168 - DNA, 207 bp, Morganella morganii
atgaatagagatgaggcatttaaagcgttattagacggcaaaaaagtaactcacaaatattttactaaaagtgaatatctgtacatggttggcggggttataactggtgaggatggcgttaatcttcattctcattttttcaacactgatttcatgtcagatggattccatatttataatggtgataacaatgagcaaatatcgtga

SEQ ID NO: 285169 - DNA, 663 bp, Morganella morganii
atgtttagtgggagggttctgggggaggatgggaaatcactttttccgccttcagggcaatgttatgttcactggaaaacgatacagattggtggcggtaacggtattagtaaggatcacgggctgggggtatacaaagggcgagatccggtcccattggtatttgtcagggcatcaacattttacgggggatggaatggtgttgcccgcctgagtgacgggtggtgtacattaaaaagcctcagtgaatatattatccagacaaattcggtttcagcgtatgcttggatattcatgccgggagactgggttaatataaaacaaaataacaattataaattcggtatccgattttacggtgaagatggcagggttacataccttggcaataacaggccactacaaatcgctaccagtttccgatatccaaaaaatgacccaatagctgacattacgataggttcatcagatcttgcctgcttaatcgggatcagtggatatcacatcacctggcagatgaatcaatctgtcgattaccttgtttcacggattcttcataacggtaagttgcggagcttttgttacgaaataggatctgaatcatacgttcagtcagcgtcagatttgcccattccctgtatcaacacatctgtttacccataa

SEQ ID NO: 285170 - DNA, 1680 bp, Morganella morganii
atgatcaaagatattagcttcaaaaaattcaagaaacttatcgacatcgatttttcattcgataaggatgttaacatcatctcaggaaccaacggcacatgtaaaacgacattgcttcacttagttagcaatggttttcaaatgccacctactcggtccacaaactattcaaataataattgcctcaaagtaattaaagctataaataaaattgccaaccccaaaatggaagcaatagttagggagtcaaaaagctatacagacccagctgagggagcaaaaggaaatctattttctattgactatttagatgggagtgaattaggctttagaaaacataattcacgaaacccagatgaagctcaaaggtacgcgattaagccattatatccaagaggtggaccaaaacaatcactgccttcaaaaccagttttatatttaggtttgtcacgattatttcctattggagaaacaaaggatggcgaccttacaaaaatttctttaaatctccccgatcaatatgtaagttacatctctcaactttacaaagatcttctccaaataagtatcactaatattgaatccaataatataggtgatttcaaatctggtccgttatttgatacagacaatcccgaaattgattcaaacactatatcatctggggaagacaattcatttattataataaaagccttagtgagtctaagatattattttgaatcattaattgaatctaatgatattaaagaaagtatattgttgattgatgaattcgatgctactttgcacccttcattacaaataagactgctcgataaaataaatgaatacgctaaggcatataaaatacaggttttctttacgacccatagcttaactttattagaatatgcgttctccaagaaatttaatgttatatatctaatgaataacatgagtaaagttttctgtcttgaagatccagactacctcaagatatcgatgttcttgaaaaatcaaaatagagatgaaacatatacccgtaaaaagataccactcttcacagaagatgaagaagctcgtttctttctcgaagaaatattttctttttggatacacagaaagcctgaaatggcaataatacgaagttatttccattttgtagaatgctttattggggctgataacctaagaacgattttcagagatccacatttatcagaaacttcattgaaatcgatctgtattctcgatggcgatcatcaaactgatttaaacctaagtactattgcacttccaggctctttagctccggaagaattattttttgaacattccgaattaatctataaaagcgatgatgaatctttttggattaaccctgatatatataatcaaggttttacaaaagaatattatttaacaaaaattcaacccgaaatactgtctattgagattgattacaaaaataaaaaagaacttggtcaatcgactaaagggtttaagagagagcgaaataaggctctttttaatgataatataaacttctttcgtatggttttacgcaattggttagagagggaggagaactataaagctaacgaagtcttttataaaggattaagaatcttattccaaaaagtttgtgctcaaaatggtatcgatagaaacacatggaattttgaattcaaagtgtaa

SEQ ID NO: 285171 - DNA, 1371 bp, Morganella morganii
atgatgtatccagcagaaccgtatcgtattaaaagtgttgaaaccgtatccatgatccctcgcgaagagcgtatcaaaagaatgaaagaggccgggtacaacactttcttgttgaattccaaagacgtttatgtcgatttactgaccgatagcggcaccaacgccatgtccgataaacaatgggccggcatgatgatgggtgacgaagcatatgcgggcagcgaaaacttcttccatctggaaagaactgttcaggaattattcggctttaaacacatcgttcctactcaccagggccgcggggcagagaacttactctctatattagctatcaaaccgggccagtatgttgcaggtaacatgtacttcaccaccacccgttatcaccaggaaaaaaatggtgcgacattcatcgatatcgtccgcgatgaagctcacgatgcgggcctggatgtgaaattcaaaggcaacatcgacattaaaaaactggaaaaactgattgctgagaaaggcgcggaaaatatcgcttatatctgtctggcggtaaccgtaaacctggcaggtggtcagccggtctctatggcaaacatgcgtgaagtccgccagttatgtgacaagcacggcatcaaagtgttctacgatgcgacccgctgtgtggaaaacgcctacttcatcaaagagcaggaagaaggcttcgaagatgtctccattaaagacatcgttcacgaaatgttcagctacgctgacggttgtaccatgagtggtaagaaagactgtctggtgaacatcggtggtttcctgtgtatgaacgacgacgacatgttctctgctgcacgtgaactggttgtggtttatgaagggatgccttcttacggtggtctggccggtcgtgatatggaagcgatggctatcggtttacgcgaagcgatgcagttcgaatatatcgagcaccgcgtcaagcaggttcgttacctgggcgaaaaactgaaagcagccggtgtaccgattgttgagccggtcggcggccacgcagtattcctcgatgcacgccgtttctgcccgcatctgacccaggatgagttcccggcacagagcctggcagccagcatctacatggaaaccggtgtacgttctatggagcgcggtattatctccgcaggccgtaacaaagaaaccggcgaccatcaccgtccaaagctggaaaccgttcgtctgactattcctcgtcgtgtatacacctatgcacacatggatctggttgctgacggtattatcaaactgttcaaacacaaagaagacattaaagggctgaagttcgtatacgagccgaagcagttacgtttcttcactgcacgctttgattacgtgtaa

SEQ ID NO: 285172 - DNA, 1320 bp, Morganella morganii
atgatccctcgcgaagagcgtatcaaaagaatgaaagaggccgggtacaacactttcttgctgaattccaaagacgtttatatcgatttattgaccgacagcggcaccaacgccatgtccgataaacaatgggccggcatgatgatgggtgacgaagcatacgcgggcagcgaaaacttcttccatctggaaagaactgttcaggaattattcggctttaaacacatcgttcctactcaccagggccgcggggcagagaacttactctctatattagctatcaaaccgggtcagtatgttgcaggtaacatgtatttcacaaccacccgttatcaccaggaaaaaaatggtgcgacattcatcgatatcgtccgcgatgaagctcacgatgcgggcctggatgtgaaattcaaaggcaacatcgacattaaaaaactggaaaaactgattgctgagaaaggcgcggaaaatatcgcttatatctgtctggcggtaaccgtaaacctggcaggtggtcagccggtctctatggcaaacatgcgtgaagtccgccagttatgtgacaagcacggcatcaaagtgttctacgatgcgacccgctgtgtggaaaacgcctacttcatcaaagagcaggaagaaggcttcgaagatgtctccattaaagacatcgttcacgaaatgttcagctacgctgacggttgtaccatgagtggtaagaaagactgtctggtgaacatcggtggtttcctgtgtatgaacgacgacgacatgttctctgctgcacgtgaactggttgtggtttatgaagggatgccttcttacggtggtctggccggtcgtgatatggaagcgatggctatcggtttacgcgaagcgatgcagttcgaatatatcgagcaccgcgtcaagcaggttcgttacctgggcgaaaaactgaaagcagccggtgtaccgattgttgagccggtcggcggccacgcagtattcctcgatgcacgccgtttctgcccgcatctgacccaggatgagttcccggcacagagcctggcagccagcatctacatggaaaccggtgtacgttctatggagcgcggtattatctccgcaggccgtaacaaagaaaccggcgaccatcaccgtccaaagctggaaaccgttcgtctgactattcctcgtcgtgtatacacctatgcacacatggatctggttgctgacggtattatcaaactgttcaaacacaaagaagacattaaagggctgaagttcgtatacgagccgaagcagttacgtttcttcactgcacgctttgattacgtgtaa

SEQ ID NO: 285173 - DNA, 1128 bp, Morganella morganii
atgcgtgatgcgggttatgcctcgggggatgtggctaaagtcacagaaacgattgccacctcactgattttatccggtgccagtgcggcggaagccagttccgttaccactcagctgagtcaggcactggcctccggtgtgttgcgcggagaagaattcaactccgtcatggaaaacggcggacgactggccagactgctggcagccggaatgggtaccactatcggcggtctgcgtgatatggcgcagagcgggcaactgaccacggataaaatcgtcccgatcctgacaaatacggagcaactcagaaaagaatttgagcaattaccgcagaccgtcagtatggcttcgcaaaaggtggaaaacgcctttatggcgtgggttggcggggctaatgaggcgtcaggtgcaacgagtacactgaccggggcgctgaatggtattgccgggaatatagacaccatcgccactgttgcaggggcactggtcggggttggtcttgcacggtatttcggcgggcttaccaccagtgtgaccaaagcaaccatcggggtggccggtgccgcaaaaggcgaggtcgctcttgcacaggctcagctgcgcgggacacaaattgcggttgccagagcgcgtgcggcagagtaccgggcacaaaaatcactggcagctgcacgcggaaccgatgcgcaggcaggcgcagaaaagcggcttgccgctgtacaggcatctgttgcacgcaatattaacgcccgcaatatcgcacaaaacaacctgaataacgtcacatctgtcggttcacgtcttcttggtggtgcgctggggctggtcggcggcattccggggctggtgatgctgggtgccggtgcctggtacaccatgtaccagaagcaggagcaggcaagacagtccgcacttgaatacgccgccaccattgaccaggttcgtgccaatcttaataaaatgacgctgccggaaaccgctgataactccggtaaaaccaaagaagccctgactgcgcaaaataaactggttgatgagcagcgtcagaaagtcgagggattaaaatcagcgatagcaggagcagatgctggcctcacccggccccagcatcaacggctatctgattaa

SEQ ID NO: 285174 - DNA, 189 bp, Morganella morganii; identical to SEQ ID NO: 278144

SEQ ID NO: 285175 - DNA, 885 bp, Morganella morganii; identical to SEQ ID NO: 278143

SEQ ID NO: 285176 - DNA, 909 bp, Morganella morganii
atggatgatgcgctgaaagcgatgcgtgacggcgcccgtaaattcagtgatgaagcggaacaaatcgataaaacccgtgggatgggcgaaaaccggcgcagtttgtatgaagagcgccagcagattgatcgtgtttatgccaaatctgatcagggaaaaagtgcgaccgaagcttataaccgggagattgacgcgctcaacctgaaatatcagaaaataaaggaagttcagtctgactggaccagcggggttacccgggggatggaagactgggttgctgaggccggagactatgcggagcaaaccgcatctgcggtacagagcgccatgggcggtatggtgaataacatcactgacatgctgaacggtaacaaagccagctggcgcgactggtcaatagatgtccttaaatccatccagaaaatactggtcaacgctgccatcgtgaacagcattaagtccatgtctggtgtcggtggctggattggtgctgtcggtgacttcctgggaggtgctgcggcaaatgccaagggcggggtttatgactcccctggcctgagtgcgtacagtaatcagatagtcagcaccccgacttattttgcgtttgccaaaggtgccgggctgatgggggaggccggaccggaagcgattatgccgttaacacgggcggcggatggctctctcggtgtccgggcgatcggcagaaatcataataccggttctgcagcaccacaggtgtttattaccattgacagtaacggcagcagccagacgcagtcgtcagctggttatgaacagtttggccgggagattgggcagtatgtagaccagcgttaccgggcgctgattaatacagatctgcggcccggcggtgccatctggtcggttgcgaaaggggcccgtcaatga

SEQ ID NO: 285177 - DNA, 336 bp, Morganella morganii
atgattgaaattttcacctggtgtccccgtgttaatcccacggaggacatcacctataaaacccgcagggcgaagttcggtgatggttatgagcaggtgtccggtgacggtcttaatccccgcagccagaagtggtcactggaatttaccggtcgcggggagtatatcgcggctatccgtcagtttatcgaccgtcacggcggcataaaggcttttcagtggaaacccccgcttgagccggtcggtctgtaccggtgcgacgaacataagctcaccccgctcggcggtgacaactattcactttctctcacttttactcaggcatttaaaccatga

SEQ ID NO: 285178 - DNA, 696 bp, Morganella morganii
atgacccgccacaaagatggttttatccggacatgctggcaccatgacaacatcttgcgggcgggtgatgtccaccagcagcaggcggacgaaattctgttacacaaccaacgggcgtttgtggcacgcagcatctttaccgatctgcggctgccggccggtcatcttcttaatccttccgatttgttcacctggtcggtgatgcgccgcgtcagtgatcatcttccggcctttatcagctcatacatcctgatgcagaaaccagaggaagagataaccggcaccatgacagagcattccattgtccatcaaccgcgctcacacagccggattgttcaggacatcgtggagcagataaaaccggtcgttgttcctgagatagagccggagccgccagcaagttttatgcggatcccgaagttaaagcgctgggagtgtctgaaatacctgcagtgggtaaaaagccagccgtgttgtgtgtgcggccagcaggcggacgacccgcatcacatcatcggtcacggcaccggcggtaccggcacaaagacacacgacatttttaccatcccattgtgccgtattcaccacgacgaattacaccgcgacccggcagcatgggaagcaaagcacggcagtcagatggagttgttatttaagtttatgaaccggtcatacgggatcggcgtttttggttaa

SEQ ID NO: 285179 - DNA, 402 bp, Morganella morganii
atgattctctatctcaaaattgcaactgatatcccagtgggtactgcaatcacgacccgctacatcatggacaaatacaaagtgtcacgcagtacaagccggaatgcattagctgtactggctcatataggtgctgctgaggaagtaagccgtatccacacagaaggtactgcttactcactgtcacctgacgcggcagataaggcacagaaatacagaaagctggtgatcatcatgcgggaaaacccgaatgaggtccggcgcaacaacggcccgatcctgtccagtccggcagatatggcagaacgcgggtttgtatctgcgcataaccggttgtttatggcgctggcggcaaagcgccgggagatgaaacagagctgcgcagtatacggctgcgcttga

SEQ ID NO: 285180 - DNA, 249 bp, Morganella morganii
gtggaaaaggcagccgaacaatcccgcatgcagaatcagcctgtcgtaatgctggtaccggaagacatgtctgttggctggtttctggaggcactgaaaacggttgatgaaatccgggtaattaccggcggtcgtatcaacttcgttaatcccgtcacgggcgaggagaaaaagggtaacagtaagggctccatgcttcttatctggcgtccgtttatcacctcgcgccggttgtctctttcgcgctga

SEQ ID NO: 285181 - DNA, 351 bp, Morganella morganii
atgctgcccgcccacgagtacgctaatgatctgattttatttgcgctgattgtggattgcggctcattcagtaaagcggcggaaatggccggtgtcaccggctctgtgctcagcaagcgggtaggacggctggaaaaagccctcggtgcccgtcttctctaccgcaccacccgcagcctgtctgtcacggaaaacggccgcgtactgtatcagcatgccaaatcccttaccggccaggttcacagcgcattacaggcagtcagtgccaacagtgatgagctgaccggccttatccgtatgtcagtacccactatctccggagagctggttctcagcgacagcgttgcgtaa

SEQ ID NO: 285182 - DNA, 366 bp, Morganella morganii
atgaacaaatatcgtgacaaatcagactttgagattaataaagcggtagctgagcgttatctgccgtgcgattacagatataacgaaagtgacaaaattgttgagctaataggcgtagacctttcatgtgaattcggaagctctatagatatagaaaaagaacatgtttacggtaaattcgacccatgcaacaacccagcggacgcaatgcctatttttattgataataaaatgggagttatatttttaggtgatttagttcagattagtgatttctctggtggcactgttaattttggcagaaatttttatcgcacaatagctgagttattcctgatgatgaaggatgcggagaatgaaagctga

SEQ ID NO: 285183 - DNA, 855 bp, Morganella morganii
atggttttatttaacgaaaggccaccttttgaaaaggcgtggctcgctacctcattccgcgtgattatggccggaatgggtgatgatacggtaatgctcattgctgaaatgtataaacgcggatatgaaccggatgaaattatattttgtgataccggctctgagttcgagcacacatatcattttattggctggctcagaagctggtgcaatgaaagaaaatggtcgaaagtcgttgtgctgcgtaagtgggataaagacggcgagccgctgagcgtcattgaaacggctgagaaaaacaacacgctgccacccgctgcgttcggcagtaaatcatgttctctgcgatttaaagtcgagacggccgacaagtattttcataatcacccggagtgtttaaaagcatggggggttgagaaaaaaggcgttccgctggattctcacaccggaagcattctgcgtgttatcgggattaatgccgatgagccgcaacgagccgaacgctggaagccagagcataaatgggtgcaagtgtttccgctggttgactgggatatcggagagaaagaatcatcggcggttgaagaagtcggcctgtattatcccggcaaatcatcctgcatctgctgccctcaccttaccggctctgaattaattatgttacgtgataaatatccggaagatttcggtcggattattgcgatggagaataattatatccgtcacgaactccgtacggactcaacaacaaagggaatgtgccgcagaaaaacaataaatcagaaaatagatgaatatgagcgtgaccaactggatattgcagaaggtcagtgtcagttgtgtttattgcagtga

SEQ ID NO: 285184 - DNA, 522 bp, Morganella morganii
atgaaaaaaaaacaaaaaagattttatcgaaaactattctcacacacttcttactctaggtctgatatagatatgctgtcagatgaatcgtatagaaataaaaagtataattttcattttatatcatcagcatctctttcattaatttctgctactttttttatagggctacttagcgttaatacgacatcaattagcttggtatcatatatagaaatattaatatccatgcttttctttgcggtttcactttcaataaattcattttcactatttcagttatttatatcatctaacgatgaggttgataaaactgaaattctaataacattacaatatagattttttgcttttattaaactagcttcatttatatccccagccattggaatgacgtttctaattgcatattttaatgaatacatatgcataatttcaattttattttttttgatattatccttttattatggaaaggtaatcgaaagagcaaaaagaaaggcaaaaaacattcttaagtaa

SEQ ID NO: 285185 - DNA, 885 bp, Morganella morganii
atgactgcttactataacgaaaatgatccgttcgctgctcagtggttacggaatctcattgctgccggtcatatagcgccgggtgtagtggacgaaaggagtattgaagatgtcacaccagatgacttacgcggattcacacaatgccacttcttcgccggtgtcggagtgtggtcacttgccctgcgccgagcaggatggccggataacaaaccggtatggacaggaagttgtccgtgccaacctttcagcgcggcaggcaaaggaaatgggtttgctgacgagcggcacctttggcctgcattcttccacctcatcggcgaatgcaagcctggcgttatccttggtgaacaggttgcaagtaaagacggcctcggatggctcgaccttgttcaaactgatctggaagcaacgaactacgccacagcagcggttgatttatgcgctgcgggcttcggtgcgccgcatatcagacagcgattgttctgggtggccgatacctttggcgggaagcgggcgcggagttggaacaagcggcaggcagggaggaatgaatattcaaacggccgcgcagctggcaggctggacaacagcgagcgcctcggatggagaacggggaggaactggaataacgccgggaatgacgggcagcagcttgacgcagcagtcaaaaatgacactgccagtccgacgaacggctactggcgagatgctgactggttactctgccgggatgacaagtggcggccagttgaatccggaacattcccgctggctgatgggattgccggtcgagtgggaaaactccgcgcctacggaaatgccatcgtcgcgccggtcgcggaagagttcataagggcttatatgctgataacagaggaatga

SEQ ID NO: 285186 - DNA, 261 bp, Morganella morganii
atgggtgacatgggtgatatattccgcgcaatgcgtgaagatgccaaagaacggaagaagcagcgattaaaagaaaacacagggaagttatcagggattgatattccatttacacaggatggaagcggaacaattcatttttcaacaccagccggaaaggttctgttttaccccaccacaaataaaattcagcacaagaaaaaagtcatgcgcggcaatctggaaaaggctgtctcgctggctaaaagtcttggtgcataa

SEQ ID NO: 285187 - DNA, 942 bp, Morganella morganii
atggcaaacgaactggtcgttatcgaaccagcgacagcgctcgacctttttacagcgccggataaggttcaggtgctgctgtctggtatccgggagaaagcactcgcagagcaggcattactcgatactgatttatcgaaagccaagaatcgcgatgctatcaaatcactggcctacaaagttacgcagtcaaaaacatacatcgacaaagccggaaaggctgtcgttgacgagttgaaagagctgccgaaaaaagtggatgccagtcgcaagcagtgccgggatgaactcgacgcactgagcgaagaaatccgccagccggtaacagcctgggaggatgcagaaaaggcgcgtgtagcagcggaagaattagctcgccaaattgagcgtgaccacgaagaagcactgcagatgaatgagctgcacgacctgcgtaaagccgaagaagaacgcaaacgcattgagcatgaaaacgaaatcaagcgtcaggcagcagagcaagcacgaatcgaagctgaacagaaagcacagcgtgaccgtgaagcggcggagctgaaagccaaacaggagcgtgaagctgcggaattaaaagcacgacaggaagtcgaggcggcagctaagcgagaacgcgaggccagagaggcgcaggaacgcgcagaacgtgaaaagcaggaagctatcgcgaaggctgagcgtgaaaagttggctgcagttgaagcggagcggcgcaaggcagatgaggccgaacgcgcacgcctggcagagattgagcgccagaagcaggaagaattaaagcgccaggcgaacaaagagcatcagcgtaaatttaaccgcgaagctttacaggcattgactgcagcaggatttgacgatgaaaccgcaacaaaattccttgagatggtaatcaaaggcgaagtccctcacctctcaatgaactactaa

SEQ ID NO: 285188 - DNA, 255 bp, Morganella morganii
atggagctggttctaccagttctggctcaggtggtttctttggcgacaactcactggcaacaagacgtatcagaggcatatgtctgtacatcatcccagaagcgggagtatgcaaccgaaaacggcactgcgctcaatgaaaccctggcgaagctaagtccgttaaacccgcagtacaaaacaaagaaacaaacggtatttcagaagatggtcgcttttattgagaaatttaaaggtgtcggcgggaagatatag

SEQ ID NO: 285189 - DNA, 843 bp, Morganella morganii; identical to SEQ ID NO: 11328

SEQ ID NO: 285190 - DNA, 2136 bp, Morganella morganii
  misc_feature (1777)..(1786): n is a, c, g, or t
atggatattattaggaattcagtctggctctctcaaggcactgatttgcttgcagagggactttaccgtgttttggattttgacagaaaggtcgatttgttaattttgtttaaaataaaatcagaaagaacgggtaagccaatccctttctcattttcaatgtttaaatattatattgaatcaaatagcataacttgtaaagattatatatatccttcatatatgttagtagatgagaaagaattaacagataaagacagaggaaggcgagatgaaaattacaatatcattaaagatcttgtagatgacagaatgtttctgttcgactatgcattacataaaaagtcgcaccttttaatggattactcaagaaataaaaaaatatcacaatatactatcagaacgcttctggcgttgtattggcgacatgggcaggatatttatgcattgctacccgcattctcgaactgtggcgccgctgggaaaagtagaatcaaacatgaaattaaacttgggaattccaaaaaaaacagagcattacctaatgaacgatcacgtgttttcattcttaatgaaagagatataaataatattagaaaatctctcattacgtatcattataaagttaacggagatacgataaagaaaacattagagagacatattgatttgtattttagggatgaaattaaaacagcaaacctagaaaatagagctccatatgttccttctttaaaacaattttcatactggaataaaaaactcttcactaaagatttctcgataaataagaagaacacgaaaaaagaaatagacctcaaaatgcgggcgcttttaggtagtgtggctaatacaactgttttgccgggtgatgttttcgaaatagactcaactgtcgctgatgtacatcttatttcgagtttaaacagacgaaaagtcattgggcgtcctactatttatacagtggtggatcgtgcaacaagaatgattgttggccttcatgtttctttataccatgcttcatggcgagccgcccgacaagcgttagcaaattgctttatgccaaaaaaagaatattgtagattatttggaatctctattactgatgatgattggccttgttctcacattccattaacattgatgtgtgacaacggggagatgattggtcttaaacctcaggaagagatgacccccctgacaaaacttgagtttgcgccagtcggtagaggcgacagaaaaagcattgttgaacgctgtttcggcattctgaatgatgaggttattcataggcttattggaacaacacgaaggggaaagattgttaaaggagagccaacaccgcaatccagggcttgtttaacgattcaggaggtcacgtctttactgattcgggagatacttgcacataatcagagaacgtatgaggaactggcttatatcaatcccttactgattgaaaatgatctcgtaatatcaccaaaaaatagttggatgataagcttaaagcacgggagattcagcgcaagagccgttggggccgacgaagtgatcgcacgattgttaatccctgtgaacgctaacattaccgccggtgggattcagtacaataatcttttttatgaatgtgatcctgaaattgcatcaggtgtcagagtatttggaagaaccacttgtgaagcaagaatagatgacaattgcgtagattatatatatgtaagatttgacaaaaatagcattttcaaaaaacattacctacttaagaaaagagatgtannnnnnnnnntatttaaagggaaagctcatcttgatacagatgtaatggctgattgggtagatactcaaaaagaaattaatttatttactctggattcgctcagcaatatcaataataaagatgaatttaacaggaaaggtaacgaaagattaaatgaaatatacgaatctcgccgggtacatggtaaagatattaaaaagaacaggaaaaatgaacttgattcattagggcgaactcatgttgctaatggaagatctgaacccctacttccttcatccagtaatgttctgcttttgcctggccgggaggagaaacaaagatggttaaaaggtaagaagaagactgaggacgcagaataa

SEQ ID NO: 285191 - DNA, 1449 bp, Morganella morganii
atgaaccttatacggcgcgtttcagcgatatataaagaacaggagttacctgagtatcgtggcaatcccttaattgaagcacttcctgaagcgcttacggaagatgaagtacttctggaaatgagttatttccccgaaattgacgaaaaaatccgctggactgccccggcgaatgttagagagcagtatgtcgaacgtataaagaaattctgttgccctcaaaccaaccttatccaggcttataagatgatcttacgggcacttagggaaagctatgcagctcgtaatcctttaaaaagcggaacaattcaatatcttcattactatggaaatgagcgtcctgatattgagccagaaagtggatattttaaatcccaggctgaaactattacgatagttggaatgagtggttctggaaaaactaccatgattgagcaagtcatggatcatttccctcagattatagaacacagcagctataaaggagtttttcccggcttcagtaagcaaattgtatgggtaaagattaattgtccatacaattcaagtgtgagagacctttgtgaagagattttacaaaaattagatgatgcaattggtattgaacgaactacacctgagattagaaatggtgctctggctcgccagattgcacaaagaattaaatcatcatttttgggtatccttgttattgatgaaatgcagaggcttaaattttcaagaaccgggggtgagagtaagttgattgattttttacatgaaattgtagattccatgggggtatctatggttttttgtggaaatcatccttttgacgagacgctgacaaagaaaatgagaattgccaggcgggcagagtctggtggttacatgaaaattaagaatgttagatacgattcacaagactggcaatcgtttattcattatttatggccattacaatggacaaatgttgaaactccattaaatgatgagttaaacgaaaaattattcattttatctaaaggcaatattggattggctcagatgatttatcggggggcacaattaaaggttatcggtagcggcaatgaaatcatcactggcgcagtcttgtcggcctctgtaccggtactcgtgagtcatacggaggaatataaggatactccactcccgggggccgcgactgaagatgaggaagctaaatggctctctgcatctaatgagggtgatgcttcggctaaaatcatggcagagaagtccctaaagtctttgatccctggggatatagacaggccacagcacaaggaattcgtaggaaaaatagacgaggttttgcgcaatttcgacgagaaaatactgtctcttgaccacgatcttgttatcaacagaacagctgaaaagaaaaatacctacgatgctcttcagcgttgcgggcttataaatatagatccacttaataaattgtaa

SEQ ID NO: 285192 - DNA, 1557 bp, Morganella morganii; identical to SEQ ID NO: 84386

SEQ ID NO: 285193 - DNA, 927 bp, Morganella morganii; identical to SEQ ID NO: 11456

SEQ ID NO: 285194 - DNA, 1827 bp, Morganella morganii; identical to SEQ ID NO: 11454

SEQ ID NO: 285195 - DNA, 351 bp, Morganella morganii; identical to SEQ ID NO: 11453

SEQ ID NO: 285196 - DNA, 897 bp, Morganella morganii; identical to SEQ ID NO: 19852

SEQ ID NO: 285197 - DNA, 381 bp, Morganella morganii; identical to SEQ ID NO: 19851

SEQ ID NO: 285198 - DNA, 930 bp, Morganella morganii; identical to SEQ ID NO: 117758

SEQ ID NO: 285199 - DNA, 681 bp, Morganella morganii; identical to SEQ ID NO: 19849

SEQ ID NO: 285200 - DNA, 1401 bp, Morganella morganii
gtgaggttcaaaatttccctgaccacacgcctgagcctgattttttctgcggtgatgcttacggtatggtggttatcaagttttatcctgattagcacccttaatggctatttcgataatcaggaccgcgattttctgacaggtaaacttcagctcaccgaagagtttcttaaaacagagacgttcaggaacaaaacggatattaagtcattatcagaaaaaataaacgatgcgatggtggggcacaatggcttattcatttctataaaaaacatggaaaatgaaaaaattgttgaactctatgccaaaaattctgttgttccagcggtcctgcttaataagtcgggtgatattctcgactatatgatccagacggaagaaaataacaccgtgtaccgcagtatctcgcggcgggttgccgtgacgccggaacagggtaaaagcaaacatgtcatcattacggttgccacggatactgggtatcacaccctgtttatggacaaactcagtacctggctgttctggttcaatatcggtctggtctttatttctgtttttctgggctggctgaccacacgtattggtctgaaaccgctacgggaaatgaccagtctggcttcctccatgaccgtacacagcctggatcagcgtctaaatcccgatctggctccgccggaaatatctgagaccatgcaggagttcaataatatgtttgatcgcctggagggggcattccggaaactgtcagatttctcgtctgacatcgcgcatgagctgcgcacaccagtcagtaatctgatgatgcagacgcagtttgcactggctaaggaaagggatgtttcgcattaccgcgaaattttattcgctaacctggaagaactgaaaaggttgtcacgaatgaccagtgacatgctttttctggcacgttcagagcatggtctgctgcggctggataaacatgatgtggatctggcagccgaactgaatgaattacgtgagttgttcgagcccctggcagacgaaacaggaaagacaatcacggttgaaggagagggcgttgttgccggagacagcgatatgctccgacgtgctttcagtaacctgctttccaatgcaatcaagtattctcccgataacacctgtacagcgatacaccttgagcgtgacagtgactgtgtgaacgtgatgattacgaatacgatgtccggccaggttcccgctaatctggaacgtttgtttgaccggttctatcgcgcagactcatcaaggttctacaacacggaaggcgcggggctgggattatcaattacaaggtcgatcattcatgctcacggcggcgagctgtcagcagaacagcaggggcgtgaaattgtgttcaaagtgcgcctgttaatggattaa

SEQ ID NO: 285201 - DNA, 435 bp, Morganella morganii; identical to SEQ ID NO: 19847

SEQ ID NO: 285202 - DNA, 600 bp, Morganella morganii
gtggccagtaaatttcagaatcgcttagtcggaaccattatcctggtggcggtgggtgtgattgtcctgccggtgttgctggacggcgataagaaatataacgaagaccagttcgcagccatcccgcttatcccgaaagaaggggagcaggatgagattgatgcggtgaatccgatcaatcagaccatgccgacgatgccgtcagaaggggcatccagcgccatgattaccgaagcggcacaaaccgggacggaagaagcatctgcgggcggcagtaccacctccaatgtaccgccgggggcggatccgctgcctgagccggaaccaaaacctgagccgaaaccggaacccaaaccggaaaaagcgccgcagggacaggcttatgttgtgcagctgggtgcattatctaatgcccgtaaggtggaggagattgtcgccacactgcggttatccggttatcaggtgtataccgtgccgcgtggcaagctgacgctgattatggtcgggccgtcagcctcgcaggccgagctgaagtcctcgctgggggaactgagacagcttaccggactggatggccgggtgcagtcttataaaccgtag

SEQ ID NO: 285203 - DNA, 213 bp, Morganella morganii
atgtggctaattgaatgtttcattgtaaatgctatcgactttaaagttatttttacgtataaatctaggtacattatctatctcgaaaagattattatcttcaatgttatacataataaaaaggctatcgattttaacgtgaagcttatggtatgcaaaaattattttttggcatttttcatgcgtgggaatatcgatgtttataagttttaa

SEQ ID NO: 285204 - DNA, 210 bp, Morganella morganii
atgaataaattaactccattattaaatgatatttcaagaatactcgataactcagatagacctgaatttaccctattgcaacgatatgaaacagcgactaatgcacagaagggcgatattgctgttgccatgatcggaaagttgattgagcagcaccggatgcttaaggtaatacatgataagcccgtcatgcaggagttgacaaaatga

SEQ ID NO: 285205 - DNA, 630 bp, Morganella morganii
gtggcaagaacacttaggcggaaatgcaaaatctgccgggagtggtttcacccaaaatttagtaatgagtggtggtgcagtcctgagcatggtgctgagttggcaataaagcgacgaagcagggaaagggaaaaggctgaagcaaaattaagaaaggagcagcagcaaaaagaacgtgaagcaaaagataaattaaaaatccgcaagttagcagtgaaacccctctcatatttccggcagcaagcccaaacagcatttaaccaatttatccgactcagagaccgtgatgagccatgcatcagttgcggtgaaaccaatccacctgatttacatggtgggcagtgggattgtggtcatttcctgtctgttggttcgcatcctgagctcagatttgatgagcgcaacgcatataagcaatgcaaatcatgtaatgccggtgccggtaagttctcacataagaatgccactgtaacgcagaaatacgagttacggctgattgaaaaatttggacaggagttagttgactggttacgcggtccgcatgagataccgcactggaagcgggaagactatatccgtatacgcgatgagtaccgtgcgaaagtgagggagttaaagcgtaagacctga

SEQ ID NO: 285206 - DNA, 495 bp, Morganella morganii
atgggcggagaaactaaaaacattgatgaaattgcaggaattatttccagtagaattttcgatgaattaggttggcaatgccaaaaaactacagatataagttgggattgttgtttaatgtcacattttagtgataaacagaaaaatgctgaaaatcctaaaaaaacacacccaacagatgttgtatttaaatataaggatccatactctgacgaagcacaatatattcaaactgatttaaagtcttattgtgctaaaactatcgagggttctagagccatactttcaacaattcgaagcttatctcaacaggtagaatgtgctccaagaaatagtatctggaaaaaatatttttggatagctcaactgaaaaattcaacgtacatggtatgttatttatttataaccatgataatgaatatgataaaaatctttatgaaagaatatcgggagctgcgacagcacaatacagtatgtccgaaaaatcattcataa

SEQ ID NO: 285207 - DNA, 369 bp, Morganella morganii
atgacagaagaatataaatattatctggatgaaaataacggtgatgtctgtgcatttttaattgatggctctcaggatgaatatattactgatgatatgaagccgataactgaagatgaggcagatatactgcgccagccaaaattaacaccggaacaacaggttgaggaggcagaaggtaaaaagcaataccttatttctgaagccaaatctgaaactcagatgctgcaaacaaagctggcacttggccgcatcaaagatgatgaaaagatgctgttaaacgcctggctggattatctggacgaactggaggcagtggacgtatccaccgccccggatattatctggccggtgaagccggtggtgtag

SEQ ID NO: 285208 - DNA, 738 bp, Morganella morganii
atgcggtctgtattaattttatttactatgcttttgtcttttaattcatggtcgatatcctgtactgatgattataacaggagggggagtgataatttttccttccctaatgcgaattatacggttgacatgagcgtcaatgggaatatttgctataagggaagggatataacatcttgggctgctggggaagggatgaccccaacaacatttattttccctgaaaaaaataaagttttagcattaataaccgtgagtgaaacaaatcccaaaacatataaagcaaaaagcagggtaagggtaatatttatcaataagaatggtcaaccagtaaagtatgattttattaaagaacattattctaatgaccaccctgaaaaagagttaactgacctgcgttttacaagttatgacttcgagaaagggatagtatattttgagtctcctgcatgggctacaagtatggcgatacatgcatttgaagttcctttcgacggtgattacagcaaagtaaaagagaaatttataattgatggaagtattaaatatcatgtgatgtctaccttgacagctaaggatagagaggagttcttcaggcacctgatagtaacccgcagtgtttataaagaaggcaaaggtcgagaatacattgattatattgtatctccggaaggaaaggttatttgtgaagctgaaacagacgcccctaattgggtaacaagaattagatgtaaatag

SEQ ID NO: 285209 - DNA, 174 bp, Morganella morganii
atgcaagacaatgaatttaaattagaatctaaattagcatttgaatatcttcgtcgtgacgaaagacctttaagtgagtcagagttttatagtaaatatttagaattaaaaataatatttgaacaagaaattaaatcacgaaaaaagaatacaacctttgacgtgctgtattaa

SEQ ID NO: 285210 - DNA, 525 bp, Morganella morganii
atgtcatatatagcaaccagtactggaaaacatattgatttcaccaatatcactccggctcagatttgtatcgaagatatcgcgcgtggcctgtcgaatgaatgccggtttgccgggcaactggaaagtttctattccgtggctcagcactctgtatacgtcagccagattgtaccaccggaatacgcactggaagccctgctgcacgatgcagctgaggcgtatatcaaggatatcccctcaccgctgaaagccatgctgccggactacaaggccgtggaaaaacgcatagagtcggttatccgtgaaaagttcggactgccaccagcaatgaccgttgatgttcattatgctgatctggtcatgctggcgaccgaaaagcgtgattttgaaatagaccccgccagccactggccgatgctagattcagcaccgccacatgatgacatcattatccagccactgacaccaccgcaggcatatcaccagtttatggcgcggtttgaaatgctgacagctgagtaa

SEQ ID NO: 285211 - DNA, 693 bp, Morganella morganii
atggctctaacagatatcaaagtcagaacagccaagccaatggataagcaatataagctgaccgatggcaacggtatgcatcttctcgtccatcctaatggttctaagtactggcgtttgcagtaccgttttgacggcaagcaaaagatgctggcacttggggtatatcctgaaatcacattggcggatgctagatcacgccgcgacaaagcgtgtaagctgttggcgaatggcgtagatccaggagacaaaaagaaaagtgataaggttgagcagagaaaagcccatacttttaaagaggtggcgattgagtggcatagcaccaataaaaagtggtctgaagatcatgctcatcgtgtgctaaaaagcctggaagataatctcttcgcagagctcggggagcgtaatatcacggagttaaagactcgcgatttattagcacctattaaagccgtggagatgtctagacgtcttgaggttgctgcccgtcttcaacagcgaaccacagcaatcatgcgttatgctgtgcagagtggattgattgattataaccccgctcaggagatggctggggcagttgcttctggaaacaggcaacatcgtccggcactggagttttacacccagaccgttaaggtgatagatgcggtaaacgcgcttgtggttgacgtgaaggccctcccggcgcaataa

SEQ ID NO: 285212 - DNA, 1599 bp, Morganella morganii
ttgaaatttgcacaagctctcagcattctctcaaagtcttcaccgtatgcggtcagtaccgagagagagcactatcaagatcacctcgttggattcaagaggtacatatacatcacgacagatatagaagcggattttaaaaaagcactcctatctgctaagtccaatcaagtcatcttcctatgcggaagtagtggtgatggcaagtctgagatcttgacgcagtacagccaaaagcacaaagtgactcatgacttccatttggatgcgactcacagcttcaatccaagccagacagccattcaagctcttgatcaaagattcacccagttcaagcaaagtcataaaccacttgttgtgggtattaacgttggtatgctcggcaattatgcagaagaaggttccaaagagcatagcgacatcaaaaaggtgctcagagactttctctctcgtaagcgatcagcaattccaaagcagtacgtattcttggattttgaagactatccaaaattcaccttcaatgctgagggctgtgcatcagactttgcagaaaaatttctaaaaagattgacagcacaaacgcttgataatcctttctatgcgctttatgacaaagagctcaaatctctaggtcatactcgcctgacggcaaactatgcgctgctgagtcgcccttcagttcaggaatctctgatcggcttattactcaaagcccgtcttatcaaagatcagttcctcacggcccgagcgttactggatttcattttccagttgctcgcggcggatggctacttgttcgacaacttgtttgcaggcagtgataacgagctgttatcccgtatacagggttttgacccaagtaatctgcacacgcgcaccgtcgatgagtttgtgcttcagcatgagctgggcattgaagatgagcgtttcaatgcgtttagatctaaaattaacgagcttggtttttacgaggtaaccaaagcaacgtcttttcttcgccttttctatttgcttcggggtgacaaagagctcagcaatgagtttgtaacgcctatccaaaacgagttcacaaacaatctggtagaaacctatgcatctgtctggatgcgacatcgtgatttcgatggttcaggaaagatgcgcaaactgcttggcagtttctacaaagaaacgctgatcgcagcgcttcaccgctattgtaatcgtcatgccccaacactcgacaaagacgagtatttagtttctgagcttaatggctacaaaacggcggtgtctcttgaagttaaggccgatttttcagcaatacaaaacagtacactcgaaaaaataggcaccttcaatgtgtatctgaaagtcgatgaacaatcgcttaagccaatgccaattagcgtcaaactacttgagcttttggtcaagattgggcaggggtatcgccctaacaagcacgacaaaaatgctgttttgttacttgatgaagcattggaacagatgctgacagtagctaagcaaaaagagaccttttttattctcaagggtgataagcgctacaaaatcgtgaaagaagaaagtgactattttgaagtgagtggtatgcactaa

SEQ ID NO: 285213 - DNA, 1356 bp, Morganella morganii
atgacgaccgataatttcacattaccgataaaggccggtttgccacaaacggtagctgataagttccaaaataagaatacgttgagcagttacattcccattcgtacgcaaggcaatgattttgactggtcatcagtcgtgggcttagtcctgcgtggattactttgtaaaaaaatagaaaagtacaattaccaagattttactgcggattgcaaaaacaacttacaaaacaaattgggtgaagaggaattttggagtgtacttgaagatatgtatttcactaatgaaaatatattctcggtaacccctgagtttctgttgtttaagagccagaagagccaagataacaagtacacgcgcgacatgcgaatggcatccttgtttattaacttacttcaaggacagcaaattgaacgatttgaatctaacttgaacttcctcgaagaggagtttcttaaaacgcttttagacaaaacaaagtcagatcgtgacaaggacttccaagtgaccgagtcaccatatttgccctatatagcagaggcgtttaaacgtgacctcgagtttttaactggttatccgaaatacctgttggatgagttcgagcgtttcttggcattctatggctttgcttacacggctcaattaagcctatcgttgtcggattggaaaacaggtgaagccccaaccgcgaaaccgctgtatttcatcatggatcatgagcgcgccagcagtgaacgtatccatatcaaaaagcacggttacaagctttttagcgaatcgtctttcaagctgtttcccttcctctctatgctggaaaatcttcaaccaaacccagaaaaattaaaaaaacctttgtggcaattggcaaaggatattaagagttcagagcggagtgatctagctgggtatattgaaaattacgcaaaaatgtttcgccacaacagaaaacttgaaacagcaatacctgaaaaagcagaaaccgcaattgattggttggaatatgctttgaagcttgctgaagaacagttcagagaccctaaaaccgaccgtccggggactatcaaaaaatatattaaagcggttgaagaaaacatggctactggcttcgtgcaagctcgtggtcgctctggtcgggtgttagtactcactcaagaccacattattttgcttactaacctggtggtgggtaaagaagaaaagcttcgcttccatgagctgataattggcttacagcaaagggggatttttgttgataagcagacagaacaagagcttattaagttctatgagcgaattggcaacgttgaacgcatgagtgatagtggagatgcagtgtatgtgcgcaaaacaatttga

SEQ ID NO: 285214 - DNA, 5049 bp, Morganella morganii
atgtgcgcaaaacaatttgaatcgtttctggttgagcagtttttactgcacgcgaaaggaaacatccgcgcaggctatcgctaccagtttaactctcctgaccatgctaatagtcagcgacttttcgatgcgctcttagcgcgaaaaggaggagagagcgaagctcgcaatggtgtagcgctgagctatttagacctagaagactgcaaagtggtgccagtgcttcatagcgaagatgcgtgtgaaacgggctttaccgaaaactacatctctaatttgcgtgacgaaatagcaagccaggaaggtccgttgaagggctgtgcactggtggtgattcacaatagtcgcctagatactctcatcaactcggcggaagatcttggccagtctggccaggtgtggagtccagggaaaatcaaattcgctcttagtggctttattgagcaatctgacaaatctcgagacgtttcgctttgccttttggacgaccaatttgacgcgattttggaagatggtgcgaccatgttcggtttcgagtctttatacaaggcagttgaggatggcgagctgtgtttcagcgagctaggcatgtttgaggatccttttgttgctgagttatcgggcaataaaaaacagatcaaacagcgcctagaagaaaaccgtacgctttaccaagagttgtcgtttgaagtagagcattttggtcagcaactcgaagaaaggctgaaaggctttagtagtaggtttatcaaagaacatttttctgacgatggttggaaagatgtggagtttgaaacttatcgagaagagatcaaaaggaataagattcagaaccttaagcatgaaggtgaagacgagaccaataatgcgcaagtgattggtcgctacccaaaagaaactaaagcaggattgcgtgaccgtcacttgattattgcactggaagaagggcaaagtgagtttgaacttaaactgagcttttctggcatcagcgatttaagaaaagagcagtttaaagtctcgccagcgaatgcacttggcaaacaagaagtcatcagcacgcgcctaactagtaaaggggcaaacgctactctagcagctagttatgccaatgagcctttgtttttcacgctagcattgaagcgtgacaatacctctgaacaccataacttccgttgcttggttgtcagaaaaggcgagtttcacctcgaggcattcaaaaacattttcgccgttgagccttcaaaaaaacgccttaccttgaaaacggtagacaacagcttggttattaacccggcgctaactgcaaaccgaagcctagatgatgtcggtgaagtggttgactgcgcagaatttggtgttgtcgattttgaatctttggccaacgagtcagaagaaatcagctttgtggtgaaatcaggtgataattccctgacattttatattgagggtgaacaggtagaaagcagcctgtccttcccattgctgcttaaccaatctcgcttccacaaattgtttgacgatcacgtgtttggcgagctttatccgagtaaagacgttgtcgcgatcgatcatagtgaatttcgcgtcatggagccgcgcattagcctacttcgttgggaagagtgtttcgttcagcaaaagcaaatctacctagcggaatccaacagcatggcgttggaacagttaaggtctattgatgacggtcttcactcagcataccaagcactgtttgactatctagcgagccgacgaacaactatttcgttggtttcgtgggggcctatatttacggcactcgtgaaagcgaccgtggatgcattccttgattatttcaacgcgatcccaactggtggcatgcttaccaaagagcaaaagcttgtgatgcaaatcggtttggttcgcgagaatggtgaagaatattactcgccattccacccaatggtgttggcttactacttaaatctttgtaatgaaatgcaaaaagatggcagctttgctgacttgccaactgtcacgttcaatcgcttggggccaagtggactgcttccgtatgtctatcatcccaagcatgggtttgcctacaaccagcaagtaacagaaaacgggttttgggttaaaagtgtccctcaccagaaaagttgtctgaagttcgttcgcaagctggttaaagaaaagatcaacgagttccaaaaagcgtttcgccacttgtttaccggctcagagaagagtgtgttggtgaatgccgtgaatcaagatcgtgcagaagagttattcctcggtttggttgactatgtaaaagataacctcgataaagcggcatcaattcatgtcaacctctacgatgatgagctggttttcaatgcatttgaccagtttgcagaaacgttcaattacgaagaattaaagtcttggttggaattggaccgagagaaagtgcgagaaaatgccgacaccattatcgatattctgcgaacccggctaacttacagcaagtttaccaatgctcaaagtgaacgcgaagggcaagcctactcgcacctgtcttttttcagaaacaacgacagcgtgaagttaacgaccttgagcgttgacgacatgcctagtggtattgcgtgtgatggtctgctgacgggagacgcttctaaaagtgatgaaggctcatacttcactgcatttggtttgcaaaacgttcaatatagtaaccaaccacacttggaaatagcgaagtatgttggctcgttaatagaaccagcatttaagcccagcacacaatacacgggggccaatgctcctgctcttgcggtcagtgaagactttaaatctctgctagcgcgctcttatgacagctcgatttggaccaccatcatcgacccgaaagtgacgctagacttcttccacgccaatcaatgtatcgtgcttattcattattctgatcagtacaccagctcagccagctacgatgcgataaccgtgacggcacagcgtggtttgttcgaaagggtggttgcacaaagtggcggcaagcagattaacgagttcaatgccttcaatggtgattggctactgaagatgttgacttgcaacgacaccattcgcaaagagcgaactggcattatcggcgcctataaatttgcgacgtgtctggtgcaccaatctgatatcacctgggttccgctctcagttggtgaaatgatccgcgtgtcgggtaacatcggcctgaaaatgaccgacagtgacttctcacgcaatgtgcagagatataaaaaaggcgcgatttcagatgatatactgctggtgggctttaaagagggtaacctttatttgcttcctgtcgaagtgaaagcaggctccacgccagactacaaaaaagcagtacagcaagcgaatgagcttcgccgctatctaacagagcttttgagcgacaagacactggcgtcgaagctataccgaggcttgtttatccgccaagtgttgatgcaaatcgacaaataccgtctgtacaacgtattcagcaatgactatttcgaagccctgctggcagagaaagaagagtggctacgcggtaactacgcgattgcggagcttgagaactatccagcaggtctagtggttagccaccttgaaagcggaagctgtttcgaacctggctataacatgcaggatggcgtgttgaaggttgaccttcctatgtctttgctgccttcactggtgcaacacccgcttcaagtattaatgaacgaaaaggacatcgcacagatctgccatgtgccggcggagtatatgttggtggggcagacagctttgaaaaaaagagagtcgctcgttccattagacgttgtggtcgataagccagaggatttaaaaccgaacctccaaacagaggagccgtcaaagttagctgcagagccaacctcagattatgcgagtgaatgccgagttgaaattggtcagaatacgcttaccggcgaaaaagttttctgggagtacgggcacaaggatttagcaaaccgtcacctgatcatttttggtagctcagggcagggtaagacctactgtatacaaggtttgttgatgagcttggccgatgctcaaattcggtcgctggtgattgattatacaaacggattcttgccgaatcaccttgagccggagtttattgaacgaacaaatcctaaatccaatattctttgtaatgagccatttggtatgtcgccatttagagctcaaaagcaagattttggcgggatttttctcgaagagaagcctcatatggtggctggaagggtagcctctgtttttaacaaggtatattcgacaattggcgagcgccagatcgcagtgctcaatgaagtgattgaatcgggtgtccaacgatatggtagtgcttatagcttacagaatatgttggatgacctaaacgaggaagaaactgcaggaccagcacttgcaagcaagctggctcctcttgttaagtctaacttgttttcatctgacagtgataaaagttggaatgatgtgtttgagagtgaacatcaccgctcaacaattatgcaacttgcgtcgcttaaccacgatatttcaatgctttgtactgagtttttactttgggatctatactcctacgcatgtagttacggtagtaaggaaaaaccgattcctattgtattggatgaagtgcagaacctcgatcatcgcctggagagcccattgggcaaaatgttaacggaaggacgcaagtttggggtgtccctaattctggcgactcaaacgctaagtatgctgcgtaaagatgagcaagatcgtttattccaggcgtgtcacaagctgatttttgcaccagcaaaaacagagacaaagacgtacgcgaaaattcttgaactgagcatgccaggtacaaagcaggctgagtgggaaaagcaactaggagacctatccaaaggacagtgtttatcagttggctaccatttggataacggtcagttgaagatgagtgttaagaaagtgaaggtttcctccatgttatcccgcctgaacaattctaagggttga

SEQ ID NO: 285215 - DNA, 360 bp, Morganella morganii; identical to SEQ ID NO: 78915

SEQ ID NO: 285216 - DNA, 2001 bp, Morganella morganii
gtgctcattaaacaactagtgttacataattttcgggtatttaacggtactcataccattgatctggcacccagaaagcgcccacacgatttgaatccacgacctattgtactgtttggtggtttaaacggtgcagggaaaacgtcgatcctatcagcgatccgtctagcactatatggtcggctggcgtttggccttgccactcaacaacaggaatatgtcgagcaacttagttcgttaattcacaacggtgcgtacgatattgaacaacctgaggaagccgctgtcgaattgacctttacctataataagggcggccatgaagcggaatttaccgttacgcgaacctggaaaaaaggtaagaaagatcgcctatctctgcaacaggatggacagccactcagtgagctggattacgatcagtgccaggggtttcttaatgaattaatcccgcatggcattgccgatctgttcttttttgatggcgagaaaattgcggagctggcggaagatgaatccggcaatattttgcgtaccgcagtgcgccgtttattaggtctggatctgatatccaaactgcgtaatgacttaatgatttttgttaagcgccagcaatccagccagttggtgggttctcaacaacagcagattgcagagcttgaaaaacaaagtaaagaattggcctgccagactgaagagatactggaaagagccgattttgccaaatcgcggattgagtttatttctaaagatatcatccgttatgaaggtttgctaaatgctcaggggggggcttttgcccagacaaaagcgcaggaaaagcagaaagttgatgcgttattgaaagataaggaacgtctggaaaaagcactgcgtcaggaatgtgatgggccgctaccttatgcgcttgcgcccactattttgtctcgtttactgcaacaaattactgatgaaacgcagattaaacaggcaaaaagctttgaaaaagagctgagccagtttttaacgcaactcagaaatgatattgcatttcgttctgagggaactggcaaaatagcagctgaagcgattaccgataatctaaaagagtatatggcaactaagcctaaaggcgatttgctgtttgatatctctgaacgtgaagccggtatgctccaacagtcgattgaacaagactgcaaaaaggcatggcaacgcttcgatctttaccgtacccagttatcagagactgaacagcagttagagcaggctgctgcaaatattgcccgtgccccggaagacgaccagttaatggagctctttgagaagctacgcgaactggataagcaacgtgaaaaacagcggcaaaaatatctttcattgctggaagatgctaaacgaattaagcaacagcaactggattgcgttcgtcaggtacaaaaaatgcatgatgttgcccgaagtcagcatggcttgagtagcgcctttaaaaacgctcaagaaacgattaatttactcggtcgatacagtaatgtattaacgcaggcaagagtgaaaacactgtcagcgaatttcgaaatagcctatcgcaaactggcccgtaaagaagatttacaacttagtgcgcacattaacccagagacgtttgacgtagagctgattgatgaacaaggatccgtcataaaacgtaagctgctttctgccggtgaaaagcaaatttatgcaattgctattcttgaggctttagcaaaaacctcaggccgtgatttaccggtgattatcgatacgccattaggacgtctggattctcagcatcgggataaactgattaaccactatttcccgtttgccagccatcaggtagtgctgctatctactgatacggaagtggatgagcgttattttgttgatcaattgcgtgatgatatctctcatgcttatgagattgtgtttaatgcacataccaaatcgtctgcactgaaacctggctatttctgggaattaactaaggaggcgatctga

SEQ ID NO: 285217 - DNA, 1635 bp, Morganella morganii
atgaataaattagtacaagcctatgatctggcagactatgaagattttataaacgaagagcagtttgctggtcacccattagcatcatatgtatcagaagtacaaagaatatattgttctgataaacgcccctgggttattggttatagtggcgggaaggactcttctgctgttatcacattagtttatctggcattacttggtttacctccagaaatgagaaacaaagatgtgtttgttgtttcatctgatactctggttgaaacgcctgtggtagttgatttaattaagaaaacgatgttgcagattgaggcaggcgcaaagcgtaatgacctgccaatcactcaacacgcagtaacgcctaaaacgaatgaaaccttctgggtcaatttactgggtaaaggttatccggctccaacccggagtttccgttggtgcactgagcgcatgaaaatcaatccggtgagtgactttattaaagataaggtcagccagtttgatgaagtgattgttgtcctgggttcacgtagtagtgagagtgcctcccgtgcacaggtcatcgcaaagcacaaaattgatggctcacgcctggcccgacataccacgctggcaaatgcgtttatctatacccctattgatacctgggatgtcgaagacgtctggaaactgctgcgcggcgcgttccgctatgccccggacgatattgatgagtgggaaagcccgtggggtggaaacaaccgtcctctgtggacgctatatatggactcttccgctcagggtgagtgtcccctggtgatcgatgaaagtaccccttcttgtggtaactcccgctttggctgctggacctgtaccgtggtcaccaaagataaagcgatggagagcctgatcaagaatggcgaagaatggatgtctccgctgctgaaataccgtgatctgctggcatttaccaccgatccagtaaataaagacacgtttcgcaactataaacgtcgtactggcaaggtcagttatcagtatgccaaagatggcgaagaaattagtgccgagcgtaaacatgttcctggcccctactggcttaagtatcgccagcagtggctaaaagagctgctggtaatcgagcgtgatttaaatgctcaaggccatacgattacgttaattacccaaccggagctgcatgctatccgtcaggaatggttgaaagatcctaatgaaccagactggtatgacacgctaccgggtatttaccgagaagtgtatcagcaggatttagactgggtagtggacgatcagtcgcgctttgacgccagcgatgcagatttgttgatacagatagctcagggatttgacgttgcacccgagatggtcatgaagctgattgaactggaagtgtcaatggaagggctaagccgtcgtcaggggatttttgacaaactcggtaccattctaaaacaggactggggtagtctcgaagagatccagcagcaacaagcagcactacaaaaacgtaacgaccgggatattcaccaggaagaagtcaccaggctggaagctgaacttcaggttctacagcgaagaattgtcgatgccagtgaatcctctgttttagtcgaggaggaaaacgaacgtgctcattaa

SEQ ID NO: 285218 - DNA, 1086 bp, Morganella morganii
gtggctcattttgatactgaatattgttattctttccccgctgtaagaggaattcaggcagggagagctttttatattgcgacatgtcccatgagaattatccctaaaatctttagtttcgatgaaagcgaagttccgccggagctgagagcacaaagaattctgaataaagcgcgaataccggaaatggtacgatatttacttgataatccaaacgattatgttttttctgcattaactgcatcaatagcagttgatgtccagttcgaagaacattcaggttcaaacaatctgggaacactacgtgtccctatggaagcccagattttgattaatgatggtcagcacagacgtaaagcaatagaagatgctctggaggaaagacctgaactagggcaggataatatccctgtgctcttttttgtcgatgagggcctcaaaagaagccagcagatgttctctgacttaaataagtatgctatcagacccagcccttcacttgcgaccctgtatgaccatcgggatgccagttctaatttagccaaatacctggcaatgtcagtcgaaccgtttacaggccttactgagctggaaaaatcgagtatcagtgttttatcaaacaagctttttactctgagcagcataaaacaagcaaccagagtcttactcgggaaacagcctaaaaaagatgatattgaagacagtatgctgattgctactgcctattggaaacaggtatatctggtcatgccagattggcagctggcagcaaaaaaagaagtatctcccgcacatttacgccaggaatatgtacatgctcatggcataggattacaggcactgggattgctggggaacactttattaagagattaccctgataaatggcagggaaagcttctgggtttaaaaacgtttaactggaagaaaagtaacccggaactaataaaaagagcaatgctgcacggaaaactaagcaaatcgaacacagctatccagctaacgtgtaatgccttaaaatctgctttattgcttcctttaactattgaagaacaagaaatagaatctcagctggtaaccccatga

SEQ ID NO: 285219 - DNA, 669 bp, Morganella morganii
ttgttgctcggcgtctttaccggctataacgatgtcaaactgaagcatcagcgcggcggcgaaagcagcatcgacagtattactgccggtggttatgccacctggttctcagataacggctggtacctcgatggtgtgctgaaatataaccatttcaataatgagttacgtgcggtttccaccaaccgcagcagcatccgcggagattattcacagaatgcttacggtgcatccgcagaggccggttacacctttgatctgccggaagccttctgggccgaaccgtatgcccgcctgagctatatgcgtgcggacagcaaatcagttcatctgaacaataatatgcaggcaaaactggatgcacagcagtccctgcaatccgaactcggcctgcacgcaggcaaagatttcaccctgaacaatcaggtgatcatcaccccttacgccacactggcctggcagcatgagtttatcagcaataatgatgtgaccattaaccagcgcaatacgttcgacaccgatttctccggtgacagcctgaaagccggcggcgggttgactgtccgtttcacgccgcagattcaggcgtatgcggaaatcgattaccgtaaaggcgataaaacagaatcgccgctgcacggcaatatcggcgtgcgctacaacttttaa

SEQ ID NO: 285220 - DNA, 165 bp, Morganella morganii
atgactacagaacaactcgcagaattaaaacgcattgcactggaaaaacaccgtgaagctgaaaaggccatgtatgcctatgcaaaagagtgtgacggtattgagcgcatggaggcatttgaggcatacgaaaatatcagaacagcaacgcgggttcgcggatag

SEQ ID NO: 285221 - DNA, 234 bp, Morganella morganii
atgagcggcaaaaaagtaccagttcagcaaaccagccttcgcgaaattgatattgatatagccaaggctgcatacaaagactatgcgcggagatatggcgccgaccagtcattcgagctgacaatgaggcgcggtgggttttgctgggccgaaattgcaggccacctgtacgggcaaattcaacaccttgagcaggaaattcgggagattgaacaatcacgcctcgctaaatag

SEQ ID NO: 285222 - DNA, 690 bp, Morganella morganii
atgaataaattaatcaaaaaatcacacggccagccggtagtaacaactgacgtgatcgccaatgagtttggccggcagcataaaaacgttcttcaggatgtcaggagcctggtcgaaagcgggcatttaggagagcttgatttcaagccctcctcatatatctcaaagcagcggaaagaattaccttgttatgagctgactgagcgcggattccttatcgttatgccgtttattggcggtgagaaagcaaaagacgggcaggttcgcctggttgacagtttcatccagtttcgtgaaaaggcagcgaaagaagcgcaggtgcagattgagcgtaatgttgccagagtggaatacaagcctatgactgatgctgttaagcaaagcaaggtggatgaaggcaaagatccggcgccgtaccatttcagcaatgaggccgacctgattaaccgcattgttctcggtacgtcatcagcaaaattccggaaggacaaagacatcgggaaaacagagccgatacgtgattacctctctcatcagcaaatcagggcgattacggagcttcagcgagcgaatactgtgtttatcacgatgggatggggcttcgagcagcgcaagggcacgctcaccggactgttcgataaaaaccacaagaaagcattgctggaagaaacacatttgctgaatgcgtaa

SEQ ID NO: 285223 - DNA, 1014 bp, Morganella morganii
atgactgatagcaaaaaagaaaaagttacagggaaggccgttggcggaaaggctagagcggcaaaaatgacactagaagaaaaaaaagaagccgggaagagaatggctgaggcgaaaaaagaaaaagcactattgcctacagttttaaatgaagggatgttaactgttggggatactgagttggatgttgctgttttgcaggacggcactcgtgttgtgtcagtaacttcgatattttccgcgcttggaagaactcagcgtggatacaaaaaagacgttagcaatcagagggttataggtcagatccaaatgcctgcttttatggatgcaatgaacctaaaaccctttataactcaagaccttatggaccagatccctagggttaaatacaagactaaatctggggtagtaaaagaaggtcataatgtattaatactgccgctggttggcgacttgtacttaagggcaagggaagccggagcaataaaaaccaaagaccagctagctgtagcccataaagcggaggtacttgttaggtcgttggcgaaagttggtgtaattgcattggttgatgaagccaccggctaccaaagaacccgagaaagggatgctctggcgaaaatgctggaagcttttgttgccactgaacttaagccatgggtaagtactttcccaccggactattacgaaggcctttttaagatatacggacttgactatcctcctgctggaagcaataaatcgtggcgacctgggtttattggtaatgtgacaaataatgttgtttacagtcgattagcgccagatttgttgcctgagctcaagaaggctgcatcaagatctgaaagaaaggccaaattgcatcaatggctaacagaagacatcggtcacccgaaattaagggagcacttggcatcaattgttacattgctaaaaatatcaaaaaccccagagcaattttacgatttagtcgaccaggttcacccaaaattaataatggatgaatctgagtaa

SEQ ID NO: 285224 - DNA, 396 bp, Morganella morganii
atgagcaggatagccccttacccactgcgtatgccgccggagatgcgggaggaaatagaaaaggaagccactgagtcgcatagaagtcttcagcaggagataatttaccggttggaatcttaccgtcttattgaatctcttctccggagtatgcccatcaaaggtgatgcatattcccaagttatggtattggctcaggcattcaaacaagcagagcagcaagcagaaaagattgaagcgatgaaaaaagatatggctctattggctgagtctacaaaatcatccgacatagaccggtttttaaaaatatctcaacaactcgacataatcagagctgctgttgataaatctctgaaagagataccaccgcgttatgaggattcagacaaaaaataa

SEQ ID NO: 285225 - DNA, 225 bp, Morganella morganii
atgcacaatatcgccaacctcccccaagacgaaaaagacaaaattaatgccgatttagccgcatccggtatcgcgtacaaagaaagactcggactgccgtatgatctgtacgaaacagaaaaccagcagcccgagcatttgcggccgtacttcagagagagactggagcactacagggagatcgggaaaaggtttccgcgcgggttcgagtatgaaaaggagtga

SEQ ID NO: 285226 - DNA, 855 bp, Morganella morganii
atggttttatttaacgaaaggccaccttttgaaaaggcatggctctctacctcattccgcgtagttatggccgggatgggtgatgatacggtaatgctcattgctgaaatgtataaacgcggatatgaaccggatgagattatattttgtgataccggctctgagttcgagtacacctataattttattggctggctgagaagctggtgcaatgaaaggaagtggtcaaaagtcgttgtgctgcgtaagtgggataaagacggcgaaccattaagcgtcattgaaacggcggagaaaaataacactcttcctcctgctgctttcggcagcaaatcatgctcactgcgatttaaagtagagacagcggacaagtattttcataaccatcctgagtgcttaaaggcatggggagttgagaaaaaaggcgttccgctggattctcacaccggaagtattctgcgtattatcggtattaacgccgatgagccgcaacgcgccgaacgctggaaaccagagcataaatgggtgcaggtgtttccgctggttgactggaatatcggagaaaaagaatcatcagcggttgaagaagtcggactgtattatcccggcaaatcatcctgcatctgctgccctcaccttaccggatctgaattgattatgttacgcgacagatacccagaagatttcgggcgcattatcgcgatggagaataattatattcatcacgaactccggccagactcaacaacaaaaggaatgtgtcgcagaaaaacaataaatcagaaaatagatgaatacgagcgtgaccaactggatattgcagaaggtcagtgtcagttgtgcttattgcagtga

SEQ ID NO: 285227 - DNA, 216 bp, Morganella morganii
atgaaagttaaattattgaacgatggtggttacggtggaatgagaaatactaagttccctgccattgtaaatggtttttattatgacgtgtcagaccgcgtagttggtattgattgcagtgaattaatcagagtcggtgctgatgaagatacttttggtattgatggtgacttatcttttctgattggcgaagaatgtgaggtaatcaatgaataa

SEQ ID NO: 285228 - DNA, 381 bp, Morganella morganii
atgaataaatatcgtgacaaatcagactttgagattaataaggctgtggctgttaatattaatggcactgactctgttttagaaaagttcggtagaatatatatcagtgatggcgatagaggtgcgatggtgagcttctccccatgcaacaacccagcggacgcatggcctattattttaaaaaacagaatcagcattatcattccagggaatgaatatagtgatggttacagcactccatttgctgcaagtggatttgatgatgtttctcatataaccagaaatacatattatacagatgaggaatcattcaatcaaaacccactacgcgcagcaatggaagtattcctgatgatgaaggacgcggagaatggtaaatag

SEQ ID NO: 285229 - DNA, 183 bp, Morganella morganii
atggtaaatagttaccactgcgaagcatgcaacaagccacttaatgaggatgagctgctttattatggattcacctgtgaaaaatgtgaacgtcatttcattactgagcatgaaggaaataaattcaaaaccgcaatatcgctcatcaggctctatttcagaaaggtaatttactcagcgtag

SEQ ID NO: 285230 - DNA, 315 bp, Morganella morganii
atgaaaatgaaagaaaacccagacgtttgggatcaggtactgatgtatctgtctcagtacaaagaccagggcatatttgccgctctcgctgggtcggtggctatccttcgtggtcgctataacggcggaggatggaagaagaccatttttgacgggctgatgtgtgcaatcttcgcgtggttcgtgaaggatttgctggcgctactcggccttaatcctgatttggcatatctgaccagtgtattcattgggtatatcggcgtggatgcgctgagcaaaataatcaaaggcaaggcgggagtgagcgatgagtag

SEQ ID NO: 285231 - DNA, 135 bp, Morganella morganii
atgacttgcgcaatatgcagtaaagaactggccgacgatgaagtttacgtgtgcgaacagtgcgccagtgaatgtccgcatcttgaagtagtcgagaagataaaaggagatggtgatgccgagaagaaggagtaa

SEQ ID NO: 285232 - DNA, 468 bp, Morganella morganii
atggatgaaatagatcgcaagattcttgcagagcttcaaatgaatggacgactatctctgactgaactagcagagcgaactggggcgagtttgtcatcttgccagcggcgggttaaagcattggagttggcaggtactatcagtgggtaccgggctcatctggatcctgccagttttggatttaccttttcagcaattgtctttgtcactctgcgtgaaggtgatcggcatacagtcagcatatttgaagacgtgatcaaaacgatcccacaagttattctcgcacaacgtctatttggtgatccggattatttactccatgttattactcgtgatcttcctgcatttcagcgactttatgatgagcagctctcatgtttagcaggggtacaacgccttacttcgacattggttatgaaaacagtcgtacaggatcaacctttgtttatggaattaatgcgtgggtaa

SEQ ID NO: 285233 - DNA, 618 bp, Morganella morganii
atggcagtgagtatatttgtagcattctgggcggtttctattctcttcgttattacaccaggggctgactgggcctatgctatttcggcaggtatccaagggaataggatcgtacctgccgtgactggcatgcttggagggcatctgcttgcaacacttatagtggcagctggtgtaggcacactcattacagaagtaccaggcatgctgtctattctgactatagtaggagcaggctatcttatctggctgggtataggcatgctccgtcatccttcatcgcttgtaacaaatgacaatgaaaaagatgatgtgtcttggatgaagtgggtaataaaaggattttgtatcagtggcctgaatccgaaagttttcttgttgtttctcgccctgcttccccagtttactgacattaagtctagttggcccctgtcgctgcaaatgactgcactgggactaatacatgtattaagctgtggtgtagtttacctgatagttggatacggttcgcgcgcggtactccaggcgcgcccacgatcagctcaaatagttaaccgaatttctggagcactaatgataattatcgctgtgattttgctggctgagtcattcatctaa

SEQ ID NO: 285234 - DNA, 477 bp, Morganella morganii; identical to SEQ ID NO: 279935

SEQ ID NO: 285235 - DNA, 192 bp, Morganella morganii; identical to SEQ ID NO: 278789

SEQ ID NO: 285236 - DNA, 393 bp, Morganella morganii
atgacaactgaaaatgaaaaaacagggcagcaagtgccaccctatggtgatgagccttgtatctactcaggaaatcttgatttagatgcactgatccgctgggtggaggatgaggccaataaattaaaagtaatcagacacgcaataactgaatcaagaagaacacttggttatctcatgaaagaaatgtctggtgtcattcagtgtcagactctgataaatagtatgcgccatcacccagattccagtttactttcagattccaatcaattttcgaatgatctgaattcaattttattacatttaaatagtcacgaactccttcacagaagctatcaggggataggtgtttcagaagaagaaaaaccatttgctgaagcgaaagagaattag

SEQ ID NO: 285237 - DNA, 465 bp, Morganella morganii
atgaaaaccggtcaacttgctactctgtttgaacagatacaacgcattgtttatccattctataacgccatatataatgataattattcccgtagcggcgataaagatagcgccaagttgcattcctacatgctattagttcttgaaatttacattgctgactacaaagaaaaattaaatttaagcaagacaccatttattaaattgacgggtgattcagtattaaggcatgcgatactaactgaataccggtatccaattgaacaggctaattctctttcgcttcagcaaatggtttttcttcttctgaaacacctatcccctgatagcttctgtgaaggagttcgtgactatttaaatgtaataaaattgaattcagatcattcgaaaattgattggaatctgaaagtaaactggaatctgggtgatggcgcatactatttatcagagtctgacactgaatga

SEQ ID NO: 285238 - DNA, 645 bp, Morganella morganii
atgattaaggttaaaatttacaaggccgataaatttttatctctcaatgagataattaataaaattaatgacaatctatatagtgacgataaaggctatggatttcatatagttgaaaatggagatgtgcttgaagtaagatttactatgcgtagtattagcacgcaaaatattgaatatgcaaatggtgagcattctgaagtcgaagttgcttcttatatgcatgttaattttgggatcaggtataataaaaatattgtattatatgctataaatcctccattaagtatgaaaataccttatacgatggttcataaactatttggtgaggacagtggtttaaagcccattgaacttgaccttcggaaggttatagatggtttatttggtaattttgatttaaaaataaagtcgatctccctttctaacattactattgatgcttatactttagctaaaaccaaaatagtgacctctaaaagccttagtgaaatctatagggataattatatgaatagcaatgctattttggactctgcccacttttatgtgaatggcattgaaactgagatgtctagaaccggaagaatccgtgtgaggaaagctcaactatcaacacttctttcaattcttgaatctttatag

SEQ ID NO: 285239 - DNA, 501 bp, Morganella morganii
atgacaaaaatagagatgatgaactcgttagaagattcgcagcaagaaaaacagatgacgaaaataatattagacgatcacttattgaatcagatttcaatgacagtagagccgttgacggaatcgatgatgatattatcggaatcagtcagcacagcattaaatcagacacaacggacaattacaagagtgaacaattcattagaagcaacaactacagcattaaactcagcgaaaaatataatagaccaacaagcattaaagttagaagaacaacacaaaaagctgcacaaatactcaacagagttaaaaaacaatacaataaagaaccaatcaagccttataatcaaggtagcttcaatagtaggagttctaaacttagcagtggttctattagtaggatacttgatcatgcagaaacagcaaacgcagccactaataaatttagactcaagagcggtagccgtttcaatagtagagcaactaagatcgaagagataa

SEQ ID NO: 285240 - DNA, 510 bp, Morganella morganii
atgatcgtagcctcagaacatcaaacaaaactaagacagaaagaaatacaggaaatcgacaggaaggcctctaaagagcatgaggaggcgaagaagaatagcaacttcacccagacatacccaaagggctggcaacgcattagagagcttgtgagggacaaacagggtgctgctgctataggtctttactcatttttcgctgaacacatagatcctacttgtggtgccgtggtctgcgaccagcaatttttagctaatcagatgggtgtttctactcggacaattcgtcgttggttagattatttggaagagaagggtgcattggtaagaataccagttgctggcaaggtctgtgcttacgctttagatccccatgaagtctggaaaggatataacacatccaaagactactcagcctttgttaccaagacgttagtgaacaaagatggagaaataaaacgtcggataatggctatgttttccggagaggagagcggtcaagagcagtag

SEQ ID NO: 285241 - DNA, 195 bp, Morganella morganii
atgacagatacgagtggcaataaagagctgatgctggctgatatctctttcagggattacctggcaacagaggctatgaacgggcttttagccaaccatcaaagcaccccaatggggatgagtttcaagcctgattcattcgctgaagctgcataccgcatggcagacgcaatgctcagggcaagggagaaataa

SEQ ID NO: 285242 - DNA, 939 bp, Morganella morganii
ttgcttataaccgctattttcttatatctctgtaaagagcaacttgatttatatctaattacaaaaagtaatggatacctcagcaggtactcaggccaccaatcatcagcgtacaaggctggagatacaatattaacaactctattttatgtctttattgggatttgcttctccaaaaagtcaagcgcactgcaaaaaatatcatgtttttatttgttggtaattggattattaaatgccataggtgggcagcgagggccatttattgttagtctattgttcatcatttggttcattgggttaaccagagatataggcataaagaaattagcattttttgcaatttcatcttcattacttcttgtatttatcatgtcgtttactgttcgtggtgataaatattctgactttggaattattaacggcgtagctgtttttctttatcaccaagggattactttatctgtaataaattatggaatatcggagttgtttgataaatatccaatttatccatatataacttctttcataccgggcggggcaaggttgtcagcaatcataaatggtgggccattaatgccttatgagttagggttcggcgcatttactgctcatgctgcaaacccagtcgaatacgctaatggtagaggcactgggtggagtataattggaaatttctatctgttttcgggtggagtgatggtaatattctttgttatatcttctgtacttggtattgcattgagatatcttgagagctcggcaaaaacaagtaactttcaccttggcttactggcatgcattctgcctcaactgtttttttcagcaagagctgaatttaaaacagtatttacaactgcattaatgtatatttttattttcgcactactatcgttattctcatcaattataagaaataaaaagcagcccttatag

SEQ ID NO: 285243 - DNA, 315 bp, Morganella morganii
atgaaggcaatatatgaaagagtgttgcatcactttgataaaatgaatgtatcttcttccgtacccggtccaatggatgaatgcagaatcaagggaactcttaaatttttaaaaaaagaaggttgtgagttgccacaacaagaattaactagttgggcattatctaaaaactggaatccggggtttactaaaaaagtaacggaatggttgctaaaaattaatatgggtggaagagttgttattaaagataagcaatatggggttagcgagaaacttaaagctgaagtcctgctattgaaaaaagaattattataa

SEQ ID NO: 285244 - DNA, 375 bp, Morganella morganii
atgagactgaccaagagaaagaaagagatactggctctgtttgagagagacagcctggagtgggttacaacggagattggcgcaccgccttttgatgtgtcaggcgttgcttacatgctccacggatcggaatcattcagtaaaaaaagcattattgaatctgtgcgccggacgctggagaatatggtggctgacggcctgcttgagaaaatacccagttttgaaacccgccagaacaaacaccagtcttccgcacaatctcccggtgtacgctgcgtggtgagccgttacggattaccgggagaacaccggatcacaaaatatcaggatgccggcagtgattatattgacggcgagtttacccgcatcagttga

SEQ ID NO: 285245 - DNA, 351 bp, Morganella morganii
gtgagcacaaaaccgcagttatggccagcgggtgagcaattcacccgtgaggtaattattcagacaaacacagacccagtaccggtgatgatcacctacaccgtgccaccttttgaggtagttgtcgaagcctggcagaatacggacccggcaaaaaactacccgcagttacggcagtttattatcggctgggatttgcaggaaactctgacagatgatgtgctgatttcgtttctgacatcatacagcgggacatacgaagctattctgaatggctggtgtgaacagatgaaagatacgctggccgctaatcagtttctattttcaggtgcgcccgtatcggtcaactga

SEQ ID NO: 285246 - DNA, 501 bp, Morganella morganii
atgaattttaacaaactcgcatatccagaattaataactatcgccggtgaggaatacaaggggagcagggataaaaatacagttagaatcccatacactgatgagccagatgtaggaatcggcgatgtaataacacaaaaatccggtaaaagaattatcgaattaaaggtattagatgcatcttttcgggctggggcctcattacatgttggaaccagacatccccatgtattaactctccaggttgaaaatatgacagctagcgaacacaaaaatacagatattagctcagttgttaatattggtaatatttcagggcaccaagtgcaagttggaaataacaattcacaaataactaacttaaacattcaggaactggtcgaaaaaatcgcaaaatctgatgatgcagaagcgaaaagctttttgattaagttattagaaaataaaactgttgcaagtgttatcggtgctggtgtaaccggattgattggattactttaa

SEQ ID NO: 285247 - DNA, 579 bp, Morganella morganii
atgaaaagcaaaaatatgaccgttaccggtcagggcttcgatcaccctgaaatcagccaacatgatatttcagttatccgctttgagggcgttcaggttcggatcatcaaagtgaataatgaaccgtggtttatttttaaagatgtttgtaaggcacttggaatatcgaaatatcgggatgcattttcacgcttagacgcagatgaaagggagtcggttaaagtggacacccttggtggaaagcaggcagtatcagcatgttcagagtctggcttttacaaaacgattgctcgcagccgcaaagctaccactccgggtacttttgcacatcgttttagtaactgggtattccgtgacgtgatcccgtctatccgtaaaactggtgcttatggcgttccgttcgggctgctgaacgactttactcggcgcagcaatgaatatctgaaagtttcgtcgcagcgtggccgggatttgcaatcctgcaaagcagagaaaatcagtttagagactgaggaaaagcaactctgggatgaatatcagcctcagttgccaactatggcaggggaggaaccgcaatga

SEQ ID NO: 285248 - DNA, 300 bp, Morganella morganii
atgaaaaaccaatttttagcaccaacaccagaagaacgccggtctattcttgctgaatacggcgagccatttgatcgccttatccgagaggatgatcggcgacgcatcacttcaatatcacgcactacagcctatacactcgagaaagcaaacaaattccctgccagaaagccattgggccgtaattcctgtgcttggttgctgagtgacttgctcctgtgggttcgtaatccgccactggttgaagatgtaaataacccatacaaccgtaagaaaaaagaaaccgcagatcaggaataa

SEQ ID NO: 285249 - DNA, 837 bp, Morganella morganii
atgagaataaataataaaaaacagttgcctaaagaattcaatctaagtaagtatgactcattgtacgaaatgaatgataaggatttgtttagacagttgtattggcgtagtgatgatttgaatattacctctaaggaattttcaacctatggattagagtatggcgctatgtatccaatgaacagtaacctgggcgatccatttggaactactgatgacagcataaaaacaatggagcaaaaaaataaatctgataaaaaattaagattaagttatggtgatggaataaggcctataagtagatttgacttggcttcgttaagtgatgaaaaatctgttagtggggtgtataaagggaaagacatcttaatttcatattccgatgctggtaacttgttggagtctgacagtaatttattttgggatgcaatgatggagccagttagtttattatctggagcatatggaggtatggtgttggcttccgttgatcttagcactccagatgaatttttacttgatgatttcaaatcattaataattaaatggcgaaatgaattgaatgtaacgtctcctgatatattgaatggtaaatgggaatttataaagaagagaatattagattataaaataattcctttaattgatttaatgtcttgggctaaatctaatgattatgctatcacatacgaggtttatgcagtttctcttttccctgatggtgaaaaggggtctttagctattcctcaaacagtcttgccatttttagaaaaaatattgtctataaattctttggaaaaatataaaagggaaattattagtaataattttttatga

SEQ ID NO: 285250 - DNA, 480 bp, Morganella morganii
atggctgaaattatctatctaactctaaagggtagtaaacaaggacttatatctgcgggttgttcctcttacgattcaattggtaataaatatcaagagaatcatactgatgagatacttgtatattcaaccacttatgatttagcacgaaagcaaaatgtttcacatgcaccatttcttatgactaaggctgatgataaagcatcaccattattactttcttccattgctaataatgaattactagactgcatttttaattattaccgtatagataaaagtggggttatgacgccatataagacaataagactaactaaagcatctgttattcgcattactaatgagtcgcctaattcattaacagacaataacttgcaatcaatcgaaaaaatatcacttctctatgagagcataacttgctcacataacattgctaatacttctggttattcaatcagggatgaagctattcgatag

SEQ ID NO: 285251 - DNA, 579 bp, Morganella morganii
atgaaaatcaatgatgtgtattttaatcgattcaatattccgattgtaacttctcctgatgttcattcaggatcattaattaatgatcctgtgaaaatattcgtagtttctaattataattggggtattgggcatacaggtttagttgtcggtgagggagaggatgctattttgtatgatcctgccggaggatattcagcctgcccatcaaaaaaatgctataacaatataaatgaacccagaacactacgtagttccggggaattttttaattatccggagtttgattgggatgattacttatcatttcagttatgggatggtcctgatgttcaaattattgagtttatagtaccaagagaacaggctgaaaaaataaaattgcttatttttgatcatggcatggctgactggcttacttgttcgagaacagttttgagaattttaaaatccagtggcgggatttttaattcacttgaggaaagtattattctcagagatgacccctggaactttcgggaaaaattaattgatctttattatcctaaaagcggaggagttatttcaggtgcatactaa

SEQ ID NO: 285252 - DNA, 330 bp, Morganella morganii
atgcatcgccgtctgagagccaaatccctgccctgccagaacctgcgtcagcgccagacaataattgcagagttcagtgctgtcgggattaaagcggggaggagaagtgacagggggtatatcggtggtcagacattcaacaagatggggagcgatgggatcggcgagcttggatttcagcagagagagaccggtgcttatcctgccgcacaatgccagcttctgcaccgggtcggccgactcaatcaaaacttcagcaaacagggcgcaatggtcagccaggacagtaaatcagtatcagcggtgaaggaaacagaaactaacggatga

SEQ ID NO: 285253 - DNA, 2202 bp, Morganella morganii
gtggcgatcactgacggtgagggcaaaataacccgttaccgttacgggccgtttgacctgctgctggcgatggttcgccctgacggtacagaaatccgctttgaatatgacagcctgacgcggctgaaaaaagtgattaatgcggccggggatgaataccgctatgagcgggataaagcagggcagattatccgcgagaccgattttaccggccgggaaattcagtaccgttatgaccggctcggccgccgcacggccacccgttacccggatcagcatgaaatccgctggtcgtactccccggaagggctgataacccggcaggatatctggtttgatgacggcacacgcagtgaactgaaatccgccacgcactatgaatataacgcccggatgcagcttatccgcgccgaaaatccggatgcggtcaccgaatttgaatacgacgatgcagggcggcttatctgtgaaaaaatcaatggccgtgagattgagcatgagtgggatgaccggacagaccggctcacacagacccggttcgggtcgcaggcattacagtatcagtacggattacagggcgaactgacgcagtttcaggccggaaaacaccagccgctgcaactgagccgcaatgcgctcgggcaggaatacctgcgtcacagtcagtccggttttgcctcgtcacgccattacacggcgaccggcatgctggcgcatcagaccgccgggcgcggctcggacagttatcttcaggcgttgcgggataacccggtacagccgcctgccgccagtgatgtcaaccggagctggcagtatgataaagcctataacatcacggcgattgatgaccaccgctggcggcgtatacagtaccgctataatcagaatgaccagatagagaatacgtccttcggcggtttatatcctcagacagagcagttcagttacgacaccaacctgaatatccggcagcagacgctgataccgggtgaggcgcagggtgctctgcatcagttatcgcagcaacagcaggcgggacgggtggtccggcgcaccacaccaacaggacatcaggaataccactacgatatcaacgggcgtctggaacggaaaaccgagcaccggaacggcttccggccgcgcgagtggcgttaccagtgggacaccttaaatcagctcacatcctgcttcatgccgcagggcgactgctggtgttacacctatgatgctttcggccgccgcctgagcaaatatcaggtggttgatactcaggaacaaatccaccaacggcacctgaatctgccgccgaaaacccgtggccggcagtacctctggtccggcaatcagatgattgaggaagtaccggtctatgcggacggcacggtggcgtatgacgccgggattcagtggctgtatgaaccgggcgcacttactccggcggcgcggtatgaaaaagggaaactgcattacctggtcaccgaccatcagggcacaccgcgtgaaatcttcacggaaaccgggacggtcagttgggcagcacggccggacacgtggggacagatggcgttctggagcctgaaaaccagtgccaatgacccgaattacaccgaatgccacttccgcttcgcggggcagtatgaagatgctgaaacgggcttgtactacaaccggttccgctattatgataaggacacaggacagtacatcagccccgacccgatagggctggaaggtggctttaatccgtatgggtatgtgcaatgtcctgtgggctgggtggatccgtttgggttggcgggaacatcaacatttagcaataaatatcaggcagaagatgttttaggaagaaaagtatataaaaatactattgatgtaataccagatgcaccttcttatgtccatccgtcagttcacccatcaataaagggtaaaattgatgatggatggacaaacttagatttaatgaagaatggatatgcgcctattggtcctgatgggaagcaaattaacttacaccatgtaataggtaaagagcctggcccaatggttgaactggtagcaacaacacataaagattataataaaccattacatggacttatcgagaatggtaatagttttagaaatacctcagcactagatcgtcaatacaataaatataggcgtgattaccggaagctcagagcgaaagattttgaatga

SEQ ID NO: 285254 - DNA, 591 bp, Morganella morganii
atgattagaaagtacttacctgcccgttatgcagttgatactggtattattattgattcagaaggaaaaacaagtgatcagatagatgttgttatttttgataatcagtatacaccaacgttattggatcaaatggctcatcgttatattccggctgaatcagtgtatgctgtatttgaagttaaacctacaattaataaaaactatcttgattatgcgggtaaaaaggctgaatcagttagagtattaactcgaactagtgttccaattcaacatgctggtggagtttaccctgctaagccatcatttgatatcatagcaggaattattgcaactaaaattgattgggctgatggttttgctacttcatttcaacaaaatcttttatctttaactggaattaaaaaaattgattgtgggttatctgttataggtggatgttttgatacattttctatgaacaatacgttgaaaatagggccaacagataactcattagcatattttctttttcggttacttcaaaaactacaatcactgggcacagttcctgctattgattggaataaatatgctgaattgctaatctaa

SEQ ID NO: 285255 - DNA, 165 bp, Morganella morganii
atgaaaaaaaatgaattaactcaagccacaaaacctacccgcactcaacttattcgttcggtagcaacctctacagctattgaaacagggcaggagtctcgccgtcttgaagaagaaatgaaagtgaagcgtgaaaagtttgggtatttgaaacttgcgatttag

SEQ ID NO: 285256 - DNA, 618 bp, Morganella morganii
atgaataaatacgatgtgtttaacagcgaaggaaaatttgctgacggttctgatgaagaggtactggctaacaagctggggctttcaaacgttgatgatatcaatgatgctgagcttgtcctgttagaaaaactgtatcaagtcatttttgaagaacaattttccactgagcaaattaccgtatcacttattcagcgttggcatcgccaatggttagggaatgtttacgagtgggctggtcagttacgtacggtgaatattagcaaaggtggctttatgtttgcccctgccggtcgagttgcaaagttactggctcaatttgaaaaagagtttctagcgaagtatacaccttgcaccaatatgagccgagaacaagtcatagaagctattgccacagtgcatgtggagttaattctgatacatccatttagggaaggtaatgggcgcttatcgcgcttacttgctgatgtaatggcagtacaagctagtttccagccgttggattatgaaagttggactcaacaccccgagcagtacatcgcagcaatccacgcagggttaaaccttaactatgaacccatgaaatattgggttaacaaagccttgaaagcgaactaa

SEQ ID NO: 285257 - DNA, 1047 bp, Morganella morganii
atgcttgcattgggtaactacccattagtaacactagctgaagccagatctaaatgcgatgaggccagaaaactcgtatcagaaggaattaatccaacacaagctaagcaactagacaagatcagaaaagcgaacgaatctgcgaatacatttcaaatcatcgcaaaagaatggttacaaatgaaagattgggctgatgtgacaaaatatcgtcgccttgatatgttggagcgcattgtatttccttctatcggtgcattaccaataagagaaattacatctcaccacattctcaaaatattgcagcgtgaagttcaaagaggcgctccaacggttgctgctgaagctaaacggacgatatcctcgatttttgaatttgcggttgccacattaagagctgatagtgatccagtatgggcaataagaaaagctctcccagcaaacaaaacacaacataaaaaagccctcactacggatcaaataggtcaactactcaataactttgataatagccgtggcacctttcaactgaactattgtatgtggttaatgtggtggacgctttctcgtccatctgaagtcgctgaggctgaatggtctgaattcgatcttgataatgcactttggactatcccagctgagcgtatgaaagcacgaagagaacatattgttcctctgcctacacaagctattacgattctaaaatctctttatggttttactggtaaccgcaaacatttatttcccggtcgtgattcttgccataaaccaatgtccactaactcactaaggcaatttcttaaaacgagaggttggagtggtatatatagccctcatgcgacacgcacaacaggcagcacacgattaaatgagcttggatatagaccagatgctatagaagcacaattagcccatatggactcaaatagcgttagacgttcatataaccatgcaacttatcttgaagagcgaaaaatcatgatgcaagattgggctgataaactcgatatttgggtaaaacgggccaaccttgaatcaaattcatga

SEQ ID NO: 285258 - DNA, 249 bp, Morganella morganii
atggccgatatcatctatttaacactgaaaggtaaccggcaggggcttatttctgccggatgttccggttatgattcaatcggaaataaatatcaggataagcataaagatcagatttttgtttattccacaacgtatgatctttttcgccagcagaatgtcgcacatgcaccgtttttactggtaaaagcggatgataaagcctccccgcttttgctttcatccatatcagataatgagcttctttga

SEQ ID NO: 285259 - DNA, 579 bp, Morganella morganii
ttgaaaattaatgatgtgcatcgtaaccggtttaatgtcctggttatatcatcacccgacccgtcggcagtaatgtctgtacctgacccggtaaaaatctttgtgatggttaactacaactggggaatgggacatgcaggtctggtagtcggtgaaggagaggcagcagtattacacgacccatccggcagctattccgaatgtgcgtcacgggcgtgctacaaagacagaaatgcaaagcgtaatccgcgcagttccggtgaattttttcacgacccggaatttgattgggatgattatctttcttttcagttgtgggacggaccggatgtgatggtgattgagtttgtcgtccccggagagcaggccgcgagaataacggagatgatttataatcatggtttagcaaaatcattttcttgtgcaaagacagtatttaaaattctgaaagagagtggcggaatttttaatgtactcgaggaaacaccgatcctcagagaaaacccatggcaattaagagaaaaactattaggtatctattatccggactatggagggataatttcaggtgcttattaa

SEQ ID NO: 285260 - DNA, 471 bp, Morganella morganii
gtgcttattaaaaataaatcgcttgtcgtttatttatcattcagtatttctgtaatattttattatcttgagatggttcatgcattttttttcagaatatactcacacggagtaaataatgtaccaattattaagagtaacatattagtatcattgattttcttttctttcgcctttgtactcggtgcagtaataatttaccggcaacaaacggaagtaagcaaaaaattcagagcaatagtttatttggtatttccttatataaccagtgtggtggtatggtatttttttgactgttacggaactgaaacgcattatcagtctgtcaggggaaaatcacaaagtattggtgattttcttatcttttcttttgttgctcacggcatattttttatcccgctggtggcgtatacctgcgattttttgctgggtttcatgttttgcaaaaacaaaaaaataccaccgggataa

SEQ ID NO: 285261 - DNA, 765 bp, Morganella morganii
atgaaacgaaaaataattaagagagtaattattgctattcctgtactgcttttggtaaagtgcagtggtatcgttgatgatattctcggaagtcagtttccgctcaacattcacaatgacggaaataatataaaaatacacataaatgatataaaaaattcggtagtgagtgttgaggcaaaatatataacagaaaaatgcactaaggccagattagatgcgtcttacactgaaatatcatactcccctataaaaaggacagttgaaattgacaacattgaaaatagcaatgacattactacatttactgtacctataagtggaggaggatggtgtaactgggcgttaactacagtattcatagaattgaccccacaagaaaataaaggcatagtatcaacaagaatacctatagatataatgaaaacaaatataaactatatttcatatgatattttaatcgcaccaatcatcataaaaaattacaatggtaaagatgagttttattacaggatttcaaaaatcggagataataaaatatcaaacaatagaaatggggaaatttacattaatgcaacattaaaaaatgaattattaacctattcacttatggataaaggtgtggttatttttccaaatggcgttaaaaaaaattacagtagtcaccgcgacctcatatccccggattttaatgaaatcatggagaatagcactttaaaaaacaatacccatgatgataaagaaaatgaaacaaaaaataattaa

SEQ ID NO: 285262 - DNA, 993 bp, Morganella morganii
atgagtgatatcagagactgtattaattgtgataattaccgctactggctggaaattcagttagttgatgatgccggacatccgctggataacgtctctttcacactgaaagaacgggggaccgataaatcgctttccggcgtgactgatggccggggcttgttcaggattgacggattatctgcacgtcctgtgatggtgacagctgatgcacaggaactggcagataagctgacaacccgtatgccgcttcaggcagtacactacccggacgattcgctgaaagactggtgtctgacacaagggtatattctcagtgagaacaataatgcggggatgttcaataccgcattacccggacatgtttatgatatgtctccggcgcaaatagcccgcctgcgtgaatattccgcccgtcatgacgggtatacttttatctggccgtataatcagcgacgggttattgccatccggcgtattaccgggaaagtgtttgctaaatccgttctgcggggagcaggaaacacagatgcgggaacagagccggagcggctggataatttcggtcagcacaatcatgcccggaaagttgagccgaccgaacccgcgcaggccggattcccgctattgtatcttttgggggggctaatcagtttgatagccggcggtggtgtttacagccagacgactcagaatgcccgccgaaatgacggagacgactttttttcacagggcagtccggcagggagtgaaaaatcacaacggcctttcatgctgacgctgatgagcagcgtattaccggtcggtgtgctgatggcccgttactatgacggggattcactgacctatgaggacctggcggaaaaagcacacgcccggggtaccgcaacgacccgtgtgcggattaaatatcaggaaaatacagaaaccggccgcccggatgtgatgtctttcgcgacagaaggcagtaacgaccaggtgcggggtgtatag

SEQ ID NO: 285263 - DNA, 1077 bp, Morganella morganii
atgtctgacataaccaagatcatcattgccggttgtaacatcagcggttttggaggtatggaaaccgtattcagtacattcagcagattgctgactgaatccggaaaaaactatcagatatcttttgtcttttttaatgaactgaataatagtgttgacgatacatggctcggtaataacccgtttatacgcttcagttcatcactaaaaaacaggaagctgaagagagtttattttgcctgtcaattcgcttctgctattaaaaaaataaatccggattatgtcattgcctttgattctgttggttgttacatttcaagactggctttgcgcttcgcttttaaaagaattccattgttctcgtggaatcatttctctgtcaccggctcatataaagcaaaatatatcaaactcgcggataaacacctgtccatcagtagtggtatagcaacccagttatcagaaatgggtatcaaccctgcggatatttatacgatctacaacccggttccggaacaatctaaaataatcacctgtggcaatacgataaattttttatatgccggtcgcttaatgtgcggaggacaaaaaaatatgaaggagttgttcagcgcattatccggtgttcatggtgactggaaactgcatatcgtcggctccggcgatgactctgaaataaaaaaattaaatagcctggctcacgatttaaaaatagacgataaaattatctggcatggctggcaatcaaatccgtggaattacatagagcaagaaataaaaaatgtctctgcacttcttttaacatccacatacgaaggattaccgatggtgctgtgtgaggcaaacagctatggtatttatactgtcagctcagactgcccgacagggcctgctgatattattcgtcaatatgtaaatggtgagttatatcctgccggtgatgataaaaatctcaccgttattctgaataaaatcgtttccggggaaacaaaaacaaaccatgatgtaataaaaaactccattccattattttatgaaaatgaatatcttgcaagggttttggatatatttaaataa

SEQ ID NO: 285264 - DNA, 267 bp, Morganella morganii
atgagtatatcaaaattaatcacattagctgcaataaccacgctgacagcctgcagccataacgtatacaccaaaccagtggattgcaccgggcatatgtttgaggggctggataaccggcattactcagctaagctgacaaaatatgcgccggacagtaaacggtttttcagtacaggtgatcctgttctggggttacatggttggatccgcatggatacgtttgacaaaattacatgtgttaaaggtaagagtacagaggactga

SEQ ID NO: 285265 - DNA, 321 bp, Morganella morganii
atggctcacgggattattgtatatgatgatcgcggtaataaaatattagattccggtaaaagacccggtcgattcgtcggttggcatgatattaatcctgcaccggtcggtcagtttaaatacagctgggatcaccggaacctgctccctatgggggagatttttgtctgggttaatccgagcttttggttcaatcataacggctggtgcgactgccgggttgaaaatggcgttattatttttgagggtaatttaaggcgaaacgacgaacagagagccagggaaacttatatgcgtatattatatggtgtaaaatcatga

SEQ ID NO: 285266 - DNA, 3090 bp, Morganella morganii
atgacacaaatcacaggccgcaaaggcggcggtggcagcccgcgcacgcccgtcgaacagccggacgatttacagtccgtagccaaagccaaattgctgatcgccctcggggaaggggaatttgccggtgagctgaccgggaagactatttttctggatggaaccccgctgctgaatgctgacgggtcggaaaactttcccggcgtggtgtgggaataccgtcccggcacccaggcacaaacctatatacaggggatgccggcggcggagaatgaaatcacggttggtactaccgtgcagagcagcacaccgtgggcgcatgcattcaccaacccgcaattatcagctgtccgcgtccgcctgaaatggccgtccctgttccgccaggaggataacggggacatggtcggtaacgaggtgaaatacgccattgatttgcagaccgacggcggcagctggaagaccgttgtggacggccgggttaagggaaaaaccacttcaggctatgagcggactcatcgtattgatctgccgcagtcggccacatcctggaccctgcgggtgcggaaaatcaccaaggatgccaacagtgcgaaaattggtgacaccctggtgctgcagagttacaccgaggtgattgatgccaaactgacctatccgcacaccgcgctgctgtatatcgagtttgactcaaaacagtttaacggctctatcccgcaggtcacctgcgagccgaaaatgcgggttatccgcataccgtcaaactatgacccggagcaccggacgtactccggtacctgggacggttcgtttaagtgggcgtggaccaataacccggcatggatattttacgatatcgtgatttccgatcgcttcggcctgggcggcagtggtactgagccgcgttatatctgtgatgtgtatgtgcaggatcgcaatgaagcctatacggtactgcgcgattttgcagccattttccggggtatgacctactggggcggcaatcagattatcaccctggcggatatgccccgggatattgattacagttacaccaaagccaacgtgctggacggtcgtttcacctattccggcagcagcagtaaggcccgctactcctccgcactggtgtcgtactcggatccgctgaacggttatgccgatgcgatggagccggtgtttgaaaatgagctggtttaccggttcggttttcatcagctggaaatgacggcaatcggctgtacccggcagtcagaagccaaccgcaaaggccgctgggggatactcaccaacaacaaagaccgggtagtgacattcagtgtggggctggacggtaatatcccgcagccgggctacatcattgcagtggcggatgaaaacctgtccgggaaagtcaccggtggccgcgtcagtgcggtgaatggccggagtatcaccctcgaccgcaaaccggatgccgcgccgggtgaccggctgatgctgaatctgccgtccggaaaatcacaggcccgtaccattcagatggtcacggataacgtgatcactgttaccacgggatacagcgaaacgccggaaccggaatgtgtctgggtgacagaatcagacgagctgtacgcccagcagtaccgggtggtgagcgtgactgagaatgatgacggtacgttcacgatatcggcgaccatgcatgatccggataaatacgaccggatagataccggcgcggtactcgatgaacggccagtcagtgttattccgcccggcaaccagttcccgccgaaagatatcaccatcagctcttactctgttgttaaccaggggatcagcattgaaaccatgcaggttacctggtcaccggcagagaacgcgattgcttatgaggcgcagtggcggcgtgatgacggtaactggatcaatgtgccgcgcaatgccaccacttcgtttgacgtgcccggggtctattcaggccgctatctggtgcgggtcagggcgattaacgcggcggaaatctccagcggctggggatattcagaggaaacccggctgaccggcaaggtgggagatccgccgatgccgctgaacttccgtgcgtccacactggtattcgggatcaaactgaactgggagttcgggaaattaaccgaagacaccctgaaaactgaaattcagtacagtaaaaccaacgacgggcagaatctgttactgctggccgatgtgccgtacccgtcccgctctcacgaactggccggtctggccgccggtaccgcgttttatttccgtgcccggctggtggataaaaccggcaaccagtctccctggactgagtttgtgcgcggcgtggccgagttcgatgcatcaaccattattgatgaagtagccgccgggttgggcgattcacaaattatcaaagacctgcagtctcaggctgatgacaactttgaagctatcatcaacaacgccaataacgcctacggccagtggggctactggcagcgagaaaccggcgcgatgaaagcagaaattatcgaagtccgcaactacacggtcacggaaacaacggcacttgcagagaaactggatgcggtacaggttaaagctgaagacggtctggcgctggcgcagaactccatccgcgcgcagtgggatatggcatccggtcaggcatctgtggtccacgatatgaaagtccggatccgttataacggtgaggattattccgccggtatggtgatcggggctgagctgaaaggtggtcaggtgaacacccttatcggttttaacgctcagcagtttgcgttttataatccggtgaaaaaatcgatggacatgttcatgtacatgaagggcggacaggtctttatgcgtgaggcgttcattaatcaggcatggcttaacagtgtggttgtcactgacaaaatgcagtcggagaactatgtgccgggtaaacagggttttattctggatgcaaaggctaataaatttgagttctttgacgggacaacaactaacggtaccggtattacagcgggcggtattaaagtatatgacaataaccggctgacggtcattattggtgatatatcggggtattaa

SEQ ID NO: 285267 - DNA, 639 bp, Morganella morganii
atgacccgctccggcgggtttttttacggggcaaatatgtcacaggaaattatggtgaaaattatactcggtggtgtgctgggtaaaaccttcggcaaaacacatcagcgcctggtcagcacaacctccgaagcggtccgtgctttatgttgcacaattcccgggtttgaacgctatctgaataccagtaaatcccgcggcttaacgtacgcggtatttcgcgggaaaaagaatatcggggtggacgacctcggttttccggtgacggatgatgttatccggattgtgcctgttgtgatcggcagcaaacgcgggggattgctgcaggttattttcggggcggtgatggtggcagctgcgttctggaccggcggtgcgtcagtggcagcatggggagcgctgcataccgggctggccatgaccggtgtatccatgatgctgggcggtattatccagatgttgtctccgcagccgggcggtcttgccgtgaaagaccagggcgaaaataagccatcatatgcattcggtgcgccggtgaacaccgtttctcagggctatccggtaccgctcggttacggtaaacgccgcatcggcggcgcggttatctcagccggaatttacgtcgaagatcagcagtaa

SEQ ID NO: 285268 - DNA, 231 bp, Morganella morganii
atgggctattgtttcgcattagtttttttatgggtgaaaataatgtcaccctggtttacgaaacatcagaaaaggacattttttgcagtaacattaataagaagacccaacccggcggtaacgggtcagaatagtatattttggggattttccggttatactggtgatatatcacaggggtatttttttattgcggaatggtatttatggacaaaaaaacacagggaatga

SEQ ID NO: 285269 - DNA, 360 bp, Morganella morganii
atgaaatactacaaagataaaaatgacgtagtttacgcattaaatccggacgaagacccggaaatgtggcttgatatgaaagtcactcaaatatcagaagatgaggctgatattttgcgtcaaccgaagctgacacaagagcaacggattgaaatggcggaggagcagaagcagtatcttctgtctgaagcagctgaatcaatcgcacctctgcaggatgccatcgacttggatatggcgacacccgaggaggaggcgctgctgaaagagtggaagaaataccgagttctgctcaatcgcattgatacttcgcttgcgccggagatcgactggccagctaaacctcaatcttctttctga

SEQ ID NO: 285270 - DNA, 1161 bp, Morganella morganii
atgtcagtaatgaataaacctgattacaaaatctttgctcaggacgcaaagtcaggggagtacgttgtattccctgatattttacgcggctggggtatcaccctggagcagtacaacggtttcccgccaatggaattatttaactctgcggcaaagcgtatcgatgaatggctcatgtacctgacccagcgaggattaccggaatgggatgctgtagtcgattacccgaaagatgccatgattcagcatgccggcgtttattatgtatcgctgaaagcgactaaaggtgagcagccaaataactcccaggcatcatggaagaaattaacggaatttctcggggttgatggcaaactcgctaaagaccagaacggcgcagatatccagaacaaagatacctttatcaaaaaccttggtttagaagagcgcctgaataagaaagttgattacggtaatcataccattactggtggcgtggactcagcaggcaacggctctgtaaatgcggcaaatggcggaatacgcttttaccgtaaaaaagacggcaccctgactctgttttcacgtgaggcggctgacagcgactctggttatgttactgaggtggaattaccgaagaaaaaaggcatggctgcattaaccagtgacctgaccaataagattgattacggcattcatgttatcacagggggtgtcgattcggcggggcgtggttctgttaatgccgccaacgggtcattgcgcgtccaccgtgatgcatccggagttattactatctatggccgtgagcaaaccgatgacacatctgaatatgtaacagccgctgcattccccagggctaagggagaggtgtgcttagatgtattcacttttgccgccggcggtgcaaagtatcgcgatgttaagattcagcgtaaaaatggtgttacttatacaaacacactgccgcgcccgatactcgttatcgccagctatgactcgccggcaacgaggacgcttgcttatgttgatggcgtcagagttgctcaaacttcccacggttctccgtccgcaacgggagcatggggcggatttgtatcttttattgttccggcaggatctaaatatattgtaaatagcaacggtgacaatatcacattactggactgggtggagctgtaa

SEQ ID NO: 285271 - DNA, 660 bp, Morganella morganii
ttgaataaacaacgagaagattttctgatatggcagtacagaggaaaacccaaagcccggcagacagtcgggcttttgctttctgaaacaaagcaggcgtttgaatcggttatcagattatcagtgattctgaatgtcgaccaggccaccggatacgcgctggatttggtcggaaagcacgtcggaatcaaccggataatgaaatcgttcatcccgaaggagtatttcggctggtatggtgtcgagggtacgaaaggtttcggggccgggaagttttaccgccacggagacgcactgacagagtcttcacggctgggtgacgcggattaccgttttttcatcaaagccaaaatcatcaaaaactatcagtcgcctgatgtggcaagcatcacctattcagtcagaaacctgctcggcgatgcgtcatatatcatcgataacaacgacatgacgatgaacgttgtcgttcctgacacgcagttaaccccgttccggatatacgcaatcagacaactggatatcctcgtgcgtcccgtcggggtgaattaccggtatctggttatcacgagtgaacggacgttcggctggcacggcgtaaaaggtgcatacggatttaacaaaggaaaatttgcgaggctactcaatgtcagtaatgaataa

SEQ ID NO: 285272 - DNA, 1125 bp, Morganella morganii
atgctccaaataactgaaaccggtattgttatcgaccgtctggcagatgtgcaccagcggctttctgacgggtttaaacgtatctatggtgacgatatcaaccttgattcggatagccctgacggccagatgataggactgttctcgcaggagatagataacatcaaccaggccatcgcgatgatcgctcagatgctggatccgtacaaagcaaccggttcatggctggagcagcgggccatgtatgccggggtcgttcgccgcggcgctgattacagctacatcgatgaagccattttcaccggcacacccaatatttcggtgccgaaagattccgtactggttgatgataaccgcgtcaaatgggtgacgctgtcagaaatcaaactcgatatgaacggatcagcacgaaccggcgtcagaagtgctgaacttggtgtgttctcactgccggcaggtaaagaactgaaaatggaaacggtcaccataggcgttgataaaatcatcaccacgaaagcggccaaagagggggcatttgaagaaactgacggcaatatgctgctgcggtttatgcgctcacactccatcaataaccatgatgaccggcaggggctggaaggggcgctgcttgatgttccggatgtgaagcaggctaaagtgtatgaaaactttaccggtcagacggatgaaaaaggcgttccggcacactcactgaatgctgttgtgatcggcggcagcgatgacgacatcggcctgaccatccttaaaaagaaaatcggcggctgcggtgtgtttggtgccatagaaaacacgcagatatatgctgatgtgccgcgtaccgtcagatttgaccgcgccgagatggtcaatgtgaaagtccggttgctgcttgagcgcaccggcggctttcatgatattgatacagacggtattaaatccgcactggcggcgacacggtttgagattggtgattcagtctacgcaatgcgccttacctgtcaggtgaactcagtgcccggattttacatcaaaaccatcagggtaaacggggctgacacggtgccaatcggatttcgccagtgcgcacaaatcaggacagaggacgtggaggtgctgattgaataa

SEQ ID NO: 285273 - DNA, 363 bp, Morganella morganii
atgagaatgcgacgattagacgaaaatcacgactggacattcggcagtggccgcagcgactacgctacggaatcagaggccatttctcagtcggtagagacccgtttattgtcactgcacagcgactggtttctaaacagggatcacggtgtgaaatggttcgattatctgaaaaagaatccgaatctggtgaatatggaatccgaattaaagaaaaccgtactgaatacagacggagtgaccgaaatcaccggtttcaatatctcacttgatccggacatacggaaaatcactgtcagcgttgattacattgatatttacggcaacaaaatgggagtgaacacagatgctccaaataactga

SEQ ID NO: 285274 - DNA, 657 bp, Morganella morganii
atggcaaatccaagtctgcttgatgtgctgtcgcagcatgcgtcaaatgagcggaatgacattcacacggcattaccggctaaagtggtgtcatgtgacgggcacagtgcaactgtgcagctgatgattactcaggttatgagggggggtgaaacgctggcgcttccgccactggttgatgtgccggtcgggttttatcgcggtggcgggttctgtgtgacggtcccagtaaaagcaggtgatgaggggctggtgatatttgcggagcgctgtatcgacggctggtatgtgtcagggcagcaatcagcgccgctggatatgcggtttcacgattactcagatgcgttttttttaccgcagggcagcagtcagccaaaccggataccggcttattccgccgattctctctcactgcagaccgatgatggtgaaacatttatccgcataaaaccgggaaaaatcatcatgcagggtgatattgagcacaccggcgaccggacccagcagggtaattctctggtgaatggcgatcactcggttaaaggcaacagtgaatcttccggcggcaccatcaaacacaacggtaaagatatcggcgatacacacacgcacagtggtgttgaaaccggcggcgggaatacaggggcaccaaactga

SEQ ID NO: 285275 - DNA, 849 bp, Morganella morganii
gtgaagcaattcgggcgattaattaatctccgtatcggtaacgaaaaagaatccatcgaaataaccaatctccgcatcgccttcagtgttgaaaaaacattaaccagtgaaccaaacccagcagtcattcgtgtctggaacctgaacgggtctaaccgcaatcttatcaccagcaagatctataaccgcctgtcgctgtctgtggcgtacaagggagatgagctgcggatgatttacaagggcgacatcacggatgtagtgacactgcgtgacgggacggacttcatcaccgaaatgacctgcggtgacgggcactcggcatacacaaaagcgaaagtgaatcaaacgctgaaagccggttcgacagataaagacatcatgaacgaagccgcaaaatcaatgggcactgaaaaaggcgtggtatcactgccaaaagacagagcgttgcctcgcggaaaagtcatcaccggcaacgcccgtgatgtgatgcataaagtcggccgtaataataatgcggactggtcaatacaggatggtcaggtaacagttctgccaaaagacaaagtggtgtcggataacgaagggttcgtggtgtcgcagacaaccggcatgattaacagcccggagaaaacggataacggcttacagataaccatgctgtgcaatgccgcgttgcggatcggcggtctggttcgtgttgagtccatcatgccggagtacaacggcgattacaaaattacagaactggaacacgccggcgattttatgggtgatgactggtatacgaaaataacctgtgtcggcggaaaatatcagaaggtggaaaatggcaaatccaagtctgcttga

SEQ ID NO: 285276 - DNA, 336 bp, Morganella morganii
atgcaagaaattcccgtatcaaccgaagaaatacaggagcagtcgttggaaatgtccggcctgaatgtccggctcacactgtacttcaaccgcatcactcagggctggcagttcgatctgtacgacaccaacgaaaaccggtttatcacgcagatgcaggggctggctgttaatgcaccggcactgctggagaaaaacatcccgtttctgctgattctgtctgacggatccggaaccggtattaactccatgcgtcgcggcgaactcggtaagcgattaacgctgtatgcagtggataaggaggagtggcgtgaagcaattcgggcgattaattaa

SEQ ID NO: 285277 - DNA, 741 bp, Morganella morganii
atggatttactcagcggatttaacacatccagacgcgctacggttgtcaccaggtctgtcggtgaattcgagctggacgcggtgacggtcgaggggcatgagtccaatatgcggctcactgaaaaccctgtcgagtccggcgcagacattgccgaccacgcgatactggaaccgaaagagattactgtgaccggcgttatggtcggctacgagccccagcagcatttcaaaaatatgctcggtaatgacctggcgtttatggatgaatacccgatgccgatggaaatacgcgcccacacccggcaggcagaggccatgtataaccagatagtcggacaagcacaggatatcaaagatcaggtcggtaaagttctggcgccgtggtacccggaagccgcaggcatggctaacgattcgtcaccgtcactggacagggtaggtaaggcctatgaggatttactcagcatccagaagaaaggtgaaccgataaccgtgcagaccggcattaagcagtacgaaaacatgctgatagtgagtatcggtgttacccagcagtatgacggctctgcggagttttcactgacactgcgggagatattcatcgtcgagtcacagaaagcacagggtattcaccctgacgtgaaagcatcgtcacccacgaagaaaaacatgggtaagacgcagccgaagaaggtcgaaaacgggaaaacggtattacgtgaaatggctggaggaaaataa

SEQ ID NO: 285278 - DNA, 645 bp, Morganella morganii
atgactgttaaatgtaaccttggtatatctatacaacaagagggtggacaaccatacacagttgtattaccaggactggagcagtctgttgtggaaagcacggttaatcacctccgggatataggcagtgccgccggtgccttcacttttaccagcgaaggcaaaaataaagataagagtaaaaaaacgcaaaaacaacaggaggccgatatgtcaggtaatatcaccaagacagaacttgaagctctcctgagagctaacaagtcagaagtcgatgttgtggctgctaacatccaaaaggagatggctgagtggcgggagcaacaaaatgctcagatgacagaagtcaataaaacactgagtattttgaatgttaaaatggatgagcgatttgaaaaccaaaagcaatcatcaactcgcattcagtggatggtcggtgtagccatcgcagcggctgcattagttcctgcatatttcgggatggtaaaatcagaacctgcgacgatgcaacagccaactattgtttacgtgcaacaaccagctccggcagtgcaagccacaccaccacaagtgcagccagcgccacagcctgtaccgcaagagccgacacctgagccacaaaaggctccagctataaaacaataa

SEQ ID NO: 285279 - DNA, 309 bp, Morganella morganii
atgtcaaataacaggaaagtgataggcaaaagtagtgattttcgtagctattatgcagaaactgtcggtatcattgactcgtcactaggtgataacaaactatttgatttaacatttctcaacagagagccaacacctataatcataaaaagtgatacatctggtgaaaacgatattttaactatggaaaatatcactgatcttaagcatgtatgcacagtaaaaataagtagaaagcagcttgtagccttgggtgaggtgataactcagattgtcaaagatacagaagatagatctgaggaagaataa

SEQ ID NO: 285280 - DNA, 816 bp, Morganella morganii
atgagcgtatcaatttcaacaatcaacgtacctttccacggcgacaatctgtatgtcgttaattacaacggtcaaccgtatgtgccaatgaagccaatcgttgaaggtatgggattaacatggcagtcgcagtttgagaaggtaaaacagcggtttaaatcaaccatcacggaaatcgtgatagttgccgcagacggtaaagagcgcaatatgctctgcctggctctgcgtaaactcgctggctggcttcataccatcagccctaacaaagttaaacctgaaatccgtgacaaggtaatccgctatcaggaagaatgtgatgatgttctgtatgagtactggactaccggcgaggtgaagaaaaagccaaacttccgccagtccacggcgaaagaactcatcccgttacgtcagacagccgagcgtcttattgctcacggtgtcggcaatatctacccggacatctggaagcacgttcacgctgagtttggtgtgcatcacatcaacgaattgctgccggaacaaatcccgctggctatctcatatcttgatgcgttggaaggcgaatacattccgaagcagcaggaaatcgccagtctcagtgctgataaagaaagagatatctacaatgtgaatgcgctggcaaagcagtatgaggctatttacaccgcgtggaaagttgatctatatccggcattggtgagtatggattcaccgattgccaaacggttatatgaccggtttaaaactggatatgcgtttctcatgtatttgcagaccagccttaacggcaagcatcccgcgttaatcaaataa

SEQ ID NO: 285281 - DNA, 264 bp, Morganella morganii
atgagcgaccaagacagcaaagaatttattgaaaggtttactgtgcgtatgccaacaggtatgcgcgagaagatagctaaaattgcagatgaaaatggacgctcaatgaactcagaaattgttcaggtgcttcaggatcacatagactctgctaatgttaaaccacctgtaaaaacaatagatatcccaagtgattttatagataaattagaggcgatagctctatctatcgaagagctaaagcaaagtaaaaatcgcaaataa

SEQ ID NO: 285282 - DNA, 288 bp, Morganella morganii
atgggatttaaattcagaaagagaataaaaatagcaccaggtgtttatattaacgttggaaaaaccggtgtaagcacttccatcggcaaaagaggatcaacgataaatatcggcaagaatggaaccaaggcgacatttgggatccctggcaccggattatcttactccacaaagctttctggtaagtcaggtaaaaaagatagcaagccaacaaccacagcagaaaagataattggcatagctatctatggcgctattatttatggcatatatgcattacttagttaa

SEQ ID NO: 285283 - DNA, 873 bp, Morganella morganii
atgaaaaagatacttaagtgggttggcattattttcattgtcatcatcgtgattggcgttattgctggtaaggatgacaagaaagatgtgacgacaacaaatagtgattcacagccatctgaggttggcaatggtagtacatctgttgcttcagttgataagaacgatgaaaaaaaatcatcctcactcagcctaaccgaagatgaaactgtcgctgtaaaagcgctacttaaagatgatgtaactggtaactttgatggtggcgatagtctgtatgattatggatatatgccggttacagcaaaagaaatgttcaaggtgtactccgctaacgaagctcgcggtgacaaaaccttcaaaggtaaaaaaatcattatttcgggcgttgttgacagcatatcgtcatcaatcggcgatataccagtagttagtttgaaaacgggcgaaatgtttcaaacggtgagtgttaattttgcaaggaaataccgcgacactgctatcgacctgaataaaaatcaaaaagtatcatttgcatgtgttggcggcacagtggtaataggaatgccatctgttcgtgattgcgtgcctttaaatgtggcgataaatgaagcagttgatgacaaaatgaaagatatcgaaaatgcactgcgcaatcacgaaacaacaactgacaaaggcttgctccagattgttgtttttgccaaagcggcgagcaaggctacagataactttaaatcatgcaaacctgatgatattaactgcatatcaggaaaggcaaaatcaatacctaaaacaaaaggtggatttgacgccttgatgaaggagtcggcggaggagatgggtattacgttgccatctaaaggagaaaaataa

SEQ ID NO: 285284 - DNA, 1782 bp, Morganella morganii
atggaaatagaggaacttctggtcgccatcggtattgatacctcacaggcggcaaagatacaggaggtcgtcgttgccctcggtgctgctgcggttgcgatggcaaacgaggccaacaaaataaatggtgacctggacaccatcggtgaaagtgcgacgcagggggcggaggaggctggtaaaaaggccgaagaggctgggcgcagcatgagcaaactgaagatgatcgccgtcggggtcggcgcggttatcggctttgtctctggtaaggtgctgggatttctcgacagtgcgattgccggggcacaaaacctgtcaaaggaaaaagggctgctgttcgatatctcaaagcaggagctgcaacaggctgacgagtatcaggaggccatgaagaaaacagggctatcgattgagtcgataaagacaaaaataaccctgaacctggtaccgcaactgacggctatcacgcagaaattcaacgactggctcggtgccaacaaagaactgatagccgcagggctgacgaaagtcatccagtgggcggggagatttttcagagtaataattaataccggaagggcaatatggaaggttattgacagcacgataggctggagaggtgcccttatcctgcttgcggccgcatttgcgatactgaatcggtcgatgctcatgagcccaataacatgggttatagctgccattgtcgggctgatgcttgtcatcgacgatttgatgggttacctggacggcaaagaatcgctgttcggtgaattctggggtgcgtgtatcggctggattaagtcggttataacatggtggaatgagctgtcagaggaatggcagacgaccatcaaacttatcggtgcgatgctggctgcggcgttcgggtctaacctgtttcttactgtcaccaagggtgcgggtggtttcgctaaagtccttggatttatcctgtctccacttcggcgtctgacaagcatggcaatgtctgctggtaaggcgtttatctggcttggccgtgcgctgatgatgaaccccatcggcattatcatcgggctggttgtcggtctggtgtatgttctccatgacctgtacaaatggttgactacaggagattcggtattcggtaatttctggcagacgatatcggacacatggagcaatattaaaaaagcatttcaggatggagttaaaaatatcctgatgtggctgggaatgagtgaggatggcgcagataaaacggtagccggaatcagcgctgtattcggtacgatatttgacgtgattaccactccgtttaggcttgcgtgggacttaatcaaagggctgtttaaaatctggggtgacgataccaagtcgctgacagaaaagcttggcgataccttctggctcgtcgttgacctcatcaaaaagccatttgaagaagcattcgactgggtgctgaaaaaaatagaatggattcgtggtaaggttagttggctgttcggcagtattggcgatggtgtcgaaaaattgaacgatgaggtcaaaaagaaccctgagatatactccgcgaccggcggcatcagaacggcaaacttcggcgcgataccgatgccaccacaggccaagggcggaaacacgacgtatatcactgttgagggcgcgaagatagaccagaacatcgtgaccaatgatcctgctaaagctggcaaagttgcagcagcaggaattaaccaagcgatagaccttaagcgaacaatgaacaacacgggaactgtgtttgcgaacggaaactaa

SEQ ID NO: 285285 - DNA, 396 bp, Morganella morganii
atggaaatcgacggcatcacctacgaacaccgtgacgcgaactttatcgcaactaaaaacatgggcaccaaactgacgcagattctgcgcggtaacctgacgctggaaggcaaagatgtgcgcattgatatcggcggcgcactggcgaatatcggcactcctgagtttgcagatgtcgaaaagtttgttctgaagtttgtgacagtgactgatgaatccggcgcagttgtacatatcgaagacccggacgtactcaacatgcacttcaaagcacacaaatcgcattatttccagttgatcatcgacggcctgaagttccactttgccggttttttgcccgctggcctcgcatccaaagtaaatacgctggacttggacaatctgaatctggtgtag

SEQ ID NO: 285286 - DNA, 435 bp, Morganella morganii
atggcggtatacagacatgaccgcagtattctcatgcttaacggctacgagattactgcgttcgatgaatccagtgattcattatccatcgcgccgatcggtgatgacggcgcaatgacagttggtgctgcgggacgcgctgtgtttgtgttcaccggtaacgagtccggcacgctgacaatcaaactgcttcagcattctgcggataacgaatttttatccgggctccgcaaccgtattcttaacagccagtcggcaccgacaccggttgagatgtacttcaaagacacctggaacggtgacgaaattatcggggagcgcggttttttcaccacaccaccaacacaggctcgcggcacagggcataacgcccagacatggacgcttcagtttgagcggatagtaacaaaattagcaaaaggggcatttaactga

SEQ ID NO: 285287 - DNA, 1512 bp, Morganella morganii
atgagtttacaaattaaagaggtggtcaacgctcagatcctcccgcagtcggcagcggcacagcggaaagatttaagcatggtcgccattttcacatccgatatcggagagccgtttcaggacgcatcaacgcgctatgtgttcgtgtctgatgctgatgatgtggcaaacctgttcggaaccggatcaaaggcgcacaaagcggctcaggcgttattttcagcacgcccgaagctgaagcgagccatgattgcgcggttcgcagaaaaggcgcaggagattccggccacggcaaacgcactgaaaggatcaacactctcagctggtatcaacgcattcaaggccatcactgacggtgcgatgacactgagcatcggtggtgaggaaattgtgttgtccggtatggatttcagcaaagctatcgactttactgatatcgccgctgtgattgaagcgaaactgccggaagatgccaatttacaggctatctgggatgcggtaggtcaccgcgtcattatccgggcggcaactgcgggggatcaccctgaaacccgcatcggttacgccactgaaccggtgagcggcacttatgtcggcggtatgctgaaactggaagacggacaggcgaccatcgtcaccgggaaggctgcggaaacagtaccggcggaatcaccatcagaggcattacataaactccagaatatctatcaggattggtacggcgtgtacttcgctgacctgctgacagatgaacaactcgacgatgcgcacacctgggtcgctgcggctgacatgaaagtgatggcctacactgccattcgtgatgaacaaatcgagtggaacaacgacaacatcctgaaaaagctgtacgacaaaaacagcggtcgtctgatggttcagttcaacaaaaccggtgatgaccacgcagcggctgaattactggctatcgcagtatcgacgcagtggagcggtcagaacacggcgaaaacggtgaagttcaaacagcagacgtcagtacgttctgatgaccggattacacaaaccgaagcgcagaagtgccgccgcctcggtatcaatttctacaccgactatgacggcatcaatatgctggccgaaggcaccatgctcggcaagacgtttatcgatgaggtgatggggctggatgcgtttatcgatgcatgtcagaaacaggcattcaccacgcttcaggctaacccgaccaaagttccgcagactgacaaagggcagtcgatgcttattggcgacctgaatatcatcgggcgcgaatttgtgcgtaacgggttcctcgctggcggtatctggcgcgggaatgatattggtgaagctacctatggcgaccggctggaagagggattttacttctactcagacagcttcgataaacagtcacaggcagagcgcgaagcccgtaggatgatgccgatcatgtgcgccatcaaactggccggagccggtcactctgttgacctgattgttcaatttaaccgttaa

SEQ ID NO: 285288 - DNA, 465 bp, Morganella morganii
atgaaggcagtcagacgggtgatagcgacggtttcccaattacctgaagacaaggtgattgacggcaatggcgagacggatgtatcgacgtggaagtattttatctcagttaatcagcttacttccgaccccatcgggacggaaatcaagttcgacggactgaatgaaaaagaaatcatcactacctcgcgggaaaccattatctcagtcaatgccttcggaaataacgcttatatactgctcgaaaacttctcaactgcactatcaacccactttgcacagcaactgtttaaagaaataggcgctggcatcgtccgtaaatctcaaatccgcaacctgccgacagccattgccgggggtaaggagcaacgggcgcaaatcgatttaactctctctcacattcaccggatggaagccccgttaaaccgtggcgaaaccgtggatattactgtcgaggacgattag

SEQ ID NO: 285289 - DNA, 339 bp, Morganella morganii
atgatggataactttgttgaagatatcttctctgacccgttctttggacaggattgtgatttcgagaccgagtccggcgttaagcgcaccctgacctgcatcgttcagcccgccagtaatgacgaccttcaaatcctgccggaaggtgatcgttacaacccgaccgtccgcgtaatgacgcaggaggcgattgagaacaaggaaatgttcagttggaacggtcaccgctggcgggtaatcagcaaatcgctatggaatgactatggctattacgacactctcgcgactcgatatgaaggcagtcagacgggtgatagcgacggtttcccaattacctga

SEQ ID NO: 285290 - DNA, 465 bp, Morganella morganii
atgatcagaaactccggtaacttcagcggcacgggcctcaaagcattagaggctcgcattcgtgaagtgggtaagaagaaggtggtggtcggcgtgccggcggcaacagacggtgcccgtaaagacgggttgagtaatgccactattgcggccgcgcatgagttcggtgtcccgggtcatattcctgagcgctcgttcctgcggtcaactgtgggtgaaaataaggacaaggcaacagggttgctcattcgcgagctgaaggctgatatctctcagggggatttttccggcagggcatttggaattgtcggagaaaagctgtcaggtgaggttaagcgcaaaattcaggcaggcattaatcctgaattggatccaaaaacggtagcacggaaagggtcatcaaaaccgcttattgacaccggcaacctgcttcagtcaatcacttacgaggtgcgcgaaaaatga

SEQ ID NO: 285291 - DNA, 363 bp, Morganella morganii
atggaatttctcaaccgttaccccgaatttaccgaagtagaccagttcagaataaaaatagcccttgaggatgctgagaatcagatgtcccgcaaagtctggggtaaattattcgaacagggtcaccatgcactcgccgcccatcttctgtgcgcttccggcgcattaaccaaaaaaggcagtaccaacggcgcacctgttcaggcagcaacgagcaaaaccgccggagggatatctattggttactctgcgcctgattcgggattcgcggcgaaccataacggctatgcgtccagcacctacgggcaggagtatctccggctccggaagctggtcggcgttcattttctggcggtgccatga

SEQ ID NO: 285292 - DNA, 975 bp, Morganella morganii
atggctattgaaaccgcattttttgaagaagcattgcaggaagcgctgactgagcgtgatatgcagctgcaggaaaagaccctgcctgaaattaacattgccgaagcaatcccggtcaacgaaggactggattttattcaggagtacgttgagtacggccgcactgaagtaatggggtctgtgtatgacggcatcatcggtaacaaaacaaactcactggtcaccatcgacagtgaaatcgagatggaaaaggcaccggtcgcgtattggggaaaagcggcaacgtggaccactcagcaggctgaaaaactcggcgcagtgggttttaacctgccgacgaaaaagcaggatgacctgtacgcaaacgccctggcaaccatccagtacggtggttatcgcggtcacgccaaagtaaaagggcaggaaggactgctgaccggaaaacatgtcgagattatcgcggacaagtcgaaaaagacaatcgcggctatgacggcggaagagtttatcgcgatggtgctcgacgcttacaacgttgcgtgggccgcttccggttaccgcgtacagccgactcacattgcgatggatgctgctgactttatgctggcaatgcagaagttcgataccaacagcgtgattgtcggtgttgacctgctgccggtatcggcaatggatcgcattatggcggcactgcgcaaagcttccggcgacagcgcattcagtatcaatttcgtgaagatcccgtctgaatatgcgcgtgatatcgcaccgggattaacccgtctcgtcgtgtacacacatgatgaggagtatgtcgaaatgaaagtgcatatgcctgagcttctggcagttcgtcagcgtgacctgctcacctatgagtgcgggtaccgtgcggcgttcggcggggctatgtggaaggttccggcatcggcggtgtacgtggattacaaaacctcgccagctaaagcagcgtaa

SEQ ID NO: 285293 - DNA, 492 bp, Morganella morganii
atgtcatttcataatgcaaaatgggactccccgtcaggcatcctgcgcccgggcacagtccgtcgcgcctccagctctgacgataagatctggggtgaagagaaccgcaccgaaaaagacatggattacggcatctttgttgctgtgaatccggaaggtggcgtgaagcatatcgaagcggcaaccgacatggtgcacggcatcgttgtccgcgatatctacggtgataaagccccgcacaacaaacagaccaatatcggccacttctctcacggtgactgcgtcggcgcactgacagtcgatgatgcggagttcgtccgtggtgaccgcgcttacatcgtagcgaccggcgcagatgcggggaaggtgacgaaaatcgctgatggcaatatcgacctaggttattgggttgaagatgtcagcaaaggcagcaagtgtgccgcgatcactctgggctacatccagaacgtacagaaaggctcaggagagtaa

SEQ ID NO: 285294 - DNA, 1146 bp, Morganella morganii
atggcatggaaaaaaacaccgcaggggtacgctgttactactgcgacgataacccgtgccgggtcgattgagtactacggccacgaaatcgggttaaccggcagcgatgccaacaaaaaaatatccattctccgcacactcgaagaactctccagaccggaaacgcttaaatcctttgaaggactcccgctgacactgacgcacccggacagcggtgaagttacagcaggtgatcacaaagagaaagcgataggtcacatccagaacatcagagttgaaggcgacaaaattgtttgtgacgtctacatcacggacgccgcggcaatcgcaacgctggaaaaaacggatgttcgtgaggtatctgtcggctatgaaccggctgaaatcgaagagcgtgacgggaagttatatcacatcaatattcgcggcaatcatgtcgccgtggtagcagaagggcgctacggcgctgatgttcgtttaaacgacaaaaaaggtaaaacaatgttcaaaacattaaaagataccattgcatttttgcagggtaaaaagctgaaagacagcgagggtgctgcgctcactgctgatgagattgtcgggatgattgcggcgctggaaaaagcactggcggatctggatggcaacgcatcagaggaagctctggcgaaatcacaggaattgattgcacaactggcagagttgaaggctcagctggaaggcatgaatgccgcaccagtggacgctgatccggaaacgccaccaggtgacgacaaagacgcaaaaatcgcggcactggaatctgaaaatgcgcaattgcgtgaagaaaaccagaagctgaaagaggaacttgagcagattaaagcggacggtgaaaccagctcgacgctgaacgatgccaaggcccgcttcccgaaacttaaattcacggacgcaaagtcggcgcgtgatgtccgctctgtcgtcctgctgagtaccggcgcgtttaatgacgcacaagttaaggcaatgactgacagcgaagtccgcgcagcatatgcagccgtacaggccactcagaagccacgcagtactatcggcgagcatctgctgaatgactcagcgaacaaaccaacaaaaacagtctcccagcgcttaggaggtaaaaagtaa

SEQ ID NO: 285295 - DNA, 606 bp, Morganella morganii
atgtcctttgcagatatcgccaaccgcctttcgtttggtctggtaaatcgcgcaaaccagcagaacaaagagcagacgcagcgcacgtataacgaggcgttcggcattgatctgaccggcatgctcggcgatgaggctatacgctccgacttggataaagcggtgaaggataacgtcgatttaatcgagtcgataaagaacgatttcatcaacgatatcggcgcggaggtattcggtaatctgaagaacggcggcaggcacgaaaatctcattgcatccatccgtgagcgggggaaggtgtcgaaaagccgtgcgaagtttatcgcccgtgaccagaccgcaaaactaaacgcagcgctgacggaatcacgcagtcgtgcgctcgggcttgacctgtatgagtggggcggagctggcgatgaacgtgaacgcgacagtcactttcagcttaacggcaaactctgcaaatactcagatcccgccgtctactctgacgatggcggcaaaacgtggaagaagcgcaaatcaatcggggcatatgaaggccatccgggaactgactatcagtgccggtgtgtcgcgctgccctatgtctcatgggattaa

SEQ ID NO: 285296 - DNA, 1380 bp, Morganella morganii
atgactaagaaaaatttaatcggtcgtctcaatgatggcctgagcagcctgatgacttctcttggcgagaaaatcggtgctgtgaagtacagcaataagcgtgacagggttcctgacagtgagcttgaggcgctttatgaagggtcgtgggtggtggcgaagtacatcaacaaaactgccgacgatatgctgaaattgccgcgtgagttctccggggatattgacgaggcactgaagcagcaaattcgcgacatggagaccgagcttaatctcagtcagacatttcgtgatgcgctcacatgggcctctctgctgggtgatgcaatggttgtcgcagttactgattgcgatgatgagcagatagtctctccgctggatttaaagtccgaggacatcattaagttcatcgtactgaagaaaggggagtacacgccggactcgcatgttatcgctgatattgcttccccacactttggcgaaccgcttacgtatcagatcgatatcgggacgaaacagcttaagtttcatcactcccggtgtcaccggataaagcttggcaagcacagcatcaaagaccggaagaagtacggcacatcagacctgcaagccccgtatgttgcaataaagacattcgatacagcgatagtcagtaccggagacaccatccaggaggcaaacgtcgatgtgatgttcctctccggaatgaacgcacagatcgatgccgggatggaaaatcaggtgcttcagtatgcagccgtgatgaaagaaacgaagtcatcaaccggcctgatgttaatcgacgcgggaaccgcagaagcgccgacacggtatgagcaaaagacggcgcaatttaccgggctgtcagacgtgataacaaaaatggcaaacgtcctcgcgggtgcgctggacaggccgataaccgttctgttcgggcagtcagccagcggatttaactcaggcgaagaggacaacaaagcctattacgaaactatcaacggcttgcaggaatcccggctgcgaccgatgcaggacttcgttgaccagttcattcttgacaaactccccgtcagtgacgaactcaaatacacgtatccgtcaattgacagtatcaacgaggctgagttagcaacgcgatttacggcgtactcgaccggctttgcatcgatgctgcaaaacagcgtgattgacgaggaaacagtactgaaggaaatggtggcgcgtggtctgcttgtcactgttacagacgcggacatcaagcggatcgtcgaatcatcaggatatggtgactatggaacttcagcagcttttggagcgcaaacaggggcgactcaaaccacgccgacgacgaatgcgaccaatcaggcagagcaagcgttctga

SEQ ID NO: 285297 - DNA, 1230 bp, Morganella morganii
atggatcagacagttgatttacccattccatccaaattagttccggtattcgcaaaggaaggcgttcggtatcgtggttcgcatggtgggcgcggtagtgcaaagacccggacatttgcaatgatgagcgcggtcaaggcgtatcaggcagcagagcagggtatcagcggcgttattctttgcgggcgtgagtttatgaactcactcgaagaatcatcaatggaagaggtaaaacaggctatacggtctgtgccatggctgaatgcttacttcgatatcggtgagaagtatatccgcaccaaatgcaggaaagtcagctacgtcttttgcggactgcggcacaatcttgacagcattaagtcaaaagcaagaatcctgttggcgtgggtcgacgaggcggagtctgtatcagatttagcatggaaaaaattaaggccaactgttcgtgagtctggttctgaaatatgggtgacatggaatccggaaaaagacggaagcgccactgacaagcgattcagaaaaaagcctcccaaaaattcaattatcgttgaaatgaactacagcgataacccatggtttcctgatgttctggaagaagaaaggcttgatgacctagatagcctggaatatgcagattatgcatggatttgggaaggcgcttacctcgagaactcagataaacaggtactggcgaacaaatacgttgttcaatcgtttcctgatgacctgtggaagaaggccgacaggctgctgttcggcgctgacttcggctttgcgaaagacccgaacacgctgttgcgacagttcattctggataattgcctgtacatcgagtacgaggcgtacggcattggcgtggagcttgaccacatgccagcgttttacgaccagataccggaggcgagaaaatggcctatcaaggcagattcagcgcgtccggagacaatcagctacctccgccgtcagggattcaacatctccgctgctaaaaaatggcagggcagcgtagaggacggaatcacattcctgcgcggatttaagcagatcatcattcacccccgctgcaaagagacagcaaaagaagcccgtctttactcgtacaaaacagaccgcattaccggtgaggttctgccggtgatcgccgatgcaaataaccattgctgggatgcgtcacggtacgggctggacgggtatatcaaagggcggacaacagtctgggatatcatgtaa

SEQ ID NO: 285298 - DNA, 426 bp, Morganella morganii
atgggacaacaatctaaacaggttggttgccctagcaagctgactgatgagctaatcgctaaggcaaaaaactatttgtacggcggttataaggagcatgaaaactcagtcatcccaagtatcgccggtatggcctgttatctcggcatagcgcggtcaacagtatacgaatacgcaaagcaggatagcgacctcgggcgtgaattttcggacacgttagagggggtgatggctatgcaggaattaaagctgataaacagcggcctgagtggtgaattcaacccgacaatcacgaagctgatgatggctaatcacggctactcagagaagcaggaaatagaccatcaatcatctgacgggtcaatgacacaaaaaccaacagtgattagattggtgggagtatcacctgatggatcagacagttga

SEQ ID NO: 285299 - DNA, 852 bp, Morganella morganii
atgagcaatattattcctcttgaatatgacgggtatcccgttcgctttaataacgacggatggatcaacgcgactgatatagcggctaagtttaataaggagcctaatgattggctaacaaggattgataccattgagtatctggtagcccttagcaacaagatacatgacaattccggcgctgtgcgggaattaagtgatatcaaagagttagagattaagaaatcatcctctagggtgaagatattaaggttggcaaaaaaaacaagcttagttaagactaaggctggcataagcggtggaacctggctgcatccgaagctagccgtccgttttgcgcggtggttgtcagtcgactttgaaatttggtgtgatgagcaaattgatgctcttatccgtggcaatatgccaatttttaatgatgaacgaatcaatgcgatcttcctccttgataaaccaacagcatgggaaaagcgttttcagcaaccgttttatcaggctcttggtcgcatgaccggtttgccttattccggacacgttggtggctgtccgtcgctattcggaatgataacggcgaagtgggtatatcaggttgtattgcctgagtccgtttacgaggaagctcggcagatggctaaggatagcggcgataagattcatcagtatctcaaaccggatgctcagaggctggttgaaaatcaaatgactgcaataacagtgctggcaaacagctgtcttgactataaggatttcgaggctcgctgtatccaggcatttggtaaaacagggatgcaaatgcagatgatttatccggctgaccagccacataaccatacagcaacactccaatag

SEQ ID NO: 285300 - DNA, 339 bp, Morganella morganii
atgaaaagaacctatatcaaaaccgccgagcagaaacaggatgtgtgcctgcggatagtccggaatcttcgccagatggacagtttcacggtgaaggtggtttcactgtccgctgagttaaaaatcatgatggcgaccacgtttgtcaaaatgatggaagacatcggcagtgtccatgtaagccacaaacgaggaaagcaggtctattacgtttttgatgattacgccgtatcaaaaattaaggctcacttcagcagtttccccgataaaaagcgcaagaaggtgaaagcgtcggtgtctgagcaggaggcccgccgtggaatgccaactatgcagtaa

SEQ ID NO: 285301 - DNA, 222 bp, Morganella morganii
atggaatggattaagaaaagtgaatctccgccagtggatgaaggaaaataccttgtctttggttctcacggaagaaccaccgcatggtggaagccggatatcaggaaattttgtgatgcagaatccggagagaatgaaggcatgcaggactgggatggcgaagtataccttgtcacgcactggatgccattgccagagaaaccacaaccaccggaggagtga

SEQ ID NO: 285302 - DNA, 210 bp, Morganella morganii
atggaaccaacggattttgaaaagtggtacgcgaaagagcttcacgtccccgtcagtatggtcacaagcttcaggagagagcatcaggacgggcattggacttatgcactcgcgggaattgaatacaaataccgcgcctacatggccggagtttgcagcagactgccgtaccagacaccgccaaaaggagatgaagatggaatggattaa

SEQ ID NO: 285303 - DNA, 459 bp, Morganella morganii
atgagaatattaggggttcgagtttcaccttctgtggcatcatttattgtttattgcactgaatctaaaggacttgtttgttctgatgtgataaaaatacctaatacattagatgttcctgagaagttaaaatatgttagaaatagtattttagatattttaaattattataacgttgatgtagcgtcaatacgggtaaccgaagccaacgctgaaaataaaagcatagataggctctatatcgaagctgttattcaagaggcgttttcaagtagtgacgtaaaaaaatattttacaatcagaaaggctggaataaaatcagggcttggaattaaagaggatgaatataagaaaatattaacatctaaatcttcacttagagaaatagataactcttcatactcacaagaaacaaatgaagccgttatggcagctatagctgtggagggtaaattttga

SEQ ID NO: 285304 - DNA, 1047 bp, Morganella morganii
ttgatcacttcttatcgtaaagctgatatttcgtttaagtggataaaagatcttgaagaacaaggctgtttttcaagggtatacctagctcatgatgaaaatctagaccatgacctcgtcataaaagaaataaaaaaatcagaaagtaaagataaagacatatatttttcagaagcaagacttctatataaaaatgcgcacccaaatatcgtacaagttcaatatgcagcagaagatgatgataacatttatatagcaatgccatattattataatggcacaataaatcagcgattaaaaagagagaatttaacgccaaatgagataattaggtatgccatacaatttattagtgggcttaatcacatacacacaaacggcctgatacattttgatataaaaccaaataatataatgttatcaaaccgtgacgaagccatgatatcagattttgggttatcaaagttaattaacgatagtaaccgagcaaagcccgatgactcatacttgctgcattcaccaccagagtggatttctagcaataatgaatgcggatataattatacatatgatatctatcaagtaggtgttgctctttaccgaatgtgcattggtgcggcggcatttgattttgagttcagatctcatgtaacaccaaaccaattagcaagggcaatagctcgcggggaatttccatcacaacagtatcccgcacatatacctaaagcacttagaaatataattaaaatgtgtttgcatgttgacccaaatgccagataccagtcagtattggatatactaaacgccttgtcatccattaaaaatggtgaaaacctagactggagaatggatcatacgtgcgctcaaaacacgtgcaaatggactaaaaatacatccaatgctattctttcattagagtatgacgctggcagcaaaacaacattagccaagcgtatttattccgacggaaagaccagaaaagaaaacaaactgtgtctaaccgattgtaaccaaactaaattatactccttgctaaaggatagttaa

SEQ ID NO: 285305 - DNA, 165 bp, Morganella morganii
atgaaaaagagcaagggagctaagctagtgccttgccgcagggatgcatcactagcgctcccatacaccatggaagaaaagaaaaagcttagtgatgatgatttagataaaagaatacaaaaaatagttaactcccctgcaaacagaaaaattctagtattttaa

SEQ ID NO: 285306 - DNA, 486 bp, Morganella morganii
atggcggttatatcgctcaggatgaaactagaaaagcaggagttcagcacctgccaccaatcaccaatactgactaacaacacaatcaggagaagccgagtggaagataaattcttttatcggtactcagcgattgattcagaggacggaatttatctttcgctcagtacattcaaaatggttcgggaaacgccttgctactacatggtaaggcagttttttgtaaccaacggtggatttaatctgttttcaggcaaggagcgccgcgtgccgaaatctgaactgcaatgcagaacaatttgccacacaaaggaacgggcactacatcaattcaggatgcggcaagaatacagaattgagcatgcaaaacggagtgagtttatagccggaagatgccttgattttctccaggccaataatttcacacctactgccgaatatacattaatactcggcaggtctgggattaaagcacttggatactga

SEQ ID NO: 285307 - DNA, 156 bp, Morganella morganii
atgaacttaacacctgaacaacttgaagcagttattgagagagctgtagaaaaagccatcacaaaatcatttatcaagtaccttaaaattacggtaggtgttcctcttgtattaattgctgcgttggttgtctttgctatcgttatgagaacttaa

SEQ ID NO: 285308 - DNA, 330 bp, Morganella morganii
atggaatttaaaggtacgccggggaaattcatggctcacactgaagttgctcagtggtactcatttgataacagattctttgaagtaaccgacgaaaaaaatcagataattgctttcgtgaaagactggaacggagcaggagaacagccaaagcacgacgcaaaccttctggcagcagcgcctgatttgctgtattcgctgcaaaaattactcaccgaatacaaattcacacgctcacagcttaatagtgataccgaagaagaccttgttgatgtcttatgtgttcgtaatgcgatggcagcaatcaacaaagcacttggccgcgaatag

SEQ ID NO: 285309 - DNA, 750 bp, Morganella morganii
atgacaccatcaacgttacctaaccgcctgtggagagcgctgaatgaagttaagaattatgtaggaaaaatgccggacggcgtaacgcttaccgatatcagagataaggtatctgcttatggtgagttaaaaaatggcgaccgtgcactgctcatcaagcacatagaagaaaggtgcttattgctggtgctgaaggccaagaaaccaaaggcagtgaaagtcaccacatttctgaggcataaaaagtacgggtatccaagtgaaattcccgggtacgaatatccgctgggtcgcgacgctaagtccaaaaagtgctggaaatgccacgaagaaaaaactctggatgagtttcacataaataacatcaggaaagatggcaggcaggcatattgcaaggaatgcgacagcctgaacagccagacacgagactggacgaaaactgacaactacggaaagaaaaaatccgatttacctgaacctgataattcaaatggtgaaattatgaaaccagtaaaaactccggagcaaatgcgccaagaggcggaggagcttattcgcgccgcagaacaggctgaaaaaaatcaggcaaccgagcaatggaggcttgagtttaaatcgaaatttgaacagcaaaaactggaagtcatgcaggcggtgggaatggccaaccgcaagttcgatgaaatgatggatgccatggcgcagttagctaaagccggtgaaaaactcaaagaacttaaagttgaataa

SEQ ID NO: 285310 - DNA, 438 bp, Morganella morganii
atgaaaatcacagacgaagatattcaggcagtaatcttaagcttaagcggggactttttatttcaggtcggcgagtcacttgagtttcatcactatgacggtttaatgccgcaagaggagcaagacaggttatataaagccttgcagatatggattaaaaaatcagctggtgaatttaatcaggatcaggggggggtggtggatataactgagaagcagcgccgagaaataatgaaacaaggtgtccaatatgcgcggaatcatttaataagtgcgtatcttgccaatttcattaactgcgacgaaaaaacatttgccaacatcatggcgctactatctcacgttgccaatgaatctatagatatcgaaataatgatggacgatatgctttcgtgcaatcatcaggcggaagactggattaaatccattctgagttaa

SEQ ID NO: 285311 - DNA, 180 bp, Morganella morganii
atgagcaaattattttatgccgtatgtgatagcaatggcgttgtcggcgttgcaaatacaaaatatccatcattaaaggcggtgttcagcgccaaggaagatgctgaaattatgcttaaaaagaatggaggctaccctttagttatcgtacctgtctatcttgaggacatcagacaatga

SEQ ID NO: 285312 - DNA, 348 bp, Morganella morganii
atgaacaaatatcgtgacaaatcagactttgagattaataaagctgcggctattgaaatgtttgggttgaatagagttatcgagaaaggtgattcaatttacatcgatgaatgtgattgcggtgccatgttcagtttcgacccatgcaacaacccagcggacgcaatgccgattattattgagaataaaatttcattgcgcgccccaaccataactgatagatggaaagcggagtttgtagatgagtacggcaactatgttggatatatcagggctctcaataaaaacccactacgcgcagttatggaggttttcttaatgatgaaggatgcggagaatgaaaaatga

SEQ ID NO: 285313 - DNA, 624 bp, Morganella morganii
atgggaaatgaatttcatgcggccaaacttgatgatgcgttgtttcatcagtccatgattgcagacttcgtgaatggtgttgtcaaaggtgccgcctatgttgggttatttgttgccgcaggtgttgtcactgccggaaccggcgggctcgctgccccgttacttgctattgccggtggttttgttctcggcgatgttatcgatgaagctgctgacacggtctccggatgggttgatgatgcgctgaacttctgtggcttcggacggggcgcggacggtaaaatcatcagcggctctttaaatgtcaaaacgaaagataagccggcggcgagagcagccggtattgttccgcatgaaaaactgatcgaatccattatggcggacacacaaaatccgccaaaaggaaaagcccgttcgcttgccgaaggtgttttgcaaaaagcatatatgctgacaccgctgggtatgggcaccgcagtgaataacttagtatcctccgcattcaatcccgctgaaccggttgaaaatgatccgttcccgaaatacccgtcaccggaacggggcttttttgagggtttttttcacccacagtggcgaataaaaatccttatgctgaacctgtag

SEQ ID NO: 285314 - DNA, 1134 bp, Morganella morganii
atgaaaattacccgagtccgtctgaaaaactggaagaatttccggaatatcgatatcaaaatgaatgaccgggtatatatcatcggccctaacgccgtgggtaaatctaactttctggatgttttccgttttatgagtgatctgtgcaaggatggcggcggcttacagaaagcggttaatgatcgcggtggaatgaccaagttacgttgcgtcctgtcacgcaatgacaaagaaatagcaatcattttagatttatctgatggtgatgataaatgggtatatgaattaaaattcaaaccatccggtagtggagcggcattgatcaatgtcaccagtgaaaaagttattcttaataatactgctgtgctatcgcgaccaaataaaaatgaccaatccgatcctttacagcttactcaaacttatttagaacaagtcttagctaaccagctatttaggcctatttcacaatttttagcttctgccgcataccttcatattgttcctcagttacttcgctcaactgaagatattgctattactaaagctgaggggaatttattcggccagggatttttagaccgaattgccaataccaatgctaaaacccgtgatgcgtggctgaaaaaaattcaggccggtttatctattgcagtaccgcaatttaaagaactccgttttgagcgcgacagttccggtcagccacacctggaagcccgttacgaccactggcgccctaatgccggatggcagaaagaagaccagttttctgacggcacattaagactgattggtctgatgtggtcacttcttgaaaaaagacaattgctcctgctggaagaaccggaactttctctgaataatgaaattgtccggtatatccccgaagtaattgaaaatacactgaaaggcgcccggaatcaaaaacaaatccttatcagcacacacagtgtttcgctgttaagcaacaacatagacggtaatgacattattctgcttctgccctctgaaaacggtacaacggcacgttcgccggatgacgatgaactggccgcaatgcgggctggcctgaccgcagcagaaattatgttaccactgacagcaccagccaatatcagaaaaatgccagagatataa

SEQ ID NO: 285315 - DNA, 690 bp, Morganella morganii
atgatgatttgcttcatagacatggaaggaaccattctagagaaaaatatttcgcttgataatggaaaggttgcgcccagtgcatggacggctttagcaaaggaaattagcgaggactgttatcaagaagaggaactttctaaagatcgttggttggagaataagtacggcagttatactgaatggatgaaagataccattaggattcatatcaaacatggcatgagaaaagagcatcttatcaaggtcatagatgcatcaaattttcatgacggtgcagatgaattatttgaatttcttagaaaagaaaaaatcattactgctcttatctccggaggctttaagcatttagcagatctagctcaagtaaaattatatattgatcatgcctacagcgcttgtgaatacttcttcgacaaagatgataaagttaagcatttcaatctactccctacagatgaagtcggaaaacttgtttttatgaagcacttagctgaggagtatgctgtgagtttgagtgattgtatctttattggtgacggaaaaaacgatgttcatttagcaagagaggttggtacatctattgctttcaatgctcagcaagagcttattgatgtatcaaccttttctgtaaaacaaataaaaccagacttatcggcccttattcctattatcaggcttaagctctaa

SEQ ID NO: 285316 - DNA, 831 bp, Morganella morganii
atgcagttagattcaacagtagcaattcgcttaggttatgtaagggataacagaggcaatttattaaagcctgcggattatagtaagtcttcaagtgttgatcttactattggagaaatccttaaaaaggacaagaatgataatatcattcagggagtaggcacgaaactcaaacctcaagagtcattagtaattatttccgaggaaataatccatgttccacccggtcatgttgcatatgttttcttaaaaaacaggttaagtcaaaaaggacttttagctttaaatactggtattatagatgagaattatgtagggcctatatcaacagtagtaattaatttttcaaacgtagatgcagttatcccttcaggaaaaacaaaagaacaaaaagagttttttagagttgtttttcataaattagattcagtggcgtcaagtactcagataccacaagccgtgagcaattatagtgatcaagattatgatgattataaaaaaaataaattaaatgatttaaagaactttcctaaaacatttttagagccaaaagttttaaaagaacagattcaagacgagatatatagtaaggtttcagaattttcaatggtgaaagttggcttcacaattgcgctacttggtttgttttttactttcctacccatggtaaaggactggatatttgcttggcaatatgattttaaagatagtctgattgtacagaaaaaaaatgagtataaaattgaaagccttgaaaatgatgttgagaaactaaaagaacagatacgaaccttagagcttaagcctgataataggaataagggccgataa

SEQ ID NO: 285317 - DNA, 657 bp, Morganella morganii
atggcttttttgacaggaattagtgatgttttaaatagcattcctcaatggttatcatcatttattatcgctttgatcggcgcatgtgttggtggttggtttactcttaaaggagttgatcgcgaaactaagattactcgcgcagagactgaaaaaaattctcttgagttgcagttatctgtattaaaaggaattaagggcgaaatttttacattaatgaacttatataataaaaggatgaaaagtcatatcgatagtattgggccagagaaagcacttcttattaatttccctgttggggatgataactttacattctatgagcaaaacgcaaaaattattgcaaaattagatgactctgcaagagattcaataattaatatttacacatatgctcgttcgctaatacagtctttcaaaggaaacaaccagcttgttgtagactacgaaaaaatcctttttgatatggctgatgataataaaaatagagatatgtatgaaagactgtatgctaaaaaaatcgaaataatggtggattatgcgcaaggaataaaaaatattgatgcagagcttcggtctgttatcaatgatggatttaaggttattaaccaagaaatagagacactacaagtaaaattaataaatttaaagctgtaa

SEQ ID NO: 285318 - DNA, 6990 bp, Morganella morganii
atgaaccggatttttaacgttatctggagcagcgtactgaaatgcatgattgtggtttcagagctctccgggaataaaagcagaattcaaagtcaggtaaataacactaattacttcacagtgaatagaaataaatattttttattatcagcaacctgcagtgctgtccttttaggattagcgggtatctctgatgtttcagccgccacgcttaatgtgcctgtttatacccccgaagctaacagtgaattacagggacaatacattattacgggtaatgataccctcacagataatggtactatggggtataatgcgtttgcccgcggaaaatcgagttataccacacaaacacttcaggaaattctggctgaaggattcattaccagcggtgcggaatatgtaaacgatgaccgtttgatgctgggcggaaaatcacagtcaatttcatatactgacccggtaacaggtgcagtgaaaacaatgactgtctatgacagcgatggtatgtctgtcgacagtatggccgattttgaacgtactgttattactggtgtcggccggcacggtcagtatgtcaatatgcggctggcaacaatccgcagtggcggtacactgaatgtgaatgtgggaagtactgcacctgactggtataaagacccccgcaatttcctgaatatcctgttaaaaaattcggcggtttatcaggctgaagctgatcccgcagcaacatctgacgcggtgattaattataattcaaaaacaatatttgatccgggtacaaaatctaacagctttcatactgataccgttacgtttacaccggctgatttctcaggaacatttacaagtaagatcggtgtacagtctgtaaactcgcttgctgattttcaggcatataataatgcactgattcaggccgttaagaatgggacattgtcagcatcagattatgaaactcagctcaatctggcctatgacaataacaccagaagtattgttattgattcatcgaatgccattaattcagatgatgccgcattattaccgatcagccggaactccagtatttttattcgtgcaaaaggctcccgggcacaggtaaatgtcacccccgatgctgaaattattggtctgggacagggaacggttgtctggcttgaggatggcgccacattaaataacagcggacgtatcggcatcggcaataccagtgcatcaggaggctatgccgtttatgccgcggattcagtaatcaacaattcaggtgttattgatgtcggttataccgatttggacggaaaaggattacttggtgaaaataaagtcgggattgttgcaaataacagccggatggaaaacagcggtgtcgtcaacgttaccggagtaacccagtacacaaatacccggggcattgatttattaaaaaactcaacgctgaataactcaggtacgattaatgtctccgtcgaaaaaggaaccacggcaccgctgacacctgataccgggaatgaactttatgcctctgtcggcgttaatatccagtccggttctgcaataaacaaaggaaccgtttatatcggccgcgagggacagcaatctgttactgatctcacaaccgatattgctacgttctggcggagtatcggggtgtatctgcgcggtaacaacagctcctttattaacgacgccggcggtaatattactatcggaacactggcacagaacagtactgctatttttgtaaatggcgtcaatcgtaatgaaaatccgcatgttgagcagaacgggaccattaatatcaatggccatatcaacagtgatgctcctctggaaaatgtgggcattctctccactcataacgcgaaagatgtcatcaacaatggcacgattaatcttaacggtattaattctgttggtataaaagtgacagacggcagtcaggccggaaacgcaggtaccattaatgttaatggtggtgccgatgcattgtccggaacccggaataccgggatgtgggtgcaggatgccggttctgcggggacattaagtggtactgtaaatatgaccggtgatggtgctatcggcatacatgccagggatgccggtgttattaatgtgactggtaatggtgcggtgaacttcagtaatggcacacaccaaaccggctattttatttacgggaaaaactcggccattaataacaccactaccggtgtacaggacgtgtcttctgacgactcggtactataccgtatcgacggcggagcaacttatacgggcagcagcagcggcgcttccgatatgcttgcatcaggagccggatcgtcggttatacaggcaaccggaagcggtactacctttaacagcggggacatgcatcttgatgtcaccggcgccggcgccaccggtgtcagaatagaggggggagctcagggaacactcaccggcaatgctgacctgaccgtatccggtaacggtgcaactgcgggtattgtggatggcaattactatgatccggacggaaatattgtctctgataaatcgggccattccgtactgaccagcgatgccattctgaacagcagtaacgctgctgtcggcaccatgggatatattgtacgcaatgcaggtgaactgattcacaaaggcactatcgattttaccggctcttccggcagtaccggtgttttggttgacggaggtacgctgactaacagcggcaccatcagagcaaatggcacagccgtcaatattgaaggaaaaaattcacaggcgtctaacagcggtacagtcagcgccactgatggtatcgctgcctggaggcttggtgatggtgcttctcttgcgttatacggaagcggcacaacgaatgctgccggttctgcacatggtattttactcgataccggtgctgcggggctgagcgtaacggatgccaatattaatatggatgcaaacggcagcggcagtggcatcttcaataaagcgggtctgagtggtatacagctcaataaccccactatcaatgtcggcaacggtaatggtgtgtataccggtgcatccccggcaaaaacgaactcgggtgaaattaatgttaatggcagcggctcggggatattgtttgaaaataccgatggaagtatgacagaccagacgctggacatgtcggattcagcaaaccttgttatcaatgtcaattctgcagccggtaacggaatcgtaaccaatgcgtcaacagatttaaaaacgggagccagcgttaatgttaatgacgcttcaggcggttccgcattaattgtcagaggtaaaacggcctctgtggaacaatccggaaaactgatttcagcgtctctgagcggagacgctgttgttaatattgataacgggtatgtcaatcattttactaacaaaggcacgattcaggccgctgatacagataagacagccatcaataccacgaagggtaatggtgttgattttaccaatgccgccgatggtgttatctccggacatgtcaatctgctgtccgggaataatagtgtgacactggctcacagcagccgcggcacagattttaccaccggcagcggagacgaccgtttcatactgaaagatatcaccgcaacagatactgcattattcagcagtctgcagggcgggaccggtaatgacctccttcagctggataactcagaatatacgttgtcagacccgttgtcagtgcaggggatggagcggatagcgcttatcaataattctgttctgacactggataacctgttaccggcgctgggggacaacaaagatgacagagccggaacaggatatgatattgaaagcggcagcacattagcggttaaaaacgcaggcagtgtggctttcagcagccacttgtcaggagcgggtactctcagcactgataataatggcaatgcatttaattttactgccaacaatgcggttaatgatttcaccggtacgctggctctggggcatagtacctttgatctcggcgggcttaatacacaggcgttatcacatgctgtactgcttgccggacaaggcagtatcacgacggtggcaaacggtaatcagcagatcggcggactgggatttgatggcggtaccatcaatttcggtacggtatctccgggacaaactgttgcggacaaccatatacaaaccagctcacagcttgatttaagcggccggggaacggtacaggccgataccggcgatgcactgaacgcacacccggtaccggcagatacaacgcctttgctgtctcaggatgacggtaatgccactatccgtcttgccggttcggacggtacggtgaccggaagcggcgggaatctgacgctgaccgatagcacgggtaatgttatcagtgacagtgttaccgccgggatcatgcagaacgggcagactgtggcaaacggaacctgggactggcgcttaagttccggtgacaataatgacggtctgtatattaattatggtctgacagaggttgagttgctgaccggcggcgatgatgcactcgtactgaacagcggaggagctaccggtaatgctgctgatttaagtgccaaagtaaccggcagcggtgatttggctattgatacaggaaccggcaatatcgtgtcgttatctgatatggataacgattacaccggcatcacggatgtccgcagcggctcactgctgatgcagaacaataatgtactcggtcatacggcggaactgaagcttgcttccggcaccggatttaatatgaacggatacacacaagcgctcggcacgataagcagtgataaaggctctctggtggcattaaacggtggtcatttaacgcttgagcagggtggtcatgttaatggtcacctggacggctccggcagtctgacgctgaatggcggaacgctcgatattgacggcgccaaccggactctcagtgcagaaataacgctttctcagggcagtatcacaaacctgaatgacacgctgggtgccggtacagggaatatcagcaatgccggtttactcaatattaacagtgcgcagggcgtgctgtataacagcctgagtaatgacggaaccgttacgctggacgacagtgatgtgcaactgaacggtaataacagcaaattcagcggattgttcagtatcagcgataccagccggttgatagcctcttcatctgctcagttgggtacagccgcgattgaggatgccgggaaattattactggcttcagacactgactggacactgaaaaattccgtcaccggagacggtgatttaatcaaaaccggtgccgggtcggtaaccctcactgctgacagcgtacaatataccgggacaacagatatactcagcggaggtattcgcttcggaagccgggataacgcactgacactggcctcttctcaggtcaatatcggtcagtccggttttctggccggtaatggtgtcatcagcggaaatactgataatcagggaacactgattgtcggaaataccccgcaggacgtcagtccggcatccggtgccggaacagataccctgatgatcaacggtgatctcagtaacagcggaagaattcaggtcggacagaccaccggtcagattatggcgggtaacaatttggttgttaacggaaattaccgtgggaatgacggacatatcgcctttaataccgtgcttggcgatgacagttcggtcacagatcatatgacggttaacggcgataccagcggtacaacacacgtgagtgtcactaacgcaggcggaagcggggctcagaccttaaacggcattgaactcattgacgttaaaggaaaatccgatggtgagtttgtacaggaagggcgcattgtcgccggtgcttacgactacttcctggcacggggcaccggtataaacaccaataactggtatctcaacagtaaaccgggtgaccctaccccgggaccggaccctgagccggatgaccagacgatccgtccggaaggcgggaactatacggaaaacctggcggctgccaatagtatgtttgtcacacgtctgcatgatcgtctgggagaaacgcaatatattgatgctctgaccggtgagaaacaggttaccagtttgtggctgcgtcaggttggcacgcataaccgctggcgcgacagcagcggacaactgaaaacccgaagcaatcagtatgtggtgatgctcgggggggatatcgcccggtggagcagcgacggacttgaccgtggccatctgggactcatggccggatacggtaataaccacagccatacccgttcccgtatcagcggttttacatctgatggcagtgtgagtggttataccgcaggtatgtacggtacctggtatgcgaatgacgcagaaaaaaccggatggtacgttgacacctgggctcagtacagctggttcagcaataccgtgaacggcgaacaactggcgtcagagtcatatcactcacaaggagtgacagcgtctgctgaaggtggctacacgctgaaaacaggcgaatttaccggaagtaaaggatcggtcaatggctggtatatacaaccacaggcacagattatccggatgggggtaaaagcgggggatcataccgaatccaacgggaccgtggtacagaaccatggcagtggtaacattcagacccggctgggtatccggacattcctgaaaggcagcaataaaacacctgaagtgaatgaacaggaatttgagccctttgcagaagttaactggattcataataccaaaacgttcggtacgtcacttgatggtgcccgcattaacagagcaggcgccgctgatatcgctgaactgaagataggtgtggaaggtaaactgaataataatctgagcatatggagcaatgcgggacaacagatcggtgacaaaggatacagtaataccgaagcgatgatcggtataaaatacagtttcaggtaa

SEQ ID NO: 285319 - DNA, 282 bp, Morganella morganii
atgatgatcaaatcattcaaacacaaagggcttaagcaactttttgaaaacggtattatttcagggattccggctcaggatgctgtcagaattaatgatcgtttgcaggctattgattctgcaaccatgattgaagacttaaatattcatatttataaattacatcccctgcggggagatcgggtgggtatctggtcaataacagtgagagccaactggcgtattacatttgaattcagaaatggcgatgcgtatattttaaatttggaggattatcactga

SEQ ID NO: 285320 - DNA, 693 bp, Morganella morganii
atgagactttataaattcgttaaacctttacaggcgtttatcttgactgaaagtgaagtcgcacttgcaaataagtgtaatctattaggtgcaaagtcatggaaatctaaagcctctgagttaaacacttttattcgcggtgatataaaagcaagggaagcacttaagaaaaaaatcaaaactgctttgaagggatatcaagaaaatcactgcttttactgtgggattcatttttcacttttaaaaaatgaaaattcaaatgttcatatagaccacttttatcctaaaggagatgaacatgggaattatgagaagttcgtattcgaaatgaataaccttgttttatcttgctgtctatgtaatggattaggtgttaaaggagaaaatgattacggaataaacaatggcgagtctattcatagaattggtagcactatcatacacccatattttgataatattgatgagcacttctcgctaaatgaaagtaccggtgtaattgagttcattaacattgataaatccaaagcgattaaaaccgaagaggtttttagattaaattcccccgcgcaaataagggctaggcttggagatattctagttgaacttcatacgggaaatgactcgggaagatctttgagcgaaaggataacggattctattgggctttatggtagggtggcttcaaattga

SEQ ID NO: 285321 - DNA, 1404 bp, Morganella morganii
atgtcgtacattaaaaccataaatttttccgcacatgcaatattcaatgattcagaagtaagactcaagaacaagagaagaactgagggaagtaatttcattactttactcattggagaaaatggaacagggaaaagcgaatttctaaaggaaattgttgaatattttagacttcgagagcagtcaaaaggtaaagccattagtaagtttgttagaatagacacacccattgataaaaacaccaaatggcccgaaaaattaatagcctcatcatttagtttgaatgataagttcccattcttaaataaagacgcagaagaaaaaaataaaggtttttacagatatcttggaattagaactgcaagcaataatgcttttacaggtaagatgagagatgaattatttcattgcatggtgaagatttgtgcaaatccatctagattgagaatttttaaagaaataattaatgactttggccttccattaaattataaattctacttttcacaatccagaggtgttgagggactttttgaaaactctcgccaaaaatcagttgtaactttaagcactatagttaaagacatggttgatagtttcaaaatatcaaataggtttgcaccatcaactttaattaaaatgcaagataacgtaatacttaagaaagatgtcttgagaaaaataaataaaacattcaaagatactgaaaaaaatatcagcattaatttcgatctcgatgaaatacttgaagttggccttccgaaaaatgcacatgaaatagattacgttcttaaatcgagactgataaccttaactgatttctctcccggtggaaatataaaatttcaacatttgagttcagggcagtttcatttattaaagagcatcattacattaatggcagagcttgaaaacagctctttaattttaattgatgagccagaaatcagtttacatccgagttggcagataaattatatgtcagtgttgaataaaatgatatctcaatttaataactgccatgttgttgtagctacgcactcacacttgattgttacgacgttacccttgaaaaactctgatgtcattgttgctagaaaaaataaaattaatgggcagatatttttcagttcactcgatggatcaccatctggatggtccgcagacatgattctatatagtgtttttggcgttttgaataaaaacaatcaatcattcgattatgatgtaaaatttgtagcttcatccatgagcaactggacgcaaacatcagaaaacataaaaaaattacgtgaggcagtattgcggctatctcaatacaagcttcccgatgcggatccattaagtaagtttattgttcaatccgagatttttttatcgaaggttgaaaatgagactttataa

SEQ ID NO: 285322 - DNA, 171 bp, Morganella morganii
atgagcgaaaagcggaagttactaattgacttcatggtggatttcaaatcaatgttaactaatgtggcaagcaacgcctataacagttattaccatcggcgatttttttgtacgcttctggcactgatgctgggaatggcactgaccgcatcatttaagaagtatctttaa

SEQ ID NO: 285323 - DNA, 150 bp, Morganella morganii
atgctcctgcttaccttcaaccgaggtgcggtaccatttcagttgtaccttcggcagcatttcaccggcggccagagcgttatacagcagcggaaccgctttgttcagcgcaacggtaaatttgaacggacggtgcgcacgctggcctga

SEQ ID NO: 285324 - DNA, 387 bp, Morganella morganii
atgccgtttaacagtgataatttgcagctttttctgacggtgctggagaaaggatcattttcagccgccgcaagagcgctgcaccgtgtgccgtcagcggtcagtatggcggtcagtaatctggaagctgaactgggttttgcactgtttgaacgttcaggcagggcaccggtaccgacagaaagagccctggcgctggcaccgtatgccagagagataacggataaaattcatcagctgaatgtgtttacccgcgaactgacgcaggacgtggagagcacactggcggtgggggttgcaacctgtgtgaatccgcaggacctgttttctgcactgcagatactgaatcagcgttatccgctgctgaaaacgggggtcacaggatga

SEQ ID NO: 285325 - DNA, 201 bp, Morganella morganii
atgaaaattaacggaaaacattaccgttccgtctggcccgcagataatggtattgatgtctgtatttttgatcagacaaatgtagcgcggcgcgaaattctgcactatcaggcgcgaaattctgcacagcggggaatggtgaaatcagcgcattttgcacagtgcaaaattaattcaatattcctcgctatcaaatgttaa

SEQ ID NO: 285326 - DNA, 354 bp, Morganella morganii
atgaaatactacaaagataaaaatgacgtagtttacgcattaaatccggacgaagacccggtaatgtggctggatatgaaagtcactgaaatatcagaagatgaggctgatattttacgtcaaccgaagctgacacaagcgcagcggattgaaatggcggaggagcagaagcaatatctgatttccgaagttcatacagaaacccagatgctgcaaacaaaactggcacttggccgcatcaaagatgatgaaaagacactgttaaacgcctggctggattatctggatgaactggaggcagtggacgtatccaccgccccggatattatctggccggtgaagccggaggtgtag

SEQ ID NO: 285327 - DNA, 519 bp, Morganella morganii
atgaaaaaatatctagtgggtcttgccttggcacttatcaccactggtgcaatggctgttgacgggtacaagggagttaaatttggttcctcatattcgacacttaagaaagcaaatttatgttcgtttaaaccatattcctcccctgtagatataaaaggattttcagcttatgagtgctcggattttatattttcgggtagaaaaaataatgcagcagtttcctttattgataataaattccaacagttaataattaactttgatggtgaaacaatgcccttgcttgaggcgttacgtgataagtacggggtaccatcatcaagtacacctactgatgtgatgaaaagagcagctcaaacaggtgagccggttattattaaatttgaccatgataccgtgatagtcaggtatgagaattcaaacggtaaagacaaaacaacgttaatctatgctgcatcaggctatgaaaaaagagttaactcacttttgaaaaaatctgtatcagatgatatctaa

SEQ ID NO: 285328 - DNA, 1215 bp, Morganella morganii
atggcgctaaccgatgttaaagtgaaaaccgcgaagccaaaagaaaagccctataagctggctgatggcggtggtatgtatctgctgattaacgctaatggttcaaaatactggcgaatgaagtaccgcttcgccggtaaagaaaagatgctttctattggcgtataccccgatgtttcgctggccgacgcgcgtgaaaaacgcagcgaagccagaaaaattctcgccgctggaggcgatccgggtgagacaaagaaagaggaaaaaatcgcccagaaaatgactctgaaaaacactttcgaggccgttgctcgcgagtggcatcagacgaaagccgatcgctggtcattacgctatcgtgatgaaatcatcgatacctttgagaaagacatttttccctacattggcaagcgccctattgccgaaatcaaaccaatggagttactggaagcactgcgtaaaatggaaaaacgcggagctctggagaaaatgcgcaaggtccgccagcgttgtggtgaggtgtttcgctatgcaattgtcactggtagagctgaatacaacccggcccccgatcttgccagtgctttagctacaccgaaaaaagtacatttccccttccttactgctaatgaacttccttatttccttcacgatctggcgggctataccggcagcattatcactaagactgccactcagatcattatgttaaccggtgttcgcacacaagaactgcgtttcgcacgttgggaggatatcgattttgagaagaaattatgggagatcccagcggaagtgatgaagatgaaacgacctcacattgtgccgctgtcagagcaggtgattgcattatttaagttacttgaaccaatctcaaaacatctcccactcgtgtttatcggcaggaacgatccgcgaaaaccaattagcaaagaaagcgtaaatcaggttattgagctgctgggatataagggcaggcttacggggcatggtttccgccacacgatgagtaccattttgcatgaacagggttttaattcagcatggattgaaacgcagcttgcgcatgtagataagaatgcgattcgcgggacgtataaccatgcacagtacctggatgggcgtagggagatgatgcagtggtatgcagattacattggtgatttaggaaaggaagagataattgctaaagaaatatttgtaaaaacagcataa

SEQ ID NO: 285329 - DNA, 1149 bp, Morganella morganii
atgtttgaggcaattgagccactggatatatataacaagaacattaacatactgattggctcaggcgcttcagcagacttgttcccgacgctagccctcgccatcaaagatgccgagggacagcgagaaacgatcgagacgctcgccacaaagtttgaaacctcgcctgagaaacgaaccgcgttgttcatgcactactacaacacgtgcatttttccagtacagacattcaatccaagttccgtcactgcaggcaaaggaaaagaaaacctcaagaattatgagatttttttgacaacccttttagggttgctggacagaaggaaggacctcaaccgcaaaatcaatatcttcaccactaattatgatggatgcctgtcacatactgccgacagcattctcatgaagggctcgcatgattttgtggtgaacgatggtgcctcaggttttcacagaaaacaccttcattccaaaaacttcagtacgtttcaatgccaaaccggtatatttgaacgaagcaactacggcatcccgcagctaaacattattcaccttcatggttctgtctactggtccaaaagcggtgaaaagattgaggtcaattaccgtaacgatttccgtaaccttttggctgaagagactctcgaaaatctaagcaggtattcagaattccttggtatcaatggcaacaagaccgaagagatcccctccttgcccttcagtaaagagcagatggataacttttgggatgagtacaataagctgcccatagtgaaccccactaagtggaagttttatgaaactgtctttgaagaacactactaccagatgctcaggttattaagctatgagcttgaaaagccaaattccatactcatcacattcggcttttcgtttgccgatgaacacattctcaggcttatccaacgctctctttctaacccacagcttcatacgtttatttgctgctacagtagcaacagtgcggacagcatgcgggaagaattcaagctctggaaaaacgtccaagtcattggaccgccggaagacatgaagatggacttcactaatttcaacagatatgtcttctcgctcaagccagataagtttgaacctccgctcatatctgaagaggaggttctgatatga

SEQ ID NO: 285330 - DNA, 1776 bp, Morganella morganii
atgagtatcgttgtaggtgaagtcattgcagtaagtggcgtacgcatctcccttcgcatttttgaagactctaatcatgagactattttctacgaaggtgttaagtatcggggaatttcacttagagagcacgtttccatccagcgaggctttatagacattgtctgcctagttgaaggggagtttttggacgagaaaagactagcgactgatgccgagaagatccattacatccgaaaggtggatgttcgacccataggctatatcgtggatgacaagttttttgaaggtgtgaagtacatgccgatgatcagagataaggcatcccttctcagcgaacccatggtagggaaaatttatgggacagaaggcaaaactgatttttctattgggtccatgctcaaagaaaatgtgcccatcaacctcccatggacacggttattcaacagccatcttggtatctttggcaacaccggaagcggtaagtcgaatacactagcaaagctttacacgactctattcaatgaacggctccacgcattaaagcacaagagtcagttcgtcatcattgacttcaatggtgaatacactgaagaccaactacttccagccaagaacaagcgtataactgtgctggactctaaaaaagccaaacacaaattcaagattgaagccgttcatttttgggatgtagaaaccctgagcctacttttccaggcaactaccaacacacagcagccattcttgcgccgcgtcctctctggtaaggaaaaatttaaagctacaccgctcaaaaggtatgtggaaaagatttttgaaaaggtttttagtacaggtgaggccaaatcagatgcattagatctgagccgtgaaattgcgagaatgattgaatgcgactcgctacaagatcacctaaaaggaatcatttattacaacaaagataagtattttaagcacactaacggcacatactacaactcaaatggcaatggctttgacgccaacatcaagcccatcattgatgaacatgttaatttggatggaatcgaccaattcgacgaactaatcttgagatgctacctccaactctgttcagatgttgtattcggttatgcccaatacgaacacattcagccagtgcttgctagggcaaaatcatctacctcggcgcttcgcaatgttcttgaaatcgttgatgtgccacaaccaccacatctcttacatgttatatctttgaagaaatgcaagaatgagataaagaagatcttgccattgctcattgccaaaaatttctacacaaatcacaaggatgctgagaatctcaagagcccaccaagccgaacccttcacctcatcattgatgaggcccataacattttgtcagagcagtccactcgtgagcatgaaatctggaaagactaccgacttgaactctttgaagaaataatcaaggagggacgcaagtatggtgtatacctcacgctatccagtcagcggccagccgacatttcacctaccattgtttcccagattcacaactttttcatacatcgattagtgaatgatcgcgatctcatgctactggacaataccatcagcacgttagattccggttccaaagctctcatcccaaccctagccaagggctgttgcgtagtcacaggaacagcttttgatcttccaatgatcttgaaaattgacccgctacagaaacaacatcggcctagcagtgatgatgtgaaccttgaagaactttgggcactgcctctcgcttag

SEQ ID NO: 285331 - DNA, 480 bp, Morganella morganii
atgaatgttttgtttctgtgtaccggtaactcttgtcgatccattctcgccgaagcgacattcaaccatcttgcaccagagggctggcatgggatgagtgccgggagtcatccgacgggtcatgtgcaccctcgctcacttgctttactggctcgtgaaggcatcgccaccgagggttattacagtaagtcgtgggaaaacctaccccaggagccggatatcgtaataagcgtctgtggcaatgctgccaatgaaatctgcccggcctatttgggacctgtattgcgaacccattggggtgtcgaggaccctgctcatgtcacagggacggatgaggcgatcgatgcggcttttataaaagcgtatgccattctgcgtgcacgtatagaagcgctttttgctcttccattgaccaaattgcagcaagataaacccatgttgaaatccgagctagaccgtatcggtaatttgatgggttaa

SEQ ID NO: 285332 - DNA, 141 bp, Morganella morganii
atgagcaagttatatcatgcactaatcccgggtcatatttactgtggcggcgctaatgatatccagcagatggtggatgaagatggcatcgaagtggtgattgatttacgtgccgaatctggactgaccccacgcccgtag

SEQ ID NO: 285333 - DNA, 810 bp, Morganella morganii
atgacaatgtgtcgggtactggatgtcgcccgggccgggttctacgtgtggctgcataacccggtctcggcacgtgataaagataatcagcgtctgctgacgcttatccgtgactcctattcactgagcggaggcgtatacggttaccggcgggttcatggcgacctgaacgaaatcggggaaacctgcggtaaaaaccgggtgggccgtattatgcaactgaaccggattaaagccgtgcgcggctataaagcgccgcgtcgtatcgctggcagaccttcagtggttgcccctaatcgcgtgcagcggcagtttactgttgtccgggccaatcaggtctgggtcaccgacattacttatatccgcacctggcagggctggctgtatctggcggtggttatcgatctcttcgcccgtaacgtggtgggctggtcgatgaagcccactctctcacgcgaactggcgctggatgcactgatgatggcggtctggcgacgtaaacccgacggcgaggtcatcgtgcactcagaccagggaagccagtacggcagtgacgactggcagcgcttctgccgggctaataacctggtcccgagcatgagccggcgtggcaactgctgggataatgcggtggccgaatcgttcttcagttcactgaaaaaagagcgcatcaggaagagaatatacaaaacccgggatctagcccgggcggatatcttcgattacattgaagtgttctacaaccgggcccggcgccacagtcacctcggcggcgtcagtccggaggccttcgaacaggcctcgtcgtga

SEQ ID NO: 285334 - DNA, 285 bp, Morganella morganii
atgggcacaccacgatttacacctgaatttaaggaagaagccgtccgacagataacggaacgcggttattccgttgccgaagtatctgaccgtctgggcgtttctgcccatagcctctacaagtggctacgggctatcaaaccggataacagcgagcagcatgcccgggatttactggaagccaaaagcgagatcctgaaactacgggcgcagctaaaacgtaccgaagaagaacgggatatcctgaaaaaggccgcgcggtactttgcaagggagcccgactga

SEQ ID NO: 285335 - DNA, 1290 bp, Morganella morganii
atgttactggcaggagccatttttatcctgaccatcatattggttatctggcaaccgaagggattagggattggctggagcgccacgctgggggccgtactggctctggcatcgggtgtgatacacattgctgatattccggtggtgtggaatatcgtctggaatgcgacggctacgtttatcgccgttattatcatcagtctgttgttggacgaatccggctttttcgaatgggctgcgctgcacgtttctcgctgggggaacggtcgtggccgtctgctgtttacctatatcgttctgctcggcgcggcagtcgcggcactgtttgccaacgatggcgcggcacttattctgacgccgattgttatcgccatgctgctggcgcttggcttcagtaaaagcaccacgctggcattcgtgatggccgcagggtttattgccgataccgccagcttgccgcttatcgtatcgaacctggtcaatatcgtttcggctgatttcttcaaactgggattcacggaatatgcctcggtaatggtgccggtggatatcgccgccatcgtcgccactctggtgatgctgcatctgtttttccgcaaagatatcccgcccaattatgatctggcacgactgaaagagcccgcaaaagccatcaaagatctggcaacattcagaaccggttggattgtattaattcttttgttagtgggtttttttgtactcgaaccactgggtattccggtcagtgccattgcagcagtaggggcagccatcctgtttgctgtggcaaaaaaaggtcacggcattaacaccggtaaagtgttgcgtggggcaccatggcagatcgtgatcttctcgctggggatgtatctggtggtctatgggctgcgtaacgcagggctgacagaatacttgtctgacgtgctgaacttactcgcagataaaggcctgtgggcagccacgctgggaacgggattcctgaccgcattcctctcttctatcatgaataacatgcctaccgtattgattggcgcattgtcgattgatggcagtaccgcgtcgggtgttatcaaagaagcgatgatttatgccaacgtcattggctgcgatctggggccgaaaatcacccctattggtagcctggcaacgctgctctggctacacgtactttcacagaagaatatgaccatcacctggggatactatttccgcaccgggatcgtcatgactctgcctgtgctgtttgtaacgctggccgcgctggcgctacgtctctctttcactttgtaa

SEQ ID NO: 285336 - DNA, 813 bp, Morganella morganii
atgtcatcagaatcgaaacggaacggaaaaggttttttatcaggcacgttaataggtgctttaggcggcttgattggtcttggtggtgctgagttccgccttcccgtcctgatgggtagtttcaaaatgcccacgctggaagcggtaatttttaacaaggcaatgagtcttactgttgtcgctgttgctttgatattccgaacaaaatccatcgccgtcgaccagttgtttgctcatcttgatattgtcatcaatttgctggccgggagccttatcggtgcatggtgggcagcaggaagagccatcaaaatgtcccgtatctggctggacagaatcattctgatcctgcttgttatcctgtcattcgtcatgctttcagaagcatggatgcctttgcatgataactccgctggattattccagcctggagtcgctaccattattgcaggcgttattgctggtttctttatcgggaatgttgcagctctgctgggtgttgcagggggagagctccttataccaaccatcgttatcctttttggggctgacataaaactggctggcagtttgtcactaatgatcagtttaccgacaatgattgtggggttttctcgctacaccaatgcagatgctttccaaatcctgagaaaagagaaaaaactttttgtgtggatggtcatcggttccgttataggggctgctattgggggccttatgctcggtatgttcccggtaagagtgcttatgactctgttaggcgcggtacttcttatttctgcgatcaaaacctttaagcatacccggcaaaggtaa

SEQ ID NO: 285337 - DNA, 963 bp, Morganella morganii
atgaatatgccatttttaaaagacattcccccgttcatcttcttcaccggtaaaggtggtgtgggtaagacatccctggcctgtgccactgcagtatggctggccgatcagggtaagagaacgcttctggtgagtaccgatccggcttccaatgtcggccaggtatttagccagactatcggccaccgaatcacagatatcagtactgtagaaaatcttgccgcaatggaagttgatccgatggctgcagcgcaagcctatcgtgaccgtgtgctcgacccggttcgcgggctaatgccagccgatgtggtcagcagtattgaagaacagctttcaggttcatgtaccacggaaatcgctgcgtttgatgagtttaccggtctgctgaccaatcatgagctgcgggaaaaatataaccatatcgtatttgatactgcgccaaccggtcacaccatccgcatgcttgagctgccgggagcctggagcggttatctcgaagcgaaccctgatgccgctgcgaacctcgggcctctggtagggctggagaaacagcaacaccagtactccgatgcggttaaagcgctgtctgatgcaactctcacgcgcttagtgctggttgcccgagcccaggcttcaacactgaaagaggtttctcatacgcacgatgagctgtctgctatcggtttgcagcatcagcaccttgccatcaatggtgtgctgccgccgtttgcaggtgaggatgacccactggcacaaagtattctggctcgggaagaaaaagcattacaggaaatgcctgataatctggctaatcttccacgctcacagctgtatctgaagccatttaacctggttggtctggaagccctgcgggagctatttacagagagcaaagccgcaccggcactccctgctaccacgctgaatgctctggatttttataaggtatccccaaatctttag

SEQ ID NO: 285338 - DNA, 363 bp, Morganella morganii
atgtcaaaaattgagatctttgaaacagcaggttgctgcgcaaccagtagcgttgtggtcagcgacgaagccgttaaatggaacgccagcgctgaatgggcgaaaaagaatggcgttgatattcagcgctacagccttgcgaaaaacccgcagcagttcctgaatacccctgttatcaaagagtttcttaacacatcagggatagaatccctccctgtcaccttactcgacggcaagctggtgatggcaggcaaactgccgactcgtgaagatattgcccgttgggcaggtattccgctaactcaggactggagtgaagacagtacgcaaccgcgttgctgcagcattccacgtatgccttaa

SEQ ID NO: 285339 - DNA, 546 bp, Morganella morganii
atgagtgatataacagcattcaacaactgcatgagcgcgttctggcggcgacatgaagcagaactctctcgcttccttacctcgaagactggtgataaagaaaaagctgcagaccttctgcaagagcttttcctgcgtgcccgcgctcattcagacagtttttgtgaaatggagaatccgcgagcctggctgtatcgggcagcgaggaatctgctgattgatgagtaccgcactaccagggagttcgttgatctggaagaagatgccccattcacagacacatcccctgatgccatctcaacgctggatatttgcctgcctgaaacattacaggcattgcccgaagatgagcggtggctgattgaagagtccgatcttaaccggcgtcctcagcagtccctggccgatgaactgggtatcacgcttacggcgtttaaatcccgtttgctacgggccagaaagcacctgaaagaagcgatgacagaactttgccagattgaggcggatgacacgtctcccgtctgctgccacaaaaaaatgaattaa

SEQ ID NO: 285340 - DNA, 714 bp, Morganella morganii
atgacaggcgatcttaagaatgttgattctggtttgtttgacacctcaatcacagaggcaagattaggcattcctactgttccccatcctccccgtatcctgatgctgtacggatctgtacgcgaacgttcctacagccgactggcaactgaggaagcggcaaggttgctgactgccatgggcgcagaggcgcggatcttcaatccttctggcttgcctcttccagatgatgcgcctgactcgcatcctaaagtcatggagctgcgtgagctggttcgttggtccgaagggatggtgtggtgctcacctgaacgccatggtgcgatgaccggcatcatgaaagcccagattgactggataccactttcggaaggcgctgttcgcccttctcagggtaagacgctggccgttatgcaggtctgcggtggctctcagtctttcaatgccgtaaaccagatgcgtattcttggccgatggatgcggatgatcaccatcccgaatcagtcctccgtggcaaaagcctggcaggagtttgatgaagatgggcgaatgaaaccgtcgtcttattacgaccgcatcgtggatgtaatggaagaactggtgaaatttactctgctgaccagaggtaactcagcctatctcgttgatcgctacagtgaacgaaaagagtcagcagaagaactttcacgacgggtaaatcagagcaaaatttga

SEQ ID NO: 285341 - DNA, 324 bp, Morganella morganii
atggagctttcaaaagcagcagataccctgaaagagctgggtcatcccacgcgccttagcgtatacagagagctggttaaagccgggcatgaggggctaccggttggcgaactgcagaagcggctcgaaatccctgcgtctacgttgagccatcatctctcatcgctgatatcagtctctctggtacgccaggagcgccagggtagaacgctctattgccatgctcgatatgagaaccttgaggctctcattaccttcctgacagaagaatgctgttcagggactaacggctgcctcaccatgccccagaagacggagaagtaa

SEQ ID NO: 285342 - DNA, 207 bp, Morganella morganii
atgtatacaaaacctgcactacttgaagatcaattcattgatatgaaattcattacccagcttactggcctgagcgataaatggttctataagctgatacaggatggggcattccctaaaccaattaagctgggcagagcttcccggtggttaaagagcgacttggaagaatggttgtattaccgtatttacgaatccagaaagtaa

SEQ ID NO: 285343 - DNA, 351 bp, Morganella morganii
atgagttttgaagaaaaaaaggaacgcgctatcgccattatggaaagcaaaaagatgtggcgcagtaattatgcgccgcctctgttacgcattttatggaaaacaggcgtcaggatccccccattaccttttgcatcattttggcaggtaactttgttgatgggaacatggtttggacctgtatggggattttttatgtggtttttttcatggaaatccatgggaatgttgccggcggttgccattgttgtgagtatcgtggcaggtgttagttttggtattctgatggcggcatatcactggtggagaaagaaggccaatcagttgcctgactggaatagcctggaataa

SEQ ID NO: 285344 - DNA, 2118 bp, Morganella morganii
atgttgataaaaaataaattattaacgctatcactgttaatagccccgtcattagcgtcagcaactgatgttctggttgttactgcgccagactcaaatgatttatataccgccacaacaacgtcttctgcgacaaaaaatgatactgagataatgaaaataccgcagacggtgaatgtggtaactaaaacccagatagaaaaccgggctgctgaaaccgttgttgatgcactcagatatacaccgggtgtggttacggaataccgcggtgattcaaaccgcaatgatgaagtattcagtcgtggttttgattatgcgaacaaaattcttgatggtatttctttcggcggaaatgcgtcctcatcaataggtacaacagagccctggtttctggacagaattgaaatgattaaagggccggcctctgtccagtacggacaaataagccccggcggggttattgcgatgacaagcaaaaaaccaactacgcagagtatcaataaaattcagttacgggcgggtaaccggaataaaaccgaaggatttttcgatctgggcggaaaattaacggatgatggccgcgtgctctatcgtttaaatggcctggcgaaaaagaaagacactcaggtacgggactacgaggaagaaaagtatgctgtcgcacccgcgataacattcctgaatgaagacacatcgttcactttgctggcatatttacaaaactcgccgaaaaatggttaccggaacttccttccggcattgggtactctggaatcaacaccggaaggaaaaattccgcaggacttcaatataagtaatccggattataatatttcccggcaaaaacagcacagtatcggatatgaatttgagcacaatttcagtgatacgatttcattggtacagaaggcccgctacgcagagattgacgaaaaatatcattacctggtatttaacacgctggcaagtgaagctaaaaactatccttatgtacttaaacggatggctcagcacgaaaagacgaaacttaatacattcggtgttgatactcacttaaatttcaatattgatagtgaggggatttatcagacactattagtcggcatcgattacaaatggactaaagaagataaacaattttggcgtgacagaagcggtaattatgatattgattggcgcaaccctcaatatccgaaaattgatgaagccagacagacgttgtccacaaaccagttacaaaaaagtgaccagacgggtatttatattcaggatcaaattgaatggaataactggaatttattagccagtgcccgatatgactggattgaggtaagaacaacagacagaataatcagtgataagtcacaacagaatgatggtaaattaacgggattagtgggtttgttgtactcatttgataatggtatttctccttatatcagttacagcacgtcatttgagcctaatcttgcaaccaacagaaaaccgggcagtaagccatttgaccctaaaacagcaaaacaaacggaagtgggtattaaatatctgactcctgaccaaaatacactggcgaccttatccttataccatatcgaacaaaacaatattcctaaatacgacgccggattgggctatatgacgcttatcggcaagggagaaagtaaaggtgcggaagtccagataaatagcagacttaccgataaatttgcaattacaggggcatatacatacaccaaaaccaaagtacttgagacggcaaacagtgccgaaaaaggaaaagagtttccccgtattcccaaaaatatggtttctgtctgggggcaatatgaagaaaatgcagggatactgaacgggctgaaagcgggcgctggtgtacgctatatcggttccggtaaagcaggggcggataatagcttttctgtccccggggtaacactttacgatgctatggttggctatgatcttgcaaatatttccccttctttaaaaggcgcaacgatacaattaaacgttaataatttagcggataaacattatgtttcatcctgcggtatgagtgatgcctgtttttatggcatagggcgaacaggtactgtcacgtttgattacgcctggtaa

SEQ ID NO: 285345 - DNA, 369 bp, Morganella morganii
atgacgctggtgacgattgccaccgtggtcttctggctcaacccggcgggtaacccgtctgttgatatggcgtgtatgataaccatcggcttcctgatttacggccccgtcatgctgatcggcctgcatgccctggaactggcaccgaaaaaagcagccggtaccgccgccggatttaccggactattcggctatctcggtggttctgtggcagcaagtgcaatcgtcggctttactgtggattatttcggctgggacggtggttttggtgtcatgattggcggcagtgtgctcgctgtgattttgttagtcgtggtcatgcgtggtgagaagaaacaccatgaggacattatccgcagcaaagcataa

SEQ ID NO: 285346 - DNA, 987 bp, Morganella morganii
atgtcactgcataatactaattcactctccgaagtatttattaacagtgatggtattccgctgattggtgaaggaaacagtgactgtaaagtcatgaccattggccggaaaaacgggctggcctgtaaaatggtaaactataccctgcaaaccagtatgagtaacctgacaatccgcatcttcccggcgattaataataccgcgctggcctccgcaattggcgctgatgacatgcagttcagcctgaatggttcaaactggaaatacgtgcgcaataatagctattactacacgttcaatgatctgaaatccgcagattctgtctatattttcatgtcgagtgatttttttaaacagatggtcaaactgggaatcgcggattcaaatacccgtgacttatttaatattcgttttcagaacacagagtcaccggaatccggctggtatgaattttccacatcaacggcgctgattataaagccacgcgactttggcgtcagtatcatatcaaaggagtatgaacttcatccgcaccgtgaggggaaagttgaacatatggctcctccgctcgatttcgaatatattgtgacaaccagcggacggacaaaagcagaccaggttttaattaatgtcaccggcccgtcacaatcactgggcggaaaaagttactgtatcttttcctctccggacaaaagcgtcaatgtcccgtttccgggctacctgagctttataacgcaaaacggaaaacaggtgaaagatgccggatgcaacggcacctggtatgacatgacagatgcattatggacagccactccgtggacagacatctccggtgatccgggatttctgaataaaaccaccgttatgttcagtattccgatggataataaaatatcggaacgaactgtggaaaataacggctggtttggtgaggtcagtgcatccggggaaatacacgtacaggcaacctggcgtaacgttcagtaa

SEQ ID NO: 285347 - DNA, 216 bp, Morganella morganii
atggccggtaaacaggttatctgtctcggtgatacgactgaccacggcggtgtggtcatctctgcgttggataattacactgtcaacggccgcccggtggcaacggaatctgagaacggcctgttccgctcttttttcttatcagccatccaggctgttaatcatggtgcgggcattgatcaccagctgccgcgcctgctcttcccgccgctgtaa

SEQ ID NO: 285348 - DNA, 1179 bp, Morganella morganii
atgactgaacaggaagctaaactgaatgctatccgggaaattcccggatttttgctgattgatgataaaaaacggtatttaacccgcctcgggctggtgatgacgtttttctttaaaaacgggtataccccggagaaaaaagcggccattttgcgctgttaccgccggttccgtgagttgtatgcagggaaactgaagtttcattcccatgaatttgacggtatgaaaaagtattctgaagaaaatatcgccaaaattgagaaaaaaattgaggaatcaggaggggatgatcccgtaggctggcatatcagtgatgcaaaaaataaggatgaagccccagaataccttatggactgtctgaattctgatgaatctgacggtgcttggggaactgcgtatctgagcctgtatctgccgtggaatatcctgttttcagcggaaggtaaacaggaatttcaggagtgggtgcagtatttatgtcaggagctggaaccggatcacggtgactgtggttatactctggtgatgccgcgtgattattatctgtttatgccgcaggagtgtgagctggcacaacgctacccggcgatggtggtgaattccaccgttcatatggcggcaactgaatacgaaaatgctatccgcagcgtgcagtggctgacgttcctggctgaccgttatatagaacgcctcggtggtgagacccatgtccgcaaaatattatccgctgatccggaaattactctgacccgttaccccggcgggctgataattcaggccggtgactatccggatatcacccccggcacaccgccggaaagctattaccggattaatgaactgatccggccaatccgttatgtcattaaaaaagatgattccttacatttttgcggagagggacattttacagaagaaacaagcagacaatggtatgagcgttatgatcgcggtccgatggtcgtttctccgttgtatgcgggtgaaccggcccgggttgatggctactggacgaccgaaggccgcgagagtgtggagaccatttttcttcagggcacaccggcgattgatattgaaggcaatccgcccggacggacagaatggcggcttatccgcgaaattccgcacgatgatgaacgggatctgaccctgctggagcaaaaactcaatggccggtaa

SEQ ID NO: 285349 - DNA, 192 bp, Morganella morganii
atgcgcatgcctgacaaatattccagccctacagcatacgcctgggggcttataacctctgcctttggcattttatctctggaccagtgggctattgttgccgggatcatctgtactgtcggaacgtttctggtgaactggtattacaaacggaaggaattccagctgaaagccggagaacatcatgaataa

SEQ ID NO: 285350 - DNA, 378 bp, Morganella morganii
atgaactggaaagaagcggtaattgccgcgctgtttattactgctgcctggtgggcatatgacacctaccgggataaccagcagctgaaggtgaataacacaacgttgtccggacagctgtcagcacaacagacgataaacaccatcacgctttcagccgttgccatcagacaccgcgtggcattcgacaacatcaaagccaaacaggaagagggcacggagaatgtcaaagttaagactgttatcaggacagtatttaaggacagcgaatgcgctgttgctcctgttcccgctgatgctgttagtgagttgcggaaatacgcggacggaatacgttcccgcgccggtggtgccgataccgccacaattgaccgctga

SEQ ID NO: 285351 - DNA, 777 bp, Morganella morganii
atgaaacttcatgaattaaaacagaaacgtaataccatcgccaccgaaatgcgtgcaatccatgaaaaagtcggtgacggtgttatgaccgaagaacagcgtgcggagtggaataaggccaaaacagagtttgatcgtctgaatgagcagatcacccgtgaagaggaactgcgtgcggcagatcaggcttttgtggatgatcaggagccggaacagcgcggaaaacagaacggtaaaacacatcagcgcctggtcagcacaacctccgaagcggtccgtgctttatgttgcacaattcccgggtttgaacgctatctgaataccagtaaatcccgcggcttaacgtacgcggtatttcgcgggaaaaagaatatcggggtggacgacctcggttttccggtgacggatgatgttatccggattgtgcctgttgtgatcggcagcaaacgcgggggattgctgcaggttattttcggggcggtgatggtggcagctgcgttctggaccggcggtgcgtcagtggcagcatggggagcgctgcataccgggctggccatgaccggtgtatccatgatgctgggcggtattatccagatgttgtctccgcagccgggcggtcttgccgtgaaagaccagggcgaaaataaaccgtcctatgcgttcggcgcaccggtgaacaccgtttctcagggctatcctgtcccgatcggttacggtaagcgccgcatcggcggggccgttatctcagccggaatttacgtcgaagatcagcagtaa

SEQ ID NO: 285352 - DNA, 132 bp, Morganella morganii
atggaaatcaaaccaggaccaaaacctgttacagacacaacaggaaaagaagacagaagacaacgtgttacccctgaaaataagggaaaacacccggatcttaagccacataaacataagaaaggtgattaa

SEQ ID NO: 285353 - DNA, 507 bp, Morganella morganii
atgaatctaggaaatgagttccctaaaaagcagaatgtttataaaggcatgtggtatttaatcactaataccaaacgatttgtattatccgcagccgaaaactcaatggcatttgagcttgagaaagaagagtatcaacggaagctcgaacaaggaaattatagtcttgatccaaaaaatcatacctactctcatccccagaggctaaaagaattacgaactttgttattcaagacaacagtctatatttttatcattattattttaatagcaggcattggtttttatacgggagtattaaaaataacaccccatctatcatggaaaaatagcgccagcgctttaggtattattttaatctcatggtctacattatttcaattaggctggggaaatggctcatggagtggaacgtgcctggatgaattggtaagaaattctctttttcgccatgtttttagcactggtgtatttttgagtttattatatttcgttctgccagaatga

SEQ ID NO: 285354 - DNA, 2871 bp, Morganella morganii
atgagccaaagcaacgccataaaaattgccaatcgaattagtgcacgactgtcactgcgcgatccgcaggatgaatcattacgcatcttatgcgatgtgctcgaacagctcggtctcagcaaagatcccgatcttaatcgctggattgaattgctacgtcaacagtatcccacagtcaaagggtttgaacgagccttcccttcactatgctttgcactggctacgggtgtaggtaaaactcgcttaatgggagcgatgattgcctggctatacttaaccggacgcagtcgccactttttcgtactagctccgaacttaaccatctatgaaaaacttaagatggattttttacccggctcgccaaagtatgtttttcagggcattcctgaactggcacaaacaccaccggtactaattactggtgatgactatcaggaagggcgaggcgttcgtctggattatgcgattgctgaaagcaaaacgggtgatctttttggcagcgaaaccgctccgcatattaatatcttcaatatttccaaaatcaacgcattggaaaatgccaaaggtgctgctaaatccaaggtcgctaaaattcgacgtattcaggaatatgtcggagaatcttattttagctatcttgcaaacctgccagatttagttgttttgatggatgaagcccatcgttactacgctagtgcgggcgcacaagcacttaacgatcttaatccagtattgggtattgaattaaccgccacaccgaaaaccgtaggtgcaaacccacgtgattttaaaaatattatttatcactatcccctttcgcgtgcactaaaagacggatacgtcaaaattccagctgttgccacgcgcaaagacttccgtgctgccaactactctgaagagcagttggaaaaaataaagctggaagatggaatccaccatcatgaatacgtgaaaacggaactaaccagcttcgccaacaacaccggtaacaaactggtcaaaccttttatgctagtcgttgcgcaggataccgatcatgcagacaggctaaaagtacgcattgaacacgacgatttcttcaatggcgcttacaaaggcaaagtaataaccgttcactctaaccagtcaggcgaagagtcagaagaaactatgcagcggcttttggccgttgagcatgacaaagacactgaaatcgtcattcatgtcaataagttaaaagagggatgggacgttacaaatctgtacactatcgttccattacgtgcttctgcctctgaaatccttactgagcagaccataggccgaggactgcgccttccctacggcaaaagaaccggcgtcgaagccgtcgatcgcctgacgattattgcccatgaccgttttcaggagattatcgatcgtgccaataacgatgactcgattatcaagaaggttctgtatatcgggctggatgatgatgaaaacggtattccagaagtaaaaccgcagcaaattatcgtaccatcaatggctgaattcctgttgggaaatcaagtcattgataatgatgggttgcaggcttgtgaacctcaagcaatatatcagacaaactccatatcaaaaccggtaatcaatacggaaacagaacgcaaagttgccgaacttacgttcaaagtggtatcagaagaagctaaacggttaaccagcagtcagcaactcagcacgccagaggtgaaagcaaacgtaactcgacgggtacaacaagccttgcgtgaatgggaagtcactcaacatcaaatctcatcgtcttcggatcaactcgatttgacggaaatgattgaagagcaagttgaacagccaagtttcctttcaatggaggatacggaagttcagtcgttggtcgggacgatcaccgaaaaactgatggaatatactatcgatattcctcgaatcgtggttttgccagaacgtgaagtcaattacgggtttaatgatttcaacctttccgggttggatcgcattgcgctcaaacccggcagtaaagagctcttactcacgcatctggagaataacgaacagcggacaatcagttggcaggaaggtggagaagcggaagaacggctcgaaaactatctcattcgttatctgctcgaccatgatgaaattgattacgacgaacatgccgacatgctctacaaactggccggacagatggtgaaccatttgtgcagttatcagccgccggaagattcagaatccgttctgaaaaatgcgggtcggcagctggctgaatttatatgggtgcaaattaaacaaaatatgtggacaactccaacgggctataccgggcgtataactcagggctttgatgtaatacatccagcgacgttcaattttgccggtaatgaaaaaccgagagatttccgtgttgcagttcccgcaggagaaaaaaataaagtccgccagatgattttcactggttttactaaatgctgttacccttatcagaaatttgactctgtagatggggagctccgcctagctcaaatattggagaatgacccctcagtgattcgttggatgaaacctcgtccaggtcagtttcgcatcgaatatgctaatggcaagaactatgaacctgattttgttgtcgaaatggacaatggttattgcctgattgaaccgaaaaaagcgacagaaatcgacgcgccagaagttcaggccaaaacgcgagcggctattcgttggtgcgaatttgcaaatcaaaatgctgaaaaacttaatgggaaatcgtggcaatatgctcttatcccccatgatgaaattgagttaagtcggtcaatttctggactaatggctgattttatgatgactaatagtttatctgtataa

SEQ ID NO: 285355 - DNA, 1614 bp, Morganella morganii
atgtcaacaaagcaaaaattagaacttaactggattggtaagcataagcgtcctcgtctggagccgcgtattctgcttgaagataagaagttatcttacggcgatgcggataatgagaacctgctaattcatggtgataacctgttggctctaaaggcgttggagcaaaagtatgcagggaaagtcaagtgtatctttatcgatccaccgtacaatacaggaagtgcatttaagtattatgaggatggattagaacattctgtatggctctgtctgatcagagatcgtctagaaatattacgcacattactatctgaggatggttcaatttggatcacaatagatgacaatgaagcgcattacctgaaaattgtatgcgacgaagtattcggaagaaataactttcaatgtgatattgcttgggaaaaaagatattcgccaccacccgatacaaaagggtttggttacgtgcatgaccatattctttgttatagtaaatcaaacaatttccaaagaaattacttgcctatgacggaagatcaaacaggtcgatacaagaatccagataatgatctgagaggtccatggaaagcaatggactatacatgtagatactcagctgacgaacgcccaaacctttattatccaataataaaccccaatactggtgaagaggtctggccgaataaaactcgagtttgggcaatgtcaaaagaagtgaatgctcagcatgtgaaggaaaatagattatggtggggaaaaagtggtaagaataaagttcctgcacttaagaattttttttctgatgtaaatcagggcatgatgccaatgtcactatggaagcatactctggcagggcacactcaagaagcaatgaaagaaatgttggctctgtttggcaacgatccatttacaacaccgaaaccagaacggctattacagatagtacttacaatcgctacaaataaaggggatcttgtcctcgactccttcgcaggatccgggacaactggtgcagtcgctcacaaaatggatcgccgttggatcatggttgagctaggcgaacactgtaatacccatattgtaccccgccttaagaaagtaattagtggagaagatctaggcggtatttctaaatctgttaactggcaaggtggtggcggattccgctacttccatttagctccttcattactcaaaaaagataactggggcaactgggtgataaataaggaatataacgccgaaatgctggcagaagccatgtgtaagcatatgaattttacctacgcaccaagtccgactcaatactggaatcatggttacagtacagaaactgattacatctacgtcactaccggttctttggcttatgaacaactcaaagttataagtgaagaggtgggaactgaacgcacattgttgatctgctgcaaagccttcatgaccgaaggggcagactttcctaatctgacattggtaaaaattcctcgtgccattctgagtaaatgcgaatgggatcaggatgactatagctttacgctaaatgtactatctgattcagaacaacctggcgatattgactacgacgaagatactgaaggcgaagaataa

SEQ ID NO: 285356 - DNA, 2388 bp, Morganella morganii
atgacggcgaattatcagcatctaaatatttccaaagcccctcttcagaatgaccgacggacccgcagagtcaatatgcctcgtattcgcagaggcgatttacgtcagcatgggcaaatgttattgaaccagctccagactctgcgcccgatgctgacgcaggtaccaggcagcgccgctgatggtcgatatatactcaagctgaactacagcggcacgatgaacttttcggcattgatacatcatggcgtagagtttgtcagtcaggaaaataaacaagtttgcgtagtctttagtgacgagcaagggctggctacatttgcagaacatctgtcatccctcggtctaggtaatacagaactaacctacaaacagatcctggaggcgcttgacggtatcgagggctggtcggcggaagatcgcaaaagctgggctcttcggcgttatggttttcctgtagcggaacgctttaaactggatgtagagctctggcctatcgaagttgcgcatcatcccaaacgtatcgatctgtatacacgttttgagcactggttacaggagcaggatatttccaggcaggataaagtcaatctgggcagcctgttaatgtaccgggtcgaggtttcactcgcgcaagcggaacacctattagctcatcgggacgttaggtatattgatttgccaccctctagtggcattagctatcaacaaattaaccgggacatcaatacacttccagctcgcctgagctcgccagcggaaaatgcgaccaggatatgtattctggatagtggtattaataccaaccatcctttgttaagcgctgccattgctgaaagcgccagctttattcccgatcaagatgcgtttgatgaacaggggcatggcactgccgttgccagtattgcgctgtatggtgatgttgaagcttgtaaccagagcaatttctggcagcctcaactatggctgtataatggaaaagtactgaacgagcaggctgaatttaatgccgaaactattgaagctacgcttgcagccgctgttgcatattttaccgatctcggctgccgcattttcaacctgtcattgggaaacgctaatgctccctacgacggcaaacatatccgcggtatagcgtatttattagatacgttgtcaaggcagtacaatgtactctttgtcgtttctgcaggaaacttcgctggtagtgacgagcctccggtaccgcaaagcagctggcgggatgagtatcctgattacctgttgcatgaggcaagcgttatcatcgatccagctcctgcactcaatgtactgacagtgggcagcatcgccaggcataacgcaacgcacgatgcacaacgaagacctgaggatattcagcatctctgcccggcaacagaaaatcagccttcaccttttacccgacatggtccatcaataaaaggggcgtttaaacccgacgttatggcacacggtggcagtgtcgcttccaatgtgcggcaagggcaatggcaggcgcatatgcgtggtttgggtgtattaagttgccatcaccagtttcagggcgctaccttgtttaaggagctcagcggtaccagcttcgccgcaccgtatattacgcatctggcaggacgcctgttaaacgaatacccggatatgtccgccagtatgttacgggcaatgctggttaatcatgcatctgtccctcaggcgatgacgcaggctttcccgcaggcgatgcgagaaagttataaaaacgcacctacaacgagaaaccgcgagatagaacgtgaggtaacgggttacggcatcatcgatgaagatgctttataccgctcttcagaatatgtggtggtcatgcgatgtgaagagcagatagaaaataacgcccatcagttttttgaactgcccttcccggcttcttttttaagatcgcagcgatcaacccgtgaaatccgcgtgacactggcttactcacctgctgtacgtacaacccggatggattataccgccacaaggatcagtttccggctggttaaaggccgctcgcttgacgaagtacaggccagttttaatcaccagacacagagtgaaacggaaacccgctccgatgatgcccaaactaaccgggttgtatctgctcaacagcgggaacgcggtacggtacaatcatcagtatggactttccgtcagcgtaacccgaatgaaaaatggtttatcgttgtaacccgtcaggatagagattggggcgaagcattcagcagcgagcaggagccttacgcactggtagtgaccgcgaccgatcgtgataacgaacaggctcagctttatacacaaattcaggcgcagatccgtgaacaggaacgcgcgcgagcacgtattggataa

SEQ ID NO: 285357 - DNA, 981 bp, Morganella morganii
atggctaacggtaaagtattaagacagctgataaaagcgggcgcgacgggcgacactgctacgttccgtcgcgtttcagaagccattattgatgaggaacgtcagaaacagcaccatcttctggctaacgatctggagcatattctttatggcgatcacattgttcaggcttcgcgttcaactacgttgcctccggcaccggtagacaaagaaagggggctgccactgttggatctacggcagccgcagcgcagcctcgatgaaatgatccttccagctgccagtgctacagtgatcgatgagctccttgaagagcatcggcgtagcgatgtattgcatagctatgggatgaaagcagccagtaaaatcatgttcttcgggccaccaggctgcggtaaaacgctggcagcggaggtcattgcctttgagctggacatgccgctggcaattgtccgccttgatgtattggtatcctcatttctgggtgaaacagccgcaaatctgcgtaaaatttttgattttattgcccaacatccgctggtggtcttgttcgatgaatttgatgcaataggtaaagaacgcggcgacagcggagaacacggcgaattacgcagggtcgtcaatgctgtactgcaaatgatggatgcttatcagggcaaaagtctaattctggcggccaccaaccatgaacatattttggacagcgccatttggcgtcgtttcgatgaagtgattgaatttcctctgccagatcagacgcagttacgcgagttgctggcgttaaagctacgcggcattcgccgacagtttgaactggacgataatgagttgttatccttgcttcatggcaaaagtggtgcagatatcgaacgcatcgttcgccgagccactaaacacatgatcctgcgtcatcaggaattcctgacgctgaaagatttaaaaaacgcgatgcagcgagagaacgccagaattcaccgataa

SEQ ID NO: 285358 - DNA, 2748 bp, Morganella morganii
atgaatccccatcaggtagaagccgctatgttcgcactggcatctcctttgtcgaatggcgttattctcgcagatgaagtggggctggggaaaaccattgaggccagcctgattttggcgcaaaagtgggcagaacgacgccggaaattattgcttattgctccggcaacgctgcgtaagcagtggagtcaggaacttgaagagaaattttcattaccttcgcggattatcgaagcaaaaagcttcaatcaaatgatcaaagagggatgtggtaatccatttgacattgaaaacgcaactggggaggctgcgatatgtatttgttcatacgaattcgcttcccgtaaagaacatgaattggcccgtatcccatgggatctggtcgtcatggatgaagcccataaactgcgaaatatctacaagagcgatggcgctaaaacggccaaaaaactcagtagtgcattatctggtaggaaaaaaattctgctctccgctacgccgcttcaaaatagtatccttgagctttatggtctggtttccgttattgacccacatttcttcggcgatttggcttcgtttaaggcccgttattctcggcagaatattgacgatgcagaattagcgttattaagggtacgtctgaataagatctgtaaccgtacgcttcgccgacaggttcagcaggaaggtggtatcagttttacccgccgtcattcaataaccgaagattttcgcccgacggatgaagaagaagctctctataaacaggtttcctcttatttgcagcaagacgatctactggcaatcaaaagtggtgcacgtcatctagtaacattagtcattcgcaaaattctggcctcatcgtccactgcgattcagggaacgctggagactatgattcatcgtctagaaaataaaatgccggtcttagatgccctgactgattatgaaaattatgatgattacagtgatgaagaaggtatcgaggatgaagagaccatcgatccccgggctctacaggcagaaatcgaacagttaaaaagttataaaacgttagcggcatctataactaaaaacgccaaggcggaggcattgttaagcgttcttagtcgggctttcgaattcacagtagaactgggcggattgcgtaaagcggtcatttttaccgagtccgtgcgcacccaaacctggctagcgcaactgctttcagacaatgggtatgaaggcgaagtcgtgttgctcaacggcagtaacagcgatgcggcgtctcgcaagatttatagtgactggttggagaagcatcaaaactctggccgggtttccggttcgcgtacggcggacatgaaggcggcgctggtcgaaaaatttagggacgaaggcactctgatgatatgtaccgaggccggtgcagaaggtatcaaccttcagttctgctctctgttaatcaattatgacttaccttggaacccgcagcgggttgagcaacgtatcgggcgtgttcaccgttacggacaaaagcacgatgttgtagtggtcaatttcattaataaaggtaaccgggccgatcagcgtgtctttgaactattgagccagaagttccagctttttgaaggtgtgtttggtgcatccgatgatgttctgggatcgattgaatcgggtgttgatattgaacggcgtatccatgatatttaccagcactgccgctccgacgagcaaatagaacaggagtttaatcagctccaggatgaactcaaagagcagctggaaaaccgggagaatgaaacccggcgttccttatttgaacatttcgatgtagatgtcgtccgaaatctaaaaactcgacgcacaacgaccctcgcacagttaaacgattatcaggaaaatctgctgctgctagcggaaatgtttctaagtgacaatagcgatttccagcactctgaaactggttttcgttcctcaggaaagtattatgacgttagctggcctgttgcggatgaaaaggatgcagaatttttccgacctaatcagggatacggaaagcaactgattgatgtggccctacatgagggaaaagacctttccacattgccagtttgtcagaaactccatttcatctaccaacccaaggcaggacaattggctgatgtaaaattgctttgccaacaatcagggcagttgttactagcaaaagtcagtatcggaaatcaagaacaacaacgagagcagctacttgtcgctgccgtaacggaaaatggtgaggtagtggcggaagaaaccgcatcccgtctgcttcgcttgccgttgtcagagataacatcaatcgaagaacagcctgtgttacccactttaacctcacattgtgcggttttacggaattcttttatccagcaggtcgaacgtgataacgaactttattacaatgaagaagtagaaaaacttgaacgctggtcagaagatcgtcgcatcgcgctggacctacgcatcaaacagttagatgcagaaattaaagaagcgcgtaaaaccgcccgccaacttccttcgctgaaagagaagatggaagctaaacgctcgctaaaggcactagaacgcgagcgggacaacatcatgttgcagtatcatgatgaaaagaaaaaaattgagcaggaagaagaccgcctgctggaagaggttgaacaaaagctggcgacagagataacgtccagtcaattatttgcggtgagctggacattgaattcaccttccgcataa

SEQ ID NO: 285359 - DNA, 1203 bp, Morganella morganii
atgcaaaaatcaaaagcaggtgtatttgccgttgcggcattggggctggcaatgacactgaataccgcgtacgcgacagagtataaggccagtaccaaagaagggccggtgaaaattgttaacctgaatgacctggaatcacaggtaaaagccaatatggacaaaggggcattcggttatatccgtggtggtgcggaagatgaaaaaaatatgcgtgataataccgccagttttgatcgcaaatatattatgccgcgcgtgatgcagggaattgaattaaaggatatcgatctctcaacgtcattcctgggcatacctctggcaacgcctgtcattcaggcaccgatggcggcacaggggctggcacaccgtgacggggaaattgccacggcaaaaggtatggcaaaagcaggttctgttttctctctcagcacctacggaaataaaaccattgaggaagtggcagcggtatctgacggacatccgttcttcttccagctctatatgagcaaaaataatgcgtttaatgaattcaccctgaaacgggcgaaagaaagtggtgccaaagcgattattctgaccgtggattctccggtcggtggctggcgtgaggatgatttacgcaacaatttccagttcccgttaggatttgccaaccttgaattgtttgccgcacagaacaatgacggctctaaaaccgggaaaggtgcggggatcagcgagatctacgctcaggccaaacaggcatttaccccggatgatattcagtatgtgaagaaattgtccggtctgccggtcattgttaaaggtatccagtcaccggaagatgctgaccgtgtcattgaggcgggtgcagatgccatctgggtatcaaaccacggcggtcgtcagttggacagcggaccggcctcttttgatgtgctgccttccattgcaaaagtggtgaacaaacgtgtgccaatcgtgtttgacagtggtgtgcgccgtggttcacacgtctttaaagcactggcaagcggtgccgatgtggttgctgtcggtcgtccggtgctgtatggcctgaatctgggcggtgcggaaggggtaaattccgttattcagcaactgaataaagaattacgtatcaatatgatgctgggcggtaccaaagatattaatgccgtcaaacagaccagactgtacagcgatcgcgattttcagtaa

SEQ ID NO: 285360 - DNA, 264 bp, Morganella morganii
ttgattcatcaaaatggcattatttccggaaataaactgatttcggtggatggtaatttaacgatcaaaggaaaaacacatccggtgcagttacaggtaacgaaattcggctgttatttcagtccggtatttaaagcggatgtctgcggcggtgattttgaaaccatgattgatcgtactcagtggggcgttgattttctcgctgatgccggtattccggcgaatatgtcactgaaaattcaggctgaagcaattaaacagtaa

SEQ ID NO: 285361 - DNA, 339 bp, Morganella morganii
atgaaaaagatcggcttaacgctgtttgcttcgctgtttttatggaataccgcacaggcggctgactataaattagaaccgggtcataccaaagcggtgttctatattgatcattttaatacctctaccaacagcggcggtttttataatattaccggtgatatggcctattcaccggagaaacaaaccgggcatgttcaggtcactattccggtgaaaaccctgaataccgggattgacggatttaatcagcatatgctgagtgcagatattcttgatgcggaaaaatatccggagattaaatttgattcatcaaaatggcattatttccggaaataa

SEQ ID NO: 285362 - DNA, 579 bp, Morganella morganii
atgaagtcattaactcgtggtcaaaagattttttttgttattgtaatcatagttataattggtgcattcaatcgttcattacaaactaattatggtgtggattcgttaagcactcagtatttaaaaaatatagataattataaaaatgatcagtttaagaaaactaattttgataaaaactttaaagcttttggaggaactttacctgcaactattgaaataaactcatccggtggtgaaggaaaaaaggttgcacgtgttgggtttgttaatgataaaaatgaaacaacaaatgtagtttattcgcaatatgaagcactaggtcacttacaagcattgatatctgcaaacaatagagtacatgacaatgaattatctgacaacattagcatatccaataaattcacagttaaaggtcatagtgaaataaactatacatatactggttttaagcaaggaccacttaaaatcattcaagtttgccaaactaggaaaggtgatgaaaaatgtgcattacttgatgaatttggtattcttcaatactataatcacttgaagaaattcaatgtaacacattga

SEQ ID NO: 285363 - DNA, 372 bp, Morganella morganii
atgaaaaaattacttactttaagcttactctctttatcagcattttcatatgcaggaacaaattttgaaggttattgcaaagacttaaaaggaactttgagaaatggaaatatcgtaagctttcatgttgtttccaaccattataataatgaaactacagagggaggacgtcccgctttcatcgccaatacgaaaataaaactatccgatggaaaagaataccattatggcatcatgcgcaatgccagtgctctttacgatatcgctaaggtagcctatctgacacacgcagatataaccttgtgtgtcggcactgaaaagaacttccctggtggagatgccatctacatgattggattaagtaaaaaataa

SEQ ID NO: 285364 - DNA, 717 bp, Morganella morganii
atgaaaagaataattttagctgcgttatttatttttattaatatacaggcatcatatgcacgacctgtatataccgtatatagagcggattcaagaccaccgtcagatgtatttgaaaaagggtttaccgcctggggagataatattaatttccatgctcatgtgaatgggtcttccggaagacggggaagtaaagattcagcatttattccgacaaaatcaaactttgattcagcgaagaacttcgcaatggatttacttaacgtctcagaagaaggaatagcttacgtatataagataagaccagtaagtaatttctattctgcacttgatactgtatattattactatgaccaagctaaacaacgtgtcgatgatacactaagagccgcattagcccgagagcaggaatattctgcatatataagcataccaaaccaattaatagagattgcaactaaatacgaaagagtgggtaatgacattattgaaaaaaccattgtgaatgaattatattccagtggagatacgcattcctctgttgaggaatttaaattatataagccatcacgaatagatagcttacctcattttatcatgggattatccatgactaatgtaaacaatgaattaccggatagttcatctgtattaccttcatcttcatttaccatgaactctgtactgggaacaatgatggaggcagctgaattataa

SEQ ID NO: 285365 - DNA, 183 bp, Morganella morganii
atggtattttttcccgggctgacttatctgaatcagcgctattattaccactacgattatctggttgatattgaaggttgttttccaggttatgaggaacagtcatttattgaggtcagggagattgcggaacggttttaccggttgttatctctgccggaagcgatgaatattccccactga

SEQ ID NO: 285366 - DNA, 1164 bp, Morganella morganii
atggaaaattattttttaaacttggaaacaattcatccttcacgcttggctgaaatattactagaaaataagccttttaaaagtggtgaaatatgggaatttactaatgagataaagcctttagatctctactgctacctgtatgcaaagtatggcccgccaaatggcatacaaaacttccttcgttctgatgattcagataatcttattcactgggaatggacccttgccggaaaatatggtttcacatcaattcaaggacataactttagaagtgaagttcatttgcttggtgattttaagaataaagaaataatacttaaagactttatctcccaaataaaatcagatattgtacattatggtaagaaaatatctgaaattagaaaggaacttgagaaatggacacagtttgtcaatccttataaacgtattgaatcagcagtaaaccttcacttttataaactaaatgaactaaatctcaatcctcaaaaagataaagtcttgcaacctacttcttacgaggattttaaaacctatcaagaacgctggtctgctatctcagagaaatatatttatgctgtgggcttagcgtttggcttacgatcaatgttgccagtccttgctgaatcatttgtgaacctgttgttatttgttttatgtcgatcagacataaaaagtaatgaccggcttttcaataataccattagacagcagatagatataagaattcagtcattacatgttaattgtattggatttaattcagcgattgattattcttccgaagaatgtagaaaatttcacactctgatgaatgaaagaaatgaccttttacatggaaatgttgaggttaataagctctcaataggcgatgtcttctttaacaagcgtgttcctctgtttattcagtacgaagatatttgggataaatcaattggagtgtcaatgcaatcagtaaaatttgaaactatacatgaagataagaaaactatagataatttcattaaatatattcttgataagcttgatgataatataaaaaaacaacttgaaataattatggatagtagtcaattaggattcaataataagacaggaaggattggcttgctatttcctgagcacatggttgactttagagctgtatttgaaaaaaaataa

SEQ ID NO: 285367 - DNA, 483 bp, Morganella morganii
atgtttcagtttaaaaatcttattcaaacaggtatgggggcagcaagttatgttgagcaaaaccgtaagagtattgatgatgttttttctaatttaaacaaagaattaactgaagaaactgacggtctctttactattgttcgctatttacatagtactcgcgacatactagctttaggcagaagaattgcagaagaattagcgccgaagttatcagtagacacaaaaccacaaacaggaacactgaatatagttttaggtaatggtgataatgcatcggttgccttttgggaacaacattcagatggttatccctttaccattgaatttttaggcgagcgcacagattgctgggatcaggaagctttaattcatgagttaggtaaattagtatcttctgggcaattatggttgaaagtaaaagagctacaatctcaggctgcaaagaagcaagaacatgataataatactcaggataagtaa

SEQ ID NO: 285368 - DNA, 918 bp, Morganella morganii
ttggactttcatttcgcattctggaactgtgcaatgtcaccgcctggtagtactatcatgcgttcctcaacagatatgtctgatgcagtcagtgttattgcagacctgtttattgaacaaaaaatagccttcctggcattatgtgaagtaaacaaagactcgtttgactctattttaaatactcttcactctcaggggctatctcttacggcagaatttatggcagataaaactgctaccggtagtacttttgatattgcttatttttttgacccaaataaagcatacgttgaacatggcatggcacacaccggcagactgggttcatcccaagtgaaagttgcccagcaactgctgctgattgttccggaggaaccatcttctgttatcaatattcttgtatcacattggtcaagccagcttcttaaaatttcagacgacttccgcgatgagtgctcaaaaggtttgcggatttttacagacagccttattgctaaagatcaacatgttatattgatgggtgactataatgatgacccctattcccgcagtttatttaaaaatatgcacgcgactaacgatcgggcactggtaatttcccagcccgatttttggctttataaccctttttggaaaactctttcggcccggatgccatttacggctaatgaagcacaacatgattttggcacatgctacagtaaatcaggcaaccgcaataattggtctacttttgaccaaattattttttcgggacatttcctgatttcggggccttggtatctgaaagaatctgatacaggcgtcgttttgaccgaaaaactacgtgctgccataatggataacagacattgttttgatcatatgccggtgatcggatgcatcagtaaaagagaggctaatcatgtttcagtttaa

SEQ ID NO: 285369 - DNA, 612 bp, Morganella morganii
atgccttacgtgatttcagaccacgacgctgatttcaatatcaaactaaagatgccatctaaaaacattgctcataccaagcttttcctggaagaaggtgttgaggatttttctttgcctggttacccagtccctcatggctatcgctttgtgaaagcacttcagcgcgaccaatatcgtctcattgcgatgggagataacccagaaaccgtttaccttgtggcattgcgattccgtaatgatatcgtttacggcagaacgacctgcacccaaattaaagtctggcgtactgtttcttctttgcatggttctgtcgtcagtgatttgcccagaacattttttgcgaatttactcaaagaacacagtattgtcgtgacagatgaagaacaaaccagtgatggaaaacgcttctgggagacaatgatcgtctgggcatttcagtcaggttttcatgtatatatttctgatggcacactaatagacagaccactgacagaaattaataatatggatgatttttatcagcagtgggaaaaattctgctggggttccgaccgggatgtacatacacatcggcttgtcgttattagtaatgatgtgttagaagtgtga

SEQ ID NO: 285370 - DNA, 138 bp, Morganella morganii
atgacactgaccatgcttttccgtaccggctgctcggcactgttgtgcctgccgctgatggtctccggcggttcttacacttatatcgatgtgtatgtcgtcggtgaaattctcgcctctccctgtaagataaactag

SEQ ID NO: 285371 - DNA, 519 bp, Morganella morganii
atgccaactccatgctatatctccatcgaaggtaaaactcagggcaatatcactgccggtgcgtttaccgctgaatccgtcggcaacatctatgtgcagggtcatgaagatgagatgctggtgcagcagtttgaccatatcgtcaccgtgccgaccgacccgcaatccggccagccatccggccagcgtgcgcatcgtccgtttaaattcaccgtcgcactgaacaaggctgttccgctgctgtacaacgccctggctgccggtgaaatgctgccgaaagtgcagctgaaatggtaccgcacctcggttgaagggaagcaggagcatttcttcaccacctcgctggaagatgcgactatcgtcaatatcgactgcaaaatgccgcactgtcaggatccggccaaatcggactacacgcagttgatcgaagtgtcactctcttaccgtaaaatcgactgggaacatactgttgccggcacctccggtgctgacgactggcgtgcaccaatcgaagcgtaa

SEQ ID NO: 285372 - DNA, 2121 bp, Morganella morganii
atgtttgctgaatatcccaaaaagaaggcggcagatatcgccgcactgaaagattctcttgttcaacaggccgccccgcaggtgcagtcagcggcatcactgctctcaggctattcaccttccggactggtgtttacctgtaaaatcggccggttaccggagcagacctttcaggtcaccgaattctcgctcagtgaatccctttcttcgctgttttcactgaccatcagcgcggtcagcctgctgccgtcgatcacatttgaggatcatttaggcttcgccgcctcactgaccgtgacccgtgacggcgttaaaatccgtaccgtacagggactgctggcttctgccgaacagggcaataccgacggcaacaaaacctggtatcactttctgatccgccccgaaatgtggatcatgaccctcaaccaggacagccgtatctttcagaaacaatctgtgccggaggttctcgcaaccctgctggatgaagcacatgtcaaaaatgagctgaaattctaccaggacgaactgcatcagaaacggaattacatcacccagaagcgtgaatccgcttatgagttctggtgccgtctggccgcagaagaggggattaacttctggttcgaggaaggcccgaaactcttttacagcgacaatcaccttggtatgaccgccggaatagacctggcttataacccgcaggcggataccgatatcagcgacagcaccgcattttcctggcgctacgctgaacagttgtgcggcgatattcagatccacaaagattacaatccgcagaatccgtcctatccgctacaacaccagataacaggtgaagtacatcagcagcacagcacctttgaaagctacgggcgttttcagcaggatgtgccggggcaaccttttactcaactgcgctacgaacaatctcagaaccagcgtcagaccggcaccgcaggcaccaactgctttgcgctgatgccgggcaagatttttaccctgaaaaatcacccgtctgacagcatgaataaagcctggcaggtgattatggtgaaccatcacggtatccagccgctggcggataacagtggcggagaaggaaccaaattcagtaacaccgttcagtttatccccggtacgcaggaatggcggccaccgtaccgctataaaccgacagctgacggcgatgagctggctacggttgccgggccgccgggcgaggaaatctataccaattcagaaggcgctgtcacagtccggttccactgggacagacgcggcaggcctgatcacagcgcctcctgctggatccgtgtagctcacggctggaacggtgatggttttggttttatgtcaatcccgcgtatcggtcaggaagtgattgtgtcgtatcttaacggggatattgaccgtccgatcatcaccggctgcacgtataacggacgcaaccacccgccgctggagttaccgaaagaaaaaacccgcaccaccttccggaccaaaactcacaaaggggacggatttaatgagctgcggtttgaggatgaaggtgggcgtgaagaaatttatctgcatgctcagcgggataataatatttacattaaccacaataaaactcagcatgtcgggcatgacgagatgcataccgttgtcaatgaccgcaaacatgaagtttgtcatgacgaattcattcacattgtaaatgagcagacactgaaaatcggtgttaatcagttcgagcacattggcaaagatcgtatcacccgtattgataacagccggaaggaagtgattcatgccagtcacttccaggaagtgggcgaaaataagcagtgtgatgtacagaatgactacaaattaaccgctgcaggcggcattcatacacatacaaaggtgcatacactgcaggcgagcgaaaccgttattattaaaggaaaagcgggctccattcagctggacgcgcagggcgtcacaatcaccggtaatattacgctgaaagggaatgtatcaatcacggggggcgctcctgattctgttgctttattggatgctgccgttaatgaaggactgccgctggcggaagactgcagggccaaagccatgaagaaagaggtgtcctga

SEQ ID NO: 285373 - DNA, 282 bp, Morganella morganii
atgcgcacatacagaaaagcaaaacccatcacggccacaataaccggcactgtcacaaaaccgcctcagcgggtcaggacggcaaccggtaaggtaatggcaacaatgaccattcaggcagagagtgaacgccgcagcccctatccgctgaagctggtggcatttgatatgaacgcattggaactgatgacctgccagagagggagccggattattgtcactggtcggcatgaatggtttaacgggtatcagctcaccggggcgcagatagttacctgttag

SEQ ID NO: 285374 - DNA, 360 bp, Morganella morganii
ttgaaattaaaatttattgcgctgattttttcattgttaccactggtggccgctgccagagtcatgacgcaggtttgtggtacggacttcattcaaatatttttagcagaagatgactacgttacggaagtaagagtaaatgacgcccctaccaacattgccattattggtcataaagttaataaaaatggcaacgtagattcatatctggtttatgggtttaaagggaatagaaaagtatctcaactccaccattcaggggataccggaataacaacacatcggtattttttatttagtcaggacggctcaccggaacgtcccggcaaaccgatatcttcccctgtcgtttgtaaataa

SEQ ID NO: 285375 - DNA, 471 bp, Morganella morganii
gtgagcagagaagttctcaccttaaagaaaagtaacaaaacgataacaattcaggccgatatcagcacaccaaaaagcgcaccgggtaaaacgaagcaggaagccccacggcgaccgcagaagaaaaacaaggcagaggcttacgcgaagaagcggaaacgccgtacagaccggatagcgcagcactggccggtattcactttacagggagccagaccgctggcaatcggcatacgggaacagatgattgccgatgctgaggcgcgggggctggatattaccggcgggcaaataaaacagggattacacgcttacattaaccggaaggtgtatcttagaactctcatgacgggcggcaatcgctttgatatgaacggacagcctaacggtgaaattacaccagagcaggcagatgccgctgaacaaaagttgcagggatggcaacacactaataagcaggatgaattatga

SEQ ID NO: 285376 - DNA, 594 bp, Morganella morganii
atggaaaatttaaaaagtggctttaatgccaccagccaaactcaccctaaatttgagtcagacgatattttgaatatcaactcagatgatatttcatttatccggtttgaaggtgtgcaggtacgggttgttaaaatcaataatgaaccgtggtttatttttaaagatgtttgtgaggctctggatatatctaaacaccgcgatgctttctctcgattagataaagatgaaagggagtcggttaaagtggacacccttggcggaaagcagtctgtatccgcatgttcggagtccggattttataaaacgattgcccgcagccgtaaagcaaccacaagcggcactttcgcacatcgtttcgctaactgggtattccgtgacgttattccatccatccgcaaaaccggcacatatggtgtgccgttcggtgaactgaatgacctgacaaaacgtcagcagcagtacaaattaacctcatcacagcgcgggcgtgacctgcaatcatgcaagactgaaaaagccaacttgcagcgtgaggaagtcgaactgtggcggaaatatcagcctgattttctcgatgaggagatccactga

SEQ ID NO: 285377 - DNA, 180 bp, Morganella morganii
atgaaagtagcgattgaagtgggcggggcggttatttggttccgtgatcaagagaagagagaaggtatggcatgtacaggttacataaaggacggaacgcagcagaagatcatatccgcccttgaggatgccttaactcaggctaaagcagagctagggttaattcaagatattgattga

SEQ ID NO: 285378 - DNA, 237 bp, Morganella morganii; identical to SEQ ID NO: 279700

SEQ ID NO: 285379 - DNA, 2838 bp, Morganella morganii
atgaatagacctttattcagtaagaccccgacagtctcggtattcgacaaccgcggcctggtcgtgcgcaacatcgcgtatcatcgtcaccctgatgttcctgaggtgacaaatgagcgcatcacgcgccacgggtacgatgcccgcggcttcctgatgcagagcaccgacccccgcctgcacgataacgaactggtgaacttcagctacctgacgaatctggccggtggcgttctgcgtacgcagagtacggataacggaactatcgtcagcctgaatgactcagcagggagaccgtttatcgtcgtcagcaatatcagtaccgccggtgatggcacggaggacagaagctcggcagttacccgcacccggcagtatgataatgccggtcgtccggtgaaggtgaccgaacaggtcggtgatcagtccggccgcattacggagcgtttcgtctatgccggccatacggatgcagagaaggctctgaacctggcaggaacatgcatcagccactacgataccgccggactggtgcagacggacagcattgccctgaccggcgtgccactttccgtcacccgccggctgctgaagaatgcggacagcactgacaccgtggctgactggcagggagaagatgtatcagtctggaacgacctgccggacaatgaagcatatatcaccctgacgactgcggactccaccggatccgtgctgactaccaccgatgcacagggcaatatgcagcggatggcatacgacgtggcgggtctgctgtcgggcagttggctgacggtgaaaggggatacggagaaagttatcgtggcttccctgacgtattcagcagccgggcagaaactacgtgaaaaacacggcaacggcgtgataaccacgtacacgtacgaaccagagacacagcgcctgatcggcattaaaacggaacgtccggctggtcacgtacagggtgtgaaggtactgcaggatctgcgttacacctatgacgctgtgggcaatgtgctgaacatcactaatgatgctgaagagacccgcttctggcacaaccagaaagtggtgccggaaaacacgtacgtctacgacagcctgtaccagctggtcagtgccacggggcgtgagatggcaaacgccggtaagcagggctgtagtttaccgcccgccacagttcctcttcctgcagacaactccgcatatacgaactacacccgtacatacacatacgacaatgccggcaatctgacacagatacgccacaccccggcaacgggcagcggctacacaattaaaatcaccgtaagcgatcgcagcaaccgtggtgtgctgagcacactggcggaaaacccttccgatgttgacgcgctgtttacggcaggcgggcagcaggtgcagttgcagaagggacaggatctgttctggacaccgcgcaatgaactgctgaaagtgacgccggtgacgcgtgagggggagaccggtgaccgggaaagttaccgctacgacacgaacagccggcggcttttgaaaatcagtgtacagaagaccggtaacagcacgcagacgcagcgtgtgctgtatctgccgggtctggagttgcgtacaaccaaagccggcagtacggaaacggaaaaactgcaggtgattactgcgggtgaggcgggccgggcacaggtacggatgcttcactgggaaagtggcaggccggataaaatcaccggtgaccagataagatacagttacgataatctcattggcagcagcagcctggaactggacggtgccggcaatattatcagcatggaagagtactatccgtacggtggtacggcggtgaggacggcacgcaatacggtggaagcggactataagatcatccggtactcgggtaaggagcgtgatgcgacgggactgtattattacggttaccggtattatcagccatgggccggccggtggctgagtgcagatccggcgggtacagtggacgggctgaacctgttcaggatggttcagaataacccggttactttgtatgatgataatggtttagcgccgtcagacaatatttattcacgggtattaaaagccggtttttcaggtaatgaggaagagatgttcatgataatggccaggcctcaaagcctcaaaaaacagaggaaaatagccggacaaactgaaaatgaagcaaaaactcttatggaaggaaaagaccagaatacactgaagatcgtcagggattatacaacagacagcagccaggtaaataccggcatcaggtcgggggctggtttcagtaaagtaaaagattttgatgaagcccttaacctcttatctgatggtcagagaaggattacttacagggtaaccacatatcttgacggaaactcaccatgggattcaggtaacaacagccatatagcagaaggtgatattgtaaaggatacagcatatctttctacttctgcccacagaggctttttaacgtataaaaataagaaggaaaatgccggtacgaaatacgccaggtttgcaataatctctgattcgtctgtaaatgtttccggattatcgaagtataataatgaagctgagcgacaaatctttgaaatggagaacaaccttcccgggaaaagtgtattggagaaggtaaggtctaagataaaaggccctgagtcaggccaggctgagtatttaataccgaggggcatcaatttcaggattgataagataaaaaatgaaaataataacgcctacattttaatgactgaggtttctcatcccggaaaagtgataaaaaatatttacagcggagcacctgtaactcactaa

SEQ ID NO: 285380 - DNA, 336 bp, Morganella morganii
atgaggttgaaacttattattacattccttttatttatcagtataaattcacatgcaaatacagagcgtgctgatgaaaaaacaacaacatgtgatgtaaaaatagtaaaaatggcacgcggaaatagtcatagattaacattatattactatggaatacaagccgggaaatatattccattatatgagcacttatcttttcagcttcaaccatcagataaagcatatacttttgtaaaatttgcttatctgtataacagaaaattatgtgtcagatactggactgaaggtaatatcaattttatcgctaacttatatgatgatacatcaaattaa

SEQ ID NO: 285381 - DNA, 318 bp, Morganella morganii
atggccttaaaaaagctaaccaccgactggggtaaaatcagtaaagaatttaaaatattatacaaaacaccagggaaggcagaatattcatattcctacatgaatgattctatgacaaaaaaacctcatccatacaatatcagcaatgcccatacattatgtgattatgcattatatgtacctgacaagaaaagtaggcagactgattcagatgaagagcatcatgaactctatcatattaaaacactaggcaatgatatttatttttcattcgaccaattaatgaatatatactattcaataaactattctaattaa

SEQ ID NO: 285382 - DNA, 354 bp, Morganella morganii
atgtttaaatatatcttatccgttcctttgttatttttattattttcgtcatcgccggatgtacacgcaaaagaagaccctaaaataaaatgcagacttaatataaaaaaattcatacaatatgaaaacgaatataaaatgacattttatattaatgatgaaaaaaatggctataattatatgtttggtacagacttggcatttcatctcccgctgacaaataatgtatacaactacattaaaacagcctatatcctcgggaaggatttatgcatccaatactgggctgaaggtaataccaatagaataaccagaatgtttgatgattatatcattgatgaaatatctaattaa

SEQ ID NO: 285383 - DNA, 357 bp, Morganella morganii
atgaaaaaaattatttttatattatatatggtttcagtatccttcggggtcaatgctaaggtatttacagacaagtgtaattattatatttttgccacagctattgagcgtgcaaattattatcgttttcaattaaaagatataaataataatctgtatcccggcagttatatatggagtttttcagccagcaagccagagatcattgaaatactaaatatggctcatatttcccgcacccctgtctgtataagttacaaaacctatgctgattactgggagatatttgatgttgccatgcaggaaggtgaagctccggtttcgttgttcagacataaaaaaacctcaccgaagtga

SEQ ID NO: 285384 - DNA, 744 bp, Morganella morganii
atgattaaacttgagagaaatttcatacctgatttttttactcgcgaggatctccatttcctaactcagaaatttaaagatgaaggtactgaagtatggcatcatccagaagtaaaatccgcttgtttaaaattaagtggtggtaaatgtgctttttgtgaggtcaagcttgaagaagctagcacttatcatgaagttgaacatttcaaagataaaaaaactttccctgatgatgttattaattgggataatcttttgccctcatgccgtaattgtaacggttctaaaggtcgccacaatgtggtgcagaatccaattattaatccctgtaatgatttaccttcggagcatctttatatgcgtgcttatcgaattaaaggtaaaacagaactcggtataatgactgttaatgttttgaattttaataatactgatcataaattcattccaagatgtcgagcagctgatcttattgaaagccgtcttgatgaagctatggagaaattagattggtttattgaaaagcaagatgtaaggcgtggaaatacctttaagaatttagttgaggcgattttgggtgaatgccaaaagcaatctgcatttgctgcaacctcagcaacaactcttcatagctcagatacttataaacaattaaaggattctatgatggaacttaatatttggactgattacatgcaggaacttcatgacgcttcattgatgcttaaattaccagattgctga

SEQ ID NO: 285385 - DNA, 1182 bp, Morganella morganii
atgaaactaacagaattggtcattaatggcatcggaggaataaaattcctacaggtgaattttcagcctgacatgaatataatctgtggaccaaatggaatagggaaatctacaattttgcatgcaacgtcattacctttttttacagggcgatcactgaaaataaaaagaaacattgggttggaggtaggaagtattagcttaatggttcaagaaggcgatgctatattaaatcctgttataaatgtcaatgctcatttacctaatgaatatccagaaaactatactgactatagttttgataaaagaaaattaataaaatttgagacgatgcgtaattttgaatatcagcaaatagaagctttacgtgctgatggtgatttatctaatagtgatatttctcaacaattgaactcaggtgtaaatctatataatatcaaagaatggtttgccaagcggcatctgtttgaaaatgtaatagatggttacggtcctaatacaataaaaaatattcaccttgctattgactgtatatcaatactgaatccagaatatgttttcagcagagttaatcctaaaacttacgatatttttgtgaatacaccaactggagaaatttggtatgaatatctttcttctggatttaaatcttgtatgagtttgcttttaggaattatcaaagagattgaactacgttatcctcatgatgacttatatgcgaaagaatttgatggtgtaatacttattgatgaaatagaacttcatttacacccagagtggcagactaggattaccgaagtcttgacggctgttttcccattagtacagttcattattactactcatagcccacatgtagtacagaatgcaaaatcacatcaaattattgcactagtatctgatgaagaaaatgaggtaaggctcaaagaattacctgataatggttttggatactcagcctggacggtcgaggaggtgcttttagacgtaatgggtatggaaagtactctgagtagaaaattacaagagatgcttcatagatttcatcacttcattgattcagaaaactttattgaagcagaaaaaatatataactacttagatggcgcactgcaccagaacagtgtactccgtaaatcactcaaaataagtttaatgtctattcgggagcgagaagagtaa

SEQ ID NO: 285386 - DNA, 1134 bp, Morganella morganii
atggataaggtattttcatatggcgatcaggattttttccctgttggacagggggcattttatgcggaaaaacacgaagcatttaatatagtttatgactgcggaaatagatggaaaacaaagaaatctcaaaaggttgttagacaaaatttttcaaaaaatgaaagtatagaaatattgtttgtatcacattttgatttcgatcatatttcattaattggaacactcaaagatactgtgaaatcaattaagcatgtgattttaccattattgaataatgagcaaaaaatattaattggcaatattcataaagttgttggggttggcacttccgatataattaatcgcccatcggctttttttggtgacgaaacgaaaataacatatgttgagtcatcagagaatagcgatattaatattgataatgcactagtgttagatggtaacataccagagaatatagatagcggaacaccaattaaaattaaaaacaatggtgataattataactggtgtttcattccatttaattttgaaagcaaaacgaggagtgcgttactggagtctgaacttaacaaagctggctttgatgtcgatgagttaaaaacaaacccctcgtatgccttgcataatattattaataaaaaagaaaagaacaccattaaaaaaatatatgaatgtcttggtggtgatataaatgaaaattcattggttgtttattccggtcctttttgtattggaagtaaacacaagcctaagcactccatcttgcataatgagatattattcagccatcatatgaatcacgggtataggtttgaatttccatgtgacagagtggcttgtgttttcactggtgacgttgatttaaataaatttgatataacgaaagtatttggaccctattgggaaaaggtgggaacagttcagattcctcatcatggctctttttatagctttgatgagggttttttaaaatcaaaagttatgttctgccctatttcattcggtgtcagtaataattatgggcacccgtcatatgatgtggttggtaaaataacaaagagtggatcttatgttataaatattactgaaaacatggattctgggtatatacaatatattgatatataa

SEQ ID NO: 285387 - DNA, 2622 bp, Morganella morganii
atgagcagaaacctccgtttacaggtcgtgttaaatgccgtcgataaattaacccggccgttccgcagtgcgcaggaatccaacaaacgactggcgggcgctgtccgccagtcccgcgatgcactgaaagacctgaaccgtcaggccggacaaattgacggcttccgtaaaacaaagcagcaactcaccgaaacacagcatgcttatcaggcggcaacacaacgcgccgccgccctcgcccgcgaaatgaacgcttccggcaatccgacccggcaacagacagaagcactcaagcgcgcgcagcgtgaagccggtcaactgaaaaaccggtttgaacaactccagcgatccacccagcaacagcgcacggccttacaggctaacggcatctcgacaacccaactcggacaggcacagcgccgcctgaacagcgacattgcccgcaccactcagcaactgcaacggcagcagcagcagctgcgccgcagcgccgaacaagagcgccggatggcagcggccaaaggcagctatcagaaaacgatggatgtccggaataaaatggctggtaccggcgcggcagcgatggcgaccggcggtgcggcgttatatgccgggaagaaatttatggcgccgggctatgagtttgaggtcgggatgtcaaaggtgcaggcgctgacccggcttgataagaactcagaagagtataaagcactgcgcgaacaggcgcggcagctgggggcgaccacggcatttacggcaaacgaagttgcgcaggggcaatcgttctatgctatggccggatttaaaccggagcagatacagaacgccatgaaaggcaccctgtcgatgtcccttgccggtgatatcgacctcgccaccacagccgatatcggatccaatatcctgaccgggttcaaactgaactctgacgaaatgaaccgcgtcagtgatacgctcgttgccacctttacccggtcaaacaccaacctgaatatgctgggcgacacgatgaaatatgtcgcgccggtcgcgtccggtctgggtgttgatctggaaaccgccgctgttgccgccggtaaactgggcgatgccggtatacagggcagtatggccggtaccagtctgcgatctattcttggtcgcctcgctgagccgccaaaacaggctgctgacgcactggaagaactgaacatcaagacccgtgatgccaggggcaacttacgcggcctgccggaaatccttgctgatctggataaaaagacaaagaaaatgggtaccgcgcagcgcgccgggtacttcaaacacatcgccggagaagaagcattttccgccctgtcagtgctgacagaacaggccggtaaaggcgagctgcaaaaaatgattgccgaagtcaaagcggccaaaggtgaagcgcaaaaagtggccgacaccatgaccgataaccttgacggtgatctgaaaaacctcacatccgcatgggaagatgtcggcatccagatattcggcggtgttgacagcccgctgcgggatatcgcgaaatctatcaccgatattatcagtaaggtaggcgcctggacgaaacgaaacccggagctgaccaaaacactgacaaaaattgcgctggcgctgggcgtgatccttgccgccggtggcgccattgttctgatgctggccgcgatgctcggcccagtggcaatgctgaaactcagtatgtctgttctcggcatcaagggtgccggtgcttttggcctgctggcgaaaggcataaaatttgtcggcatagctttctttacagcaggtaaagcgctgctgaccaacccgatatttttgacgattgccgctatcgccggtgccgcttacctgatctggaaaaactgggactggctgagtcagaaattcggagcgatatggaacaaaatatcggcagttgtttcgcaggcgtgggacagcatgctggcttatatccgggaaaaatggggcagcactgtcacttggtttaaaggcctgccggagacgctgaaaacaacggcatcagagatgattgataaaatcataggcggcatcaatgaaaaatgggaagacctgaaaaataagtttgctgaaataaagcaaatggcaaaagacgccctcactccggactggttaatcgaagccaaaaaagacccgaaatttgtcaacgccgtggatgccacaaagcagacaaccatgtctggcggcatccgcaatgctcactggacgatcccgccgaaaaaatacgccggagcctatgattccggcggacatattccgcgcggccagtgggggatagccggggagaacggtgcggaaattgttgaaggcccggcaaatgtgaccagccggaaaaatacggcagcactggcaatgctggcactgagcaccctttcacagccgatagcgtcggcaccggcacaaaccgccggcggctctgtcagcagttcgtattcatcacagcagaacgccgcgccagtcatcaacatctacccgacgccggcgcattccgcacaggatatcgcccgcgaggttgcccgccagctggatgcgcacgccagaaagcagcaggccagccgccgcagcgggtacagtgacacagaggagttttaa

SEQ ID NO: 285388 - DNA, 1209 bp, Morganella morganii
atgtatgtgaggattcttattaatgaaaataatagtaaatttatatacataccattaaatagatatataaatcaacttaatgtaaatttagagggggggttaaaaagtcacgactcattaattaaaataattctaatttcaaaaaatatagagccaactagtgagaatgtcttagatataaaaatgtatttcaataaagaaaaaaagatgaaattgatacttgatggcttagatgaagcatatgctaaatacccaggaattattcaagctattaatggtttcaaaactacttatccacaaatacaaatgctaatttcaagtagagattgcgtcagttatttatctgaaattaattttttgggaatcactttgttacctttcaatgaatctcagttatacaaatttatacgatcatggtttgagacaacaaaaccagaattaggagaggagctcatcaatagtatacaaggaaaggaagtggctgatatcgtaaaaacacctttattggcaactctgctctgtgatttagctgagaaaggagttgatattccatcaagtgagagtgaaattttcacaaagagactagagctattttgtggtctatatgatacatataaagatataaaaagaacagagttgtcacaaagcatattgcacaaagctgcaattaaaattgcgtatttacttcatgaaagaaaccgccgttcggctacgaagtcagaaatgatacagtaccttattaacgatactagttttaattatgaagacgatacatgtactaaagtagtaagtgaacttattgacccatgcaatattattgtattcgatgctattgctgagacgtattcattcgggcatctgagatatcaggaacatcttgcatcaattgagttacaaaacaaccggtctatcgagatagttcactaccttaagaatgactggtggagaggtgttttgtgtctttatgctcagtgctgtgattttcaatcattaattgaagagtttacacataaatataataatattggtccagcattgattaccctaagggaaatggttaaatataggccaataaaagaaagaaaaaatatattaaatttacttgacaaatatgaaagtgcagatagtacgcactactctattgatgattataattataatgatcgttattataatgacccgcatgaatttaattttttgggttattga

SEQ ID NO: 285389 - DNA, 1854 bp, Morganella morganii
atggagccaactgacggcaacctgctgcacgcaggtattgtgtttctcgcagcagccgtggtgatggtaccggtggcgcagcggctgcgtatcggtgcggtactggggtatctgctggcggggattgccatcggcccgtgggggctgggatttatcaaaaacgtcaatgagctgctgcacttctctgaacttggcgtggtgttcctgatgtttcttatcgggctggagctgaatccgcgtgagctgtggaaactgcggcgatctattttcggtaccggtaccgcacaggtggtgttctccgccctgatcctcggggtattgctctggctgacggatttctcctggcaggcggcggtggtcggcgggctggggatggcgatgtcctccacggcgatggcgttacagctgatggatgaaaagggcatgaccaacaacgacagcggtcagatgggattctcagtgctgctgttccaggatatggcagtgatccctatccttgcggttattcctctgctgggcggggaaacggcgggcagtgactggtatcgcattggtatcaagattctggcctttgccggactgctgatcggcgggcgttatctgttacggccattgttccggctggtggtaaaatccggggtcagtgaagtcttcactgccgcctcgctgctggtggtgatcggttcggcggtgtttatggagcagctcgggttttccatggcgctcggaacatttatcgcgggtgtgatgctggcggatacagaataccgtcatgagctggagatcactatcgagccgttcaaagggctgctgctggggatgttcttcatttccgtcggtatgtcactgaacatcggcgtgctgtggcagtatctgccgcaaattctgctgggtgtgattgtgctggtgagtgtcaaaatgacggtgctgtatctgctggcacatctgacctgccgccgcagcgggcgcttacagtttgccggggtgctcagtcagggcggggaatttgcgttcgtgctgttctcggcggcgctggccagccgtgtgattacggatcatcagatggcgctgctgctggtggtggtcaccctttccatgatgaccacgccgctgctgatgcagggcatcgatatgattctggcgcgccgttacaataatgccgaaccgggaacgggcgaaaccccgtttgtggaggataaccacccgcatgtgattctggtcggtttcgggcggatggggcaggtcatcggccgcctgctgatggcgaacaaaatacatccgacggtactggaaaaagatgtcagcgcggtcagtgccatgcgccgttacggctataaggtttattacggggatgcgacaggactcgcattgttgcgctctgccggggcagagacggcaaaggtgattgtcattacctgtgataagccggaagataccatgaccattgtgcagttgtgtcaggagcacttcccgcatctgcagattattgcccgcgcgcggggacgggtggaggcacacgagctgcttacacacggcgtaacacagttcagccgcgaaaccttctcgtcggcgctggaactggcgcgcaaaacgctgatcgggctgggcacgcatccggcggaagcacaccgggcgcagcaattattccgcaggctggatatgcagttgctgcgtgagcttatcccgcaggcggaagaggaaatctcgcatatctcccgcgtgaaagaggcgcggcgcgagctggaaaatctgtttgataatgaaatgaaacgggaaaaacatctgccggacagctggaacctgacagaagactcaccgggcagcggacggacagaaacaggagcagaaaaatga

SEQ ID NO: 285390 - DNA, 1488 bp, Morganella morganii
ttgcttctgcatataagaaatataatatcaaacaataagttagttactttttgctttatttacataattgtaactatagttggatatattgcggctcctgtgtacattatattttccgtaatatcatcaagcgaaattatatttaactatttctttaatgagaggatatccatagggcttattggctctgtaatggaatcaaatagtagtgaatcagcaagcatgattagcgagtacgcaaaatacataccaagttatatagccaacataattgtttattcaactccagcttttatgatcaaaagaaatattcgaattggagccatattgtttcttccttctttttttgttttcaacagtatatataagaaaataaataaaatacccaataactacaagaatgaagtttattttttcaaaagtaatgtagccaccccactacataaaacatatccatttttcattggagatgcggtgtatatagcatcaatgataatagaggataatgccatatatgtaaaaaaagaccataaatttccaattgggaaagttaatgaaaaaacaagagatataaaagaggatgttatagttttcattatgggggaaacatctcttagtgatagatactctctatatggatataaaataaaaaccactccattcatggatagactcaaggagatggatattatctcttgttactttaataacgttcattcatctgcaaacctaacaaggtattctgtgccaatgagcttcagcttcgatgtgccagagaagcaagactatatatttaatgaaatgaatattatagaactggcaaatagagctggattaagaacacattggattacagcgcaaagtaatcgtgacggtcttaatacaaaaataaatttcatagcaagttatgccagtgagatagtgacgccagataatttaaaaaatgatgaaaaaataaatatggatattgatctaattccatatttaaaggatgcaatagataaagaaggaaagcacttcattgtattacatatgaatggttcacatcagaaatattcaaataaatatgatgaaattgacagcaagtcattgcctagtgccagcgactatgataggagcattcaccatactgatagagtggtaaatgctgtatttgaatcccttgagtcgtcaggtaaaaaatactcagtattatttacatcagatcatggtgaggttgttggtaaaggtcatggctatgttagtgatggaggaaggcaactatttgtcccactagtttacttttcaaactcatctgataaatgctcaaatatagaaaaattacgtggaaacaacgggtggataagcggattaagtaataaattcatggtgttagacatgattggatacgatataaaccctgattttattgactcggaaatacacaatgacaggatattcagatccaatgctgaggtggctgactttcttgatgaattgaagtcatag

SEQ ID NO: 285391 - DNA, 510 bp, Morganella morganii
atgagctataaaaataaaacatatgtagcttttgccagtgaggacatcagccattatagattaatggaagcatggagagaaaacgaaaatatagattttaatttttatgatgcccatgatctatttatatccagagacacaagcaaaccagaaactataaagaaaaaccttcgtgagagaatgaaaaatgctaaacaagtcgttttattgataagtaaagatgcaaaaagaaagggggatgatggtgtttctttcttatcacatgaaatagatctaattatagaatttgatttaccagtagtcatcgttaatttggatgggcgaagggatgtaaatacctccttagaattaaaggcattgaaaaaaaatgaccattatacaatgtccacttcattccaaccggctataataaaatacgcgctagacaattattgcccagaatataaagatagctcatgcaccggttcttattactacaaggaacatgtttataaaaatcttgggatatag

SEQ ID NO: 285392 - DNA, 231 bp, Morganella morganii
atgcaatttttcacctctcaaaaaattattatgatttctgcaaaatcctgcgaccgatgccattttcacgttgaaaaagacagccctgaatttaatgaatttctgtcaattgaccagcgagctgggtttagctctatcttcggtgacggaagccacttgaagctagatttatgtcagcactgcgtgaaaatactgttgaatccatggttatcagtcagtgagccagattag

SEQ ID NO: 285393 - DNA, 699 bp, Morganella morganii
atgtctgaactaatagcatataaatccaatgcgttgattgaagctagttacaaactaactttacaggaacagcgcttgctattgatgtgtattggaaagctaaaccctctggataaaactcctcaaaaaacattcaaaattacatctggcgatttttatctagcatttcctgatatgggaaaaagtaatgcagaacgacatttaaaagaagctatagataagctcgctgaacgttggatatatatacaaaacaataatgaaagacgacgtattcgctggatccaagaagaagctgagtattttgagggtgagggaaaaatagaaattgtttttgctgactccataatgccctacttaactcagcttcaaggtcaatttactaaaatcgtgatcaaaaatgtatcaacactaaaaagtgtctatagcattcgtttatatgagttattaatgcaatttaaagtgattggcgatcgattgatcagcattgatgattttcgctcgatgctaggtttggacgaaaaaaaatacgccaccttcaagtcactgaatcaatgggtaataaaaccagcaataaaagagttaaaccaaaaaagcaatctatcagtaacagttgatacagtaaaaaaaggcaggagtgtttttgcgctacactttcacttcaaagaagatcaacaaataaaaatgatgttagaggattga

SEQ ID NO: 285394 - DNA, 438 bp, Morganella morganii
atggctttggtatcaatcagtgaagcggcaaggctgacaggaaaagcaagaagcacactacacaagtacataaaacaaggaaaactgtctacgactacagatcaaaatacagggaataaaagcattgaaacatctgagttaattagagtatttggtaaaataagtaatctctcaactacagacagtgacagcgtcacacgtgtatcaaaactacagcaagaaacacccagcactacacaatcactacagattaaacttcaacttcttgaacaagaaaatgcacacttaaaagctgaaaaagagttactttcaaaaaatttagatgatatacgtcaggctatgttattaatcgaatccaagctgccgacaacacctgaacccgtcgcacctgcactacctgtaccaaccaaaaaaccgtggcaattctggaaaaaatag

SEQ ID NO: 285395 - DNA, 129 bp, Morganella morganii
atgggtcttaaaccgggtccgaaacccatcgcaaaatcgacaggaaaaccagatcaacgtcgacgcgacaataaagatactccggggaatactcctgagttaaagccgagtaaatccacaggtaagtga

SEQ ID NO: 285396 - DNA, 225 bp, Morganella morganii
atgttagctattcgtttatctgatgacattgaaacacgtctggagtcactcgcaaaacagacaggaagaaccaaaacattctatgcgagagaagctatcctcactcatttggaagatttggaagactactacctgtccgctgaaaccgttgcaaaaattcgtcgtggtgaagaacacgttcattcgtctgatgacgtgaggaaagcacttggtctggacgattaa

SEQ ID NO: 285397 - DNA, 267 bp, Morganella morganii
ttggtctggacgattaattattctgaacgggcgttaaaatctctgcgaaaaatggacaaacagaatgcccgtcgtattgtcgattttatggatttacgcattgcagctttagatgaccctcgacagtcaggaaaacctctcaaaggtgagctgggtgagttctggcgttatagagttggtgactatcggatactatgcgagataagggatgatgagcttattattcttgctgctactataggacaccgtaaagaagtttatgattag

SEQ ID NO: 285398 - DNA, 207 bp, Morganella morganii
atggagcgctttttcaggagcctgaaaaacgagtgggtgccggtgaccagctacaccagcttcagtgaagctgctcatgcaataacggattatatcgtcgggtattacagcgaactcagaccgcacgaatataacggaggattaccaccaaacgaatcggaaaaccgataccgaaaaaactctaaaaccgtggccagttttagttga

SEQ ID NO: 285399 - DNA, 480 bp, Morganella morganii
ttgctgtccggcaccggccatctcgcgcccggtggcgctgaccagctgatacagcgtgtcataggtgtatttattttccggcaccactttctgattatgccagaagcgcgtctcctctgcgctattggtgacgcacagcacattgccgaccggatcatattcatagcgcagatcctgaaatatttttttccgtgccggatgttcggttttgacagcaatcaggcgctgggtttgcggttcatacgtgtaagtggtcactacgccgttaccgtgctcctcacgaagtttctgtccggcagcggaatacgttacagatttgatgatgattttttccgccccgcctttcaccgtcacccggctggtgctcagcaatccggcaatatcataagtgactttttgctgatgaccctccgcatccgtggtattcagtaccgcaccggtcgcatctgccgtagtctgtgtggtgtattttccgtctga

SEQ ID NO: 285400 - DNA, 423 bp, Morganella morganii
atgaatttgttcaatcgttttaaacgtgaggcatcaaataatactgacatatcaaacttcacatcagagtgggatgaaggaaaaaatatacatacgggaaaatttgagtttaatgacaaaaaatttagattcatacttaacgaagggaataaaatatcagcgctctcaatctcactgttagctaagatttctaggccagaggggcaggatgaattatctctgcataaaatagccaattcaataaatgacttgatgatatcagttaagtttgtgatagataacattgatgatgacaacatctatctatcagtaagaacagaattggtgtccattgaaatcaaagacttatcaccagtatttttcatgttaaaaatattagcaactgctccagcattctttttcaatctccctaaagaggattag

SEQ ID NO: 285401 - DNA, 528 bp, Morganella morganii
atgaaaggtttgattggtacagtgctatctgccatgttcctattcttttctagtaacgtaccagattggattggatattttataattacatttgggttgaatgataagatatttaattcattcggttttcatgtttgtgtctatgcgattttatctttcattgggtactgggcgttatttagatttatattcgaatcaaactgtaaatcattgcttttggttgaaaaacaaaaaaatttaagccttaaaagaaagaataaaaccgaaaaaaaagagctagaaaaaaaacacaaatcaactttaaacagtgagcattcaaagtcaaaagacgccatccgaaaacttactgagaaaattaaaaatttagagtcattgatagccaaaaaagatactgtaataaaatcagtaacaacaaactatttgatagcgttagaaaattcatctgaggccaaaaagcagggagatgttgattataacaactatgccaatacacatacagattcatccataacagatatctatagctga

SEQ ID NO: 285402 - DNA, 399 bp, Morganella morganii
ttggaaaaaacgacaaatgaaaaaactattgaaaatatcctgcttgattcaaattcatttgatttgaattttgtcatgaaattcaaatcaaatatctcccaggcatcaccaagaataaaatgggatatgaatcttccgccaagaaatataaatactgtgcagttaaatataaacatggcggatgttagcttttctttttctgtgataaatatgtatgttattgacgcaatcaaaaaaagaaaaacagatgagtacatactattgtttactgagaaaaataacagtacggtattaaccatgaaaaacacagacatggcaattaatgctatgaatgtaagcattgtttttgtttttattttgttaaaacacatactcagcaaactaccatatataaaatga

SEQ ID NO: 285403 - DNA, 1041 bp, Morganella morganii
atgactgacacgacaaatatcggcactgtacagaaaagccgcatcccactgtttgataacgttaagttattccttatcatccttgttgtactgggccatgctgcagattactacacctcgcaatacaaagaggtgagatggtttttcctgtacgtatactcattccacatgccggcatttatcttcgtgtccggttttttttctaagaagctgctgacgaacaagcctttccctacagagaaagttttctctctgctgattttgtatgttttactgcaactatccatttatggcttgctctggtttaacggcggtagcccgaaattgtcgctgttcgttgtcggcggtgttccatggtttcttctggcgctcccgatatggatggtgcttcttcacatcctcatgcctgtcaaattttcatttctgtttcccgcaacgattgttgccggtgtcttggttgggttcgacccaaaagtaagtcagttcctggctacgtcaagagtaattgtattcttcccgttctttttgctcggcgcatattttcggattgagcatgttgagatgttgaggagaagatgggtttcggtgctcagcgtcgtatttatagctgctagcatagttttgtcatggatgtacatagacgaactgtacaagctaaggtatatatttactggtcagaacccatacagcgtaacagtattctcaaaatcagtactgtggtcgataggcgcgagggtgtttaactacatcaccgcattattatttatagcggcacttattgcggtcatcacgaacaaatcacattcattcaccaagctaggagagaggacgttgcaggtatattttctgcacaggctggtgttgtatgaatattttcacctgaagattaatgatcacctcaaagtgttggctccggattactggtgggcactgtacatcattatctttatcatagtctcatttgcactgtctgcatcggtgataagcaagccatttgattacatatacgggctaaaatacaaaattatcatgaagcagtaa

SEQ ID NO: 285404 - DNA, 612 bp, Morganella morganii
atggaacaaccttgggagcttaatcctgctttaacagcagaacgtctaaagcagttagcatcattaatccgagatgttagagatgatgttgtcgatctgcacaatgatgacctcggtgatacttctcgctcgacaggtctcagagcttatgaatgttgtcgagtaagaattattagggcagcggcacagcaacaagagtggccgtggcttggtataattaaagttgatggtaaatttaccttttctattggatcggtgccagtacgtttgtatagaggtaggcctagttgtcctgaggaacgtagacttattccttgtgtcgaagcgttaagtcagatgagcttattaccgacagaaataggtgacgctgcatcaataatctggctgtttgccgttgaagttgatgaatttcgttatgttgaacgagtaagcattacaggcttcttagatggatcacaggtttctagttgggagattcctttagatgaaagagtacctgcacttggttctattgatgccaaattacctgaatctattaagacacctaaagcgcctatttcggttaaaaggaaagacaaaaaagctgaaaatgatgattcaaataatggttag

SEQ ID NO: 285405 - DNA, 1500 bp, Morganella morganii
atgacagcatatatcaccaaagataacattcttgtcacagaagctacagtagaagcctataaagcgattgttctgagcgttccctttgataatacggtcgatcaacgtcataaacctcaatattacggtgaaattagcttgttcttacagcatattatctgtagtgcgacggttagcaaaaatacgaagaaaaaagcgaggtttaaaggagataaagactggacgtattcagtaccatttcctgctgaattgggaaaagagaaatttcctatgatttttaagcaaagtcgcgatttaggcttagaacgcggtttagagtgtttggaacaagctaaaatcattaaaattatccaacatagctatggaacccataagtgccgagaatttgctttatctaaaagtgtccttaaagctttatttcccggtaaacgaaaggattatcttaaacgtacagatcgctatacctatttgacgaatatttttgataagcgtaagaaacccgaaacactgtatgaattgatgttaaaaagctcttataatgtaaagcctcctaagcataaaacatcgaaacgagccatcgaaaatgccaattttagacagcgcgttatcggtgtgtatcaacaactcgaagcattaccgatcaaccttgatagactacaagaatattgtaatgaccatcctactgcaaagaataagagcttttattttaattttatctctcatttgatggaggtaggtgtcaagataattagcaaaacgccattgattattgaatatcgacaagcgtataaaaccgccaaagtgggtagccgttcttttgaggtaggtacaggttttcaatatttaccgagcaagatgaaatgggcatgtttagctaacgggtacaattatgatattaaaggctgccagttagctatcttagagcaagaattcaagaaatatggaattagcactgattcgctatctgtactagaaaccgattttatcaaagatacgctaggggtcgatgataatctcgttaaaactatccgctacggtactatatttaatgctggctctgttagtttgtcagcgaagggaagtatggtgaaaaagctacgaaagctctattccgacgattatgtatcagaaatactggaacattggaaattagaaacagcagagctatgggaaagcataaatcaactcattgacgagtatctaaaaataggaaagaaaaataagcatgggctttctgtcgtgaatgcggctgggcagccattcaataccacaaagcgaaaaacaaagaacgaggagtggaaggcgtggcgtcgtgatgttatgcgacgtaagctactcgcgcatatgatacaagggctagaaagccgtgcagtctatgattatgtgagctcgcacagcgatgtttgtgcgctagaacacgatggatttgtgagcttacatgagcttgatagtgattggaaacacgagtatttgaagatagtgttgaagcatgatgattag

SEQ ID NO: 285406 - DNA, 516 bp, Morganella morganii
atgcgtccttctgagatagaagcgaaacaatgtgaacttttatttaatcttaacggtgaaatgatacatatcgcaagggaatatgaaagtttacatcaatttgtactacgagggatttcaagagactttgagagtactgaaacgcagattgtatatgtatttgatgaatggcaggctaaatatcttactgataatattgaatatatagatctcggcattgacgataatgaactgaagcagagaggcaggcctcaaggctcaatgaacaaggaaaagcgttttactcttgatgataagaaagcaaagcgtttccgccgctggaaagccagtaatccgaggcttgaattagatgcattcaaggcgtttcttgcaagttcaaccaacgcagatctatgtactaaagaaaaagaggccatgtgggaaaaatacgaaaatgaagtacgaaaacaagtaagcaatggagtccagaacaccaccataaaagtgggtaaatgtcccaaaaataataccttataa

SEQ ID NO: 285407 - DNA, 558 bp, Morganella morganii
atgcacttcaccggtcacctgatgttgcagcgggtaggacggtctctgcgggttataatctttgtggatctgaatgtcaccgcacaactgttcagcataacgccaggagaacgcggtactgtccgtaatatccgtatcggcctgcgggttgtaggtcagatgaataccagcggtcatgccgagatggttatcgctgtaaaacagtgtcgggccgtcctcaaaccagaaattaattccttcctcaaaggccaggcgacaccagaattcatacgcggattcccgcttctgagtaatgaattcccgcttttgatgcagttcatcctgatagaatttcaggtcatttttgacatgcgcttctttcagcagaatggccagaatctccggaaccgattgttgccggaaaatgcggctgtcctgattcagcgtcatgatccacatttcaggacggattatgaagtgataccaggtcttattaccgtcagtattaccctgttcagcggaggccagcaggccctgcacagtacggatgcgggtgccgttacgggtcactgtcagtga

SEQ ID NO: 285408 - DNA, 435 bp, Morganella morganii
atgtccgtaggttctaagcgaaatcaactttgctggtgtggttctggtaaaaaatacaaaaaatgtcatttaaatagagaaagtcatcctgaattagggtttggtgaattaattggcatgactaataaactaaataaagaaaaattatgttctgttcctgaagaactgaaagactcatgtacatctaggattattaaagcacatacagtatcaaagagtggctcattaatggatatagccaaagatagtcatgtgttgggattaaaggtttcattagaaaaaattcaacgcaatagaggacgacttactttagaaaaagtcggtataaataatgcgtctacatttactggattctgttcattccacgacaaagaaatattttcacctattgagaatgaagaatttatagctagtaaaaaaattgttttttattag

SEQ ID NO: 285409 - DNA, 408 bp, Morganella morganii
ttgcctatcgcacaagtatttagccaattgttattacatgaactggataattcagtgattaactcagcgattgatttaaccactgttagggcggttaccttaaattttcgagacccattgtatagtgctgaaacaggcggtttccatcctgtcgaaatacgcttgttacggctgcatgagcaatggcagtttgattatgtgacagatttttcatacatggggaactattatcctgagcttgaaaaggaactcgatatttgttggtcgcaaggttatgtttatcattttatgatgggggatattgatgaagaagagggcggagcaatgtttgaactgtggcaacgtaattttattcaataccacaaaatgaaatgttatgaagtcagtattcagtgggaaacccactaa

SEQ ID NO: 285410 - DNA, 198 bp, Morganella morganii
atgcaacacgaacactttttaacgattaagcaagttttagaaatcactcaggtttcgcgcgcgaccttataccgttggattaaggcgggggattttcctgcgcaatattcattgactgcatctggtcgctcggttcgttggaaagcgagcgaaatagttcaatggtgtgaaaaatgcgtaaaaaaggaggggcaataa

SEQ ID NO: 285411 - DNA, 447 bp, Morganella morganii
atgagttttgtaatcaatgccgctgtccgcatccgccaccagtacggccgtgccgccgaacggataatattcttcctgactcagcagcttaccgtcaccatctgtttccaggccgctgctgccgatcagattgtcataactgaaccgctggtgatctttcttaccgtcctgccagtgcagcaaccgcacctgtgcccgcccggcaacaccggcacagatcacctgatagttttcttttccgcggtacagctccagtcccggcagatagatgacctgctgtgtctgtgtgctgttgccggttttctgtacggcggttttcaggatacgctggctgcccgcatcataacggtaactttcgcggtcaccggcggcaccgttacgcaccaccggcgtaacctgttgcagttcgccgcgcgttgtccaggacagagtttgtcccggctgtaa

SEQ ID NO: 285412 - DNA, 1554 bp, Morganella morganii
atggatatagaaagcaaattagttgacatctttcgcagtcgttcggctggaccatttctttttttgggttctggattctctagaaggtatttggggctagaggattggaaaggactcctcagtaaattctgtgtagctggtaagccattcgagtactacttatcatcggctaatggcagttacccaaaggttgccgcattacttgctaaagacttcaatgaatattggtggtctgctactgagtattcgcaaagtgtagagcgatataagtcaaaaattaaagatgaaacctcagcattacgaatcgaaatatgcaactatctttctactctagatcaatctaaagcgaaagaatcagactatgctgacgaagtaaaactactagctaatttgaacgttgatggtgtgattacaacaaactgggatatgtttattgaacagcttttccctgaatacaaaacctatatagggcaagaagagctgctattttctaatccgcaagaaatcggtgaaatatacaaaatccatggttgctcaacgagttcaaattctttgattttgacagattccgattatgaatcttttaatcagaaaaatacctatttggctgctaagttaattacattatttgttgagcatccagtggtatttattggttactcgatttcagatgagaatataagtagtttgctcaaggcaatatctggctgcatcggtcgagataatatagagcagctcagaaagaatctaatatttattcagaggcttgctgactgtgaagacccgaacgtatccgatacctatttgacgattgatggaattcaaattccgcttgtattagtcaaaacaaatgattttcttcccgtttataaagcgatccattctacaaaacgaaaaataccagcgagagttcttaggtattgtaaggaacaattatacgaattggtgcagtcttctgagccagagaaaaaaatatgcgtggttgatattgatgaaatagaaacaaaagatgatgttgaatttctagttggtgttggggttgctcagcaagagtttgtagggccctctcctattggctacgagagtgttagtactaatgatctttttgaagatttgctacacgaagaaaaaggatacgattgcgagaaggttttaaagcatgtggcgccccgggcttgcaagtcaacacctaatgttccggtatttatgtatttgcataagtttggcattaacagtgaacagggttacagagattcaggatttaagttagataaggttgttttcagagatctgagaaaattaagaatgaattcatatgctaaaccgttttttcgtaactatcggcatatggatatgagacagattctcgaagcttgcacacctgagaatgctgctgcctacatcccatttcttagtattgataaaattgatgttgagttgttgcaccaatttttgattgataatgaagaaaaattcgaatatgacgtttcgagctatgcaagtagttttagaaagctagctgcactttacgataggttgagatggggatggtga

SEQ ID NO: 285413 - DNA, 1044 bp, Morganella morganii
atgcaagctgagatgagcatgtattctacaccgcaatattcaggaaaaccgacactatacttagatcaaaacatactcgatctcttcgttaaaaatggcgtgggtagttttgggcgagagcttatggacaagttccagattgtttattctgatgaaactctcaaagagataagacgatcttctggctatgaacgcgactttcttaatgttctaaaagaccttgattcctatcatttaaaaatcaatttcgagcagcctggcttcattgtaactgacaaagcgaccatcactagcagggacgtatttgaagcattcgaagaacactgtagcaacgataatgaatatggaagtattgaaaattcaatgtaccagtggttgttcaagttctctggcggaagatctggtgatagcatttctgctattcatgaggagcagttgggtgctttttcacagcttatggggggcatactcaaaaacgctgatgaactttctgtcgaaatgagggcgcagattaaagaatattccgagctaatgatggaacaatataaatctacgcttcatgagtttgaaaatacgatgtcaaaggacattcctgatacgaaggagtggaatggaataaagtcctacagagagtcagtgggtataggcccaatggaattaaataacatagagccaccgaatgtgatcgaaaaaatatggggtgctttcaaagttaggcttcccaaaaacaaccacatcaacagcttagaagactttttccagatccgcataaacccgatctaccctaacagaccctaccatctacaccagaaggtgatcggtatgtataacatgcttaatactcttggctacttccccgactccaagttacataaggaaagacgatttattgccgctatgagtgataattgccatgcatcaatggcctcattttgcaatttgttattgtcaagagatgagaactttgtaaaaaaggtacgggcgatttatgagtatcttggagcacaaacagaagtaaggctggttacggtaagcaatgcataa

SEQ ID NO: 285414 - DNA, 1371 bp, Morganella morganii
atgccgaatccacttatggatcatttcaggctgcggccgatttcagagcctgatattgatcaggttgttgaaaatgctggagggaaacgagcacatccggacgctgaacgccgagagcaacctggagccgattatgtgctgggtaactgcgttatagagttaaagtcactcgatgatgagggtttggcaaaaccagaaagacaagccaagcttgctgctttattccgcccctttaattccgataaaccagttgtcgttctggatcgtaactctttaccttcatcccagcagagaaattttgatcgaattctagaaggaccaattaaaacggcagtcagcaaagccagaaaacaactcaagcaatctcgacttgagcatgaagaaacgacgacttcaattatttggtttattaataacggctacaccgctcttgatcatgatgagttgatcaaactaatcacacatagggtccgaaatgacactaatgaggttgatggcgtcattgtttcgggctgctatttccacagtgattcctatgacagctttttcctgtggccctttgagtacgtgcccataaatccgaacaaaaattttccagagtccggcgatttgcaccacgcttggcaaaacctagctgatcggagtatgactgctctcatgcaacaggctccggggaagcaggaggtaaagggaccggtgatagacacccaattcgacattgataacgtcacttatgtcaaaccggcaccaccaatcggaggaaaatcagggttctttcgtaatggccgcccaagattgaatagttcagggataacaacctcacctcctgtgggattggtttttggcgatctgtcgcttgggcaatggacaatatttcatgagaatctaccaaatgctcaatggcttcggacaaaccatgaggactggaagctggaaagaacagatgcagctaaacaagcaacagataggcagatttttatcttgatcccagttaattgggatgcttgggtcaagtgggttggacagccaagagagcatcatcatttgacaacgcatcattatgcaacctatatctttcaagaaagaatatcagtacttcttaatgaagcaaaaaatataaacagcgtaaaaactttacctaacaggtacatgcttatcgttaccgaagaaattgggcaagacaaagacaacgacatttcccatgctgttattgttgcagaaaactcagacggaacccaagattttgaagaaatcttttccaatcaaaggctgttccatgaatatgcaatgacgctgggctgcgcacatgcgattgcccgaggtgttgaagtggtcagatggcataaaaacaagacttacgcatggatctga

SEQ ID NO: 285415 - DNA, 828 bp, Morganella morganii
gtgaatgatttatcgctcaaacaaaaaaaactcatctataaactcagctcaattttaattggttcaattttacttttttccgctcttttttggctggcaggcaactttgaaggacatggcataactaagaacaataaatctgctgatatttatgagttggtttattttagcgtggtttctattacgacgcttggttatggtgattttataccaaccggtatatccagacttttggcctctttcgaagcaatatttgggattgtgttcataggttattcaatttcacaagttttgtctctgcgtcagtccacgctagtagaatattccgtaaattatggcatccacgaggcatataatcaatgtatagagtatcttatcgacgccaaagaatccataggtgacaaaaggagagaaattcaaaatggcattatccctcaaactatctctttcatatacaacagatccaaccctttttattcatctacaaaagcgttgcgaattacaaatggatactcctctcaccttgttaatatagataaaattgaagagcttgttaaacatgtggaacgcgcagcacatcatgttgaagagcttgcgggatttacgagaaaatatcttaacttactacaaaataaaaatatagactggaagcagaatagaacaattttaattcttcggacactgtgtgatcagatcgattatttcgtagatcaatttatcgaaaaaactagctatgcaaataaaccatataaggatggcggcatgtatagggatatagttaaatccatatcgaatgacattcgggaaaagtgtaaaaagcttaaataa

SEQ ID NO: 285416 - DNA, 831 bp, Morganella morganii
atgaataaaaataatgattttaactttataaaaaacaatatcagtaatatcgtattttggattatttttgcatcacttactcctttaatattgttttttataaaatttaattttgatgatttgaattcgatagatagatttggtttatttggctcatatctaagtggaacaactagcttcttactaatgatattaactgcaatatctatatatgtactttataaaaccttcacactgacaagaaaatacaacgaaaaacaaattgaatttaacaacaaccaaataaaaatatccaatttcactctattaaccgacttgctatctgaaaaaataaaaaaaacaaaaaaagaatacttagaagataatgacaacctaggcctaacagatacatttacatctttaatatatcactccaaagaaaaccataactacatgaagaataaagacaaaaataagtacatgataaataactacaatgaattactgagcttttttttagaaaaaaacaaaataacaatatccgatgagtttatattaaatatgatgtttttctcaaaggaaaataatgacattagatttataatgaaagaattatcacccatagttaaaattatggttgacataatcacaaatgaagataccactcaagatttaaaagatattctatcaatcatgttaaaaaataaaatccacaatgatattatcttatggggtattatttatagttcattaaatatagaggaagtatataaccatgcaggcactctattcattatacctaacaacattcgtttagctttaaagagttacatggaaagtgaagatgagtag

SEQ ID NO: 285417 - DNA, 1140 bp, Morganella morganii
atgaacttaaccagcatcacatcgaaacaacagaaaataacacctgaagaaaaacatctgaaccgaatgtcaaaactgccctttatgaataccttactggaaagagtgtcacatataaaaaatacagatgcagagtttgaagggaaatatattaacatctgtacagacatagggaaactaagccgaagcttgttatcttaccagtacataacagaattaaatgacctgaaaagagaaaatagctcaacaaaggaaacaggaaaaaacacccgggaaaaattaaatgaaagggtaactaaatggcatcacgaagaaaaaataagcacaccggcaactatcgtttaccgggaaattgataagatatgtgcagagaaaaaaatcacattatcgacgaaagaaaaagaaaaaatactggatatcatcaatgaaaaatatataaaactagatatattaaataagaatgcatctgtcagttcgatgctcggccctttaaaatcagacagagatctggatggaaaaataaacgtgcccgagataaagaaaaatctgattacggatatgaagaaagaagtacctgcgcaattcagaacgttggtcgatacatttcataaaaatgatgccgtaccgcagaaagaggaattactgacacctgtggaaagtctcatatttaatgatattccgctagtcagggaaatagccggtaaaatggcatcagatgtctatagcggtctgattgaagaaatttacaatatattatttcgtgacaaatccaaagaacagcctttggattttaacgcgataaagatggaagcaagaatgcaggcagaacgtatcgtacaagatcaaaaaccatctcaacacaatgaaataaattctgaagatattatccgccggaaatttgaatctgaaataacactaacaatgtcatctccggaaaaaaaacttgaagatttctttgatatgcttggtgaaaaacagataaagggtgacatttctgaccagcgcactacattcaaccacggggtgccaaataatataaaacatcgggatattgatgctatttttgatattctgaacaaacccgcctttacagacagaaatgacgatcaacgagcatcgttaggaaataaaacaatctaa

SEQ ID NO: 285418 - DNA, 387 bp, Morganella morganii
atgctcagcaccgggaccgggctgataaccggcaaaacgaaaagtcgctgtaaacacttccctgtgcgctcaggcgcgtcatccatgacgcgcatgcttttcgtctctctgccggttatctgccttttacttttgctgcggatggaattatgcgaactttggttcggtggcctgttgttaacaaaggggggtgaaacgctcagcaccggggccgggctgataaccggcaaaacgaaaagccgctgtaaacacctccctgtgcgctcaggcgcgtcatccatgacgcgcatgcttttcgtctctctgccggttatctgccttttactttggcatgatgaaaaccgtggatattcaatatcatcccacagaagtcaggacgttaaataa

SEQ ID NO: 285419 - DNA, 477 bp, Morganella morganii
atgttggcacaggattccagatccgaaacgctaagagcccttttattcagcttttccagtacgttaccggcgttgttaccacagcggttggccagacgatggaactcactgatttcacgcagctcttttacggtactgacgggggcgcctgttgacagtatccggagttcagcaccactgagtgacagtgtccggataactaacacccgttgtgccagagcctggcaccattttgcctgtaaatccggagttttattattgatcagcataacccagaaatcacgggtcagcggcactttatccggatggttattatccagccagtgcagcacggcttccccttgttcaggattttctaattgcatagtaccggcgatcaccggagccatagtggcgcgaagtgtatctgtatttttattgtcaataccggcgttgcgcagagcatcgagcagcgtgttcatttcgtctgttggctga

SEQ ID NO: 285420 - DNA, 870 bp, Morganella morganii
atgcgcaaagcccgatttactgaacatcaaattatcgccgttctgaaatccgttgaagccggacggacagtcaaagatgtctgccgtcacgcctgccgggccttatcgctgagcaaaacggtgtatttttacaaaccggatacccggcgggatgaatcggtgatacaggcgctgacagaggcggcagaacgttatccccgttacgggtttaaaaagctgtttcagatcctgcgcaggcagggcaacgggtggaattataagcgcgttcaccggatctattgtctgctgaagctgaactttcgccgtaaaggaaaacaacgtctgcctgtacgtaatccggcaccactggcaacgccggaggcgctgaatcagagctggccggttgattttatgcatgatgcgttgatctgcggcaggcatttccggacgttcaatattgtggatgattttaaccgtgaagccctggcgatagaaattgatctgaatatcccggcccaacgtgttgtccgggtattagacagaatagttgcaacacgcggatacctggtgaaaatgcggatggataatggtccggagcttatatcactgacactggcacactgggcggaagagcatggagtaatactggaatttattaaaccgggtaaaccgactcagaatgcctttatcgaacgttttaaccggacataccggaccgaaatactgggtttttatctgctccggacactgaatgaagtacgggagataacagagcactggctgaaagaatataactgggagcgtccacatgaatctctgaataatctgacaccggaagaataccggttattagctgaaaataacgaaatctcaaaaaatgtgtggaactga

SEQ ID NO: 285421 - DNA, 153 bp, Morganella morganii
atggtttattcgaaattgattaaacccaatcatcgtgttgaacaacttatccaagttaactaccctgtcgcttatcgtaaagacggcagcgtagaaactcatattagcggtttaagtgtagataaaaaattcattcctaaaaacaaacgttaa

SEQ ID NO: 285422 - DNA, 174 bp, Morganella morganii
atgaagaagattattatgttatttggtttatttataatcgcatcaaaaacgataaaaacattaaataccaaattcaacaaggctgggaactcaacagtctttggaaatctcgttccgctgttttggttaatccaaccgctgggacaaaagaatgtatggtttattcgaaattga

SEQ ID NO: 285423 - DNA, 360 bp, Morganella morganii
atgaaaaagattatgttcttagtactgttaattcttttcggggtaaatgctcacgctcgcacggaagttcctgattgcatggacagttactatgacgacgtggtcatggattcgctgaagtcgagtgacgaatatttacgcgggcataaagtgttattgaaagtccaacgcactgcgccagaagtgactaaagtggatgtgataaacgaagccgccgaatgcaacgtggtaatgcgcatgtccaacactcgagggacaacatcaagaatgttcgtgcatcaataccgcatgacttacaaaacacaagaccaaaacgacagggacgtatttgtagaaacaacaagttttaaacgcctttaa

SEQ ID NO: 285424 - DNA, 372 bp, Morganella morganii
atgagaacgttaatactgacggttttattaaccttggtaagtttcaccagtttcgctaagaccacgacatttcctaacgataagttgtgtcgtactcacgaaatcaccaaacgttacgaactcgaactaaatcgagcatggtggtatcagggaacgattgatagcggttacaatcaagtaagggtaactgctcctaacttctcgtataaccggaatggggtgttgggttgtactactctaattatcatgaagaataatcgcacgggtaaagaacaaaaatacttcagtgcgttcacagtaaccaaagaacatagccttagcaaagttaccctgaaacgcccgattaccttctccatgcctgtaaggaaataa

SEQ ID NO: 285425 - DNA, 384 bp, Morganella morganii
atgaaaaagttaattattggattactgttatccttaaccagttgcgcggcattcgcggcagtagatatttgtaaaaaccagagcgttgttttctcgttaaacaaactcgttattcctaaccaaggttggttcaaagagtctatcgacaaaggctatatcgtcggtgactctgagtacgttaacaccttggttaacgactatgagaaacgcacgtcttattgtgaaggtgtgacgttcttcgtcggcaaagatttaaaacctatgtccgctcggttcatgtaccgcgtggaataccaaatcagtgatgacctcgaaacactcgggccgtttgaattcacatctgttacttacccggtctttgactacccaccatcaagcttttaa

SEQ ID NO: 285426 - DNA, 381 bp, Morganella morganii
gtgaaaaagattatcttaagcttaatattagctttcgtcagtgtgagtagcttcgctaacaatgaaccctatgacccgtgtggtgaccttaacgtgttagctgtggttaaggaagacgtaattaaaacgaagtactggtacgataaggaactgattggttacgataaaggctatatcaaacgcggtaaaacattaatggaacttagtacccctaataccgtactgtgccagttccgtgtcgtttacataggtcgtaaaaacagaccgaaagaaatgaacttcggcgtagggttaaaatacaaccggcaggatggaaaggtaagtactttccaagccaacgtcagcaaccgagtagaattaaaaataagagacaacaaatga

SEQ ID NO: 285427 - DNA, 198 bp, Morganella morganii
atgggtctatttacaatccatgaacgctcccagcatatcgataacaggcgctccctgggacacagggaaggtgatttagtatcgggtacaaaaaaacctcatatagccacacttgtggaccgaaaatcacgttatacgattattctgaaactcagaggcaaaagatgctttatcagtgaatcaggctcttacagataa

SEQ ID NO: 285428 - DNA, 321 bp, Morganella morganii
atgctgcgtatggataacggccctgaatttatctctctggcactggttgaatgggcagagaaacatacagtaaagctggagtttatccagccgggtaagccgatacagaatgctttcattgagtgctttaaccggacataccgtatagaaatactcgatttttatccgttcagaacgctgaatgaggtacgggaaattacagaaaaatggttgtcagaatataactgtgaacgtccgcatgaatcactggacaatatgacgcaggaagaataccggcaataccattatttatcagtgatctcaaaaaatgcatggaactaa

SEQ ID NO: 285429 - DNA, 456 bp, Morganella morganii
gtgacagacgcggcattagttttaaggccagtttcgctgagggcagccaatgagtacatctctgacaatcatcgccaccatggaagatgtcaggggtacaagttcgccatcggtctttttaatggtaccggcaacatggttggtgtcgcagtcgtaggtcgaccggtaagccgtatccttgatgacggggtttctgctgaggttaccagactgtgcaccgacggaagtcgaaatgcatgctctaagttatattcggcagcctggagggcagcaaaagccatgggataccgaaggatgttcacatatacactggcatcggaaaccggagtcagcctgaaggcgtcaggatggcgtaaagacacccgggtaaatgggcgctcatgggataccccatcacggagaaggaccgataagcatccaactgaagataaacaaaggtgggttgtcattgcttag

SEQ ID NO: 285430 - DNA, 231 bp, Morganella morganii
atgacagctccacataatacagaagttcaaagaacaattcatcacgtagcgagcgaactggcagcgctagagtttataaatcaagatgctgcacgcgagatctcacaagttgccgaagcggtcgccaacatgtttacggtgctttattaccaagcagaaactggagatgcaacaaaacaggattttcagaaagcacaggctaagcttcaggaagtgttgttaacattatga

SEQ ID NO: 285431 - DNA, 918 bp, Morganella morganii
atgaaacaagaattattaaatttagtacctgtgaaattaaaagaaatcaataatattagtatgggggttttaccaaatggagaaacatttttatctcttcaggggttagctaagttttgtggtttggctccaagttcgattattcagttggctcaggactggtctgctggaaatgcccaagatcgtaatagaggccaacaacttatagagttaattaaggaatggactgattcagatatagttcctgatagcttatatgttgaaattgacagtaaaagttctattacaggtgtaattcatgcagtgccagagcaaattgttatggcaattactgattactatgcacactatgcgacaacaagaaaaaatgaggcaattacaaattaccgtcgtgctgctaagtttggattaagggagtatatatatagaagtttagagtataatgaaaaggatctgatcactgaaagttggaagcttttccaagagagaatattaaataatgaatgtcctaaaggatattttactatgttcgatgaagctacaactattattgcatcgcttataagaaataatattgtagttgatgactctattatgccagatggtagcttaggtatccactgggccaaatattggaaatctcaaaaattatcagataaatatggtgaaagaataaaaatatatcataaatatccagaagcatatcggcagcttgatcctgaaattaatgcttatcctatcagtgggttatctgaatttagaacatggtttcaaaatgtttacttacctgaaaaatatcctgactatattaaaagaaagattaatgatggaaaaatatctatttcatctgttccattattactatcagcggtgatgcctcctgatattactgagtcagtattaaaaaacaatctttga

SEQ ID NO: 285432 - DNA, 375 bp, Morganella morganii
gtgattgagcatctggacagagataccgccattgagctggtcagatatatcctgaccaacatgaatgataatgcccgcttttttatcagtacgccattgtggttttatcctcaggacacaatacaggaaggtgatcttgaaaagcaccttatcggtgtgccggtatcctcaatgatggcaatgctgccgcaaatgtattcagtgaataatccccttataggcgggtttatttacggcaaagtcagtcttgattatgcagatatgttcagcccggtcacgaatccggcattttctcaggagcagggacaggctatcgcccgcgcgatcaattttgactgcacgccgggtaaagtcacccgtctgcagtatgaataa

SEQ ID NO: 285433 - DNA, 510 bp, Morganella morganii
atgatattggccggtgccggtacagaaaacctctgccccttcagattcatcgttggtctcgtaatggccatcagggtaaatctgaacgattggcgacgattttttataatatccactgccgtctacgatatacatattggatgtcaacacccttaccgattcccatgcagaaccagtataccgatgtatcgccatgtgcgtcgcgccgtagttgggaaggactatcctttgtccaatatctccggaatacctggtggttataacgcttccaaatctgtctcctatgacagaagggggattttgactgttctggtcaaatctatacataccattaggcaaattggtgttagtgaaatttgtcatatacggaggatagtccgcgtatactgccccccatccggttgcctgctgaatccaggagcgagtcgcaactacgccggtgtcatatggtatcgtcacaatgtgctggttttcgccgttagcctgccgatacacaatgctaagcattga

SEQ ID NO: 285434 - DNA, 366 bp, Morganella morganii
ttggttctcacaaaaggaaattcgtatctaggtagaaaggctattgataaaaaaattagtgacccagaatgtgaatatagctatacgcataaaaaagcaacaaattctgagaaaaatattctagattatactgatgggtcatcttggaaggaattaaatattcttaaaagggagttagatctggtcaaatttgcaattgatagatggtctattccgtttaaagaggatgaaggattcattgaggttcctgaaacatataaagaatttattccaaaatgtaatgatattgaagtaaagtttgatgagtatgagctaattgatagttgtgatactgatgagacagattctgaaatagaatacgagtaa

SEQ ID NO: 285435 - DNA, 354 bp, Morganella morganii
atgctcccgaatagaatgcagctcagccgtcaaacagaagaacaattaaaaaagctcaagggatacactgggatcacacccaacgtagctgcacgtttagcattcttccgttctgtagagagtgagtttcgttattcacctgagcaagataataagaaactggatggtattttggtgctggataaaatcacatggttaggtgaaacacttcaagccaccgagttagtattaaagatgctttatccgaaggcagaacaaaaagaggtagttaaggcttgggctgcacatgttgaagatggcatcgcatccctaagaaatcataaaaaccttaagaattttttgttttcgatataa

SEQ ID NO: 285436 - DNA, 291 bp, Morganella morganii; identical to SEQ ID NO: 278757

SEQ ID NO: 285437 - DNA, 363 bp, Morganella morganii
atgccaacgccctgcccggcggcggctcaggccaaagagaacctgaaacgtaacgatgtggcggttgtcgggttcagtaccccgaacgtgatgcgtccgtatgtggagcgcggcacagttaatcagttcgcgttatgggatgttgtcaaacagggcgaaatttctgtcgccgtggctgatgcactgatgaaaaaaggcgaactgaatgtcggcgataagattaccgtcgccggtgtcggtgaagttgaagtctccccgaacagtgttcagggctatgactacgaagcaaaaggcaacgggattgtggtactgcctgagcgcgtgatcttcaccaaagagaacattaacaactatgatttctga

SEQ ID NO: 285438 - DNA, 156 bp, Morganella morganii
atgctgacacttattttaagtagctcacttatgattcacagctgttttccaaaacataatgcagatgaaacaccaccagacctttgggaagcagcagaaatccactctgtttatgataactgcccaaagactaaggcttattgcagcaaaatataa

SEQ ID NO: 285439 - DNA, 312 bp, Morganella morganii
atgatattaactgcaatatctatatatgtactttataaaaccttcacactgacaagaaaatacaacgaaaaacaaattgaatttaacaacaaccaaataaaaatatccaatttcactctattaaccgacttgctatctgaaaaaataaaaaaaacaaaaaaagaatacttagaagataatgacaacctaggcctaacagatacatttacatctttaatatatcactccaaagaaaaccataactacatgaagaataaagacaaaaataagtacatgataaataactacaatgaattactgagctttttttag

SEQ ID NO: 285440 - DNA, 423 bp, Morganella morganii
atgaaaaagatgacagaaatagccataatcctggttctggtggtgttctttaccgcgctcggcgatgcagtcggcgggtcaatgtacggccgtggtgagttcgggcaggtgttcagcgatacactgctggcgatgacactgctgggcggtatgtccttcgcggcatacctgatcgccgccggtctgtgttcaccgctgttcccgtatgacaaagaaatgattgccatgaccggtaaagtctctatcgcggttatcagtaccacagtactggccttcgcgggtctttcactgggtaaagatatcgataaattcaaagcgatttcatggcgcattatcccggtgtcactggcggtattctccgggacattcttatttgccgcacttatcggccaactgacgctcacatggagtggcgttatctga

SEQ ID NO: 285441 - DNA, 2001 bp, Morganella morganii
gtgttaattaaacagctggtactacataactttcgggttttcaacggaactcatgttatcgacctggcgcctaaaaaacgtcaaaatgatgataacccacgccccatagttctgtttggcggattaaatggggcggggaaaacatcgatattatctgctatccggctggctctgtacggaaggcttgcatttggttcgtcaactcaacagcaagaatatgtggaagagcttactgctctggtgcataacggttcatcttcgggcaagcagcctgatgaagcgtctatagagcttattttcacgtataacaaaggcggattagaggccgaattcacagttacccgaacctggaaaaaaggaaagagggataaactttcacttcaacaagatggaaaggttattcagggacttagttacgaccagtgccagggttttctgaatgaattgatacctcatggaatagctgacttattcttctttgatggtgaaaaaattgctgaattagctgaggatgaatcaggaaatattctccgtactgctgtacgtcggctgttaggtttagatttgatcgagaagcttcgtaacgatctgattatttttattaaacggcaacatgccagccaactcaatccctcccggcaacatgagctggcaaaacttgagcaaaaaattaaagatctttccttaaaaacggagctgcttcttgaaaaagccgatactattaagctacgtattgagcttatatctaaagaaattatgcaacatgagacactcttaaatgcgcagggtggtgcttttgctcagacaaaaaataaagaaaaacataaagttgaatatcttttaaaagaaaaagatcgtctggaaaaagctcttcgtcatgaatgtgatagctccttaccatatgctttggctcccgggactttaagtcgtttactggagcaaattagtgcagagacgcaaataaaacaggcgaagaactttgagaaggaattaaaccaatttctgacacagctcaagagtgacatttcattccagccaggaagtccgggacagattgctgcagaagcaatagaagataaccttaaaaaatatctggcaggtaaacccaaaaatgaattgctgtttgatatctccgagcgtgaagcaggaatgatccagcagtctattgagcaagacagcaaaaaagcctggcagcgtttcgatctttatcgtaatcaattagctgaaacagaagaacagttagaacaagccgcagcaaacatcgccagggcgcctgaagatgaacagctcatcgatatttttgaaaaaatcagagagcttgaccatcaacatgaaaccaaatgccgggagtattgttcactgttagaagaagctaaacagatgaaacaacaacaattagactgcgcacgccagattcaaaaagtgcacgataccgcgcgtaatcagcatacttctaacagcgcctttaataatgcccaggaaacaatcaatctacttggccgttatagtgagttattaacacaggcaagagtaaaaacactttcagctaattttgagatagcctaccgtaagttagcccgtaaagaggacttacagctgaatgcacatatcaacccggagaccttcgatgttgagctgaaagatgaaaacaataacattattaaccgtaaattactctcagccggtgagaagcaaatttatgcgatagcaattcttgaagcattggctaaaacttccggacgagatctgcctgtgattattgataccccattaggccgtttggactctcaccacagagacaaactgatcaatcattactttccgtttgccagccatcaggtcgtcttgctgtctactgatacagaagtggatgaacgttattttgttgatcaattacgcgacgatatttctcatgcttatgagattgtgtttaatgcacataccaaatcatctgctctaaagcctggttatttctgggaattaactaaggaggtaatctaa

SEQ ID NO: 285442 - DNA, 1251 bp, Morganella morganii
atgattagtctagaaaaaatgtttgggtcacgggtttatattatccctaagaatcaacgtggttacagttggacgcctaaagaaatcgatgatcttttcagcgatctggatttgatgggagatcaatctcactatcttggcacagttatttgtacgaagtgtgatgactttactgatgaaatcgataaaactccaacatatcagtatatacttgaagatggacagcaaagattaactacttttttattaataataactgaattacgccgaagatttcttgagattgatgaacgtgaaacagttgaatcagatggtttaaatagattaataacttataaaaaaggttctataagcattaggattgaaaatcagaatatttctctggatgaatgtttaaaacatcatattattggtcacccctctcttcctggggtattaactccaccaatgaaatgccttcagaaagctaaagatcacattgcttctatagttaataaaattgaaattagggatgatttaatagaattaagaaataaagtatgtaaacaagttcaaattattgatgttgatctggcaagtgctcgtatagatagatatttaacttttgatgcaataaattcgagaggacttccattaacagagttcgataaaataaaaaacttttgcattcttatttcagataaaagaaagttggatatttctcctgatgacaaatggtatactgcgattagtaatcttgagaaatttggcgttagttctagaaatattgaaaattcattcatggcggaattatattctgtttaccatggtgttaatactagtaataatgatgttcacgattcatttgttaaggagtataggacattattagagggtgaaaatgcacaaaaggaaagaagtttcaaaggtttcattgattattgggcttcctattctgaagcattcggatttataaactcaaaaaataaagagtattattataatagtttatgtactaaaggtgctggtcagtggcttgattctattgataatttaggattgcagggagttacaaaaaaaatacttacggttgctttccttgcatcactatctgattcagataaaactgattttgaaaaagtatgtagagtgtgtgaaatatatacgtttaggatgcatgcattatatcgatatagagtagataagaattctaaagtaatcttaaatattgcaaatcaagtattgaaaaattttaaaaagttcaataagtag

SEQ ID NO: 285443 - DNA, 309 bp, Morganella morganii
atgacagggaaaacacagaagcttaatctgcacaaattaccagacgaaatcaggcgcacgatagcagagcatccggtgtttgttgaggtggtggaagaatgcctgaccactgacgaatttgttgagcaattccagcgcctgtacaacgtatctctgccacgcaaaagcggtaacccactggttgacatggttgatgaagcgaccgggtttaaggaatcacaaacatgggaatttctgtctcatttcgtgccatttgttcaccggtggatttggctaccactgtatagcgagggaaaattaggaggctaa

SEQ ID NO: 285444 - DNA, 225 bp, Morganella morganii
atgaaaacagcactaggagaaatgattaaacaacaggtgttcgatgccaatgttgaccgactagtttcgctcagtgatgaacagtgggattttatcctgaacgaccaagatgagcgtgtatggtctggcggtcactactacggtcaatattaccacgaatgggaaattatcgtcgcgcacaatattaagtacgtgaaaacaggattgcgggagccgctgatatga

SEQ ID NO: 285445 - DNA, 231 bp, Morganella morganii
atgagcatcttatttcacaaagattatccgtatccggatttagacaactgccacaagaatttcgaactgttaatcgatagcaagaatcttccgtatgagccgcttgttgataccaccgagaatccgattaaaaggaaagccacgcggttgttcagacaaatggccagatgctacccgcgtggtaaagcatacatgcgcgtcagtaaacgcgagtttttggccagcaattaa

SEQ ID NO: 285446 - DNA, 315 bp, Morganella morganii
atgagttttcgcggatataactgcgctagaaatcgcagatcagagcgtagagcagagttacaggctgattatgctgttaatgcagaactgaaagcagcggtacacggtgagcaggaagaggaagttaagcgccctgttctgtcactcagcaataagcgcattggcagggttgataaagtggtggcggtgagcaatatcccagtgacacgcaacatcgacccgaagatttacgactcgctcgacaattgctgccttccgcatgtgcatattttttctattaatgataaaaagaataaaacaataacggcgaggtaa

SEQ ID NO: 285447 - DNA, 873 bp, Morganella morganii
gtgtccaatagaaaaggtaagtttattgactataattcattgccgccaaatgcgaaaaatctaaaaaagaaagaagataagcatgataaggaaaggtggcagcatgttttcatcataaaggggtcagggacaaaagatgatggcgttgattttaatcgccataggcaagctgtatttgatatggattggtttaaaatgaccaatagaaatacaccttattatctggtagatgtttatccagataaacgacagaaagaaatattggattcattgttttcttgccctgagttaattcagtctaaaattgacagaatggaagttaagacatttgatgtaaatactttcctcctagagaataaaatatctttttattcactcattggagcaaattactggtcaagttatgttggatttctacgagcattcaccgattcttatattgaatcagacatgataacattagaaattccagctggagacaatgtttcaatatcaagagattacagggttttcattggcctactgggaatcggtcttctttcttgcggagagccaaacagggcgaaaatggttcaacaaagaaagtatattgagggaatgagatatataaaaaaattctcaataattaaattcaaagaacaatattatattaaaatacgctatgacgatgactattttcatttgaaaaagagccgaaacttggaacttgagttaactggaacatttgaggtaatggtaggaaaggccttacgtgaaaagatggccgagagtaagcgatatgctcgcgttgatttacatgaagacccaaatgcatattacggcgtaagtattgttaatcacgcgcacgcaagaaatccaaaaaagaaatggtaa

SEQ ID NO: 285448 - DNA, 168 bp, Morganella morganii
atggacgagtattctccacgaaattacgatattgcggtactgaagtatctgtgtgatgaactttgccgtgaaggcacacaaaccctcatcagaagcaataattattgggttaatgatttagccctgagagatcccctcataatttccccaaagcgtaaccatgtgtga

SEQ ID NO: 285449 - DNA, 1572 bp, Morganella morganii
atggattatacatatcattatggggcctctatgaaaagtaacatgcccgttacacaaattgagcacgcacttaacgacaaagcgacgctgctttcaacgacggataaagaaagtcatattacctacgctaactctgcttttatcgatgccagcggatttaacgaagatcaattaatgggcgaagcgcataatattattcgccatcctgacatgcctcccgctgcattcgccgatatgtggtacacgctacagcagggagacagttggacgggtatggtgaaaaaccgccgccaaaatggtgaccattactgggttcgcgccaacgttacgccggtctggcacaatgaaaaactcaccggttacatctcggtgcgtaccgttccttcgcgtgatgaaataactcacagcgaaaatttataccaaaaaatgaatagtcagcagtttaaaggctttcgactttttaaagggattatcattcgtcgcggcttattggcatggacctccatgtttaaatggctgaatatcagccagcgcgtcaattattctttaggggtgacggccctgctcgctttgctatttatcttcgccccgtttaatccatttattcagtcgggtggcttgctggtgttatttatggcgctggctatttaccttaagtatcaaatttgtcagccagttaatacgctcctgacgcaaatgaaaaaagtggtgtccggacgtaaacctgataactgtcatttaaatcgggtggatgagatcggaatgctaatgcgactggttaatcagtccgggcttaatctgaattctctggtcgatgacgtcagtacgcaaatttccggtattcgcgctatcagtcagcgggtgtcaaaagaaggtacggcgctgcatcagcgttcagaagaaacctctgccgacctgcaacaaaccgctgcggccattgaagaaattggtagcgcggtacaacaaaccgctgagacggcggcacataccatgaccatggccgataaaaccagcgccaacgctgcagaaggcggcgatatcatgaaacaaactatcgccatgatgcaggcgatatcgcgtgacaacgggcagatcgttgacatcattggcgtgatcgacagcatcgcctttcagaccaatattctggcgcttaatgccgcggttgaggccgcgcgagccggggaatccgggcgtggcttcgccgttgtcgcggcagaagtccgcaatctggcccaacactcggcgtctgcggcaaaagagatcaaacagcttattgagaagaacgtcgccaatgttaatagcggcgtcaaaatggtggaacaaacggaaacgcatctcaccgggatgattggggatgtactgcagatgtcgatgatgatcaaagacattagtctggccacgcgtgagcaaacccaggctttggatctgattaacgattcaatttcacgcgttggcaccatgacacacaataatgccgagatggtggagcgcgtcaccgacgccaccgccgatctgacccagcgttcatcacgcttacagcaggccgttcaggtctttggcgtatcggcataa

SEQ ID NO: 285450 - DNA, 924 bp, Morganella morganii; identical to SEQ ID NO: 144775

SEQ ID NO: 285451 - DNA, 474 bp, Morganella morganii
atgatgaagcccggaaccatggaacggtcgctaaaaataacgagacagagaaccacgccaataaaagccatagcagatgtggcaatcaacaacaggcgaactggcaaccgtagccacaacataatgagaaagcttagggagcgcaaaacgcttcctaagccttttgccgccgccccagcgatccacttagctttcgtaacaccactatcatcatcattagaagctacacccccacccggacgaatcggaacaacgttacttatcggcttccgggtttggtcacttacccctttgaatgttctcatcacaatcccctttttgtataaatcccatacgctaatgataggccaaaatggcctacccatcaagaaatattcgactatttttcgtgcatacgaaggaaaatcaactcttccattatcatcaatattgtgtatattgattatcgaaagatgcaattttgataaaaaatga

SEQ ID NO: 285452 - DNA, 309 bp, Morganella morganii; identical to SEQ ID NO: 40473

SEQ ID NO: 285453 - DNA, 747 bp, Morganella morganii
atggaactcttttcaatattggcaacctgcgccgctttaacttttggtacaggtagcccagcagaacaggcttaccctgttagtgagcaagaatgtaaatcagcagcggcgatgtatcgtgagcagttgcaaaaagtacagctcaccgatcaggacagggatgctattgcacgtgttgccatagccgaagcggccaatcaaggtgattcgggtttagctggcgttgtgtatacgattattaaccggcgtcttagcggtcagtttggccagactgtgacggacgtagtaaacagccctaagcaatttgagccagttaccaaagttggtggtgactggaaaaagttaccttccgtaaccgtttcacaatatacgcaagtacagaccatcatcaatttggcgttagaaggtcacttgcctgatattaccaatggtgggttatttttccagaaccccgcaattgtagctgacagagaaaaagcaggaaaagtatctaaaggtttaactaatttcggtggttccgcaccatcagcgatcattaaagatcatgccttctacgccagtattaataaaggtggcccgtctaactcttccccggttcaattaactgcttccgctgtgcctgagcctaaaaaatgggatgtatacggaactgcaaagttccagaaaaatagtaacgccgaatggaatgtattttctaaaaatacgccatccaaaagcgtttatcaaaatgaaggggtgcagccatga

SEQ ID NO: 285454 - DNA, 1983 bp, Morganella morganii
atgaaattaatgattgtggaatctccggggaaagttaagaaaatacgcgagatccttggcgatggttggaaagtcgccgccagtgtgggccatgtcagagatttaccagaaaaagatattggagttgccgcacctgacttcaaaccaacgtatgtggccactgagcgcggcaaagaggttttggccaagcttaaacaggacgttcagcatagtgatgctgttttcctcgcaactgacttagaccgggaaggggaagccattgcatggcatctgaaacaggcgctacggcttgagaacccgcagcgggtaacgttcgctgaaatcacccctcgcgctatcaaagcagctctggcgtcaccaagggcaattaatattcctatggtagcctcacaagaagggcgaagagtccttgatcgccttgttggttacatggtttcgccgcgcctgtcagaaatgagtgggcgacaagggttatccgctggccgggttcaaagccccgccgttcgtattattcttgagcgtgaacgtgcaattcaaaactttaagcctacctcccattttggcgtaagacttaattttgcaggagattggtttgctgaatgggatgtaaaacctttcttggccgaaggtagcgaatatttcatggatgaaggctttgctaaagaaatagccgccatccgggaagttgacgttatttcttatgaagagaaaaacgcatcaaaagcacctcctgcgccttttatcacttcaacattacagcaggcggcatctaataaattaaagatgaagccaaaagcaacaatgacaaccgcgcaaaaattatatgagcaaggccatataacttatatgcgtaccgataaccccaacctttctgatgatgctctggttgaaatataccaactctgcaaagcaaagggcttacctatggcgtctaaacctcgcacatggaaagcaaaaggtgatgcacaagaagcgcatgaagctatacgaccatcacattttgacgttgaagaagcagggagtacgccagaagaaaaagctctctatcgcctgatatgggatcgcgctgttgcctgtcaattagaatcagctcgctacgccgttcgcgtggcccgcttccgggctactgacaatagcggcgaaaaaccagttgagtttgaggctgaaggccgaacgttgacgtatgccggatggacaacgttgtttaaagacgataccgaagccgatgatggcaaaaaggaagagaaacctaagaacccgatcccttctttgcaacgtggccagcacctcaccgctgaaagtgggaaggtattaagtaagacaacccgcgcccccagccgctttactgaagcgtcacttatcgcagaactggaaaggttaggcattgggcgaccaagtacatacgcggcgattatggaaaacatcatgcgccgtggttacgtcaaatcggatagcgcaaacaaatatcttttgcctactgaaaccggtgcattagttattgatgctttggttaaaggcggctttagctttatcgagtacgactttacacgcgctatggagggcgagctggataaagtcgcccatggccagacatcttacaaaaacgttgttggctctgtttatgaacgtctggaatcagaacttagccacctgaaaattgacgttgcacctcaatacccctgtccaaattgcggcaaggctcttttccgcaaaaaaggggctaccggcttcttttggggctgctccggttatccagattgctctaccacgttaccagatacagcagggaaaccggggaaaccaaagcccaaaccagaagcttcaggctttaaatgtcctgactgtggaaagcctcttatccggcgtaaaaaaccagccaccggcggcaaaaaagggtatgactttttcggctgctctggctaccccggttgctcatcaaaatttgatgctgtgaacggaaagccaaacttcgagaaaaagtaa

SEQ ID NO: 285455 - DNA, 255 bp, Morganella morganii; identical to SEQ ID NO: 40476

SEQ ID NO: 285456 - DNA, 309 bp, Morganella morganii
atggcaaatgtaaaaaccttcacccgtcagattgcctctaccacttggctaatgttgggtttgatgatgttaccgggtttcgctcacgcagccggtggcgatccaattaaccaagggcttcagtggttaattgatctcttaacgtcaggcattgcccgttcttgcgcaatcttagcgatcgccgtattgggttacttagcatgggccggacgtcttcaagcccgtaatgctgggtttgctatcggcggtatcgtgctggtatttggtgcggcgtctattgccgacgcaatcattgctgtagtccagtaa

SEQ ID NO: 285457 - DNA, 252 bp, Morganella morganii
atgctatttgcagcgagaaaaatcactccagttgtagcgatacagaaaattattgcctcgtatgttacgccccacacaagtgaggggcgtgtagcaccggcaaagagaacatcttttcctgatgccatgacgctctccttactggactacagcaatgattgcgtcggcaatagacgccgcaccaaataccagcacgataccgccgatagcaaacccagcattacgggcttgaagacgtccggcccatgctaa

SEQ ID NO: 285458 - DNA, 2451 bp, Morganella morganii
atgagtaatgcaactgcgacaaaatcacgccaatgggtgaatgaaaactctgttgctgagtttatcccttattctgttcaccttgacgaaaacaccattaaaactaccagtggctattatcttcaggtaattaagattgatggccgcgcccatgaaagtgcagatccagaagatgtgattaactggaaagaacaacttaatgggctgttgaaaaatatagcctcaccaaatatatctctttggacaaacattattcgccgtgaagaaaatacatttcccggcggggagtttgaagaaggtagctttgctgaacaactaaataacaaatacaaaaatcatgttggtaaaaataacatgatggtaaacgagctgtatcttacagttctttatcgcccttcaggtattcccggcgttaatctccttcagcgttttgaaaaaaatgttgaatctattaaacgtatacaggctgaagctattgaagggttacacgaagtggttaacaccgtcaccagtagcctaaaacattatggggcgcgggttttagggtgttatgacagaaagggtataaaaaactctgaagtattagagtttttatcttacctgataaatcttgagtggattcctcgcgctttacctcgcaaggtactctctgaagcgttgccttttgatcgtccgttctttggtgaagatgcctttgaagttaggggcgtcactgaaagcaccgtgggcgcagtcctgagcattggtgaatatccagaaggcaccgaagcgggcttaatgaatgcgttcttatccgcgccattcccgttaattttgtcgcagtcgttcaactttttaagtaagccggttgcgactgaattattaggcagaacacaacgccgaatgaaaaacgccggtgacttttccaaaacgcaaatggaagagatcgacgacgcacttgatgatttaacttcaggccgtcttgtattcggtgaacatcatttagccctaacgattctggccaaagattcgcgaagcctgaagaaaaatctttctgacgctaaagccgagctggtcgattgcaacatgatcgtgtcgcgtgaagattgggctatagagtctgctttctggtctatgttgcccggaaactttaagtaccgggcaaggccagcccccataagttcacgtaattttgcggggttttcctcatttcacaactacccaacaggccgcagaaccggcaaccagtgggggccatcggtaacgctacttaaaactacttctggcgctccctattatttcaatttccatagcgagttaagcgccgagaaggccagaaaactagcgcaactggaagcggaaaagggggcgggtagcattcaggaaacaaaagaggaacaaaaagccctagggaatacgttaattatcgggccttcaggctccggtaaaaccgtaacgcaaggtttcttgatggctcaaagtaagaaatttaaccctactcaaattatcttcgataaagatcgtgggttagaaatctatgtaagagcagaaggcggcgtttatttgccttttaagaatggtgcccgcactggctgtaacccgttccaaatggaaccttccgaagatacttatcagctccttgagcagatagttaaaaaatgtgccgggggttccttcacgaccgttcaggatactgacattagtaataccgttcgcggagttatgcgcctaccgaaacacttacgccggatctctgcctgccttgactttatggacccaacagatccagaaggtgtaggcgctcgtctggccaagtggtgtggcaatggaacattagcttgggtattcgataacgaaacagacgacattgattttagtaataacacaatgtttggttttgacgttacggacttccttgataacgccgagatcagaacgccattaatcatgtatttgttccatcgtatttctcaaattattgatggccgtcgaatgatgattttcatggatgagttctggaaattattgttggatgaatattttgaagactttgcacaaaacggcctgaaaaccatccgtaaattgaacgggttaatggtgtttggcactcaatcagctaaagacgttcttaaatccgctattgggtacagcatcattgaacagtgcgcaacgatggtctttatgcctaaccctaaagctgattgggatgattacgttaaaggcttcaaacttacagaacgtgagtaccagttaatcaaaaccgacatggcccccggctctcatcagttccttattaagcatggccataattcagtgatcgccaagctcgaccttgcagggtttagcgacgaactagccgttatctctggaacggctgacaacgtggaactattggaacgcatcatgcaacaagtaggggatgatcctaaagtctggttgccagagttccataaacagcgcgtagctgcctga

SEQ ID NO: 285459 - DNA, 645 bp, Morganella morganii
atgaaactgaaaaaattagcgttagtgctggccattgcaggaagccttaatgccgttagctatgctggcgttcctgtgagtgtagttgcagacccgcaagcatggacagcacatcttgaggacatggccaaatatgttgagcaaattaaacagcttgaaaaccagtttaaacagcaggttaaacagtatgaatccatgaccagcgcacgtgggttggctaatgtaatcaactcccaatatgacactgacgccctgagtggcatcaataccgacagcattttacgtgatagcggcattaattcagccagtgattttaagcttcctgaagacgtggccgaactttacgacacggcagcaaaaaacgccgccacctatgctggccaagcttcccgctcgcttgaacaagcacaatctcgttttactgagctatcaggtttggtacgccgggtaaatacggcaaccgaccccaaagaagtgatggatttaaacgcgcggattggggccgaacaagcctttttacaaaatgaagttggtaagttgcaggttctccagcaaacagcgcaggcaaacgatgcgttgtaccaacagaaggttaaacagatggccgttcaatcatctggctcactgcgtaatgtgaactggtag

SEQ ID NO: 285460 - DNA, 249 bp, Morganella morganii; identical to SEQ ID NO: 40481

SEQ ID NO: 285461 - DNA, 1014 bp, Morganella morganii
atgggtacgggaacaaacttatttgtccgtatttttgccaacgttgactcggcgttatcaacctacattaccgatacggtcggtaatgtaattggttatgcctcgccactgttcaccagcatgatgatcgtctggattgccatgtggggcattctgatgatgttcgccaaagttgatgaaccggtacgcgatggcgtctttcgcatcattcgtattggtgggattgtcgcgctgggcttaacggtcggtacttatatggatgtggtcgttaacgtcctacaaaaaggcccggaacacatttcggcggtggtttccggtacaacgggaacaacagccgacacgctggatgcgctctttaccaaaatattcaatgtggccaaagctgcatgggataagggcggggtcatgaacggaaacttcggtttgtatctgatagccctgattgtgctggttgttgggtgtggattgacgttgtttgtggcgttcttggtcttgttgtcaaagttcatgataaccatcctgctagggattgggccactgttcatcattgcactgctatttaacaccacgcagcgcttctttgaagcttggttagcgatggtatgcaactttggcattctgctgattctttcggcatcggtaggttcgctgatgatctcgttaggtgacacctacatttcaaagatggcaccaacagaaagcgcagcggccaatatggctaacttaggggatgcggcgatgttatgccttgtatttgcgctttgcattttagtggtaaggcaagttccttctatcgcttcagcattaggcggcggtgtggccatggccacgcaaggcgcgttcggctctgccatgaatgcgttacggccaacagcaatgaaacgcggtatgcagaacgttaaccgagaagttaagacgactcaacgcgccctgacttcccccgttcgcggtggtcaagcggcttatgcctcctatcaaaaacgctttggtggtaattcagtcgcacaaggatag

SEQ ID NO: 285462 - DNA, 219 bp, Morganella morganii
atgaagaaatctctagcagtaatcgcactcactttcacccttggggcttgcactctcacgccaccgccaccggctgaagctgtagacgatgggcgcggcatggttccgattaacccggcaatggttacgcaagaacagattaatgccgtcagctcgaagtacaaggacgtaaataagaaacaggttcagcaactgaaggagtttgcgcatggccaataa

SEQ ID NO: 285463 - DNA, 759 bp, Morganella morganii
atggccaataaaaaagcagcccctgccaaagaaaaaaaagtaaccgacaaggattactttgatgaggctaaaagctgggatgaatctgagattgtcagagaaaagaaatcagcccgtagagcttggtcggcattttgggctatgactggtgttgtaattgttcaggcgattgcaatttctacaatgatgcctctaaaaacaattgaaaattcaattgttcgcgttaatgacaccaccggcgaaactgaggtgatcagcaacctgaaaaacatggatgagactaccgaacaggtgatgagccgttactggttggctaagtatcttcgccaccgcgaagggtatcactggaacacccgcgaagatgatcgccttcaggttggcatgttgtcagacggggccattcagcaacagtacgctgattacaccaatcccaaagttaacccttacgcgccaatcaagatttatggtgaaaccactgaggttgatattaaggtcaatcccgccattacatacctaaacggtaaaggtggagtgaaaccagagaagggcgagaaggatcagttcggtgaaacggtgtatacagcgttagtacgctacacggccaccgtgaagaaagacggtgaaatgccagcaacaacccattgggccgctactgtctctttcgtctaccgtaaagagccaatcaaggtggatgatcgcctgataaacccggttggttttcaggttattagctaccgtaaagatcaggaagggggttaa

SEQ ID NO: 285464 - DNA, 822 bp, Morganella morganii
atgctttcgcttaataaaaccaccttatcagttcttctcgttctcggcattttttcttctacggcgtttgcgcttgaagttccaagaggcggcgcttatgacaaacgagtcaagttcatttcatacaaccatgagcaagttgttaaattgattggccattatggctattcaacagatattcaatttgcccccggcgagaacgtcaccaacatagcaatgggcgacccggacgcttgggaagttgcgccagtagaaaaccatatcttcattaagccaaccggcgaacaagccaccacaaacatgacggttttaactgaccggcgcgtatacacgtttgatttatccgctactggtaagaaaaccggcgatatgtattttcaggtaaatttccgttatccgcaggacgaagcggcgcggcgtgtagctgaagaagatgctcgcagactgaaagaacggatgaatgaaaaagcgcccaacgcttggacaaactggaactattgggtattcggttctcgtgaagtctccccttggcgtgcttatgatgatggccgttttacctacttcaagttttccggtaatacctcgatccccgctatctacattaaacatgctgatggctctgaaacacttctgaacccaacgatggattccgatcacccggataccatgattgttgaaaaagtggctcctaggtttgttttacgcaacggcaaatatattgccaacgtctacaacgaatctttcaaccctcatggattaatcaataccagtggcacaacgtcacccggcgttaagcgtgtaattaagggaggggcgcagtaa

SEQ ID NO: 285465 - DNA, 1188 bp, Morganella morganii
atggctaaagaccgcgacgacttagatacagaaatcgaacaggaagatgctgatcgtggtatgccctcgatttccaaaaacaggaaaaccggtaaagcctccggtattggtcagaaaatcgtagctgtaatcatagggattatcgttattctggcgttaatagcggtgaatggtggctttaagggtagtgaagaagataaaccgcctaagctcaccggtaacaccagtgtagccaaccggcttggcccgccgccttctttaccgccgccgccagctccaccaaaggctgagacgccaaaagaagatcggatgttgaatacagggcaaatagccccgccgccgccgtcttcagcttcaggaactggtggcaatgggaagcatgaacagacaccagacgaacgcaagcgggcaagctctattctggcgtttggcagtatttctaaacctcaacagcccggacaaaaagcaggtaatggccagcccgttcaaatggccggtgaggtacaggagggtaatagctcactatctgaaactgaccgcgctgatagtctttctaaccggcttaaaggtactgaggttagcggtagcagggcaagcctcttagtagacagaagttactttatcacacaaggcactttccttaattgtgcgctggaaacggctattagtagtgatgttcccggaatgaccgcctgccgtttaactgatgatgtctacagtacagacaagaaagttttgctactggaaaagggttcaaaaattgttggccagtatcaaggcggcataaagagaggacaggcgcggattttcgttctctggactcgtatagaaacgcctaaaggggtgttggtcaaactggactcacctggtactgatgccctcggccgctctggtcttgatggcttcgttgatacgcacttttgggagcggttcggtagcgccattatgttgaccacggttgatggcctcattacctacggggctaatagcgccaacaatggcagcaatggcaaccaatacaactttggtgataccgcgcaaacagcgcgagattcagcgagcattgcgctggaaaactcaatcaacataccgccaacgttaaccaaaaatcagggtgacaatatttctatctttgtagctcgcgatctcgacttcaggggggtgtatgaccttaaagcagcctactaa

SEQ ID NO: 285466 - DNA, 1038 bp, Morganella morganii
atgaccttaaagcagcctactaatgctaaaggttcatcacttttggagtaccttcgggtactccagccctttttaaacgaagacggggttactgaagtggtggttaataaacccggagaggtaattactgaaggccggaaagggtggcagtttcataacgtaccaaagttagattttgctgcttgcgctgacatatcaaagcttacggccacttattctggccagtcatttgacgagcgtaagccgattgtttccgcaacattaccctacggcgaacgtatccagattgtgcggccaccggcgacactgagcgaccgttacagcctgactatccgtaaaccctctgacgtgatcagaacgttggatgattacgagcgtgacggtgcattcgatcacatcgtaacggacgctgtagggctgcgtgactttgagcgagaacttattgagctgaagaacgccagacgctttaaagagttcctcacgctggcgattaaacatcgccagaatattatcgtttccggcgctactggttcaggtaaaacaacgttcatgcgttcattgctccagcttgtacccgatgatgaaagactgatcaccatcgagaacgtagacgagctgaagctataccaaacacataaaaacgttgtgcctctgttttacagcgccggtggccaaggtattgctgatgtgacccagcagcaccttttagaaagttctcttcgcatgaaaccagatcgtgtgtttgttgccgagttgatacgtggcgatgaggctttctattacctgcgtaacgttaacagtggccatccgggatctataacgtctatgcacggcactaacccacgaatggccatagaacagcttgttttgttcattaaggaaagccaaagcggcggaacaatgtcacgtgaagatattaaacagcttctgtttagttgcatcgacattattgttcaattccaaaaccatcaaggccgtcgatatatttcggagatctattatgagccagagttcaaacaaaatattttggtggcttaa

SEQ ID NO: 285467 - DNA, 1929 bp, Morganella morganii
atgagccagagttcaaacaaaatattttggtggcttaaaatcctgctgctgattagcttgccgcttatctttctggcggtagcggcttggattggcggggctatattcatggccggtaatggatacgaggccaaagatgctactcccctgacgctataccaatattggtactattacggtgatatacctaaaactaagctatggctgatggggtctttagttggcggtttaattattaccgcgttgccttgcttgctgccacttctgccgaagaaaaccccgttgcatggtaacgctcgctgggctaacagtcgtgagatccgcgaggctggtttattcagtgatgatggtattatcgtcggcgtaaaaaaaggctttatgggccttttcatgcagtaccttgtattttccggttctcaacacgttttgatggccgcgccaactcgttcaggcaagggggttagtatcgtagtccctaaccttctttcatggcgtgatagcgttgtagttctggatataaaacaggaaaactgggatataacttccggctttcgctctcgtcatggccaagactgttttttgttaaatcttgcgccaagggattaccgttcgcaccgctggaacccactcttttatatttctgacgatcccaattttcgcattaacgacattcagaaaattggtcagatgttgtttcccaagattgagaatgaagcgccaatttggcaatcatcggcccgttctctttggttaggtatggtgctttacctcatcgagacggaagatctgccggtaacaatgggtgaagcccttcgccagttaaccatgggtgatgaacgtctggctgaaattgtcgaagccagacaagaatctgaaacccctttatcagatgaatgttacttagctctaaaagaatatttagatacgccagataaaacacgtggttctgtccgtaaaggttttacttcggcgttagaacttttctataacccggtgatcgatgccgtaaccagtggtaatgactttgatttgcgtgaactgcgtaagcgccgcatgtctatctatgttggcattacaccggacgatttagaacgtttggccccgctgattaacttatttttccagcaagtcatagacctgaacacgcgggaactgccggagcaaaatcccgaccttaaatatcaggtattgatgttaatggatgagttcacggccatgggcaaagttaacattctgtcaaaaggcattagctatgttgcgggttatggcttgcgaatgctgccaataatccaaagccccgcgcagttacgcgaaacctatggccatgatgcagcggaaacatttattgataaccatgcgttacaaatagtttttgcgccaaagaatcttaaaattgccaaagaagtttcagagtctcttggtactaaaacagtgaaagccagatcccgcagccgttctactattgggagggcaagcggttcagaaaataccagcgaaactggccgcgcgctgttaatgcctcaagaacttaaacagatggggaaaagcaaagaaattattctgttagaggattgccctccgatccaatgctctaaaattacttggtataaagaccccacttttgaagccagaggtaatggccgtgatggcgttaaattcccttccccggaagtgacaattattgacccagccaacaggccaaaaggtgaagtttcctttatgagcaaccgggttgaacaggctgaagagacaaaaaccgaagttgtggaacgtgctgttaccgttgctgatattgaaaatatcgacaagctgaatcttgatgattttagttgtgatttttcaaaggttgaaatccctaaaggggatattaccgatgatgcgatggacgacatagttaatcaatttttctctggcttagaagctgcttaa

SEQ ID NO: 285468 - DNA, 2700 bp, Morganella morganii
atgaatgaaccaaacttagcaactaagaacaccgtccttatcgtcagttttgaggaaaggaatgaagctaaaaaagcggctggcaagttagagaacggcgaaaacgctttaggcttcgatgaggaagcgaaacactggtttgctaaaccgggtgcagacctgagcaagttaagcaaatggctaccagatcagcataaaggtaatccagtgcaggataataatccggctgctgaatttggcgctacgttagctgaagcaggctttgaactggatggcctgccggtgatggatggtaaaaagcaccgagtcagaacggctgacgataaaaaaggcgaaaagaccggggtttatgcgggctatttagacggcgttccggctgggtggtatcaggatcaccgaatccatgaccagcccgttaaatgggtatcgactggccagcaagttgacgccgaagcccaagcccatttacgtgctattgcggcccaaaaccgcattgatagagagaatgccttacaacgacagtatgcgcacaacgcccggagatctggccaagtatataacgcgatgccggttgctgacggtagccaagaatatttggttaataagggtgtaaaggcattccccggcgttaaggctgataagaaaaaccgggtggttattccactggtcaacgaagaaggcgaagttcgtaccctgcaacgtatcagcgccaatgggttcaagtcgctgaagaagaacggccagaaaaccggtaatttttttgttgttggtggtgaactgaaaaacggcgagccggttctctatgctgaaggttactcaacggcggccagtattagcgaagccaccaatcgcccggtagtaatgaccgttgacgcgggaaacctgcctaaagttgccgacaagcttaaagataaatacccggatagcttgcatgttgtgcttggcgacgacgaccgcaaaaatgccgttaacaaagggatggccaaagctgaagaagcggccactatcgcaaatggtgttttcaccgtaccggcgtttaccgctgaagaaaaagaacgcggtttaactgactttaacgaccttcaccaatcacgcgggcttgatgccgttcgcgatcaggttgaaggaatcattactgaacatactcataaggctgaaacaatggctgataaagaacatgaggcaataaatacaggcccggtgattactgaaaattttgaaagggaaatggacgctgcccttaatgtgaatcattcctctatagatttagagccgtatcaatctgaagaggatgagtatgcggagtatatggatcagtattacggtgaacagaacgccgcgccagttcctgtagccgctgccgaacagaacgccgcgccaactcctgtggccgctgccgaacagaacgatgatgtagaaaacagcatcgagccacatatagaacaggaaaaggcccaaacggctgatgatgatgtaagagcatggttatcatcatcacgtgtttctactgcggatatgttagctgaagacgatgaacgcgagggccgtaaacgcgaagagttcaagcaagtagagcctgacgctgaagagccagtttttaaacgtcagtcgcaagatcaggattatttcgaagacagctcttataaacctgtagtgccagatagagtggccaagtcttatattgaggttgaaggtaaatattatttccaaaatcgcccggactcactggcctttgtggacaaaggcgcgaagcttcaaaccaaactgagcaatagccaagtagccggttccatgattgatattgctgaagcacgtggctggactgagatccaagtaaaaggtactgaagattttcggcgtgaagcatggttacaggctacggccagaggactaaccgcccatggctacaagccaaaagaagaggatttagcacggctgaaaaaagtagccggtgagcgcaacattaacgaagttgaagcgcgtgaagttgctgataacgtgaaaacgtcaccttctgccccttccggtacaacgtcaaaaaatcaatccgaagcccctacatccaaaaccggcaccactgagtcaagcagtacggcacaaggcaaaaatgagggtgctaaagttgaagctgaagaaaaggttaacaagctggccggtaagttggtagagcatggcgcggccccttatgaacataagaaagacaacaaagataattactatgtaacgctggaaaacgccgatggtaagcaaagcacaacatggggtgttgatttacaacgtgccatggccgagagtgaagctcaaccgggtgatcatgttgagttagaaaaccttggccgcaaagctgttaccgttgaaaaagatgttaaagacgaaacgggcaaagtagtcaaaaaggaaactatcaatacgttccgtaatagctggcaggttaaagctgatgccattcgtgatcaggaacgcccagcgcgagaaatagttaaagaacatcccgatttagtaaacgaaattacagcggttaaactggctgagaaagtatctcaatcaatgaacgctgacgacaaagaacgctttatgagccgcgtccgtgacaaactagcggataaagtggccagtggcgaaaaagggccagaactgaaaatcaaagaggttcaaacggtcgataacccacgggttaaagataccgaactggaacgctga

SEQ ID NO: 285469 - DNA, 153 bp, Morganella morganii
atgaacaataaaatactggatctgaatataccgggccgtgaaattgagatgagccgccaagaagctgaagagttaggcgcatttgaagaaagcgccttatctgaaactgatgcaagagaggcgattgatatagaagacgagcaggagggttaa

SEQ ID NO: 285470 - DNA, 1158 bp, Morganella morganii
atggccagaggtgacgacaaagagaagaaaccattctatgaagaaattgctgatcgtctgatcaaacagcttgaggaaggaaccgcgccatggcaaaaaccatgggaaccgggttcaagcagaatgccgcataacccggttagcggtactcgttacaagggagccaacgccctatggctggctatgcaacagcgtacagatccccgctggatgacgtataagcaagcccaaagcgtgaatgcgcaggttcaaaagggcgaaaaaggtacgctggttcaatactggaagtttaccgacacaatccccaagctcgacgataaagggaaaccggtactggatgataacggtaagaaaaaaatgattaccgtgaaacttgatcgcccaaaagtcttttccgcagtggtatttaacgcggaacagattcaaggcttaccgccattagaagttaaggcaacaaaacccgattgggaacgccatgaacgagccgaaaatatcttgcaggccatgagcgtacctatcaagcatgatcaagctgatggcgcattttaccgcccttctacagattcgatacacctcccggaacgtagccaattccccagcgccgataattactatgccactgcattgcatgaagctggccattcaaccggacacaaaagccgtctggatagagatttaaccgggcgatttggttctgagtcctacgcaaaggaagaactgagagctgaaatagcctctttgatgattggcgatgaattgcaaataggccatgaccccggacaacacgccgcttacgttaaaagctgggtgaaggttctaaaggatgatcccaaagaaatactgagggcagcaaaagacgctgaagctattagttcctaccttttgagccatgagaaagaaaaggcgcaggaagcccctcaaaacgcaccagaaagcgatacagaccaaaaagagggtaatgatagcgcattgcctttaaaactcgctgagaagcttgcagagcgttttaacaacgcagaagatcgggctaaattcatggaaaagatacagtccagacttacccacgaaaaaccagatacggaaataaaaataaaggaaattaatacggttgtagtaagcaaaaaaggtctaaaacaagatactgatttagagcgttaa

SEQ ID NO: 285471 - DNA, 993 bp, Morganella morganii
atggccgttgaaagcttgtcaaaactccttgagggtaaagtaaagactaaatccaacaaaactacagacctgaaaagtaaggctagtcgcatagctaatcgtgcgtctgaagtgatggttaaggtgagtggcaatgcaaaaggcccagctcacgttaaagcccatttagattacatcagccgaaacgggaagctggaacttgaaaatgaacgcggtgaaatattgaagggaaaggacgacgttaaagccgttcataaggaatggactcaggatcaaggtaagcgacgtgccaatacgcgcgatactactaatgtagtgctatccatgccgaaaggaacggaagctaaggccgtcaaagaatcggctagggcatttgcaaaaaaacaatttggcgaaaactaccagtatgtttttgcacttcatgaagacgttgatcacccgcatgttcatatcagtataaaaaccttgggtttcgatggcaggcgcttacatgtgaaaaaaggcgatcctcaaatatggcgtgaaggttttgctaaagaacttcgcgctaggggagttgaagctgaagcaacaccacgcgctacacgtggcgtagttaaaaaaggtattgatcaggcgattcttcatattcgcaagcgtggattaaccccggaagtcgataaagccaaaatcaaagagatcgtagaagagtttaaagatacgagggccggaaagcctgcaaaagcgaaaccgtgggaaaagaaaatacagacaaggcagcaggaagttagaaaagggtggctatcggcggcgcaggaacttaaccagagttcagagccgggcgataaaaagcttgccgctgatgttgtgaattttgttaataccatgcctcctatggctacggaacgacatgaaatggccaaagcagttagtcagaaactagcaagccagcagcccggaaaaaagcaaaattcaactggcagagatagagataacgatcaggaagaacgataa

SEQ ID NO: 285472 - DNA, 516 bp, Morganella morganii; identical to SEQ ID NO: 40459

SEQ ID NO: 285473 - DNA, 717 bp, Morganella morganii
atgaaacctacacaacagacttacgaagaattgcaggttgcttatgaccatttcaatgacgcactttttgatggttcacttcccccctgcctgatcactctccagcgggaaaagaaaacatatggctatttctctgccgaaaggtttgttcacgccaatggaacccggacggatgaaatagcaatgaaccccgcctattttgccgtatgcccgccagaagaaattatgcaaacgcttgtccatgaaatggcccatctctggcaataccattttggtaaacccggacgccgtggataccacaataaagagtgggctgataaaatggagtctatcggtttaatgccatcttctacggggaaacccggcggtgccagaacaggtgatagcatggccgactatgccattgaaggtggccagttcatggatgaatacaacaagcttatgcaggatgattttcgtatttcatggatggatagatttccagcaagggatcgccttcttgaggccattgcatctggcaatgctgaccagttcgcgggtgacttagaagctatggggattgaagttggtgaagatggcgagttgacgataaagaatgagaataaatcaaacaggattaaatacacctgctctatgtgcgaaacaaatatttgggggaagcctgacctgaatgtgatgtgtggagactgtaacgtagcctttgaagtcgctaactga

SEQ ID NO: 285474 - DNA, 306 bp, Morganella morganii
atgaatggagatctggaaaagttggttgatgaattggaatccttcgatagttcaatccgtcacctacccattgcagaacagcagcgattaaggaaaaacagacgagatagcatggataagaaggcgaaccaagccaaaaaaattgcaatgattgggttggttttcatgatcccggctgtcgtgtggttcgcgtgtacgtggtacaacaataccgtctacgaaaattctcttgccatcatattaacaatgacactttccccctcagctatgttgctggctgattttctgttcaaaaaatacaattga

SEQ ID NO: 285475 - DNA, 240 bp, Morganella morganii
atgaaaaatcgcatagtgctaatcagcggcgttatcgccgctttagtcctgattctttttctggcgtatccctacctgaaaaacagccaatcatttttggctgtagtagctatttgcgtaacgtttgctgtattggcattagctataccagccaacttatttagttggctgcgaggaaagaagggtaagcccggatttatcaaaagcacttttataggtattttaaggagggggaaataa

SEQ ID NO: 285476 - DNA, 1125 bp, Morganella morganii
atgagcgccaaaaaaggattggatttaagcgggctggataacttttcagctttgatgggaggcgacccggcccctactcaatcagcggcttcaacagacgtacctgaaggttttgcaggaaatcttatccgtgtgcctctgaaaaaaattcataaggatgcagataacgccagaaagactatcgacccgcaggaactccgtgagctggccgattcaatgaagtctgtaaatccggcaactggaaaaccacgcggtaacaaaaacccggtaagtctgaaacctcatccagatataccgggggaatatattcttaatgccggtgagcgccgttgtgctgctgctgaacttgccgagttacctgatgttttggcgttcattgatgaggatgccgacgaatttgataatgcagttgataacattcagcgcgtagctctttcaccaattgaaaccgctacgtttatccagcgccggattgagaaaggcgataaaaaaagcgccatcgcggcccgattgggtaagccagcatcgtttgtatcagatcatattattttctttgatatggctgattgtatccgcgatatgtacgacagtggccgtgttgtctctatgcaggcaatggccctgttacatcgtgcctataaaaaacacgctgaagaagtagaggctttttgttccgaagcacaagacgagctaactactgctgatgtgcgggctttttgtgattcactcaaagagccggaatctaaagccgtgaatacgtcaggcgacaatgaagaaggtcaggagctgccgagcgatgccaacgcatggataggagggggtgccgatagcgacgaactggagaagggcgaagagcaacaacctttagttattgacggcgaaccaatcagcggcggctcatcttctgatttggaggatgaagccagtaaaatcattgccgcagatgaggcaagcgacaaaattaaaaaggcgattgttcagattaaatatgatgaacgcccagcgcgattactcacgaaccgccgagcttcttatgggttcggttggattaaatacgatgatgatggcagtgaagacgagattgatttaaaggacgttagcgttgttgccattgttgaaggttga

SEQ ID NO: 285477 - DNA, 753 bp, Morganella morganii
atgaatatcataacagtgacgaatcagaagggcggggtaggtaaatctacaatcgccgtacatcttgctatggctcttcaggaacgaggcgacagagtgctttttgttgaacttgatccgcagggtaacgccagtaagactttagaaaaggctggaggtgtggcggcacttcaggcaagccaactttttgaagaacaacagttaactattacgccaaatgaaggcattactttaatcaatgctgatgcaaagatggccgatatagaacgcgccccgttaacggttatgtcaacctttaaagaccaccttaccgcgctggcgtctcagtttgatcattgtgtcattgatacccctcctacccttggtttgcgtatgtcagcggcgcttatcgttgcaaatcatgtgttgtcgccaatagagctggaagaatattccattgatggtattacaaaaatgctgcaaaccatttttggtgttaagtcgaaatggaatccagatctgaacttcctaggcatgttacctaatcgctttaactcccgttctgaagaccagaaaaaaacattaatgaatctggtagagaattacgctcatctgttaattagagcgcggatcggcattcgttcatcaattccagaagccctttccgaaggtattccggtatggcagttaaagaaaacatctgcacgtgaggcaggaaaagaatttcaggaagcttttaagatcatttttgaaaaaatgggggttgccaaatga

SEQ ID NO: 285478 - DNA, 363 bp, Morganella morganii
atgaaaaaacgactaacgcaggccgaatttgaacatgccatttctaacctgtcacgcgcactaaagccagcaaatgtagaaattgtgaaagcaattttggttgatggcagaaagcaaaatgacatggtgattgaaacgggattaagccgtacagcaatagcggcaatgacgaagaaagttagagaagcgcacaagttacatggcaaaccaccggcaggctgggaacgtatcgagctatgtataccatcatcaatggttcctatgttaagggctatggaagatgaggcgcgtaaacaggcaaacgctaagggtgaaatgaatgaatatcataacagtgacgaatcagaagggcggggtaggtaa

SEQ ID NO: 285479 - DNA, 510 bp, Morganella morganii
atgttgaagcgttggaatattatttttctattcttatttttaccgttgcaatatgcaattgctgatattcatggcgaaataatacgaattatcgacggtgataccgttgatgttttagttaataaaacgccaataagggtgagattagttgatattgatgcccctgaaagcaagcaaccttttgggcagaaatcccgtcaatttctggctgatatgatctttcgtcaacaagtaaccatcgttgaaaagggaaaggatcgctataaccgcgtgttaggtacagtttttaaggaagataacaccaacgtaaatgaatctcaggttagtaacggtatggcgtgggcctacagataccgtgaacaggcgactaatccagccatgctagaccttgaacaggacgctaggcaaaaacgccttggcctatggtctgatccgcaatcaagcattgtagagccttggaaatggcggcgagttaacaataaatttcgtgcgcacgaaaccgcaaaatga

SEQ ID NO: 285480 - DNA, 150 bp, Morganella morganii; identical to SEQ ID NO: 40467

SEQ ID NO: 285481 - DNA, 177 bp, Morganella morganii
atgaaaaacagcaattttgaagaggctaacgagattaacaacgccatcaatgaaatgattagtgaacgtcaatctatcgacgcaggtcggaacgacttcctaggggtgagtttggagatcggaaatttttgtacgttaagcgcattatttaaccaatcttggttcgtaaggggttga

SEQ ID NO: 285482 - DNA, 285 bp, Morganella morganii
atgaaagttaaaggtatcccttatgctgaagtgaaggctaaagccttacagaaccctgatgtaatggccgcttatcttgcagagaagaaagaggaagagttacaggaacttttggctgatctgcgccgcagagctggtatcaatagtacccaagtcgctgaacgtatggggattactcagccagccgtaagtaaattagaaaaaaacgccagtaaagccagtgtcacaacacttgaacgatacgcggcggcctgtggtgccagtatcaagattgttatgggctaa

SEQ ID NO: 285483 - DNA, 321 bp, Morganella morganii
gtgtttgaattgatttttcacccggaagcacaacaggaaattttggatcttgatagtccaatgcaagggaaagcgtttgctgcactggataaacttgaggcccaaggtaatcagttgcgttatccacatacggatattattcaagatggcctttttgagttaagagcgggtaaaaaagatattacacgtaccttttttgctttcgctaaagggaaaaagatatatatcttgcgcacgtttgttaaaaagacacctaggacgccaccggcagagatccaattagcattaaagagactggaggaactgacagatgaaagttaa

SEQ ID NO: 285484 - DNA, 228 bp, Morganella morganii
atgagctatgttgatattgcgcagcggtggcgtacacagaatgttgaacatgcccattcagggattgtgatgatttgggatggtcaggtttatggttggaaaaattgccttcgtgatgcacagcatgagcggcccggcgtaattgccgttgatgtcgatgagaacgtttttattgccgaaggtgggaatgattacgatggtgctaagtgttgggtggcacattcataa

SEQ ID NO: 285485 - DNA, 1353 bp, Morganella morganii
gtggctacatcacaactggcgctttttaatccagccgacgaagcggagacttatcacaattccgggcggcatggtttcttttctgtactggctcagtggccaacgggtaaacgccaatcttcttacccattaagtgagatggccaccgttcttagcatggtcgatacctcacgcgatacatggataacccaagctgaatttatgcgtcctaaccggcgtgtagtaaacctcttacgtttggggttgctttttgtcgatatagatacctacaagatgagttgggcgcagggtagaacacctgaagctttggccgctgcaatcaactatttctgtcaacaagaaggcataccagaaccctcctttatggtctattccgggcgtggtattcaggctaaatggctacttgaaggaaccttgccacgtgccgcgctaccgcgctggaatgcttgccaaaagcatttagtatctaaactttcctcgctaggggctgatcccgcagctaaagacgccagccgggttttacgattggttaatacggttaacactaagagcggcaatatttgccgtgtagtaagcgttctagaacgtgatggcgcaccaatccgttataacttcgagtaccttgctgaaatgttattgccggtggctcgctgggatattgaaaagcaacgccagacaaaagcagaacagaaacttcaattgctgcccggaggccgacaaagcaacctcagaggttttagcggtcgtcagcttgcatgggataggcttgaagatttgcgcaagctggacgagctgcgcggcgggttagcggaaggggaaaggatgcgtcatttattttggcgtattaattttttgctgttgtccggggcgacaaattcaacgcagatgtatcacgaagcggccgcactggccacggagatctcccctgcatggtcttaccgttcacaagagttaatgacgctgtacagcaaagcaaagcagtatgaagccggtgagaaggtatctttcgggggcaaggaattttcaccactctacacgccaaaaaatgacactctaatcaacctgtttcaaattacagatgaagagcaacgccagctaaaaactatcatttctaaaaatgaagcgttagagcgtagacgcgcacgagacagaaagcgtgacgaggaacgccgcagagctgctggagccgttgagcgtgatgtttacgaagctaattcactgactaaacagaaaccgtgggaagtgttaggaatgagccgcgctaaatggtacagattgggcaaaccatcaggcagtgagacaactccctcccctattacttgtcatggccaaatggccgctaaatcagcctag

SEQ ID NO: 285486 - DNA, 315 bp, Morganella morganii
atgaaccagacacaagtattaagaccggcaacgccgggtgacgttctgctttctcagttcttagaaccgaacagaattagccaaacggcgttggccacctataccggatggacgagaaagcacgttaatcagctctgtcatggaaaagtggccataacaatagattccgcgctcatccttgcaaaagtctttggtaacaatcctgatttttggctggatttgcagaagaaagtcgatttatgggatgcactgcattcagaagatcgccgcagcagaatagataaggcgcgcccttttcaattactggcggcctaa

SEQ ID NO: 285487 - DNA, 1023 bp, Morganella morganii; identical to SEQ ID NO: 77658

SEQ ID NO: 285488 - DNA, 981 bp, Morganella morganii; identical to SEQ ID NO: 119795

SEQ ID NO: 285489 - DNA, 282 bp, Morganella morganii; identical to SEQ ID NO: 101047

SEQ ID NO: 285490 - DNA, 330 bp, Morganella morganii; identical to SEQ ID NO: 101046

SEQ ID NO: 285491 - DNA, 348 bp, Morganella morganii; identical to SEQ ID NO: 279422

SEQ ID NO: 285492 - DNA, 528 bp, Morganella morganii
atgcctttacctcctaatccgctggctcctgtcaaaggcgccggcacaacgctgtggatttataccggcaaagacgacccgaccaaaaacccgctggcagacgaaggctggacgcgcctggcgaaaatcaaagagcttcagccgggtgaaatcagcgctgacagttacgacgatacctatctggatgatgaggacgccgactggaaagcaaccgctcagggtgaaaagtcagccggtgaagccaatatcacgctggcctggaaacccggcgagcagggacagaaagacctggtcagctggtttgataccggtgatgtccgttattacaaaatccgctatccgaacggcgcggttgatctgttcaaaggatgggtcagcagcctggggaaatcggtaccggcaaaagaggtgatcacccgtaccatcaaaatcaccaactccggccgcccggcgctggcggaagaaatgaaaccggctgaaggtgaaacccgttcagtaccaaaaagtaaagagacatcaggagaataa

SEQ ID NO: 285493 - DNA, 399 bp, Morganella morganii
atgaactttctgcaacagaaagaattcacgtacaacggcgaatcactgatgctgagcgagttgtcagccctgcaacgtgtggaatatttcgatcacctggtgacacagaccgaaaaagaagcgccggcagaggatgtgcagagcctgaaacgcactgctgtttatgtgcgtatgaatatcgaatcaaatgcgtttctggtagcccgttctctgttcaatgtgggtaatacaccgggtaaacaggttgatgagatccgcgctgatattctcagcacctggccgccggtcgcgctggagcaggcggcaaaactggtacttgaactcagtgatatgcaggtcaaaaccacagacggtgaaagtgctgaaccggtcgcagatccggaaccggcagaaaagtaa

SEQ ID NO: 285494 - DNA, 255 bp, Morganella morganii
atgacggcaacagagctgggggactggtacacctatttcggggtaacgccattcacttatcagctgattgatctggagttcgccgcactcagtaacaccgtggtgtcgctggtgggcggcagcaaagacctgtcgctgaatgattttctgttactgaaacacagcgaagaaaccggtgagactgacgactcactgttaatgacagcaggcgaggggatcgccgggggagtacgttatgagccagcagatagctga

SEQ ID NO: 285495 - DNA, 456 bp, Morganella morganii
atgagccgctcagatatgatttttaacatcacgtattcctattatctcaatgagatgcaaagcaggttttccggccgcattgataagttcatctcaattgtactgtttgttctcggcggctccgttcttgcatcattgctcaacgttatttttgttggttctgttgtatccatcctctctgcaattcagtttttctatcagtttggtaagcaatcatctgtttcggatgagcgtgctaaaaagtatttatctctcatgcatcacgagtcacgccttacggatgatgagctgcatagccaactcgatgagctgcttaaaactgatactcctgtatttggttttttggaaaaccccgcatataaaagggcatccattaaacttgatcttgtcgatgaaactaagctttcttgggcagaatctatttttgcctggttggctggtgatttgcctaagtag

SEQ ID NO: 285496 - DNA, 609 bp, Morganella morganii
gtggacacccatccaaagcatctgccggccgatgaacgtcgtgccgtaactgtcgagtccgtcgtggcgcttgccggttcacaaaacccaagcgagataaccactgcggctatcgctaaacacatgaacttgacccagggtgcgctgtttcggcacttcccgaacaaggaagccatttggcaggcggtcatggagtgggtagcagagcacctattagccagaatcgatcgatccgcacaaggaatcgagtcgcccttggcagccatggaggcgatgttcatgagtcatatcgaattcgtagctgagcacccaggcgtgccaagaatgatgtttggtgagcttcagcgtgccgaatcgacaccggccaagcgcatggtgcaaaccttgattcagcgctacggcgaacgtttgcatcgtctcatcgagaaaggcaaggccagcggcgagttgtctccctcgcttgacaacgaggcggcggcaacgctgttcattggcacgatccagggcttggtcatgcaatcgctgttggcgggtgatgtgggacgtatgcaccgcgatgcgccgcgcgtctttgcaatttatcggcgtggcataaggagtgcgcaatga

SEQ ID NO: 285497 - DNA, 1152 bp, Morganella morganii; identical to SEQ ID NO: 188799

SEQ ID NO: 285498 - DNA, 831 bp, Morganella morganii
atgatcagcctggccggccgcgacattctccatgcctgggggaaattcgtcttcaccggcatcggtctgggtctgctgatcggcgtcaccctagtcatggctggggtgtaccgaggcatggtggacgacggcaaggcgttgctcgacaacagtggcgctgacctttgggtggtgcaaaaggatactctgggtccttatgcggagtcgtccagcctcaacgatgacgtgtatcgcgccattctcgccatgccgggagtctcacaggcagcgaacgcgacctacctgaccatgcaggtacgcaagggcgagagtgatgtacgcaccatggtggtcggcatcgcgcccggtgcgttgggggctacacccggatggcctccttatctcgtcgctggacgccagatcacgcgcggtcactacgaggctgtggccgacatcgccaccggcttcaaactgggagatcgtcttgccattcgccgcaatcattacaccgtcgtggggctgacacggcgcatggtgtcgtccagcggcgacccgatggtattcattccgctcaaagatgcccaggaggcccagttcctcaaggacaacgatgccatctggcaaagccggcgtcgcaccgaagccaacccggtcttcaatcgacccggtgatccaggtttgctggatgccgtgattgcttcacagagcagcaacgcgttcgtcaatgccgtgctggtcactctgaaacctggtcatgcgccggacgaggttgccgaatccatccagcgctggaagcgtttgacggtctacacccgggcacagaatgttccttgtgattctagccatcgttag

SEQ ID NO: 285499 - DNA, 351 bp, Morganella morganii
atgttccttgtgattctagccatcgttagcgcggccatcgttgccttcatcatctattcgctgacgatggacaaaatccgtgagatcgcggtgttgaagctcatcggcacacgcaaccgaaccatcgccgcgatgatcatgcagcaggcgctcgccctgggcgtgattggcttcgtggtcggcaagatcacagccaccttttcagcaccggcttttccaaaatatgtcctgctcacgccaatggattctgtcgccggtttttttgccgtgctcgtgatctgcgttctagctagcctcgtcgccattcgcatagcactcaaggtcgatccggccgaagccattggaggttga

SEQ ID NO: 285500 - DNA, 711 bp, Morganella morganii; identical to SEQ ID NO: 188801

SEQ ID NO: 285501 - DNA, 1320 bp, Morganella morganii
atgatccctcgcgaagagcgtatcaaaagaatgaaagaggccgggtacaacactttcttgttgaattccaaagacgtttatgtcgatttactgaccgatagcggcaccaacgccatgtccgataaacaatgggccggcatgatgatgggtgacgaagcgtacgcgggcagcgaaaacttcttccatctggaaagaactgttcaggaattattcggctttaaacacatcgttcctactcaccagggccgcggtgcagagaacttactctcttcattagctatcaaaccgggccagtatgttgcaggtaacatgtacttcaccaccacccgttatcaccaggaaaaaaatggtgcgacattcatcgatatcgtccgcgatgaagctcacgatgcgggcctggatgtaaaattcaaaggcaacatcgacattaaaaaactggaaaaactgattgctgagaaaggcgcggaaaatatcgcttatatctgtctggcggtaaccgtaaacctggcaggtggtcagccggtctctatggcaaacatgcgtgaagtccgccagttatgtgacaagcacggcatcaaagtgttctacgatgcgacccgctgtgtggaaaacgcctacttcatcaaagagcaggaagaaggcttcgaagatgtctccattaaagacatcgttcacgaaatgttcagctacgctgacggttgtaccatgagtggtaaaaaagactgtctggtgaacatcggtggtttcctgtgtatgaacgacgacgacatgttctctgctgcacgtgaactggttgtggtttatgaagggatgccttcttacggtggtctggccggtcgtgatatggaagcgatggctattggtttacgcgaagcgatgcagttcgaatacatcgagcaccgcgtcaagcaggttcgttacctgggcgaaaaactgaaagcagccggtgtaccgattgttgagccggtcggcggccacgcagtattcctcgatgcacgccgtttctgcccgcatctgacccaggatgagttcccggcacagagcctggcagccagcatctacatggaaaccggtgtacgttctatggagcgcggtattatctccgcaggccgtaacaaagaaaccggcgaccatcaccgtccgaagctggaaaccgttcgtctgactattcctcgtcgtgtatacacctatgcacacatggatctggttgctgacggtattatcaaactgttcaaacacaaagaagacattaaagggctgaagttcgtatacgagccgaagcagttacgtttcttcactgcacgctttgattacgtgtaa

SEQ ID NO: 285502 - DNA, 885 bp, Morganella morganii
atgagtatgattttaactgcgcgggctttgcagataaaaaccggcaacgcgctgcgcaaactggtactggtaaagctggcggataacgccaacgaccagggcgaatcgtggccgtctgtgccgtacattgctgagcagtgcgaaatgtcagagcggtcagtgcaaaaccacattaacgccttggtggaaatggggttggttcgtgttgagtcccggaaatcggccaacggtctgaaccagtcaaatatctatcatctgcgtttaaatgctgtcgttgtgagtggtgaatctgctgcaccatatggtgcaaatcctgcgggggtgagtggtgcaaatggttccgggactggtgcagcagattcaccaggtggtgcaactggttccgatagtggtgcaggagctgcacccagaatcagtaatgatccagtcatagatccagaaaataaaaatattaatcctgttcgcggaaaaaccaaaagcaaaaccgtgatgccggaaaactttgttccgacaccagaacacaccgatcaggccaaagccgccggtctggatattcaggacgagtttcagaaattcagcgactaccacgccagcaagggtacccaatacgctgactggaatgccggtttcagatactggctgaatacggccgccggatttaaacgcgctgcggactcaaagaacatcgacaccaccgagtgcgatgaagtcttcagaaaaatgttctcatcctccgactggaagccagaaaaccgcgtacaggagctggtcgcaaaacacaaatcctacattgggcgtatgaatgaaattgccggacgagcagcatttcgcgggtactggaaacaggccacagagcaggccgccaaagaacgggagacagcatga

SEQ ID NO: 285503 - DNA, 351 bp, Morganella morganii
atgctgagcgagttgtcagccctgcaacgtgtggaatatttcgatcacctggtgacacagaccgaaaaagaagcgccggcagaggatgtgcagagcctgaaacgcactgctgtttatgtgcgtatgaatatcgaatcaaatgcgtttctggtagcccgttctctgttcaatgtgggtaatacaccgggtaaacaggttgatgagatccgcgctgatattctcagcacctggccgccggttgcgctggagcaggcggcaaaactggtacttgaactcagtgatatgcaggtcaaaaccacagacggtgaaagtgctgaaccggtcgcagatccggaaccggcagaaaagtaa

SEQ ID NO: 285504 - DNA, 597 bp, Morganella morganii
gtgctgcgtggtggcaccgaacagggcacctacgtgtgcaaagaattggtttatgcctatgcgatgtggatcagtccttcattcaatctgaaagtgatccgcacgttcgatgtggtggccggaacacagcaggcgatacagctggctgataaagttcaggccggagctatcctgctggagtctatggcgaaaacattgaacctgtcgaattcctcaaggctggctgggtatcagaagctgcaaaagatggctgatcttcctgatctggctccgtcctatgcgattgatgcaccggctggcgcggtggatggttccagcagaccgacaacgtccctgactacgttgctgaaaaatcacaatgccgcattgtctgcgaccagagcatacaaacgtcttgctgagctggggattgtggagcagaaagctcggcctggatccagaggtacacagcgcctgttctggtcgataacgacgcgtggactggcatacggtaaaaacatgacatccccggcaaatccgcgggaaacgcagccgcatttctttgagagcaaatcagcggaacttctggcactgatgatgactccggcggtggcctga

SEQ ID NO: 285505 - DNA, 474 bp, Morganella morganii
gtgctgacaaccggtaaagctaatttccgtgagttcaccacgtcgatactgaaaatgctgacagaaatttttgttaaaaaatcgattgttatgggaatggatgcgatggggtttaattttaccccaaatgccaaagggggcgtttatagctctccgtcactgagtgcgtacagtggccaggtggtacataccccgacaatgtttgcctttgcaaaaggtgctggtgttatgggggaagccggaccagaggggatttttccgctgcgccgtggtctggacggaaaactgggtgtagtggcgaaaatggctggtggaggtgatggtgtagttcagcattttaatatcaccattcaaaatgacggcagcaacgggcagatgggcccgcaggcgacacagcaaatcctgaagctggttgagcaaaaaaccaagcaggttattgcatctgaacgtcgtccgggcggagcaatggggtaa

SEQ ID NO: 285506 - DNA, 171 bp, Morganella morganii
atgagcggagaggatttgcgacctctccagagcctgctgcgcttcgcgcgaagatttgccgatagtatcgcggattgcattttgcttttcagtctgctgcttaacgtatttatcagcctgatcctgaagtttattcaggcgttcctgagcaacaacttcatcacccaatag

SEQ ID NO: 285507 - DNA, 255 bp, Morganella morganii
atgctggtaccggaagacatgtctgttggctggtttctggaggcactgaaaacagttgatgaaatccgggtaattaccggcggccgtatcaacttcgttaatcccgtcacgggcgaggagaaaaagggtaacagcaagggctccatgcttcttatctggcgtccgtttatcaccccgcgccggttgtcttctttcgcgctgaaacaagagttggaagcgatcgggaatcagtatctggcggaggtatccgcatga

SEQ ID NO: 285508 - DNA, 198 bp, Morganella morganii
atgcagcagcgccttacattcagcgtccgtgtacagcttgccgggctgaatatcactaccggtatggccgtaacatacggtaagcactccggccacatcacggtaaggtttgtactcaacaccctcatacgctgggatcagcaccagcgcaccggcaattgccccggcagcacaagcggccatgacttttttaaataa

SEQ ID NO: 285509 - DNA, 171 bp, Morganella morganii; identical to SEQ ID NO: 285506

SEQ ID NO: 285510 - DNA, 1065 bp, Morganella morganii
atgataacaaaagaacagaaaattgactgcataaattatgcaaaagcaatagggataattgctgttgttattggtcattataaaaatgacatgttcgatgtattcaaaccttatatgtatcatatgcctttatttttctttattggtggcattttacataacgataaaagaagtattacaaatagcatgctaaccaccataaaaaaacatcatttttatatagtggttaattatatactaattgggatgtttataattgcagtaaataactcatttggaacgtcattgagaaacccatttgatgaatcaatcattggaacgataaagtatgcggtgacatggaacttccattccaatacactgtttttggttgcatggtttttgtttgcatactctttaatatttgttttattttcagtggtaattaacaaaataacaaaaggtaaattacctatatttctaatttcaatttttcttggtgttattggttactacgtggcagttgagatgtatgctaaaagtgaattgttttatcttaacttattaagtcaggttttggttgggtcaatgttttatggtataggagtatcaataaaggataggtttttttcattgctcaacccattcgcctttgttgttatattaatagcaatactgacattggttaaacttgattatataggaacgataggaatgtcgtggagtaattacaataaagggttgtttaacctattgtttacaccagcggcatgtatttattgtgtattttttgtttcttactccttatcaaaatcaagcgaattcaagacgctattgctcatcggaatgaatacaaaatcaataatgtcatatcacttagcggcatttgttatattagatatatttttcagttacattgggaagtatgaaatatctaacataagcgcattgaatcatttcaatacatataaggtatgggttatttacgttttattttcaatattcgcatcaatttattgcgagaaaatatttatacacctgaaagggaaaatagtggcaatagcaaaaaagacactattaaattaa

SEQ ID NO: 285511 - DNA, 207 bp, Morganella morganii
atggataaagagtttgctcgcatctataaagaagtaactgagagagatgcgtgtgatgaaagagaaaacctaagccaagaagattttgattcaaataacgaaaaaatagactggcttatagataaattcatggagcgtatagaaagcgacagtcaaaaattcagaaaccttctgaccatgaagaaaagtcttagcgaaaacaaataa

SEQ ID NO: 285512 - DNA, 3252 bp, Morganella morganii
atgaatgtacagaaaaccaaattttcatctaaagaatttttaaggcgccgtcgccctgaaaagttttctgattcaacaatcagagagactggtactttagatagagttgtactggaacacttcctctctacgctaaatacaagaaatcaagaattacaattcgaggattttgcaaaaaaaatatgtgaaaaaataatttgccctaatctccttgaacagactggtcctgtagcagggggggatggtaaaactgacacacaaacataccctgtttcggaacagaataagctcctttggttcgaaggtgttaatgaagcatcaaataaagaacgttgggcctttgcggtaagtacacgtaaagactggaagaaaaaatgtcatgaagatgtacttaagataaaagaaacagagcgtgggtatactaaagtattttgcgtaacgaatcaatctgcaaagtccaatattcgttcagaggttgaggatacactaaaaacaaaaactggaatagatgtccgtatattagatattaattggctattagatcaaatttacaaaaatcattttgagcaattggtcattgattcattgtcagttccaacgcaatataaaagagaagttatttttggagaaaatgattataagaaacataaaaaatatgaagaattaaccgagtatattagagagaaaataaaccctgctgaaatttcatatgaacaagtggatatatttttagaaattgcagagttaagcgctgaacttgagaaaccactaattgaaacacaaggtctatttgaaagagctataaaaatctcaaaaaaattcgggactaatcaacaattgctagatgcgtattatcaatacgcctggaaatcccatttttggatggaagattttaatctcttcgaagaaaatcttcaattagcgtatgaaagtatagcatcatcaactaattcctcaaaatgggaaaaagttttaaatttagtaaccgttcataaaagttatattagacttaacaacgcaacatctacaatcgacattgagaatattgaacgtaacatgctcgccaaactagatgagatagctaacgatgattcacgtcccagtaatgcgctcacagcgagaactcacaaagccatttataaactgacaacgttttcagatgtagaagatgcttcggttgtatttgaagagttacatgaaatttttaaaaatagcgggaatttaataggctatccgtttgagaaaaacttccaacttttgaacgaactagatgacatttttttcgatgtagatgcatatgaaaatttattagactatatgactgagcaatctgctgttagaggtggtgaagttaaaggggcattattaaatctgcgaagaggtataaagaggcttcaaaatggtcacccttatcaggcaatcaagtatttaggaaaatcttttattccactctataaagaggaatcacgagataaatttatattagcattaaaagctattgcttatgcttacgaatccattggattactatggagttcacgttcatgcttgcttctatccgcttctttgattacagataacttctggaagtatgatgagatatctttaaagcaggctgaaatttattataatttatgtctaacagaaataaaactagggaaattagcacatgctcttttatggtatgaactgtttttaataattaacgagaatatcagtgatagctcgttcggcgataaagaaaatcagcaagtcgatttttacataagtcaactcattttgaacactgacctaaagggaataaatcgacagagtaatatccccgatgagctcgatagattaggcctttttgtatcatcgggatgtcttaaatatgctttaggttatattgaagattttgaacgtgagtacggagttactgccgataaagatcataatgatttcttgcaaaaaatacgtgactttgatacaggatttaatagtaagggcataaaagataaccatgacaaacgaggagtacatacatcttttatttttggatgcactatagaaattaactttccgaatcggtcaccatttatagagttttcaactaatgtcttatcacttttagagggtgcttttgcaacctgtacgattgacaacatctatcttaaagaagcatttttaattattgaagtaatagcagatgacgatgatgacttatccttatcacatgaaataaatagcaatagtggaaaactaaatcttacaataaattgcgctggttttgatgtaagtgattttagaatcgaggtacaacaaaaaatcactaataaattcaaagaattagtgttcaatcttctccccgagttattttttataaaaaatacagaatacattgaaaaaatgatcttcgaagatgctgcattcgacagagcaattagttttggtgcctgtatcaaatctattgaaaatgttcttggtaatgatattgatcaacaaattaagaaaatttattccgccagttctgaaaagaaaacttaccctcttttaagagataaatcctgggatagtgaattttcgaaagtgttggagatcgaggatataaaagctccaacacccggtaaaggaagaatgcctgaagaggaacttaatttcgaaaatataacacataaagattattccatacaaagtctaatcaaacctcgtctatgggatagaacacgctggcaaggagtaggtttcgctcaattaaaatcgtgttatccagggttatatctattatttaaacaccccgatataggtgaggatatttttaaagatcttatatcatcagtaggcttggtagatagtaaagccagattacgggtttgtattgtcaagggcatctcagttaaaaacccaactcattatagagtactaatatctgaaaatatgatgacaaccccattaactaaaagaatgacaatgatcagtagaattaatacgatgactcctgatagcaatgtcaatctagaaagatttcttactgcgtatcaggcctgtggaaaattctatcttggatgtgatgcgatgttaaaaaatattgttcctgagcatccacaaagagatagtttagggatagaaatgagtacgttagatgttaggtgggcttgggaaattgggttaaatgatgttgattgtattggggttaatttaaaagaagatgacccctatattcctaatgatgtagctgagatcccattattgcaattgataaacagtaaataa

SEQ ID NO: 285513 - DNA, 333 bp, Morganella morganii
atgaacaaatatcgtgacaaatcagactttgagattaataagactgtggctgagtgtaaatatggtattggatgtacagggaaaacccaaggtggtgacgtcatagtattcactgacagttttactgctgttttcgacccatgcaacaaccctgcggacgcataccctattatctttgaaaacaaaataaacattaatttcagggagtcaataaagaccggggtaatggcggaattatctggctggagtggagtttattcaataaacgaaaacccactacgcgccgctatggaggtattcctgatgatgaaggatgcggagaatgaaaaatga

SEQ ID NO: 285514 - DNA, 678 bp, Morganella morganii
atgaaagagcgcggaataattttcaacgctgagatggttcgcgccattctcgatggaaggaagacgcagactagacggattattaaatcagttccgacaactcacaacttccacggctggattatgtccagcacatgcgcgaaagatgaaggtaaagcgtgctgggctatcggtaattcaccgttactcaaagacccgattcgccttaaatgcccatttgggcaacctggtgatcggatttatgtcagagaacaattctctcgccttgaatcatttggtttctttgattccgcagttccttatgaggttcctgatttctggtactgggcggatggcgaaccggaatggggtaactggactagaccgcaatcaggcgcagtaatgccacgtaatgccagcagaatcagcctcgaagtaactggtgttcgcgttgagcgattgcgtgacgccgacgacatgaccctccttgatgagttgggtgacatgttagatgactgctacagcgtcgccgggcgggcatttaaccacgctgaacattacgatattgctggcatcgacgttggtatgatgccagaaatgcacgggtttaaagcgtggtgggataaagtaaatggcagtgggagtttcgactccaacccgtgggtgtgggttatcgaatttaagcagattcaggggtga

SEQ ID NO: 285515 - DNA, 756 bp, Morganella morganii
atgatccattatcacggcgggccgataacgcctgatacctgcgcgataagagcatggaaagctcgtcacgcatttatcagtttcgcccacccttcacagttaaatctcgcatccgaaatctgccagtcattcgcagttgataatggggcgtttactgcatggaaagcagctggccgcaacaaaattgactggtctgattattacggtttcgttgaaaaatggaagcgtcacccgcgctttgacttcgcgatcatccccgatgttatcgacggcggagaggaggaaaacgatgctctgttagcagagtggccacacggtgatttctacggtgtgccggtgtggcacatgaatgaatctgatgaccggtttattcgtctgtgccatgaatatccccgcgttgctattggtagttgtggggagtatgacgttcgacgtccaaaggcatcagtcgccaggatgaaagaccttatccggcatgttgtcgatgaaaacggatttccggcagcaaagttacacggcctgagaatgcttaacccgcagatatttactcagttaccgctggcatcagctgacagcaccaatgtggcacgaaatatcggcatcgataaatcatggtctggttcttactctccggcatcaaaagagaccagggcggcgttattggtggaacgtattgagtcgaacaacagcgccagttctctgaactactgtgaagagaaagaccgctttgactatcaactacaattggcggtttag

SEQ ID NO: 285516 - DNA, 123 bp, Morganella morganii
atgtccaaacaagagagcattgcaaaaatgttgaagcttgcaaaccgtctggatgaaatcgtcgcagagctgactgcaaaaaaagacgaaatgttcagcgaagcatatagcaaagcagcgtaa

SEQ ID NO: 285517 - DNA, 345 bp, Morganella morganii
gtgaatactgacttcaaagatgccgttttagttacggatgctcaagcctcgatcgaggaaagacagttaaacagcataaaaatgactgtgcaaggtttgataaactttgtgataactagttttgagcaattagggattgataagctgcatgagcttaccgacccatcacttgatgagctagcgcacataattcaagaattaggcgtagaagccaaaaagcatcaagacatcaatcttcagcaaacactattgattgctgaaatgttaattaacgacattaagatgaaaaacccggaaatgtgcgcgaatagttcgcatatgctgaaaaaagcaaacattttctaa

SEQ ID NO: 285518 - DNA, 1386 bp, Morganella morganii
gtgattaaccaggttccgcaaagcctcgaagctgagcaaagtgttatcggcgcattgctgctagacccacagggcgacagaagccagatggtgttatccagacttcagccggaaatgttttaccaggcatcacacaggctgatttacgcaacaatccgtgagttaaaccgaaccagtaagccggtcgacctgatcacggtgacttcagcactggaaggagctggtcagttaacactggcaggcggattctcatacgtagctgagataaaccaccggacaccaagcgcagccaatatcgtggcatatgccaatacggttcgcgataaggccgtagagcggcaggcaatcgagaaagccggagaaatacagcggctgtttaccgaagccagtgttctcagcctggccgaaaaaatcgacatggctcagacgatgctgtccgatgtggtggagagcagcaaaaccggccggcagtcaggactgacgaatatctctgccgtgctggatgaatgggttatcgaggtcgaggagcgattcaaagatcccgatgctaaccgcggcctgaagaccggaattgcgccacttgatgccatgcttgcgccgaagttcattgtccgcggatccctattcgttgttggtgcgcgcccgaagatgggtaaaaccacagtcctgaccgaaatggctaaaaacgtttctgattccggattgccggtcgcgctgttctcgatggaaatgaccaacaagcagctggccgaacggatgatcagtcagaaatctggaatcagttccaatgccctgtatgacagcggtgatgagtacgagtgggggcttatcagcaaggcaatgggtgagttaagtgagcgccctaacatctggctggatgatactcctggaatgacactggcacacattcaggcggaatgccggaaactgaaacgcaagacaggaaaaattgggtttatcggtgttgactatctgacgctgatgaaagcaggcaaagcagaccggaacgatatcgcatacggcgaaatcacgaagggtctgaagcagctggcaaaagaactcgataccaccgttgtcctgcttacccagcttaaccgcaaactggaagacagggcagacaagcgtcctatgccaagtgacagccgtgataccggacaaatcgagcaggactgcgattactggctgggtatctacaaagattcagtctacaacgacaatgccgacaaaactctcacagagctgattgtacgccttaaccggcacggtaaagcggggacagcatacgtcgagcagaaaggcctgtgcatgtttgatatcgatcagactcaggcgatggtcagagccgaaccactggcgcggcataacccaagacagaaggacttttga

SEQ ID NO: 285519 - DNA, 165 bp, Morganella morganii
atgactacagaacaactcgcagaattaaaacgcattgcactggaaaagctcgcagaggcagaaagagcggtgtattcctatgcaggaaaatgcggaggatttcgtaggattgaagcttttgatgcgtacaaaaaaatcaggcttgcgacacaactttgcagatag

SEQ ID NO: 285520 - DNA, 537 bp, Morganella morganii
atggcgaatttacgaaaagaagcgcgcggcagagaatgccgagtaatggatgtcgctgggtttgaaggccgttactgcgtaaacgactctggcgatgtgatttctgttcttaaacagaaaactctatctccaggcgttaagcccggaggctacgcttttgttgggttgtatccaggagggaaagggaagccgtcttatagaatggttcatcgcctggttgctgaggcgttccttcctaatccagaaaataagccggaagttaatcatattgacggaaacaaattaaacaattcactcgataatcttgagtgggtcacgcggagagaaaatgctattcatggttttgataacggacttttagttcacggctttcgtcatcatttctcaaaattaaccccatatcaggttaaagaaatttattcagcaaaaggcaaatatagggatattgccaaaaattatggggtatgcgctcagactgtctgcagcatcaaaagaaagtcagcttacaagcgatttctggagggggagcatgtttag

SEQ ID NO: 285521 - DNA, 366 bp, Morganella morganii
atgaaccaatatcaccttaagttgccgtggcctccgtccaacaacacgtactggcgacacgccagaggtcggcactacatcgcagaagaaggaaccagataccggcagcacatcacagagttaatcagacagcaaaacctcgatatcagcaccacatcccgcatcagaatcagcatcacagcaaatcccccggacaaacgacagagagacctcgataacctgccaaaggctgttttcgattcgctcactcacgccggtttctggaaggacgacagccagattgatgatatgcggatcaggcgtggtgaaagggtaagcggtgggtcactggatgtcacgatatgggagataggggatgaaacctga

SEQ ID NO: 285522 - DNA, 351 bp, Morganella morganii
atgagaaaagacagaaatattgacttgctttatagcgtttccactaattcattaagccaaaacgctgggttgctaattaatgcgttaaggaaaaataaaaaaataagcggtgatgttcttgctggatttattggtataagtcagcaacaaatatcccgttatgaaagaggtgaaacagaattaacactggagaaaataaaacaattctccaccttctttgatattagcgtatgggaattcatggatatgttatatttattttatgctggaaagagtgatgctcttcatgagatagataacattatattacagtcattttatgataggaatcagtggtgggggagggggtga

SEQ ID NO: 285523 - DNA, 234 bp, Morganella morganii
atggagacttttgataccgaacttgcaatgaacattatatcgcattcgacaggtgggtttagttacgaaacccttgctagggcattgatttcaaaagtaaaaactgaaaatactgaagttcttcttgagtgttgtagagccttttgtctttcgctggaggagcagggtatattaagacgatactataagtgctctaattcacaagaagagtacttcgagtatatatctcattga

SEQ ID NO: 285524 - DNA, 3165 bp, Morganella morganii
atgccccttgaagtaggcgacctcgtttactcgccttatggaatcggcaagcttattcgcattaacaatagtgatgctcttattaagtatttcgattctcccgtaaattatgaaggcatagagcaaattgtcgaagtaaaatacctaaaaaaagccgaactctatgcggaaagtctggtttatcgctacgactacgagttggcacactggcaattggcacgtgttgtgggtgccgtgcctggaggagtgcgtttgcatcttcctaacaagcagcaggaagacgtcagcttaaatgatatctttgtacgctgggatcgccctatcagcgatgctgcagcccttctggccgagcgcattacttatacccccttctggcaggatgctcgtctagcttatcagcatcagatgctaaaacaacgcaacgcttgtgctgggattacctcttcgttgtcgtccagtattgaactcgaaccttaccagttggccgtcgtacgccgggtgttatctgacccaattcagcgctatctactggcggatgaagtaggcttagggaaaaccattgaagctgggctgatcgtgcgccaacacgtcacggaaaatcagttcactcactgcgtggtgatcttggcacccaaggtccttcaccgccagtggcagcaggagctttccgcacgtttccacctaggggaactgctgaacgagtcgatccatatcattgatatagcagattttcgtgaggaaagcccgctgccactctgccctgatatgttagtaattgacgaagctcatcaggttggtgcttgggcatgggacgcagagcatgagcagcagtacgccagcgttaaccaactggcacaacaaagcgcaaaattgctgctgctgtcggcaacgcccgtgaccggtaacgaaaagaacttcctggccatgctgcatttgctggatgctaaaaattacccgctgactgacactggcttacagaaatttcagcagcgtatccagcagcgcgaagaaataggttcactgttctacgcgtttaactgtgataacgacaacactacgctggaagagaacttggaagcgttgatcagcttgtttcctgaggatgaagtactaaacgggatggcttcacagttgcttccccatttagatatgatgcagccgctgcggagtgaggcgcgtgatctgctgatcaataaaatccgtcactacattggtaaccgttaccgtctgcatcaccgcctgctacgcaaccgccgtagcaaccccgccattaatgttctgatgcctggcttgtccggtctatcgctaaaaaaatataccacggcgaacgccagcaacgacatgatgatcgcctggcgcgaatcggcaataatgatgcacccacaagacccgacgctggcggcaatttatcagttactgtttgaagccgctatcgctacgccggaactgctggcccggctcgcaaattgtcgtttacagcaggagtcacttggggccgcgcaaggctttttctatagtgattcacagctcgcgctgttgcaacatccgctgtttgatggtgagaacgaaatcctgcttgagctgatagaccgctgcaaaatggagcgtgacagcaagcgccagcgcttaattgaggtattggaaaaacttctggatagtaacgccagagaacgcccttatattgtggtgttctgtgatcagccatgggtagccgaccaagtatttaccgaccttatgataccatttattggcaaaatccagcgccataaccctgacaaagaagtgcgttttgccaagggaagtaaatgccagatcttagtgtgcgatcgccgggctgaagaaggtgtcaatctgcacggcgggcgcaaaattgcgctacattatgatttgttgctgtcgcctaaccgtatggaacagcgtcttggccgcttgaatcgctactgcgcgactgagagtgcgacttctgtcctcagcatggcactggtgagtgaagcagaggatctgcaaaatcagtggctgactattctcaatgaagtgttcgatgtcttcgaagagtcgattgctagcctgcaatatctgattgatgaggaattacagcggcttatttccaatctttatccgctgggtgaagaaagcatgatgcaactcagtgcgcgtctggctggtgaagatggccgccttacggtggaaaagcagcgcatcgaaatgcaggaagtcctgctgcaaattgatggcgatatcatcgaagccagagagtatgccgatgcactggcggatatagatgagtatgaagaggaattccgccgctgcgctcgtaatctgataggtaatgtactgaaattcgatttcattccagatgagaaagatccagcgatgttccgctattgcttcaaccctggtgagcgagggacgggcaccttagtcagcccacaacggctacaaaaacactgcctgctaggctttgatctcaaccaatctagcggaagttcgcccatgacctggccgcttagctactaccgggctgatacctctcagggtaaaatccgcccagctcgcttgggtgaacctttccatgatgccatcctacaaatgctggattttgaagaacgcggtgttgctagcgcggttatccgcatcacacccagcataggtgatgagaaaatttttttccgctacgattttctaattgaagctgaagtcaatacacctgcactgcaacgactggccgaccatttgatgccgcctgaaaccattaccctgtggctcgaccaggccggggagcaggtcaccaacgcagaggtgttgatgatacttaatgaagactataaaccgaaggataagggcggacgtcacataaatctcaatgaggaacgctgggcgcagatttcccattgcatcagcgctaaagagtggcgcacctggtgtaacgatagctatagcatagcccagcgactggcgctggaacagttcgctacacaacaggctctcagcctgagccgactggaacattatctaagcagcgccacgctgcatcatgctaaccatctggagacgaggcagacgctgcgccagggtattgcacagccgaaagtgacctgcttggcgacgcgtgccttaatcattgcatcagaagccatattggatgaggactcacaaatcggatga

SEQ ID NO: 285525 - DNA, 2568 bp, Morganella morganii
atgaatctgactcaactaattgataataatgatttttcatcaagattgagggagtgcctgctgccggatgcgaccgccgggcgcctcgaccgccgggcgttgatccgtgactggctgtaccgggaaaaatatgcccaccacaatgataacgaactgaccgtccctgatgacagccaccttggttggccaagacaggaggagtgggaagccagcggtattaactgtcaacgactaggtcagacctttctgctcagcgctggccctgcttggtgtccacagtggctggagcagggaaactgcatgccttttctcgccagcgatcagcaccaattctgtcgcctggacactcgagtaccgatggactatgtcctgcgccgttacttcaagaaggacagctatatcagctatcaggcaccgggccagcgcgatgcggtacgctgggctctgttcgctccaccgggcagtacgctgttggtcaatttgcccactggcaccgggaaaacactggtagcgcaagcattagctctgacagctccaggtcccggggcactttgtgtactgatcgccccgaccacagctctggtgttggagctggctctccgtttccggaagttactgattgacgcagggaacaaagcagaatcggtcaccggttggtatagcggcttaccggcgcaggataaatatgatacgtacatgcgtatccgtgtgggtgagcagcggctgatcgtcacctctcctgaagcgacctgcagttccctgcggttcgccttatttgaagcagcaaaacagggagggctgcgccatgttattgttgatgaagcgcatattgtcgccagctgggggaacgactttcgcccgcatttccagcaacttggtggcttaattcgcgggctgaagcgcatcagccgtgaagcgaatcttacaccgtgctcaacactgctaatgagtgcgactatcaccgaagccagccgtaaaatcctgcgcgataccttcgatcaggagatgagcgaagtccatgcctgccatctgcgcccagaacctgcttattggtgttatcgggcaaaagaccacagcgacaaacgggataaggtgctacaatcgctggctcatgcgccacgcccgctgatcctctacgtgacgcgaccgaaagaagctgaagagtgggcgcaacagttgcgtttgcaggggtatcagcgtttggcaacatttaccggtgatacaccgagtgaagtacgccgaagcctgctggaaaaatgggataaaaaccagctggatatcatgattgcgacctcagcatttggcgtaggtatggataaaaacgacgtgcgcacagtgatccatgccacagtaccggaaaacatggaccgcttctaccaggaagtgggacgtggtggacgcgatggctatgcctgcacctcactgctaatttacaatcatcaggatgtcaaacaggcagaacatctgtcctcacaaaagttgattggtcttgagttgggcctggaacgctggaaaaagttatggggcagtgccgaatcggtgggcgacaacctgtatcgtattgatatagagaggatccatagcggccttaatttccgcagcaaacaaaataaattatggaacttgcgtaccgtactgatgatggtgcgtgcaggagtgctggaactggatgccgatctacaaaacccgccagacaaaaaagactttgccgatgttaatcgctacgaagcggcaaaagagcaaatcatccgacagaacggaaactcactggtagtacgcatcctgcgtagtcaccacaccggagaagaattgtggaaaacacgtattatcccttcccgtgaagagacgctgcaagctgcaagggctaaccataatgcattaatcaactggctgcatacgccactgagcagaccgctgtgcgaggcacttgtggatctctactccatggcggaatttattccgggtcacgcctgtggtggttgccctgcctgtcgcgataatcaggcgtttactagtaattatccgagcccaccgacgctgttgcttaacccgccagcgtcggtggcacagcaggcgttaagccgctggcaggcgctcagcggcctatcttactccagttgctttatcacctatccgccagttaacgacgatgagtgggaacgtgagaactggtatcaccgcatcgcgacgctactggtgcaactgtatcatagaggcattgtccagcgcgtctgggcagatcctgccttgttgcatagtatatttagcgccattccgcgcggtgagcgcctgatcttgttgagtgacgaattgcctgcacgtgatgagccagcgccggataacgatgtaatggccgagttggcagagttggtacttcccactcaagagtcctgcgccaatggttacctgccgcctttcaacccagcaccattacaactgacgctgatcccgcatgatatgcccgatccccaccatcctggcggggcgcattacgttcttctcgataatcacaattggaccaccatcgaacaacttcaaaggaaactagacagtgtcgattatcaataa

SEQ ID NO: 285526 - DNA, 906 bp, Morganella morganii
gtgtcgattatcaataatgcccatggtggcagccagtatgccgtgctggccgcattttatcaggtgctgaaagctagcccgaagaaccaactatcgcgtgaaaagctgatggcgctctgtgcaccggaaacattgcaaaccggcgactcacaaaatgcacgtggtaaagcgtctcaggaattaagagcatggctggacttggggttactgacggaagaaaaagtagaagagacaacacaaatcagttttaacgcgaactatttcagcacaaaaagtatgccgctgcgccaggctgcgcgccgctgtttacaagctcaggaaaataacagtgacctgagctcacgcgatgaacgcgccgtcgaccttacccttttgactgcgttgctgctggcgctggatgtctatcagaacgcagaaatcaaatcgggcaaccttgaagtgctggtgaacacgtttatacctgattttcgtatcaacagtaatgaaattgctgtcgttccggggtatctcagttggctgggctttgctcaacaactcactcgcgacagttacgccattgaccccaccgattctattcgtgaagagttaccgttccttatgcgtgttgacgaacaactttccatcggcgaagtgctgcaacgtcttaatcgggcgctcccggtgctagatggtggcagttatcgccagcaggtcgaggagcgtatcagtctgtatggctggcactctcttagccctaaccgcctttccacctcgctgtcgcgtgcgctgctgcggcttcagctttccggagtaatcaatatgaaggctgagtctgacgccagcggcgcaatgcagttaaccggccggaacggcagcgtgctgcgtaccgtaacccatctgaccttaaatgatgtgggagtccactaa

SEQ ID NO: 285527 - DNA, 3048 bp, Morganella morganii
atgccacaactacagagctactggcccagcgagcagaacgttactgcctgcatcttaaccgaggctgagtcactggctgacagccagttgctggcggtacatgaaccgatgcgtctcgaccgcattgagtttcaaagtggtaaggtcacgcaggtaggagagggggcgctgctggactttctgcttgaacataaccgcccgctgccgctaattggcgcttctggcgtggggaaatcccacttggtacgctgggttcatgctcagctcaaacgtcgtgaagatcatgcgaaataccacattatccgcatccccaaaaatgcttctctgccacgtgtacttaccgccattttggaaggtcttgacggcgaggagtatcagagtattcgtgaaaaggttaacggagttggaaagcaattaatccccgaaaacgttgccgaacatattgctcttaaattgcgtcaagcgctaaatgcagcatatacagatgccattgaagagcttcgccaagaaaaaatgggaaaaattcagctggaagaaagcagaaaaaagcagctggaagaaatccaacaacacgcagcatcatcccaactgcccgcgctgttttttgacagcgtgatgacgcagtatttcactgctcctggcgcctgtcttcacaatatagcgcagcgcttctgccagggagctaacgacgacagtattgccaacttgcggtatgaaatgtctgcgcaagacttcaccttcaacggactggacttcaggcaggtttcaccaacagtgcttccctacctgcgcaaccaacagttgcttaccagtgatgaaaaaaagcaagcagcggctcgcgttgtcaacgtggtgcgcagccaagcgttagaagacaccttcgtcgaactatttagctttaaccgggccaatttccaggatctgatgcgtatgatccgccgacagttgctggcagaaggtcgcgacctgatccttcttgtggaagatcttaccgccacctcggcgattgaagatgtcctgatcgcctgtctgatagaggaagatgagtacgacggcaaaaaggttttatgtactctaagatcgattattgcggttactgagggtcacgatagctttaagcgcctacgtaatacactaggcacccgcgcccgctacgaatgggtgatccagcagcatgccagcgaaaacgatgctgctctgaaaaaacgcgttattgacttttgcggccgctatctcaacgctgcccgtcacggcgctgctgctctggaaacttatcacctccagcaggacgcgcagtgttatcaggagattcctgtatggcaggatcaggaggtgctggagaacgaatctgctgcgccagcgctggccagttttggcagcagtagcgttggtcatccgctgtttcccttcaacccagcagccattgggcagttggtagaacgacactgcaaagttaaagaacaaggcctggtgtttatcccgcgtaatattttgcatgaaattttgcgcgagccactgaaaaagtatcgccagaattatctggacgggcagttcccgccgtcacaatttgctgagattgtatgtaacccggcattacagcagagggtacgcctggaaggcctcagccagactgagcggattaattcactgctggctgtttgggggggaaatagtacaagcctggcaggtcttacgcccgccatctgtaaagagtttggtctgccggatgcgacagtactgttggggggcggtggaacgcccccggaacctgtaccgaaacctataccagtaccgaaatcagtaccggcaccaccatcaccacttgatgaatggaaactcgtgctggataaatggcaccagagcaagacgctcgagcaaaccagagcccgcgacattcgtaagtggctcctggaagcgctgaatgcccgtatcgactggtcaactgagcttatccagacctctctcatggccagctcagcaaaaactcagggtcggatccacttgcccggcgtgcttgtagggaatcagtcacatccgctggtgaagcttgaagatactcctgagttgcgtagcgcctgtctggcgatggcgcacttcaaccattatcagagttgggattatgacggcagtgagatcgactacgccgcctttcatagtttcatggattgcattgagcacgaagtaaaactcaaggtgttgcaggaagaacgcgaggagctttctagtatcatcaacgatctgcagttaagtggtgcattccttgggttggatggattatcaacatcccacccagccacgctggtgcaggcactgttaacggaaccgcaagtcgcaaacagcaaccatccactgctggataagttcttaacccaagcgcgcgataccgtgattgatgagcatctgaaacgtcgcgagcgtttaatcgcgcttacggcggcgaaaaaaccgggtgctcagcagccgtatgctattaacggcttaatgctggtggaggcgtctaagaaacaaccgctagacgctggcaaacaaccgggcaagatccatgaagtcaaaagtaagctcggtggctaccgcaccctgctattgaagacccaagagagcatcactgaacgcctaagcgacggcaacagcgccagcctggcagcggtgaacctctgcgacaccatgaaggagatagtcgaactggcgaatagcgcggacgtcgcccgtccaatgggtgaaactgtaccggtactgctgaagttgctgaagagctggaaagatccagagctgaaaaaactgatcagacaactggaaaaactgacgttgccagccgataactcgcacatgttgatgagagagatccttgccatcaatggcgagcagtttgaggcgtttcgacagttattagagacttggggcaagttcgaagacgccaccgacaagtatgtgcaacagcgtataagcgataagggcggagaccaagttgaggatgcagaaaaccaagttacagataccctggcaaacctggctgaacagttaacgctgctggaggtggacttatcatga

SEQ ID NO: 285528 - DNA, 792 bp, Morganella morganii
atgagtgaagtaaacatcaatgacgtggtaattcccgtagccagtgtaccggaagaacgcggtatttttgcacggctcagcggtgattttaaagcacgccttcaacgctaccaacaaatggagaaagctcaggatatccgcgataacctgctgcggatagcaaaaaaaatcgatactccgacccaaacactagcacaggccctctgtagttatagggtgttaaggcagatccgcgacgatgaaacgggtaagccgattgttggtccgtttgaccgtgcgacttttggcaatccacaaatcctgctgacggccttttgccagcagtacgcgacgcataaacatgatgttgagcaagagggtgaacttgccctgcttactcaagaaattgggcgcttagccagcgaactcagcacgcacaccaccgcggcgtgggttaactatattcgcggattaaaagcgcagtgggaagtggatcagagactgttcagtaacttggcgcatcaggaagggcaacgaaaagtacaagagcactacagtgatctcgtggaaaagttcaccagcagtagccgggggctgccgaaaaccattgaagaatttgagacggtgagagacctgcatgagaaactctgccagcaacgcggagcacttaagctggatgtgccagaagaggtcaatcgcttcctcaaagccgtagccgggcaaggtgccacgctcgatatgttgacgcctaatgtactcagttggctgactgaagaagacgacccgacgcgctatcgtataagacgcttgtaa

SEQ ID NO: 285529 - DNA, 4530 bp, Morganella morganii
atggaacagattattcgcgcagtacttgatgggctggagtcgcaggaggcggttctgctcacttggggtaacacacaaggttttttcactgagaccgagctccgtaatactatttctcaggtcctacagaaccacccgctcgacgccaacggcctaactagttttggcatagtgaaagttatgatcgatcgcggattgctgctgcgccaccagcaaaatggtgtttcggtgtttcgtacccgcatggcggaggcagtgcggctttacagccagttgcgccagatgtttcctaagcacggctttaatgataactggcgtactgcaccgacgttggtgtccgactatcgcttcttacgccgccagcgcaaatacccgaagcgtgaccagcaggcagctgaagttttgcagcaacttgatgaaatagcaggttttacctctacgcaccgccaactactatcagccctactcagccactcgagcggaatgtacaacctcgcctactttcaacaagaagcctgcaaaaacgtactgcgcggattgcagcagagccagcaccgctcgactgctaccattgtctgcgccggaactgggactggtaaaactttggcgttctatctgcccgctctgacctttatcggcagtgaactggtcgccaaaagaaaagacgcggtgaaggctctggctatctacccgcgcaacgaactgcttaaagatcagtttattgaaacgttgcggcagacgcgcaaattgaacactgaactggcaaagaaaggtgtgcgcaaagtgcgtatcgccgcattgtttggtatggtgccaactaataaagaggcgatccatcgcgactacatgaaagatgcctggtgcaggcatcgcaatggcatggcttgtctgtacattccctgcccgacagagagttgtcgcggtaaaatggtctggcacaccgccgattatgataaaaaccttgaacgcctgcattgcgacagttgtagccagaccatcgagcctgacgaagtgatcctgacgcgtaagcgtatgaaaatcgaactgcctgacattctattcactagcaccgaaatgctgaataaacagatgggtaacccgtttctggcatcgctgtttggcatcggcaaaaacgtagtcccaccgtcgatgatgctgcttgatgaggtgcatacctattccggcgtcagcggtgcacagaacggcatgctgctccgccgctggcggcatctgtccggtgccacaccgcactttgttgggctgtccgcaacgttggagcaggcgacgcgctttatggcttcgttaactgggctggaagagtacctggtggcagaagttagcccgattgaagatgatatggagacagagggcacggagtacatgctggctctacgtggcgacccggcgtctcgttcaagccttttgtccaccactattcaggcctccatgctaaccagacgtatgctcgacaacgccgcagtgccagtcagcaacggtatgtatggcacgcgcagctttatattcacagatgatattgacgtcattaaccgcctctattttcagctgctagatgccgaggggcgttactcgaacggcaatatcaatgccaaaaaagaaccgctggcgatgctgcgcggcgacgctccaaatgaagagaaatttacctttggtcagcagtggccgctggccaaaatgattggtcatacgctcgattccgctgaccggagcaacgttaagcgcacctcttcgcaggatgctggcgttgaccatgctgcggatctgattgtcgctaccgcgtcacttgaggtcggatttaacgacccgaacgtcggtgccgttatccagcataaagccccgcgcgataacgcccaattcctgcagcgtaaaggacgagctggacgtcaacgaactatgcgcccgtggaccgtggttgtgctgtccgactatggtcgtgaccgcatggcatttcagtgctacgaaaacctgtttgagccggtactaaaggcacgccaactaccggtcggcaatagctacgtactgcgtatgcaggcggcctttgccactatggactggttctccagccgtaacgagtatcttaatcagtggaatcgtggtatctgggatgacctatccgtcccgcagggcaaggggaagccatctgaagctcagtcaaagctggccgatctgattgaagaccttctgaacagccagaaaactcagcaggagtttaactcatggttggctgaagcactggggattaaggacgaaaaactgctgcagtcattgctgtggcaaccaccgcgcgcgattatgaccgcgtttcttcctacggtacttagaagattgcgctctaactggtcgcgccttggcattgagcaggcagataactgtcgcaaaagtacgccgatgcctgattttataccgtccgcgttgtttaacgacctctgcctgccggagttacagattaatctgctaggtgaagtcggtcaggaacccgatgcgcacagcatgccgattttgcagggtatgaaagatttcgccccaggtcgcattagcaagcgctttgccatcaaaagcattcgcgaatgccactggctagtgccgaaaaaactcgagctgaaagatggttcgcatccattcccgattgatgattactgcccgccagacaaacgagagtccatgcccgattgtcatattaccacccgaactggcatgcaagttataccttgcttccgcgcctgggaagtgactgccagcacgccgccagatgaccttaagctgagtgaaacctcaaatgcgtttcttaactggcacagcgagatccgtccacctcagggcggcatccctgcggaagtgccatccaacaatgtctggcaagatattttccagcaggtggagttttacagccatcagcagcactgtccgatcgaagccgtgcgctttgctaccggttcacgtgccaatattaaattcagcgaccagcgtgaagacctacagattgacttcaaatttgaacaccaagacgaacccgctgcgtttggcttctcgctatgggtagatgcggtaaaattccagtgtcggctacctaattttgatttcgctagcatcagcaacaaccgtgaactggtggccggattgcgcacggcgcgcttcctgtatgaggtcagccacgacgaggcaatctgtgttaatactttcctcggcggttggctggcagaaactgtcctggcaggtattggcagcgaagcagtattgaaaaactgcaccctggagcaggcgtttcgcgcaatggaacacaacagcgcagggatcgccttgattgacgttcctgcacgaatcttccagacgttgtatgatgtgcagaccggtaaagagatagagcaggatctacagcaaagcttgcgtgaactgttggcccaggctccggtgatggcaagaattgccgactgggtggaactgctgtggcaaccgctggataacacctggctggagtgggtgaccctcaacttcaccaacacgctgggtgcggccctgctgcaaaccgctatgcagttgtgcccggatgctgacgacaacgacctaatccttgacctcaatggtgggccggtgagcactgcgctgctcgcgcctgaccagcgcgaaatctggctgtcggaaaccacagtgggcggtggtggcatcattgagaagatccaacagatttaccgtgaagatccgcgccgtttcttcgaattgctagactttaacctcagtccaggcaactacgaaacaatggacaataatgtctggtacctgctgcaaaccatggtaaatccggtatcatccctgcctgcgtgtatgaacgaaatgcgccttgccaacaatcatgccagccaagttcaggcgcagcgcaacttgctgggaaaattacagcgcagtggctttatgaccagccacagcttcctatcggcgatcaacacccgtctattacggccggggaccgatgccagcagcgacgtctttttactacaactgcaacaggattggcgacagcaggagcagcgactgggcattgaactaccacagcgtgtctatgcctttacttgtagtcagtccagcgtgcttgaccagcaactacaacaagcgagccaagggcagcacaacttggagagttggcgtttaaatacctgtaatggcctactgtggccacgcggccataccattcgtgatagctggctaacttggtacaacccttacagctttgctggaccaaccgagcgcctcctgctggcccatgtggtgcagcacagttgtgctcaggtagacctctgccaaccagactggatgcagcagtgtcaccagcatctggaaaataatggcaaatgcgagttagtggccgaactgggcgatgcaataaatgaggccatcgcaactctattagtcaccccagtagaaatgtatgggttgttcttctacccgcgcgtcagtgcccttcgccgccataacaatgacaccttcgctatgattgaaattccggaggcgatccaatga

SEQ ID NO: 285530 - DNA, 540 bp, Morganella morganii
atgaatacccgtcgtatctttaaatccagaacctcacgccagagtgaagttcttgatgtactcagctccttgttggtagcggaggtcgttcagcctagcgcggaattgtggattgtctcgccgtggatcaccgacctcgacctgctggataatcgcaccggccgttttgactacctcgaaccggcctggggacagcgtcaggtgcagacctcagaactgctggcgcgtgcggtagccaacggaggtacgcttaaagtgataactaacgaaacccagcataatgcacgctttatccgacagttaaccgaacgcgtcgccaactacggcatgctgggtaacctgtacataggccagaaagaggtgctgcataccaaagggttcctcggagataatttcttcctaagcggctcgatgaatctgacgatcggcgggatcgtgatcaatgatgaacagattaacttgaccacagacaaaaccgccatcgtgcaggcgttgttggcgtttaacgacttttaccaaccggtacagggaggtgtgtaa

SEQ ID NO: 285531 - DNA, 2247 bp, Morganella morganii
atgaacaacgctaatagcgaacagttcctgcgaacctttttccacagagaaaacaatattatctcttgggaaaaaattgcgggtggcctgctagaagcatcaacccaacagcggttgaccccctggcttgacgatgtccgcaacggatgcttcccagtgatcctgccgcgtgtagtgaagggcagcaacgataaagtcacttggtatgcaatggccgatgaggaacgagactatgcggagttgcgcgagttactagacgcgcacgtcggtacctcgtggtctgactttaaccgccagcgcacgatgctggatccgagtgacccggtggaaaaagcgttgatcgaccactatagcgatagagtatataaatttagctcgctttctcagtcgaggatcccgcagattttcaatggcatagagtgcttgcgtcaacaactcgctagccgcccgagtcaccagttcacacttctacgcccgcgtggccgtattctgcgtgatatccgtgccgccttgcgtcgtcgtgatgtgccacagactcggctctatctgcaggaactacgtgaagctggtggtataggccatattaacgaactgtttatcgaactgcgctgcatggttctggaaggcgacgccaaaagcctgctggattcgactcagttgcgacaggtcttggatatgccgcacccgttggtgttggctgaagaagtgatgacagtcttctatcagcagtttctgctgaagtatgagcagttaagcaatctcacagcccagcgacaagcatttaataatttgctggtaaagaacgtaccgcgtctgttccaagtgacgcagggtataaaaacaccatcagcgatcaaaaatatcctactgtggttactttctgacacacaaagtgatccggcaagactgagagaacaggcacaacaagtagttgctggtatgaagatagcatcagacgatgatcatcgttgggtggggcagttgctagcatctttcccgccagtaggtgttccagccatgttaccggccagtattgatgatttactcactagggctgacgaacatccagaaagtgtgttggaagaactacagttgttgccgatcagcataagctctgtagctatcgctttaaaatgtgcttggattgtaggcagtgtagaagctgcgactaagggcattaattactttcatcagttatccgaacaggagcaagactcgctgctggctaaacctgctttccagcgttatcactcttcactagaagtgtttttacctgctacaaatagtgttggactcagtaactggcaggaatggctacagggggtgttggataacccacagtggccgggggcaatcgaggccgtagaacaggcatgtcatctatggtccgaagccgctttccagccagaagcttttgttacgttaatcaataaaagtgatagccgtgccagtatggtgatgcgggatgttattccgatattgctagcgtggttggataaccaccaagccagcgactcatggcagtcagttcgtttagcgttattgcagcaattgacactggatgacaacagctcatatgaagatatcttcattgccagcgatctgactcgtggatatttaagtagtaatagtactgcgaaagactattgtgagcttgtagaatatttaaagatgatgatcgaaaattcaggtacttctagcgcgagcgcttggctggatattctggaactgttcctgattcatcctactgctgatcaatctgctagagaaagcttattcaatctcgtgctcggtatattttatactaatcctgcccgttacagtactcttcagtggggcttgctggcactgtttgccgaagagtgcggtctgagttgtgatatcccaccgcaggtagtcgaagacggtaatgatcgattagaaaccgtttgcacaggagcaacactgaatggcaaggttgttggcatttatactctgactgattcagtggcggagcgcgtaaagcagcaactgttggatgaatatcctcaagctgatattcgcctcaataatgataaagggggatcggtgacgctgcgatcactggctaaaaatgcggatatctttgtctttgcttggctgagttccaaacactctgcttattacgcaataaaagaagagcgcggtgagaaaccatttttacagccttccggaaaaggaagcactagcatgcttgattgcattcgtaattatgttaaggggttgtaa

SEQ ID NO: 285532 - DNA, 222 bp, Morganella morganii
atgaataccaccgataccaccactgccttttccctgctcgacgaaccactcgtggacatgaaatttatcacccaatttaccggatcaacggacaagtggttttacaagctgatacaggaaggccagttcccgaaaccgattaaactgggccgctgttcccgctggttaaagagtgaagttgagcaatggttacaggagcgtattgcggagtctcagagataa

SEQ ID NO: 285533 - DNA, 1188 bp, Morganella morganii
atgtatcgatatatttgctcagaatatgacatttcttttggtactcttcaagctggtacttttgatattctgtgcaagaaagctatcaatgaaataaaaaacaaccagaaagagggtaaagttaaatatatttttgattatgttttcatcgatgaaagtcaagattttgatgagagcttcattgagctttgtgaattggttactgaaaagaaagtatttgtagcaggtgatgtattccaaaacatatttagacctatagatgatgatgtccgaaaagctgatttactgttgaaaaaatgctatcgaaccgaccctagaaacttaatgttctcacatgcactgggtatgggactatacgaaaatcctgttttgcgttggttgaaagataatgaatgggatgcttgtggatataattacaaacaacacggtaaacgggctattgtgagtcgagacccgctaagacgctttgaagatatacctgatgagtttagggcaacttcattaacacaagttgatgatgataacaaaattgcaaaatcaatttttaccattgttgaaaaaatcaaatctgagcatgaaaatgtttgtcctggtgatattgcggtactttttctagatacatctaaatatatttataatataataccagagttatcacatattatttcagataaatttggttgggatgtaaatatctcctatgaaagtaaagttaatgaccctagtaaattctttatttccaatataaataatgctaaagggttagaatttccgtttgtaatatgttttgcaatgaacttaaacaaaaaaacctcattcagaaatggcctttatacaatgatggcaagatcatttttagaaagtcatttagtcttaggaactaaagctgatagtgagttaattagtaaactaaactctggtctggattgtatgtatactaatggatacatggagttacgtgtaccaactgatgaagaaattgaaagccaacaagctgtattagtttgggatgaaaaaccaacaattgaatcactagttatagaatattgtgaagagcatgaagctagcccaaggctaaaagctaaacttttacaacgaatgacagaaattttgggtggcgaagaatatgatagtgaatactttaactctctgattgaaatagaatataagaggaatgttaagctatga

SEQ ID NO: 285534 - DNA, 666 bp, Morganella morganii
atgagtgtttatttttataatagcattcctaaatattatatggatagattcaaggccgttagaggatcattagataatctttttaatgttctccaggcaattgagattgttaattgttgccactcttgtaatgtggaaaatattaaaggagatttagactttaacttggcgatttttacaggtgacttccatcgttttctaatcagaaaagacgacggatatttctcaatggctatcccatttcaagtgattattgaaggtgaaactatttcatttaatagtgacttgctacaagaaaatgttggaggtcatgttatttccattttgagaaatgctatttcatctactcttgactcatctcattctcatgaagaagtcatattatctattgtagacaattttaacttaagtttcccagaagctttactttattacgatacgtttacatctttattagctaatgaccacggctactttaggtttgatgatgatgaagaacatgaaaatggccatgttcatcctcgttatcattttgatgttttttataaaaacacgagttccataaagattgggtatgacaaatatgacactttagattgtttttactcgttggtagataaaaacatacctaagaagtatttagctagtgatagtttagttttttga

SEQ ID NO: 285535 - DNA, 1167 bp, Morganella morganii
atggagattaatttttggcagtattggcctgttggtttatatggtttaattgttggtatcacattttggggtgcccataagattaaaaatttcagtatggactcaaagccactaactaaacaaacattattttggttagcaattatagttcctgttttttcttttttttattttggagcgttttcatggaatggatgtatatttcaatttgatatggctggttttaaaaaattcatagaaatcagcgcgttaccactagggttgctatcattatctattccttttacgtcggtggtgaataatattcatagaacaatacagaccaataaacaaatagaaacagttgattctaaaaatcgcattgatttattctatgcacatcagaaatacttcattgattacatcaggtcaattattccaccattatcaattaaggaatataaattcaatatttataacaataatgagagcagaggtaaggaaagaaaaataattactgtaatgactaatgtaaacattggtgtagctaattattttaaattttatagctttctattttgtgataaccctaaaaactctgaaagctataaaatatcaaaattgaatgtatcgaaaatagtcaatataataaatagcattgatgataaattaagggattttttttatggtgaacatgatgctttatattataggtgtcgcattggaataatgtatgatcttaatgttgaattgaataatttgtttgatatggtaggtatttgtaataatagtgagctactatacaataaagattcgtgtccggatataaatgacattggacattataattatttttttcaggaagaaaataatgcatcttatattaggataaaatatgagtgtggtaatggcaaaggtgagttaattactaatatatatagtgataagatgtactatattttattagcaaggtttattggtattttaaataatgcattgcagttttcagaatatgaacctatagatattcattattataaaaatatagctaatttattctatacaaataatgtaaatttcccgcacctaaaaactatattctctgtaattggacaggataataataactacaagtgttttacatctggcgaaaataaagttaggcttgaagatattgatgtccattaa

SEQ ID NO: 285536 - DNA, 1035 bp, Morganella morganii
atggggatcaggaagctggatggtggtgactggatttgcgatatccggccaaatggcgttaacggaaagcgaatccgcaaaaaatttgtcacgaaaggtgaggcgctggcctatgagcgttacatcatgggtgaaatgcaggacaagccgtggatagcagaaaaagaagataatcgccgggtttccgaactggtcgatttatggcattcattacacggtcgcacactggcagaccctgacagattattatcaaaactaaaaactatctgtgaagggctgaatgacccgatcgccagccaactaacggcggctgattttagtttataccgtgaagcccgtcttgccggaaagttgcctgatgccaatggcagaatcatggcggtaaagccccggaccgtaaatttagaacaaagtaatttatctgctgtgttcagtatgctgaaaaagctgggtcacatcacatatccaaatccattaactggattaccgacatttagaattcaggagagtgaactggcgttcctgtacccggaagaaatacaacggttattggctgtttgtgaggaatctcaaagccgtgacttattactggttactaaaatttgcctggcaaccggagcacgatggagtgaagcagaagggctgactgggagccagattacaccaaaccggatcacatatgtgaagacgaaagggaagagaaacagaactatccctatatcggaatcactttattccctgataccaagaaagcggggcaagttatttattccttgccggaaatcgtttgaacgggcagtggaaagggcagggattgaattaccggaagggcagtgtactcacgtcctgaggcatacgttcgccagccactttatgatgaacggcggtaatattttagtacttcagcgcatactcgggcacgctgatataaaaatgacaatgatctacgctcactttgcgcctgagcatctggaagacgcagtgacgaagaatcctctttatttgcttgaagggcaggaagttcatggagattaa

SEQ ID NO: 285537 - DNA, 567 bp, Morganella morganii
atgatgaaattagaaacgggtgcaaggccagtaattgaccgagtctgcgaggcgtatggtttcacgtctaaaagtcagttagctgaccatattggaattagtaaaggttcgcttggaaaccggctaacccgcgataatttccctcatgacattgttttgagatgcattattgagactggcgcgtctcctgaatggctttcatttggaacaggaaaagcttttaacacagcagaaactgacattgttcacttggatactttcaacttggttgatggaaaactacagctatcaatcccaacaatgtttgataaggttatgctcccgaatgtgtatcacaaaatagaaataatcaattatttatcagatagttattttatagaacgtcgcttttcatcaatcgacgaagggaaatggttagtcgaattttcaggcaaatgttcttttaactatttacagcttatccccggtaataaaatccggatggacggtggtaagtatccgatagattgcgaccctgaagatattaaagcgataggtaaagtaatcgcggtgtacgcgaggcagtag

SEQ ID NO: 285538 - DNA, 186 bp, Morganella morganii
atgcaaacaattaattcaatacagactcagccgcgctgggtcacttatactaaattttgcgaattgaccggaatgacgctgagaacagcaaaacactatgtaagccaaggaagattaaagataaaacccaaaaaacataaatctgaaactgtttttatagactggtgggatttcagcaaggattaa

SEQ ID NO: 285539 - DNA, 477 bp, Morganella morganii
atgaccaatcagccatccgaaaataattcagcctttgaaatcagttattccctttacctggaagaaatgaccggaacctttaatcgtcgttgtaaccagttctgttacttcatccagatgtttttaggcgcatctgttttcgcaaatgccagcttcggctggctgcttggcattgtgattgccttcatttccgcactacagttcaccatgaagttcggcgaaaaggccggcaatgcaaaagctcaatcccatcgttaccgcgtgttacttgatgcctcaccttcactgaccactgatgaaatactcaaacagcaacatgttattgaaaaagatgacactgccgttttaacatctttgtataatcccgcccgtaaacgcgcctcaatttctctctatggtcaggatgttgaatccgctcacccgctgaccaaatgggaaaaagctgtatcattcatcggtggcggcatacctgaataa

SEQ ID NO: 285540 - DNA, 132 bp, Morganella morganii
atgaatatccaatttcagcacaaattaaccggcgagtcagtcatgcgccattcacaaaaaaaacacacctgcgcggataaagtgacgctgattgtttctttaatcgcgctggcctttctcattattaagtga

SEQ ID NO: 285541 - DNA, 348 bp, Morganella morganii
atgcaacaggcttatgatatcggcgaaccacgcgcctttcctattccaatcagccagcgtacagatggattaaaccatattgcaaaattacgttctgagcatttcggcgtggaaaataaagaactggaaaaattctttaaagaaatgcgtgaccgttttgacccgatgtatcaggacaataaaaaattccttggcgttattttatatatggcgaatatcgaaaaggaaaaacacgattgtaattacaatgatttcagtagtcaggaaatatttgacattgtaaaagcaattaaccatatcagagcaatcagcgcgatattaccgaagcacctcgttttaccgcagtaa

SEQ ID NO: 285542 - DNA, 186 bp, Morganella morganii
atgattgacttattatctgaatcgatagacttagagcggattgatatgctgcttaagtttgctacatcgcctgagtgctcggagcatcatagagagaaaatattgatatggagctcagaactgacaagcgagttgatttctaaaatagagagtaaagaaaaagccccgataacttttcggggctga

SEQ ID NO: 285543 - DNA, 312 bp, Morganella morganii
atgagacaaaataaagtaaaattacgtgagttaacggctttatggaaaaataacatgcgcgtaatgaaagtaatttgccccgcctgtggtgctgatgcccggattcacaagcgtaatcaaaaacaccgtcaattagcagacatatactgcgcatgtactgatcttgagtgcgggcatacttttgtctcagaattaacattccgccggactttaagccccagtgcaaaaagtaaagaaacgcttttgcgtgaggcgctcggcggacttactgaaaatgaacgccagttcgcccttgaattgcttacaaattaa

SEQ ID NO: 285544 - DNA, 390 bp, Morganella morganii
atgattaagcaactcgcactgatcctcaccctgcttgcagcggctttcggtgcgggttggtgggtaaacgggctttatcacgacagcgtgcagttggcagttgaacgcgccgccaccgctgccggtgataaggcccggacagaatcgcaggccatttcccgcgagtcggcacggaaactggaagaacagttggagagcatcgccaatgctgcccccaaagaaatacgaactgaaattattaagcctgtgtttactaatgtgtgcgttagtcctgagtttgtcagcatgtacaacgacaccgccgccaaaatcggacgaacagtatcaggaaagcctgttgaccaaatgcccgggaacactgccggtgctgacgggaacaacgggaaataa

SEQ ID NO: 285545 - DNA, 270 bp, Morganella morganii
atgagtaagaaagccagcgtaatcaccttaaatattgccggtaacgatatccgctttgagccgaatatgattgcctataacggtttcattaatgaaatggccatggataacaaagttgccccggcacacacctatctgaaccgcattgtcgccaaagaagacaaagaagccctgggcgaactgctggagctgccgggtgccgcgttgcagattgcaacgacagtgaatgaccagtacgcaccgaaactggatatcagcgtaaaaaactaa

SEQ ID NO: 285546 - DNA, 540 bp, Morganella morganii
atgatttcactaaaattattatttaatacaggttactacgtggctaaattaatttatgtaaaaccaataaccatcaaaaatgctaattcttttatagcggagcatcatcgtcatcacagaccaacagcacgtaattctggtagatgggcactagcagcctatactataaataataatgacatggtcggtgtggttatagctggtaatccagtatctgcaacatatatggatggagttacaattgagcttacgaggctatgtgtcagtaaaaacgctccaaaaggaacgtgtagttttctattaagtagatgtagcgcgatatggaaaatgatgggtggagaaaaaattatcacttatacattagcatccgagtcaggagcatcattgcgtggagctggctggacccaaaccgccactgtcaaaccacataagcgatggttgaacaaaagtaagtctgatggtatcgagcgttcagagctgcacatatattcagttactaaatatcgttgggaaatgaaattggaggaattaagtgtatga

SEQ ID NO: 285547 - DNA, 966 bp, Morganella morganii
atgacaaataaatatataggagcatttagttccgacaacagagagatatataaggctgatatatataaagtaatgagtcttccaaatgacggagttattcactttagatacaagaaaaaatatgttgataacgacatattacacatgcaaccagaaaaatataaagaaaacaaggtgattatatatttaacccaaggtaacactgatgcaacatccagtgaaaatgaaaacctaacaaatatatcaataagggaagcagaaatagtcaaatgtttttatagcacagatacagatgtatttcatatatacttaaaacttagtaactttgtggatgctaaaataataaaatcattgtctggagatgagctacctccatataaattcctatcaaagataagtataacaaaaaacaaagatacgtgggtatccagagtaaaacaagttaaaaattcatttacaaccataaatttcttttttatcaaagggatatacctaaacgaaaaagaaataaaacctctggaaaaaaataaagaattattatcttctaaattaaaaaaagggaacacatataatataaaaatgtctctaggtaacccaaacgaaacaaaatcaaaaattaaaatcatagaaaacaataatgatactatcataaatcatattaacccaatagaaaactcagcacaatacgatgatataagcattcctatatatataaaatcaacaccatcatgtaaacaatcaacgtttttatctatacagccatttatagataaaaatgaatttagtgaagaatataaattaaatattgaattagaattatgtttaagtataaggagagctttaatatttggttttttaagtaccatagcctccatggcgataaccccttcaagtaattatattatttcactaccttgtatatttatagcatccgctggattattttatttttttggaaagaaataa

SEQ ID NO: 285548 - DNA, 351 bp, Morganella morganii
atgggccgctttgattctgatgattcattatttgatgtagatgatgttgctggtaaagtttcacacttggcccctaatcattttatgccttggcataagccacgtaagcaatatattcgagaccggcaatgggtagaacacctagtccgccttattagacaaagtaaatttaagcatgtagatacaattaattacttcggcttgcctggtggagatttgctcgatataaattatatacataagggcctcagtcgcacctcaaaatataatgtaaaaaacttggttttcatggacttatcgataatgttgatgactataataaagctcagggtgagtttacgaagctcctag

SEQ ID NO: 285549 - DNA, 2037 bp, Morganella morganii
atgatagactctgataatgcaatagagcaggagctcataaaaaatattagtaatggactatatcagtcaaccaaattagagactgatgataaggttctggctagggtcacggatgggatatataggcttcctggttcagcaataagagagttgatctcgaatgcttatgatgctgatgcagaaaatgtttatgttgaaactgatgttccacgttttaactctatgactatcagagatgatgggagtggaatgtcagttgatacattggttaatatgttgcggcatattggtgggagtgcaaaaaggacagataagggtattcatcttagggtaactgatggtgtggatacatctttaagtgctataaaaaaaagaaagttaattgggaaaataggtattggtttatttagtgtagcccagttaaccagagattttgaaattatcaccaagcagaagggtaatgatttctatcttagagctaaagtccggctctttaactattctgatgaaattccaagtaaagaaaaaatagatggagaaagagggaaaagttttcagaccggtaatgtcgacatatggactgagaaaactgacaatatcgatgctcatggtacggacattttacttcataacataaaaaaaagtgcacaggatcaattaagaagtgtagatgtttgggggcaaactgaaaatgaaacgatgcctgatgattatcaagaagatactctcgattcatcaaaagcaatcttacctgactttcatgtcggatatctttctaatgataaagatggcactccaacgtatactagtaattcagatagaaaaccatcactcccttgggatgaatcaacaagtccagatataaaatttttgaatctttatgagggtattttaagtaaaactaaaaatgcagtcagtccaaaattaaatcttattttagataactatctaaacatgatatggaccctcggtttatctatcccgcttaaatatattgaaaaacatccctttgagttaaataagtatgagattcctgacatttatgcattaagcaataaaagtaaaggacaagctgaaaatatattcgatgaaatagattcggaaacgcctataggcgatgcattaggatttgttgcgcataaaagaaaatatgattttaatgttattattgatggaataaaattatttagaccgataaaatatactgatcttccacaatcaaaagctatggtgaaaaaaccaatcatgtttgttggtaaatataagccaaatctgagtggaatagaagttacagattccgggggagaattagagtttgaagcttatgttttttggactccaaaagttagccctaaagatcacaatggttctcttataagaattcacgatgcatcaggaattctttttgatgaaacttttatgaagcatcaggttgcagaacatacaataaaaagccagttaactgctgaaatatttgttagtcggggattggattctgctttgaatattgatagggaatctttcaatattgcccacccacattatcaaatagtaatgagatggcttcatagtgctataagacaagtggtcaacaaatataaacagattaaaagagatgctcaagtaagtataaatattgataatgaagatgctttcactttatcattaaataaaattgttgaaaattcttacaagagcaatctcaaagaccctcatgaaagatccaatctcgttctccttgatgataatattgtaattaatgggagtgatgatacagaaatatctagaaaagatagtgatgaacagattgttaaatcaatagatgaagcctatgatagttttatcataacaaaatctaagttagatgaagtattatccccgataaaaagacaaaaaaataaacaaaaaaaccttatttcaaggtcacaggcaattttgcaaattcttgaatcttataatttactagtgaacctgactgttgaaaaacaagaacttttagttttagatcttataaaagtgttgagtgtggaggtataa

SEQ ID NO: 285550 - DNA, 402 bp, Morganella morganii
atgaatgaattattccgagcactatccggagttagtaataactggactcttcacatcgttggttctggtgatgaatctgaaatagtaatattaaaaaaattagctcatgaactgaaaatcagtgaaaaaatcatctggcacggatggcaaaaaaatccgtgggattatgtggaaaatgaaataaaaaacgtttctgcgcttattttaacgtctgcctacgaagggtttccgatggtgctatgcgaggcaagcagtatggtatttatattgtcagctcagactgcccgacaggacctggtgatattattcagccatataaaaatggtgagttatattctatcggagacgataaaaaactggcctgtatactgcataaaattgcagccaacgaaacaacagtaa

SEQ ID NO: 285551 - DNA, 210 bp, Morganella morganii
atgcataccgtatactgtccgctgtataacgatattgaagctcccaatatgaagaagagtaagacgatcacgggaggaaatataaataacagtgaattatttatcgctattaatcatatccctcatgaaaaattatacggtaaccagccgacctttccattaataaaactcacatttacacaaaacaatataaataatttttatcaataa

SEQ ID NO: 285552 - DNA, 528 bp, Morganella morganii
atgaaaagagtaattactgtgttgctcaacgggtggctgtgggctgtggtgttcttcgggttatggatgttcagcttactgtcagcagaacaatcggaaggccaacacaaagaccaggttatcactgaccagcaaaagctgattgataacgcctacaccagtatcgatatttttaatcatgccgctgcagcaaatgccagcaggaatatgcaggcagaagccaaatcacaggagaagcagattgaataccgcaccatcatccggaaagaacctacctgtaatctgtatattcctcagcctgtttctgacgggttgttcagccacgtctacgccattcgtgaatcagcaatgcgttccgctcccggcatcgctgacacaaccggtgctggcaccgctgccacccgccgactgacatattgccaggcggttgaatggatagagccgctactgacggcgttgggccaggcgaacgggcagttgatggatatacggaaaacggatgcagagcgtaatgggaagcctcgataa

SEQ ID NO: 285553 - DNA, 159 bp, Morganella morganii
atgccacggaaccctttaacgttaatcatcattgctatcatcctgctgacggcttgtctgctggcgggttgctatctatattcactgccgaatcactgtaagtcgctggtgggtaccccgctggacggcgtgattcattatgagtgtgaagcgccatga

SEQ ID NO: 285554 - DNA, 729 bp, Morganella morganii
atggcaacctaccgtatcgaccctgacctcgcgtttatcggtcagtgcagcaatgaggacctcggtctgctggtctccgtcctgactcacgacagtaaagacggcaaaaaacggctggcggagtctctgaccgcctcaccggaatatcagctcttttatcccgaccatcagaagtactggccagccatctgtgccgaactgcaggccttcggggccaacagtctggtcacgctgctgcgcggcaataaaggcgtgctctaccgtgaaattctgcacgatgtctgcgacaagctgaaagtgaactacaacaaagaaagtccggtggaaaccaccgagcttaacctgctgatgaaagtactggaaaagagtctgcgggagatgtcacaggaggacctggtccgttttgcggacgggctgaagctgaatctgtccgcaccgactccccagcttatcctgctcgcggtgcaggccgccgtcaccagctccggtgtcgcagccctgcagtttgccacgattgccgcagtcggggtgattgaggccatgggcggtattgccacctgggggacgctctttgccgccaaccgggcgctgggggtactggccggtcctgtcgggattgcgctgagctccgcctggctgatagccgatatcgcgggccccgcttaccgggtcaccgttccggcctgcatcattgtggcgtacctgcgccagaaggccctggcggtctga

SEQ ID NO: 285555 - DNA, 225 bp, Morganella morganii
atgcacaacatcgccaacctcccccaagacgaaaaagacaaaattaatgccgatttagccgcatccggtatcgcgtacaaagaaagactcggactgccgtatgatctgtacgaaacagaaaaccagcagcccgagcatttacgccagtacttcagagagagactggagcactacagggagatcgggaaaaggtttccgcgtgggttcgagtatgaaaaggagtga

SEQ ID NO: 285556 - DNA, 615 bp, Morganella morganii
atgagcgtaatgatttttcaggcgggcggcgataccaaaatctggggacgcaagctgagaacgaaaactgtggttcaggatgatgtcgctgagcacttggcaaatggctggtataagcaccctgacgatgttcctgatgagccacttgttggtgaccaaattgggattgttggcgtaggcgcaaattcaccagttgatatgggcgaagtgtccgacggttatcacacctttaacgagctttacgctcaccgagtgcgcctcttctcatcactgatgcatgcttacccaggtctttcttggtggtctcgcaaacacagcgacggggaagtgtgggacggttggattattgcaggcatcaccactccagaaggcgaaatcacttaccatctacctgttgaagaaatcgagctccttcctgaaggcactgagcttgaattcgggaaagagtgggatggtcatgaagcaaatgatgttcttgaccgacttctgagtttgcgaccggctattgcagagccagagccagagccagagccagagccagagccagagccagaaaagaaaccgcgcaccccacgaaaaaaggcggtgaaagatgcagatactaacgaagggtga

SEQ ID NO: 285557 - DNA, 780 bp, Morganella morganii
atgaatacatttaatatgaaaaccccgctggcgacactggttaccctgtgtgccgcattctccgcggtacaggctcaggctgatgcgggctatggatcatcatctgccgaaggcttaagtaactatatatctgtcggcgtaaccgctgcatcagagcgtcaggggcatccgtcaccgggcggagaaccgggaattggttattccggcatgcacaacggaaccaaagtcagctttgccggactgcagggacccaaccgtgcaacaccaaacgataacggtgtttctgttatcacctcaactccgcagtcacaccgcagtatgggctcttttaattttgccaaaatagccgatgccgatatttattacggtgaatgggtttccggtactgatttcagcgatgattcccatatggtgtattacgccgggaaagatattaccgccgccatgccatccgaagggacggcacagtacagcattaaaggactcagcgggtacagcagcggtgaacagatcagcggtacatttagtacggattttgatgccaatacctttagcggctctctaagctcaaccgagctcagctacagcctgagcggggatatcagtggttcaacctttgatggaaccgcatctgtcagcaccaccggtaccgataccacagccgtcagcggtacgaccaacgggcatttctttggtgacaatgcacagcaggttgccggttatgctgagttcagcagtgataaagcgaagaatatcgcgttcggcggaaccaagtcttaa

SEQ ID NO: 285558 - DNA, 672 bp, Morganella morganii
atgttatccagtccggtttctgaccagtactgggatgcactttatcgtgaggaaaacttgccttttcagcaggttgcggttgtaaccattgccggagaggagcaggtcgtcgggcttctgagtgcgattccgttttattttccggaagatgcaccgctgactgatctgccggatgagggctgggatgcggtgctgacgcagggggcaaccgatacccggaaaccgacatttgtatccgcactgtcagtgaccgttgacccggattttcgcggacgcggtatccctgcacagcttatcaccgcgctgaaagcggccgttgcacaagccgggctgaagggcgtggtggttccggtgcgccctacgtttaaggcacagtatccgttacaggatttcgcggaatattgtcagtggcagaccccgcagggtgagccgtttgacccgtggatccgcacacatgtccggctgggcgggcagattatcaaaccggctatgcgttcgatggatattacatcctccgctgataactggtctgaatggaccggcatggcctttccgcacgccggtcagtacattgtgccgggggctttggtaccggttcaggccgatcctgaaacggaccgggtcatttaccatgagccgaacctgtggatatatcatccgctggctgaatag

SEQ ID NO: 285559 - DNA, 213 bp, Morganella morganii; identical to SEQ ID NO: 284170

SEQ ID NO: 285560 - DNA, 354 bp, Morganella morganii
atgaacaaatatcgtgacaaatcatactttgagattaataaggctgtggctattgcaaacggctataaggttatgtcgtgtgaagaatcagtattggcctatattgatagcggatataagccattcgatccatgcaacaacccggcggacgcaatgccgattattattgagaataaaataacagtaatgtatgacagcattggtaacacatggtgtgcgcatgctggttctgttatggatgattgtggctgggattataaaatagcgcctgagcactatgcggacagtgataactattaccgcgccgctatggaagtattcctgataatgaaggatgcggagaatgaaaaatga

SEQ ID NO: 285561 - DNA, 243 bp, Morganella morganii
gtggaaaataaatgtgtagttattgagattggtgctggtgacaaagtattttcaaccattgattataaagatgaacaatgtgttggattatcgatatctgaacgaaaagataacaatcgtgatatcggaaataaattcacctacccggaaggcacgacaattggagaccttgagccaatcattgttgttgtaacgcagaatatcaactctctgatagctttgcgtgaccaggttgatgtgtga

SEQ ID NO: 285562 - DNA, 285 bp, Morganella morganii
atggcaatagttcagttttgtatagctggcggtaaaggcgaagacccgtcaggaattaatgaaaataacctctatgaattaccagatgatcataacttcagcgctgatgatgacgacttcgaattctgcattgaagcatgtgcagaatattatcacgctgactgtgacggatgggaggatcaatggccgttgctattcatgctgtggattgacgaccaataccttggcatgtttgaaattgagcgtgagtttgacccggttttttcagttgagaaggtggaatga

SEQ ID NO: 285563 - DNA, 336 bp, Morganella morganii
atggcgtttaaaggcacaccggggccgtggctccgcatgaatggaactgatgttttcacagggttaaattctacaaacgcaagcggaattaaatcagacaaaacagatggatggcaaatagctgattgttctgttggaaaaacattcgtagatggtgaatatgttgagctgagcacaagcgaacaaattgctaacgccagactaatagcggcagcaccagagctacttgagcggttaatcctgctgaggaataaaatagctggctatcatcctgacgacgatgaccatcttgatgttgtcgacgcagtgatcaacaaagcacttggccgcgaatag

SEQ ID NO: 285564 - DNA, 162 bp, Morganella morganii
atgaaattagaaaaaggcaaagtttacagaatctcaacggatgcactggattggtatcacgcacacgaccgcgctgagtatcactcgacctttgcgcgtgaatcagatggcgagccgctgcatcactttatcatcagtttactaccggcgaccttgaaatga

SEQ ID NO: 285565 - DNA, 189 bp, Morganella morganii; identical to SEQ ID NO: 278013

SEQ ID NO: 285566 - DNA, 186 bp, Morganella morganii
atgatcactcataacctacatactattattaacgcagataaaattattgtgcttgataatggaaagattattgatacaggtacacacacccatttattaaaccaatgcccaacctataaaaaattatggaatgattatagttacactattcattggcaattaatccaggagaataataatgattaa

SEQ ID NO: 285567 - DNA, 798 bp, Morganella morganii
atgacgacctggcgtacgtggatagctaatgtcagacaaggtgacgtatattttttacttaacaggctggcgcactctgacccgaccgctcttttttatcatcataactggattgatgaggctgttccgctgtatgcgggaacgccgttatcgcatctgggcacggcaggtccctggcttgtcagggcaaaatggcaggcgttctccggtatggctgaaatcctcgataccgggccgttttcagatgacagctggggatgggcttatcacagtgaggatagctgggaaaatcagatagcacactggcaaaagtatcagctgataacgtttgaaggggaagagcgggttttgcgtctgtttgatcccagagtagcagctgtactgattccggcctgtaaaccggcggactggtcatctctgctgaggccgctggctgattgctgtattccgtcctcacagggggacagggtcgttaaccgcctgccatccaccggttattccactgtgccgtcacgatttgaaccgggcgtacatctgacgcaggcatggaaccggtctgagcaggcccgcaggaatgtggcagataattttcagattaccttctgggaagaatatccggagttggcgttaacacttgatgaaccgccgggacgtcttttttctctgattaacaactgtatggatgactatgagaatgaccttgtggatgtcgtctggctgaaaaatgatatgtttatccggtatctgaaaaacaataatcttatggaaaattattcagggacagtcaatgcaatctga

SEQ ID NO: 285568 - DNA, 1941 bp, Morganella morganii
atgcaatctgaaaatacaggatccgtacaacataatgatcagtattgtacaaattgtaatgcccgtaaggcatggattgaaatcgttctggttgatgagctgaatcgtccggttgccgggatcccctataccttagccgtttcaggcggagaaacacgggcaggaatatccggtccggacgggttgatacgggaagaaagtctgccgctgacatccgtgatattaaaaacggatgcacagaaactgacagatgaaatggaaaataggtcactgcgtgaagggcgcggggcagagcattcggatgtaaaaaaactcgctgcacggaataaccacggttatcgttatgcggttatcggtgagttatgtgaccgggcgccggatattgaaaactggaacaaagaagccttcggtttaccccgttatcactttaaaagcgagaccgattttccgggaatacggttttcaggtaaagactttaaccgccgccatattattgaaatctgcccgttcagagcctggtcactaattctgaatcatacaacgatgtatgatctggtgaatgcccacaatctggcgtttctggcactgatggcttatcaggatgaaattatgctggacccggatgaggcaggtactgatatgcgaccatccctggatatcaaaaatacggtaacctcctttttctataatacctgctttgacctgtctgatattccgtcatatgaggaccaaaggcggttttatggcattgcgacagatgttccgttccgtgagcgctattatccggcggtattcctggacagttcacaatcagaaaacaaggcatttttcgagcacgacacccagatgttttttgtggagaacaacactcagattattgctgcctggcggggaacggccggaaaacgggacctggtgaccgatgcctcctaccggccggtgccgtattcgggagtggacgattctgaagccaaagcccattacgggtttttaaatgcctatcggtgtatggagaagtattttgacaaaaaattagaaaaaatagctagagcagccgataagaaaaaattatttctttgcgctcacagtctgggagggacagcggcgttactgcatgctgctgatttacggcaaaacgcacctgttgtttacacttatggtatgccgcgtgtctttaccaaaacagcggtaacagctctcaaagatatcaatcatttccggcatgtgaatgatgccgatgcggtcactaccgtgccatcgaacaccaatatggataactggttttttgaactttgggggccatttggggtgatactggggactgcctggactattgccactgcaccaaccctgccgatacagaaattgttgccggagttcggagaggctttctggcaccacggcaaaactgtctcattttttcaggccagacaaattggtgaggcttatctgcccgcaggtaaaggttcggcaatgacacgtgcccgctggcgatttaattcaggatataaattttatctggtgccggatatccggaaagacctggatgaggacttaagacaacagcagaaataccttatcagtaccgttgataaaaccgtactggaaaagattttccctcagcatactaacccggaccttgacagtgtggtattcagttttctcgaccattccatggtcagtaactatatgtcccttatcagtaatcaggtattgagacagcttgatgaaaacaacacaccgtatgcaaaaagaaaacgggacgattttatttcaaaaatagactacagcgatgcctatccgccgaacgtggcgcgaaataatacctttattcacctggaaagtgtcctcggtgagctgtttaaacatcagcacagtaatgcggtcagccagaccgcactgacccggtttacggagaaagtccatgagtttacaaaatag

SEQ ID NO: 285569 - DNA, 813 bp, Morganella morganii
atgttcagcattagtcaggcatcagtcggagataaaccgatgcgcggattatttgttccgctgttattgttgccggtgattctcaccggctgcgcttacagcactacgttatccccgccgtcagacagccggaatattcatttttctgctactgttccggttgatttggaatctctgccgttgtcggccatgtaccgctcaaaaaaatgcacccgtacccgaacaagcggcagcggtaaatcctatgaagttccggggtttaacagtgccaagtatccgctatccatcacagcaaccggtgatgtcaccgccgatattcccgttaatggcggtggatattgtgactggcagctcagtaacattaagtttgaagtcaggctgaaaaatccacaaacaattgaatctggtattacagataattttggatttaaaactgtatttattaccgataataacgctccgcaggaatttaatggcggatatatatctcataagggagactttaataggtcattgctattatttccatttgttagcgaatttttccttggaggacataaaaagacagttgagataattggagaaagcgatatgttgacttatcgcttatctggcacagacaatattaatattatggtgagctatgaaagaaacatggtgagccgttggactggagtcaaagaaaaaaaagaaggaaacaaaacagttatcacttaccctgatggtgaagaagaacgaaaatccaaaagctatcccgactataaaaaactattaaaaatctatgaagagcggaaaaatcatgttcagcgttaa

SEQ ID NO: 285570 - DNA, 1182 bp, Morganella morganii
atgaataataatcttgacatcatgtttaatggcacggaaattaataattacttatcgaatatagttaatactcatatggggttatcattatttttacctagcgatatagataaggataaaattgataactggctagattcttttagaaatatatatgatttttgccgtaagtccaaggttgacttaatggaggcctgttcatgttcaatgaaaattcacttccgtagtgacaaatgttctcttgaggattttatcggttcatacctaatattaatcaggtatataaaggaatattcctatatatatccagataattccttgagtggagagatatctattctcatggatcaatttgatgagcaaagagattttttcttacaccttaaaaatagatcacattattacacacagtatttttatattaaaaatatttttgaccgaaagatcgccgagcattacacattaaaactaaatagagatattagcacagcgaatgatttatttaagaagttcgatgataactatagcgaattcgatttaaaatactcccgaatatctactatggtagagtataaagataatgttattgagcataaacaccaagaatttatagaacaggttgaaaatgatataagctccagaatgaatagactcgaggagcttaaagaaacaattataaaattaacatcagaatacaactttgctgctttaaaacaaggttatgctaatttagcaaaacaaaaaaaattcgaaaaaaagatggctgttctttgcatgttaatttttggattaatggctattatggctgcatcaattaaactactgagtttgctcgactttctccccattgaaattattttttctgacagagaggataaaatcattttctacatatcaatagttggccttacgattttatttttatacttctttagaatttcaatgattaacttccataatgttaaatcagagttgaatcaaataaatctaagggtaaatctgtgcatgttcattgagtcgtatatagaattcaaaaaagaccaggaagataaagaactaatgaataaatttgaaaacattgtattttcaaatatcacttctagtaataaaaacaatatcagtgcttttgatgatttggataaactgataaaactaatacaggcagtgaatcctcaaaagtga

SEQ ID NO: 285571 - DNA, 2142 bp, Morganella morganii
atgcgccgattactgagttcttaccctgtcgttattacatctgttttttctgcctctttgctgtctgccccgcctgtttcagcggaaccggacgatgtggtgtatgtcactgctgcggatgatgttcactatgagccgcgcggttatggttccctgcgccagtcctcagcgacaaaaggctctgccgcactggcggaaacgccgcagtttgtatcagtgatccgccgtgatcagctcgataccctgcccggcgaatccctcagtaaagcactgcgctacagtgccggggtaaccagtgaaaaatacggtgctttcggcaatggtattgatttttccaaaatgcgcgggtttgatgcggattattatctcgacggcctgcgggtcgcgggtaacagcgggatctggggggcacagattgattcctggctgctggagagcgtcgaagcggttcacggcccgtcgtctgccctgtatggtcagggcggtgccggtggtgtgatcaacatgcagtcgcggctgccccgggcggaggaatcccatcagattcagtttcagagcgggaattatgataacaatgcgctgcgctttgacagcaccggcgcactgaatgaggatgaaacctggctttaccggatgaccggctcggcagcatcgtccggttcacagattgaaaatactaaacagtcccgttacctgatagcgccatccgtcacctggcagccactgaataatctgagctggacagtggccggtgtctatcagcatgatccttatgtcggttactacaatacccttcccgccgctgccctcggcctgttgccgtcgccttacggctctttggacaggcaccgcaactacagtaatccggatcatgaaaaatcgggccggacacagcaatccgtcacttcactggtcagctggcaggtatctgattcactgacactgaaacagaacctccgctatgcggatgtgaaaacgcatatccgccgtgattttacgcggggatttgtgcaggacggacgtctgctgaccgcggtatatcaggattccccgtcccgggccagaaccctggcggcggataatcagctgatttacaaaaccctcaccggcccggtatcccatgaaattctgaccggctttgatcttcagaccggtaagctggataaggactggtcaggctcgcaaacggtaacatttgacccgtacggttctcactaccgcccgcagtttacgccgcacatgacatcatccacttccaccggacagacttaccagcgctatggtgtgtatatgcaggatcatctgcgctggcagcaatggagcctgattttaagcggccgttatgatgattcgtcactgaaaaccaccaacaatctcagcggaacaacacaaaacagtgatacttcggcatacagccaccgtgccgggctgacctacaccttcagcaatggtttttctccctgggtaagtatctccgacagttttgacccggtactgggaacagacgcggacggcaaagcatttgtgccgacagaatctgaccagacagaagccggggtgaaatatctgagtgataacggcgatattatggcgagcctcgcagtctatgagctgacccagaaaaatgtcaccacccataacccgaaaaacccggattactataaccagaccggcaaagtccgctcccgcggactggagtttgagagccgcatggccgtgacaccgtcacttaatcttatgctgggttatgcctttaccgataatgtgatcacggaatcggatgacaaatccgtactgaataaacgccctgttcaggtaccacgccacagcggctcactctgggcggattaccgatttcagggccgttatctcgacggcgcgctgatcggcgccggtgtccgctatctcggtgcgactcagggggataacaccaacagctttacggtacctgccgtctggctgggggatgtcagcctgcgttatcagatggacgcgctgacaccggaactgagcgggatggagctgggtgtcaccatcagcaatatcgctaatacgtcttatgtggcgggctgcaccagttccacttattgcagcattggtaatgatcgcaccgttgtcgccacccttaactatttcttctga

SEQ ID NO: 285572 - DNA, 561 bp, Morganella morganii
atgacatttttcccgttactgaaaaaacggataattaccggtcttattccggttttatttccgctggcggcatacgctgaatgtctgccggacggcatatataaaatcagccatgtcacctacggtaataccgcaacaatatttactgatataagtgaagaagaaggctcacaatatttcaaacttaagcaccgggacggtaaacaaatattttcggcggggagtgttacgtcagaaatccgtccggcatcagaaacacaatcagaacaggttgccggtatgcaaagaacactctttgcaacaccggagggcgccgttgaacgttgtgcggtacgtatcgccgggcaggatgaagatattctgctggtacagctgaatattcagaatctgacaaaatcagaagtgatgaaatccggcctttttgaacaggttttttcatcggccaaaactgtgggtaatgtccggacaatagcaaatacccgctattttatttattaccgttttgtggttcccggcgccaccggcggaattttgcttgtcccgctgaaaaaaataaaataa

SEQ ID NO: 285573 - DNA, 315 bp, Morganella morganii
atggcgtgggtgtatctgcttgccgcatcactgtttgagattgtgatgggcatttcgctgaagctgaacgatggctggacaaaactgaccgccagtgtactggcggttgcctctgccctgatcagtattttcctgctggcacaggcactgaaaacgctgccgcttggtacgacctatattctctggacagcaatcggggctattggtttgtgtgtgaccggtgtgctctggtttaaagagccgttttctctgcagcggctgttttttatcacactgacagtggccggggttatcggccttaaactagtaaaataa

SEQ ID NO: 285574 - DNA, 672 bp, Morganella morganii
atgacagtatcaaaaaaaccggatatcacgttttacactgccgataccccgaacggcctgaaagtcgccctgttcctgcatgaagcaggcattccgtttgagcggcgttttgttgatttatctgccggtgagcagcatcagcctgcctttctggctatcaacccgaacggaaaaatccccgccattgttgatcacacgacgggtatcaccctgtttgaatccggcgctattcttacttatctctctgataaatatccgctgtttaagcctgattccctgaaaggacaatgtcaggttcagcagtggctgcatttccagattggcggtatcgggccgatgatgggtcagctgtggtggttcctgcacgggtcaaaaacccgtaatgaggaagcactggcacgttaccgcaaagaggcactgcgtctgcttggtgtggtggaaagacaattgcaggtctcaccttatctggcgggagaaacttacaccatcgccgatatggcggcattctcctggttacgcacctggcatgagctggatttggatctctctgcattccctgctgtgatggcgtggctgacagcgttatctgcccgtccggcggtgaaagaagcggttagtgtgaacacgatacgtgacggcgtcacatttgttgcgccggcaggaaaccagtaa

SEQ ID NO: 285575 - DNA, 444 bp, Morganella morganii
atgaccccgaatctgcctgatccctggtttgcgtttgtccgtgctcaccggctgctgatccgcaacattgaagctgcattgtcacaggccgggctgccggtttatgcctggtatgatgtgctgtgggggttggaaagcggcgaaaacggcacacggaggatgaatgaactggcggatgtgctggccattgaacgttataacctgacccggctgattgaccggctggaaaaagaagccctggtcacccgctcccgctctgacagtgaccggcgggccgcttttgccactatcacagaaaaaggcagagtactgagaaaaaaaatgtgggcggtgtatcaggaggtaatcaaaacagatttcctcagccaattcagtgaggatgatatctcccggatgactgcgctgtttacggcggtggccgggaaagcacaatcagcagaatga

SEQ ID NO: 285576 - DNA, 777 bp, Morganella morganii
atgcaacaagagattgatagcataaataaagaaggagatgtcaggtataaatacaaaacagcccctggtttttctgatgccaagaaaaaaaaagaagaacgattttcttataataagataaattatgatgcgcaatttagtgacctttatatttggaagcaaattttgcagcacgttaaatctaatgatattaaaaaagttatttatgtcacaaatgatgaaaaatttgatttctattacgaaataaatggaaaaactcgtggtccagttgagtcactggtgacagaaatacgaagagaagcgggtgtcgatattttttttctgcacaaaatagaatcatttttacatcatgctgttatatcactgaatgtagatataaatgaagaatctatagttgaacttgcatctgctgctatggaatatcgtgaggataaaaataatactgtaagagttacaacgagggaaaattattatgatattccattctctagttttcctaaattagacataaattactatgacacttcaaaaggctttgtggttggcaaattagaagagttgaagaatacaaagaatttgatggagaatcaatgcatagaatatgaaaaagcacttaaatacttgtatgctgatctgtcgtcatccattagccaaatggatcgtgataatatagaatttgccatagaagatatagaggttagaataggcgcgctctcaaatcagctccgtgaaatagcattgataattgataagtacataaataacacgagtttttaa

SEQ ID NO: 285577 - DNA, 846 bp, Morganella morganii
atgaattttttaaaaccaatcgttcttcttgaaaaaatcagcgagttaatgtctgaaggttctgactgtcttaacaaacaggtaaatttaacttataacattaaaagtgaaaatgattattacgatgaagaggtccatatggggaatttgtattttgaatcccttttagaacgcattaatatttcatttttagctttaattgaagctatgcaactatcggaacttctgaaaaattataaaaaggacttcacaaagcttgatggtaagtatactagccttagcttaatgccttatataggtgaatggcataatgaaacattggatctattttggaaatatcataatacgttatcatcacttttagaggtaaacattgagacggttttaattgatgagcagagatcccaactggaacgcatattgatcaacacgccaaaaattgttaaagacagaaacatagagccaaaaaatgaagctgaggtaaaaaaatgcgtctatgagttattgattcatgtatttcctgacactgtaaaagaaatatccattgcaaaagaaacaaagaattacaagccagatttaggggttaaatctttaaaatgtgcagtggagtataaattcgcagataatgaacaagaggttaaaactgcaataggaggaatttatgaagacatgaaaggatatgataacagtgaagactggaaatttttttatgcggttatttacatgactgacgctttctttactacagagcaaatattatcggagatgtcgattgatagtaaaaaccaaaactggaaacctatcttggtgtttggtaaaggtcaaagaaaaggcagaggtaaataa

SEQ ID NO: 285578 - DNA, 192 bp, Morganella morganii
atggcgagtttgaatatgggaagtacaattgaatttacaattgaaaaaattaatgaaaaagtacctgaaaaatgtgggaactatgcattaggatatattgatgacggaacattttatgtccaatatgtaggtcgttcagatagtgacatcaattcaagattaaaatctcactttaatagaggatcactataa

SEQ ID NO: 285579 - DNA, 633 bp, Morganella morganii
gtgccaatcaccgcgaaagtggtcgctgacttcctctcaagtgtgggtgttgaccgtgtgctgacagtggatcttcacgctgagcagattcagggcttcttcgatgtcccggttgataacgtcttcggcagcccgattctgctggaagatatgctgcagaaagatctggacaacccgattgtggtctctccggatatcggtggtgtggtccgtgcccgtgcgatcgccaaactgctgaacgacactgatatggctatcatcgacaaacgccgcccgcgtgcgaacgtttctcaggtgatgcatatcatcggtgatgttgccggtcgtgactgtgtactggttgacgatatgatcgataccgggggcacgctgtgcaaagctgcggaagcactgaaagaacgtggtgcgaaacgtgtgtttgcatacgcaactcaccctatcttctccggcaacgcggtcaacaatatccgtgattctgtgattgatgaagtgattgtctgtgacaccattccgttatcagcggaaatcaaagcactgaataaagtccgttctctgactttatccggaatgctggcagaagccatccgccgtatcagtaatgaagagtctatctccgcgatgttcgaacactga

SEQ ID NO: 285580 - DNA, 837 bp, Morganella morganii
atgtcaaattttgaaatcagactgaataaccggtcacatctgacccgacaggaatttgaattaaccctgggctattcggtgacattaaaaatatctgggttacacaataaagaacatttaatgtttaaagcgagtaataaccggattagcttaacacagaatgcagataataaaaaaagtgaacagacattaaagatcactgcagtcagcgaaggaagcagtgaggtcacatcaatgacgaaaggtataggtcaatgtgctgttaaggaaatgaccggtaaagtgtcagattgtttcccccggttaacctttctggttttaccaaaaatcgccattccgcctgatttgacactcagacaaaaagtactggttcaggtgcttctttctgagacatcgacaccgcaaaaaaaattctttaattccaaagaagcaaaagaagcgatgacattaatgcatgatgcactgtataaccggattgtatcacccaaggcgcgctatctcgatgttcctcaggatggaagtgataagttgctgggtgttatatttaaaggcagagtgattgaagggtttaaaaataatactatagatcctaagattctcagcaggataaatgtacttattgaaaaagctaacgatggtaatcctgatatgaaaaagtacagaatgttgatacaggatgctattgaaatagcaaaaaaagatagtgttatttctgatcatacggtgattggctggagaacaatgggtagtagtttagggggaggcggcatagagaaatataaagatctgcaaggtcaaacctttacaaaactgacagctgaatttctcagacaataa

SEQ ID NO: 285581 - DNA, 126 bp, Morganella morganii
atgctgcgcactctgaatctgaataaagaagagatgggtgcggtccgctacctgagtttcctgcccctgaaaccaaccatgtacattgccaacgtccatgacgatggctttgagaacaatccgtag

SEQ ID NO: 285582 - DNA, 2106 bp, Morganella morganii
gtgaataacataaacacatttgatatctgctacatcattaaactagatcaaaacccaacagaaagaacgtatttctttaatattgaaaaaagcaaactccagaggattgagttaattagaaaaatatcgaaattaccaattaacatccatcacccgtcatttgcacaagagtttgtagtggaatctaaattttgtggactttcaaatggtcattccattaaatttatctatgactgggatcaaataaataccattccgtaccaacataaagttattttttctcgaacgtctccaccgtatcctttcataaatactttgtgttatattgatgaaaatgagattttaactgaaactgaaatagaaaaaataattttaaaatatttaacttataatctacgtaaagagtttgtctttaaccctaaaataatagacatgcatagaacctcagtaaaaaatagcccgtacaatctgtctacattgatagcgtttgaatcaaataaattcaaatttacttataaagacaatagtaatgagtttaatactgagcttttagaaatgcattccagaatatttgagaacataactcaaatggaggatataaagcaattaataagttcaaataaattcaaatccattataactgacttttcaattgataattactttgttttaaacaaaaaagagctgactaagagtaaattaagaaggaaaatcagcaataatgatgaggctgacagtttatcagaagcaataatatgcgccaaaaatgaaatttacaactgtaacgatggaacagttaattccgacaatttagaacttaaaaaattaattcaagaaatggaatatatcgatacactaattggagtgtattcatgttccacctttagttccactttaaaaactgactgttatgtgaacgatgtatttacatttatgaatgacttggcgaatatggaaagagaggctgcgtataataaaaacattaaaatcctaactgcacgaattagggataaacttacacaaaaaagtagaaatgtaattccttatatagaaagtaaaaaagttcatccactaaaaatcatttcgaatcttccccttgaatggatcaaggtaaatagacttcctttgatgattaactcacctgtaagtcgaattcccaaaaccccaatgcgcgttctcgaacacttgacactagaaagaaatttcagcatcctattggattacaatgatattcatcaaattttggtcatcagtgcattcgaagatacagatgtattgaagggacaattagaatcttatatcaatgaacatatattagatgaactagttatcagaaaacaagatgaagcaatgaaagaatttattgattcaggtgagccgtcttaccgatttaatataagatttgagaatgctagagatataaatgaactctgtaaattcctcaatgagagcaaagaaagcattgtcatatttgacatgcatggggatcataaagatgaacaagaaggatttatagtaattaacaatactcgtgtttcaatatcttctctatttgacagagtaacaaaaatcccccctatagttattatgagcagttgcaataccagtgaaataaatagcaactctaacacattttcttctggacttttagcgcttggcgcattttctgttcttggaagtgccctaccaattatggggcatgagtcatgtagatttataactagactccttgtgagaataagactatatttagttgaatattttaaaagggaggaaacaattaattggagtaaattcattcatggaatgattaaaagagaatactttacagacttaatcaatcatttggagtcagctggatttattaaaaccacagaggataaaaaagaaattaacgataaagttggaatttttctagagaattactttaattctaatttgatggatggagtattacacataataagctctataaccaataacgaatttgaacgggtttcaaaagaaattgaagataatttcttttatgcagagtcaattaaatattttcacttgggcaaccctgaaagcattgttgtgcacaagtcattagctgcatataattaa

SEQ ID NO: 285583 - DNA, 603 bp, Morganella morganii
atgaaagacatcaatgaagtaagaaaagataacctaatttttgtcctggaaaaatattatgatggtaaacaaaatactctggctgatgcattgggatgtgcccctaatattatttcccgctatctttcatccccctcactgaaaagtcaccgtaacatcagtaatgctgtagcccggaaaattgagtatatcacccggatgcagaaatactggatggatgcagatcattacaaccagcaggacgagaatacagaagacatttattctcctacagagattggtgcaatattggcagataatatcagcacttttatgctgacaaatggtataaaatcacagacacaattgtcagccaaaagtaagctgggtcaatccacaattaatcgtattatcaaaaatgaaacttctgctacggtggacagcgttgactctattgctaaaggactcagatgcaaagcctatgaactactgatcccatcggacgatactaacattatcagatatgatcaaaaacgatacgccaccctgtcaccggcagaaaaagaacaaatagaggactttattgagtttattattggaagaagtaaatataaatcacgataa

SEQ ID NO: 285584 - DNA, 1179 bp, Morganella morganii
atgaaagaataccaggataccgaaacggggcagatctatgcgtttggcgatgattttgaccccttcactgaggataaccggaaccttcctaaaactctctcggtaatagtcaaaccgaagcccgatgattcacatgtctggtatcaatgtgcctggatcaaacaagaggatgctcctattgattatacacagccaatatcaagtgttccctcgtacaaccctgcatggatagctcatttgcggccttatactgccgttcatcgggcaattgcttctggtttgaatattacgttagagcaaattgactctaattcctatgacggaagcaagcttgctgaaatagtcacattactccctcttggaaatccaagcggaattccggctcttgttagttatgatggagctatagcgattcctcagtgtagtgatttccccagccgggttgatggagtgtacaaattgaatgagatactttgcagccttcttctgggcggaatacatgtcgaggttcttcgcgccgaagagttagttatcggagcattgcacaacaagaactgtctctttgcatacaccccatctctccatacaagccttagattgaactgggctgcttcggtggattgtgtgaaacctttgatgaacccgagagttcttatagtggatgaaatgcacaaagcatttcatcaggggcaacatgttattcaatcgatcgcttctttttctccgatttttttactgaatggctacactgcaatggtgtataggaataatagtgatgcgctaaacaatctctggataacggtggagcaacttacggagcatatatggaatgagcaatatctgaagaaaaaggacagctttcctgaaaaagttgcaaaagcccacttgaaggcggagaggcagaaaaaacttggctccatttacacaaagcatgaacttctgtgcctgtctgatatttttagtaacgattgttacagagaacttgaccgtgcgcggcgaaaacgaaatatccttgtgcatacaggtgcagtacctgattctggtcttgtagagcagttgtggaatgtaatgcctgaattaattgaagtggcttctggttcagaggctttggggttgaggcgactaagtggcggagtagtggagaattgggatatgccagtaaggactgactttagttag

SEQ ID NO: 285585 - DNA, 855 bp, Morganella morganii
atgcaaaaaatgattgccgttggtgatgaattttactggtcacagccggtgctggcagaacaactgcgggaactcggtttgcagccgggagattccgtgatggtgcatgtttctctgcgtactgccgggccttgcctcaacggcgcggatgatcttattgatgccctgctgcagtgtacaggtgagaaaggcactctgctgtgttatgtcagctggctggaaaattatgaagattgtacggggaatgacgggtgtgtcccggcagcactgaaaccgctgattatgccgtttgatgtccggacatcgcgggcaaatccggatcatggtgcttttgcggaatgtttccgtacccggcccggcgcgctgcgcagtgcgaatcccggcgcctctgtcgcggcgatcggggcaaaagcagcctgttttacggaaaatcatccgctgtgttacggctatggtgaggattctccgtttgcacggctggcggcagagaacggtaaggttctgatgccgggtgccccggcggacaccatgagtctgctgcatcatgcggaaagtattgcaccactgaggaataaacgcatccgccgcagagagttaccgtttctccgggcagacggcagtacggagtgggtgatgagtgaggagtttgatacggtggatccggtatgtgactgtttccctgaaggctattttgcacggattgtcgcggatttttgtctgcagaataacaacgtgcggcagggaaacgttggcagtgcggcgacattactggtcagtgcgcgggagatcctggattttgcggtcaactggatgacggcgtatcagaatcgtgcgggtaaccggtgtggcggatga

SEQ ID NO: 285586 - DNA, 1623 bp, Morganella morganii
atgactaatttttataaaaaaacatatgctatatttataattattgcccttgcaatggttgggtatatgtcatatttagcgccaatgcaatcagatgactactcttacctactgaaagggcttgatctacagacacatgtaaatcattacttaagctggagtggaagatttatttctgactacattagttcagctatacttattttgacaaatgatttagcaaaagcatttttaacatctgtagcatttgtttcaatagcgctcattattacattaataccgtctattctgtataaaacaaaaaatactttacttagtttcttgtttgtattttctttatattgggtggttaatccaaccttaggccagacggtattttgggttgttggagcagcaaattacctatttacaaacttatttatttgtttatacctgttatttttaagtctttacttatcacatggtagaaaatacataataccattgctcattttctcaataccagcaggacttagcaacgaaaatacaagcgtcattgttgtgtgcatatcagttgtttcaacagtatatgacattataaaaaataaaagctatttattattaacatcatcaatacttgtaattattggagcctgtcttttaatactaagccctggtaatttctcgagagcatccaaccaggcttttgagtggtggacgcagatgacgctatctggtaaagccaagtactttattaaatatgcagtgccaatatcgcttaaaaggatatggcctttactcatgacatcaattattttactggcgatatcttataatttaaagaaagataaagagcaatttattacatctgcattattctttcttgctggatttgcaagcatattttcaatgatgtttgcacctactttccctgagcgagcattatcaggcccatgcttgtttatgattatatcgtgctcaatttcatttaatataatcaatgttaacagcacaaaactaaattcactcatattaaaaccagtcacgttagtttatgtaattcttttttctttatcttatactcttatgacttattcgtataatagattgctaattcaagctaacatacgaaatgaatctatcagagataatataaaagatggcaatacatcattttacattcctaattttttctggccgtcatcatttaaaagaggtgactccgtagataaatttagctctgaatcagctatggggaaaatgtatggcgttaaaagcatagatgcatttgaaccatattttgattattcaatattaattgatggtaataaaaagccaataaatcaagatttggaaaatggaataatattatctgaaattataatcggaaagaatgggctcattaatgggtcatcggtggctatagtgtgcaatggaattacatcaagtgatatcaaggctgatatatacataatcaataaggatggtgacgttattaataccgatgggaatagcgggcttggtaaaaacatttatgccgtaaatagaataaatggtgagattgttataggattcaccgcaaaaacaaacccaaatgaaataaaatcaataaaaataaataataaaatagtagacttaaaataa

SEQ ID NO: 285587 - DNA, 1260 bp, Morganella morganii
atgcactctgaagacttcgcaacacagcttgcactttatgaaaccggaaccgctccttcccgcacggaagccatcaaaatattcaggaagtaccggacacggcttaaagactggcggatcctgtatgccgacgacagcccggacgggccatttccgctgagacgttgccggttttctgaaaccggttttgtgtccaccctgtttaccggacactcactgtggatcctggatgatgatgtattgtcatcatcaggccctcagatgttcaaaaccggatatggtacttatattgattcaaatcccgcaggttatatacgttcactggcctatcgtgaaaatccctcagagaatttacttggtttttgccgcagcctgtccgcttatttttcacatgatgaactggcgcatattaatccgtacctctatctgtgggaggcacaacgggatcgctccctgaaaaccgtaaacgctatccgtgaaaccattgcggcattactggcactcccgcatctgaaacgacctctggatgcggagtggggaaaacaataccgtatgctgtaccgcgaacaggctgaagcagaagcggatcagcttctgtttccgttttatcaggaaccggatgccggcctggccggagcgcttgagcaggagctggatatactggaatgtgttctggtcagaacgaaactgatcgaactctcctccaaaaaatcaccgcagaataaaatgaatgagctgatgcagtttatgcaccacgagctgtcagccatcatgctgcgtgagctgtttgtctgcgcggatattctttttcatgacaacatgacacagatgtcccgtaagctgagcgggttggacatgaagaaagatcctttcgggctgttaagaaactgcgcccgggatctccatatgctcaggcatatggagcggctgacaaattcattatatgatcgtgatgatactgcattttatatcccgtcttttattacgtttgaccgtgatatcgcggatatcatacaactgacagaattgcgggcgattgcactgcaccggacgtccggcgcggtatatcctctctgtaacacaccgctgatgtcatggctttcggaacggctgggtgaaaagcggtttatcagtgctgagcatattttcagggaaaaagggttcagcacacgggcagagggcaggcgcagagtgaatgtgaaaagccttcttgaagaagataaggcaaaactggctgagcttatcagcaggcgccactga

SEQ ID NO: 285588 - DNA, 210 bp, Morganella morganii
atgattttaaagcaaggaatcatcaatgacggtgaatatgccggatggaaagttcagatcattgatgatagtcagggggatacaggggggttctatctggtattacagaatgaaaacatagaagcctttgattattggtttgaaaataaacagcacttagataatcaattgatggatttcaacataaaatggatgggaccctgtaaataa

SEQ ID NO: 285589 - DNA, 660 bp, Morganella morganii
atgcaggatgaacttgcacaggcgcttttgaaggcaggtaaaaacataaaggaatatttcagttcgtccgcaacggatgaggaaagatatgagactcttattaatgcttataaggcgctgactcctgaagaaaaagcaaagcttgactatgaatttgaacggaatgccctgacagtcgattcagcccccgtttctatagaagaattagccaaacaaaatggatttggtcaggcgtttgtccggggagcaagagaaacaaaggaccaaaatggtaatacggtctatattatggataacggtggtgcggggagccagatccgacgaggtgatattgtcagactctatggtgaacatatttatgtttattccaaagagggtacttttcaggtagcacttaatgctgatggttcgacaaacagtactctgacaaagcagaataagaattttaatataccaacaaacactggaggagatcagttaagcggaactaattccccaggtaaacttgaaaatccggtacctgatcaaagcaagggtacttcactggttacccctaatccatcagatgataagaaaattacgaatacggggaatgttgatggtcaacgtgatgttggtgggaatattttaattaatccgggccaagaccctttaaagtaa

SEQ ID NO: 285590 - DNA, 153 bp, Morganella morganii
atgcgtacgctttgtcatgccaataaaaacagtgaattgggtaagatatcaccggcattgaccggcgaagccatcggtattctggccgaatatatctacaaaaaacagccgggcgaactgactgaacaggaaaaagagaatatcagcgcctga

SEQ ID NO: 285591 - DNA, 363 bp, Morganella morganii
atgaaaaatattatacattttaatgaaattgttaatgactcaagagggctatggctatcaggtctttttggttctgttgtcggttggaatccagataaatctttttgtgaacataaggttatatttttttcagtaatcaaagaattattggataaacaagagattaaattttgctccccagatgacccattaggtacaaaaattccttattggaatgttgataataaagaagttattgattttcttgagagaaattggccccaaaaagccaatgatgaatgtgatgatgatttaaatttatatttttatgaaatgcccgcagtattatggaaaaatgaaaatgatgattatgtgggctcataa

SEQ ID NO: 285592 - DNA, 327 bp, Morganella morganii
atgctgagtgattttgcagtgaaatacaatgcagaagcgggagatgcaggatatataactgaagcttatgtattttatattagtaaatcagaacgttatttaatgcgggcatattcttataagttgtggttaccggcagaacaaaaaaaaccggcattgcagacacaatgccggttttattttctgttaacgccctttcttaatatgagacatcaggcgtttacgtttccgcagctgagtcgctgtcagtacgtttttcttatccgcaaacgggttttcaccctctttaaactggatgcggataggcgttcccatcactttcagtga

SEQ ID NO: 285593 - DNA, 429 bp, Morganella morganii
atgtttttattaacggataaatacgatataaaagactctgattcatttattcatattacacccaaagaaaacctgaaaggtattttaggcctgagcagtgataaagaactggatgatgttcttgctcagatagcaaaaaataaaattcaccgcaaaatacacctgaaatccagcaaagggatttttaaaaatctgactgccggattctgccgtgacggctacacttatttcttccgtaataacatcagcgatttcagtatgtttctgaatctctgtggccgtcatcagcattttaaaaacgttaaaatcaccatcccggcgtatgccatgaaggggatgctgagtacggtacaataccggcgtattgacggcacaattatgctggaaggggattaccggggtgatgcgatcatcgaacgggtgatctga

SEQ ID NO: 285594 - DNA, 342 bp, Morganella morganii
atgcccgttaataacaaacgaaattccgctgccattaatcaggcagccggtgctgttattcgttcattacggaaagaaaaaaatttatcaggctatgacttaggttgtttaaccgggttaagccagcagcagatctcccgctatgagcgcggcagcaaccatctgacactgaacctgctcattgagatattacttgctctggatacgacactggacgaatttttgtatcagatgaatattcattgcggctttactgacagtaaaaatatgctgtcagtattcagaaaggaacatagttttaattcatcatttaatgatgatgacactatattccacagctga

SEQ ID NO: 285595 - DNA, 546 bp, Morganella morganii
atgacgttcaaaacaaaattactttccgctgccctgatcgccggcctgtctgccaccagcatgaatgcactggcagcaccgtcagcagaagtgaccttacaggggattctgactgataccacctgtgatgtaaccatcaacggcggtaaatctgtcctgaatgttggtgtgttcaacaccaaagtcggcggtgcggatgccggattcaccgcagctaatgccatcaccacacagcaggctgacatgccggttaccctgaccggttgtgccaaaggtgaagccggtgacctgatcatccagggtatcacctctgtcggtaacaatgagcagagcgtgtttgttgcccaggatacccagactgtcggttttatgattcaggacagcaacggcaagaccgtcactaacggcaaaggcgctgctgttgctctggatgcggaagagaccagcgcacagtacaccttcaaagtcggtatggccaccaccaacgccaccccggctgccggttcttacagcgcacctatcctggttgcctatatcgttgactga

SEQ ID NO: 285596 - DNA, 726 bp, Morganella morganii
atggaaaaatttaccctactcagacacgcagtcagcagcctggtattgctctccgcgacctccgttgccgggatagccatcgacagcacccgtgttatttttcaggcaactgatgataccaccggcaaaagtgtcggtatcaccagttcatccggctcactgacgccgtatctgatcaaggcacagatcctgaaaacaccggccggtgagcaggcggataccccgtttctcgtcacgccgtcactgttccgtcttgagcccggcagtaccaatcaggtccggattatgaaaaaaaataccgcactgccgcaggacagagaatccgtattttatctgcgtgccattgcgacaccagcgggcgaaaaaaacaatacacagcaggaaagccacatcggcggtaccgtacaggtttcatccggcaatattatcaaattattttaccggccggccggactgaagatgaaaccccagcaggccatgcagtcactgcagttttcatccgccgggaacgggttaaaagtcacaaacccgtccccgtaccatgtcacgctgaaatccctgacggccggcggacaaaaagtcccgctgagtattaaagcgggcaataccatgatcgcgccgatgagcagcaatatctatcccggcgccccgcatcagggcagcgcggaatggaaagcaatcaatgactacgggggcacggaggtctttcatgggcagatccgttaa

SEQ ID NO: 285597 - DNA, 552 bp, Morganella morganii
atgggcagatccgttaactggttaccggggctgtgcctggcactgtactgtctgtctccggcgctccgcgccggaacaaccgaactttccgccgttattacggatgatatcggctgcgggatgagcattccgtccgtattgcagttcacgcctcagcgcaccacagattttcagggcgcactgaaaacacatgaaatcaagccgttacaggccattttcagttgtacagacaaaacaggaaagctgacgccgaaaattacattacagggcaacaccccctacagcgcagataccctttttcttgacggcacgcccaacagtgccgggtttatgctgcgcctgtatgacggttcacaaccatccctgaatgatttttacaacaccggtaaagccattgcccgtggtaaacaaatcgccctgacgccgctgaatgcggaaaaccatttccggacagaagagacattcctggtcgggctggtcggcccggtagacggcccggcgaccccgggagaattttcggcagccctgatttttaatcttatttttcagtaa

SEQ ID NO: 285598 - DNA, 579 bp, Morganella morganii
atgttatttatcagaaaacccgtttttgcctttttactgcctgtgatgatgagtatgacagccgcaaacagtgcggtggctgccacctccgcatccaccgaattcaaagccaccattgtcggcgggacctgtgacatcaccgttccggcaaccgtatcagtgaataaaggggcggtgatcccgtcagaagatattattgccggtaacagcccggttgaatcattcaacctgagactggccggttgtaaaggctatggcctgacaccggaaatcacccttgaaggggatgtggataacacctccggtatgccgctgttcctgaccaacaccagcagcaccaaaggctacggtattttgctgacctttgccggtaacagcaattttaaagcgagcaccaatcttgctgccgacctgaagctggcggctgccggtaaaacctggtcaaccacgatggcatccgtgctgaacggcaatattccgttaaaagccgctgtcagttgcggtaattgtgcagcagatgcggatattcagggcggtgaactgaaagccaatgtcacgtttaaatttgcttataactga

SEQ ID NO: 285599 - DNA, 582 bp, Morganella morganii
atgaaaataaatactctgtacaaagcattagccctgtcagcaggactgctccctgcggcttttcagacagcagaggccggcagcctcacacagacgattaattttaatgccactttttacggcggaagctgtgaaattaccgcaccggctcagttgccttataacaacggtaacccgattccggataacacgattgccggtgaccagcattaccaccagtttagtatcactctggctggttgtcagggttactttatggcacccaaaattgctgttaccggcaataccattaccaccagcgacggtgtgaaattatttgctgatacaaccagtacctcaaaaggttacggcgtacgcctggcgacagaaggcaataagcgctttaacgccaacagcaatgctgccgcctccggggcaatcagtgccctaaactggcctgaagacggcgctaagaacgccgcatcgctgaacggcccgctggaattcagaggctatctctcctgcggagcctgcacaccgggcacagaattacagggtggcgagctcaaagccacggtgacattcacatttttatataactga

SEQ ID NO: 285600 - DNA, 753 bp, Morganella morganii
atgaaacattcacttttaccccgtacatttttactgatggctgcatttattatgctgtcacccgttcctgcggcacaggcagccgaaggtggcctgcgtctggcgcaaacccgtgttatttttaatgcagataataaaaatgcgaatgccgctatcaaaaataacggtcagcaggtttatctgattaaagcggctgtgatgaatacaccggaaggaaataatccggcattacctgccgcaccgtttatggtgacaccgccgatgtttcgtctggaaaaagagagtcagagcacagccctgattgtccgtaacggtacagcacaattaccggcggacagagagtctgtcttctggctgagttttcttgccattcccgctgtcagcaaaaacggtaatacgccggataacatgaccagcgcgcaggtgtctgtcggtatccgcaatgtgattaagttgttttaccgtcccgccgggctctccccttcttttgaacgggcacaggaaaagctgacattccgccgtgagagtcgcagcgtctcggtgaataatcccactccttattacctgacactggcagcactgttatttaatggcagagatgtcagcctgcaggatcataatccgatgatagccccgtttgcctctgcggttttcccggcagaaggtgcggtatcacaggctcagtgggcggtgatcaccgattacggtgatataggacaaatacacactgccgctgtcagtgcaggagagtaa

SEQ ID NO: 285601 - DNA, 738 bp, Morganella morganii
atgatccgccgctgccttctgaatactgccgcattgctgtttgctgttactgccgcacaggcaggaaacctgtcgcagggacaggacgggatcacactcagcaatacgcgggttatctatccgggcgatgcccgtaacggtatcacttacacactgactaataacacaccacgcccgtatctgctgcaatcacgggtactgccgtacggtgacagcacaccggaagatgagaccgggaaagcggaaaaaataccctttattgtgctgccgccgttaacccgttttgaaccggatactgcgctgaccttgcgtatccgcctgactcagaatgcattaccgcaggatcgggaatctgtgtttacgctggcactgaatgccattccggcacaaacagaagccggtgagcaaacccgtctgatcatgagcacacagaacaatctgaagctgttttaccgccctgccggtctgccgccggcggatgaagcagtacttgcggagcagccggtattccggcgcagcggtaatacactgacagtgaaaaatccgtcaccgttttatatcacgttcagttctctgtcagccggaaacacggatatcgatctgcgtaatgcccggatggtcgcgcctttttcagaacagtcatggccattacctgccggtgccgccggtgatctccgctggcaactgataacagatgacggaaggcccggcgaaaccgtcacccgccctgccggctga

SEQ ID NO: 285602 - DNA, 2724 bp, Morganella morganii
atgaaaatacctcataatatgaataacataacatcacatcgctcgtttttccgttaccgcccgctggcatggctgctgcttgcggccacaacgccggtgatggcggacgactattttgaccccggttttctgaatattgccggagataattcagatgttgatttatctgcattttctcaggccggcagtgtggcggaaggtgaatatacggtttccgtttttgttaaccagcaggataccgggcagtacacacttaatttcgttaaaaatgcacaggggcagattgcaccggagataacccctgctcagttggaaacctggggggtaaatgttccgcaggttccggaattaaaacatctgccaaaagatctgccgctgacagagttaagctcgcttatcccggatgcatccgcacgtctggagctcgggcgcctgcgtctggatctcagtattccgcaggttgccatgcagcctgctctcagccgcaattctgatcctgcattgtgggatgacggcattccggcactgatgatgaactataacctcagtgccggacggacaaccaacagctatgacggcggcctgaaaacacacaacgacaacctatttgcctctgtccgcaccggtgccaacgccgggccgtggcgtctgcgcagcaccatcacgcatacccgttttcaatacagcggcgggcgtaatgaaccggcaagcagccagaacaggacatcgtttaccaatacttatctgatgcgggatatccgtccgctgcgctcctcggtgcagctcggcgaaaccagtaccggcagtgatgtgtttgacggattttccttccgcggactgaaactcagttccagtgaacagatgctgccgggcccgatgcgcggctatgctccggcaatcagcggagtggccaacagtaacgcccgtatcacggtccgtcagaacggtaacattatttatgaaacctatgtcgcaccgggcgcgttttatatcaatgacattcagcaggccgggttatccggtgactatgatgtcaccgtgacagaagcggacggcacagagcgccagtttgtggtgccttactcttccctgccggtcatgctccgccccggcggatggaaatatgaggtggcggccggacgctatgacggcaacatcaccaccagctcacgccgttctgattttatcaccggcaccctgatttacgggctgcacaataatgtcacactcttcggcggcgcattgctggcaaaagattatcaggcactgaatgccggaagcggcatttcaattggtgatttcggggcggtatccgcagatgtcactcattcaaccgcgaaatttaccagtgaaaatcatcagaatgatgaacggaaaaccggccagtcataccgtatccgttattcgaaaagtatgatgtcaaccggcacgtcggtggatttaacagcgctgcgctattcaactgaacacttctataacttcagtgaattcaacagccagggataccgtcttgaggaaggcgtcagtccgtggaccttacagcgccgccgcaccagtttccagactcagctcagtcagcagatgggaccgtacggctccctgtatttccgcgccagccgggatgactactggggaagtgatcgcacactgaccgggttatcgctgggctacagtaacagcattaaaggcgtcagttacggtgtgaactacaacatcgaccgggtcaaagataataacaatcactggccggaaaaccgtcagttatccctgaatgtcagcgtgccgttcagtctgttcagctcaggacagaatatgcagtccatgtacgccacctattcggtcactcatgacaataccggcagaacacagaacagcaccggcctgagcggcagtctggcggacggccggttctcttacggtgcatcacagaattggggaaataaaaatcaggttgccaacaccagcctcaattccggctggcagggtgacaaaggcagtatcagtgccggttacagctacagtgatacctcacaggcactgaatatgaatgcctccggcggcgtacttgtacatccggaagggataacgttcagccgctcaatgggggattccgtggcactggtcagtgcaccgggtgcggagggtgtcagtgtgaacggcggcagtgccgttaccgacagccggggttatgcagtcgcaccttatttgtctgattacaacaaaaacagcatcggactggatccggcaacactgccggaaaatgtggatctggtgcagtccaacgtcaacgtttacccgactcagggcgctgtggtgaaagctgattttgccacccgtgtgggctaccaggtcttaatgacgctgaaacagggtgccaaaagtgtcccgttcggcgccattgctaccctgatcgacagccattccggtgaggcgatcagcggcattaccggtgatgccggtcaggtgtatctcaccggcctgccggaaaccgggaaattacaggtgaaatggggagaaacagcggcacagcaatgtcagatcagttttgacctgcgtcatctgactaccagcgacgatatgcctgtccgtcaggtgacgtatcagtgtgagggcgggggagcagagggtaagaaagtaacactacagtctgaatttgatgctgttcagaaaaataaattacctctgacttcatctgaacttcgtatgctaaatgaaaataactaa

SEQ ID NO: 285603 - DNA, 1098 bp, Morganella morganii
atgaataaatataaaaagataatcaaaaacacatttcactttgaaaataaaatattctatgctttaacttcttttttattattttccgggcaaaatgcttttgctgcatgggaattaaaaccgggaagccgtcaggatattcccgtaaatgtcacgtcgaattatcccaataaatcaaagacagaagctggcagaaaccaaactgggcaaataacacctttaactacaattaacaaggacgaactatgtgaccggggtctgaatgttggcctgtccagcgataactctgtccgcgggttagttatcgcgcctgatatattgttaacattttcaggggatgcaaaaagctcggtggcaacaccatctttccaggcatcctggacggcgacagatggtaacgtacgttttaatagagaaaactatccttccggccaatatataaccggcattgtaaccgaagggtcattaagctgtatcggcacacttggttattgggtagcaacaaactcaactgccagttttaacgggaaaattactatctatgttggcccgactgctaaattaggaacgtatcagttacccaaattatactggaatgtaatagctgcaactaaacaaaccatatttagtggtggtacacttattgttaataatccccgtgtttgtacagtcagcactgacaacaccattaccttcccggcagcagatattaccgatgctgtcaacgcaaaagcactggcaaataaaacaggtaacttcaccgttacctgtgacgatacaaccaatgcccctgttacggtggaaatgcagggactcaaaggacggtataccgataccatggcgctgaccatgacggacggcacgaatgcaccggccgaagtccgcggatttatcggtccggatatcccgcttggcggtgaatgtaatggccgccttaacggatataccggtatcgtttatttcgttccgaatgccggactggaaaaaatgccgttcaaaccggggtcgtataaatataactgggtactgtgcagtaccggtgcatataaaaccggcaaagccaccggttccgctaaaatggtcgtcaactgggattaa

SEQ ID NO: 285604 - DNA, 1113 bp, Morganella morganii
atgcctgtatattctccgcttgtcccagccgggctgtgtcattgtataaccgcagccatattatcgctagctgtattacccgcagtttccggtgccgctgacaataatgccggaacaatacatgaccttggcgttcagtatattaacggcgatggtgttcccgccgatgcggaaaaagggcgttatcatattcaccgatccgcccttctgcattttccgctggcgcaatatcatctgggggttttattttataccggcgaaggcggtgacaaaaataccgcctgcgcccgctggtggctgggaaaatccgcgcttgccggtggtgacattaatataatggcacaacaggcactgaccgatatttatcaggaaataacggacaatcctgctgagcatatattactgactcagccgacggatattgttcgttgtgaaaaattaccggagcgcgctgctgcaaaaatggctgttcaggctgtacagcagattgtttccaccgcagaagctcttccggttactccgccttttctggcccggataaagcagtttacccgactctcagaccatctgacagattcactggtaatacaggttccgcagttctggtctgtactctccgcaccgccggtaccggatgaaatcaccattacgattatgcagccggttaaaacagaaccggaaaccacagcaccggtgattcccccggagccgccggtcaccatttatccgtctgaaacgattattccggatagtcttatcagtccctctgtaccggataaccatgcagctccgcgcagagagaataaaaatacacgcccggcatcacgcaataccggccgggatctgcgtaccgctccggcgcatcactacacattacaactcagcagtgccgcaacaccagacggcctgtaccagtcagcccggcatcataagttatcaaattaccttgtgtatgaaactgtccgccatggccgccaatggtatgtgctggtttacggtgattatcctgatttgtcatcggcaaaatcagcattacactcactgccatctgccttttataacaataagccctgggtacgcagcctgagacaggttcagcgtgaattaccctga

SEQ ID NO: 285605 - DNA, 897 bp, Morganella morganii
atgaagataagtgaatatgattttagtgggcaggattattattgcgtcggaaataaagatgagtgttctcattttgaagaggatggtgcaattgttctaccttggaagaataatattattttagatgagaatatagtcaaactcagattagttccaacagtcaggcaattattatcagcaagagataaattgccagatagtattaggaatatgctaaaattagagtgccttaatattccattgtctatgcttaataatgcttgtgagggtgatttgccaaaaagcattaagttactaatgctaactggcctggcaggaagcacctatgactctggaattaattggggagttattgaaaatttaccttgtttagagcaattattctttcatcgaaattttaatgctgattcatatattaatcaattcagtgattttgatatcaatagatttaaaaacctgaaatctatatggtttggtttgatgggtgaaggtgatttaattaatggtatttcagagagtcattcacttgaaaatatacatgtagaggatgtaaagaaatatcctctttttgatattgtaccaaagcatttgaagcggttatctattgtaggtgttgataagaatcttgagtttaaaaaaataaaacaattaagaaccatagagagtatttttgtaaatggcgcacagtgtgaaatagactgcgaagttctatttgaaataaaatcacttaagagtatttatattgtaaattcaaagaaaatcattaacccagagatttttataaataaaaataatgttagtgaattgcgatttataaattgcggaggagctttcaaaaaaataaaaaaagaatttaatccagatgattataatcatttagatatcgatttttcttga

SEQ ID NO: 285606 - DNA, 660 bp, Morganella morganii
atgaaaaaaatagctaaagatattcaggatgaaattatttcggttgttaaggaaaagttcaataataatggttttttttgtaataaacaaaggttttttgaaaggggaagtgaagatggtaatataaatgtgtatgaaataattctttctaaaaaaaaggatttttattcattacatcttcgtttgtcattaaaaaatttaatcttgatgaaaggggttaatgaaattcttagaaaggttttaaatgaccctgaatatatttaccctagctcgtggggtgagattgaaatcaaaaaatccaacgagctgatgttatcaaatgatactatttcaatggttaccgattggcgtatttttaaaggtgataaatccctggaggaatttaataatgttttttctatttggatgtgtgcttttaaatgtctttcggaaattaaagatttacatgcacagcttttaaaaagtattgattatgcgttagattggtttactttggttggatctgatgagtggattattaataatagtttatatccatcgttatatctccttaaaatgatgggggataaagataagcttaatgaaaaatataattatgttttgtctttatcaagaaataaaaaagaagtggaactttatttcaaatatttgactttatga

SEQ ID NO: 285607 - DNA, 4404 bp, Morganella morganii
atgagcaccccaaatgcagcaagagaaaaagatcaaatcattcatgccagcatctgggccgatctggcttcagtcgtcatggaaggtgtggtatatgccggtgccgcgctggtggtggttggtgctgccacgctggccgcgccggctcttgcggcagggtcggctgcagcagctgttgttggttttgcgggggggtgtattggttctggtttaatttcctcaacaattttgaattatacagggttgggagataaaatatcggaagggtgctctgaactggctgatgcaatttttcctccgtctccggctggtgtaatcagtacaggttctgatgatgttaaaacgaatagtaagccagccgctcgtgcggccggccgtcttttaacggaagccgaaatcgcagcacaacccaaaccacctgaaccggattctttgctggattacgctcagatgttgttggggtcagcagactctttcgtatctgaattgatcagacccacagtcggtggcccggataaaccaactgcagaagctgagcatgatcgtgttgactgcgaaaaacacagcccgattgaatacctcgctgaaggttctgacaaagtatccatcaatgatttgcctgcagtcaggtcgaaagatcggacaacatgtgatgctacagtcagtgaagatgtatcaaaaaatgtgcatattggcggcggttcggttgtggtccggacaataaaaagcgggaaactacccggatttgacctcctatttatggctgcctcgcttatgatgggccggcctaaaaatatctttaaaaaactcccttgtctttttaccagtatggcagttggtatggcaacagatcgccttatcaatgctgcaatagcggtttttaatcctgtacatgcagcaaccggggctaaaacattgtctggtgaggatgagctggattttatgcttcctgcgagatatccgcttatttttcaacggctgtacaatagcaggaacccacactcagggttattcggacaaggctggagcactgagtttgaagtatctgtgagccgggaggctgagtattactgctatctcgatgccggtgggcgtgagttgcggtttgaacctccggttacaggcgtacaaaacagctaccctgcagaaggcctgatcattgttgccggagaaaatggtcttcttactatcggtgatacggatggagcctgttggcgcctgtttggtccgtccccggatgatgcatcacatctgagacttttatctctcagtgatgaatatggtaatggcctgctcatgaagtatgacgatcagcagaggctggcgcagattacggatacagaaggtgcactgtgtattcgttttttatatcagcaccctgagcatccgcagcgggtttcacatatctgtgaacaccataataacaatacccgtcaactgattagctatgagtataaccgtaatggtcaggttatacgggtcattgatgccgctgatattgtcacgcgcgtatttacttataatgatgataatttgctgataacacacgaaacgtcatcgggactggtttgtaactatcaatgggtatatctggatgactggcgggtatcacactacagtgataatcagggtgaagtgtgtgaaataaattatgacctgacagaaaaaattacccggattacacataaaaacagcttgtcgcatactcattactggaatgatcagtttttggttacccgttatacggatgaagcagacaatgactggcattataaatggaatgaatatggattactgacagaaagcagctctccactgggtgaatatcatacctatttttacaatgaatatggttgcctgacggaagaaataaatccggccgggctgacgacactgacagaatggctccctgaacgggaattgatttctgcaataacatatcctgatggaaccaggaccgaatttggttatgatttgcatcatggtgttatacaaattacggatgcagggggactgaaaacctgctatgaacgtgatacatacgggctggtttctgccgttactgatgctaaacaaggccgtaatgagtatcagtataatgaatttggccagcagattcgtcaccgggattgttcagggcaaacgacacgttacagttacaattttcagcaccagcttagttgtattactgatgcattacaggaagaatttcatcttgaatatgatgcggcaggccggttgttaaaagtcattggcgcggaggggtggtataacaccttccatctggataagcagggcagacttatccgatttgaagaagctgacagcaaaacgcagtcctttgaatggaacagggccggattattacgcagaaccattaactcattatcaggtacggttgagcgcagctatgatgaacgtggccgtctggtcagcttacagaatgaaaaccggaagtcatatcattttcagtgggggccgaatgaccggctgattcgtgaaaccgggctggatggtattgcaacccgatatgattatgacgattgtgaccggatggttcagcggatattcgctgccggtacggaatcagctctgacacatcatgcccgttataatatgctggggcagatgacagaaaagcagacaccggatggtattacccagtactgttatgccaagagcggagcgctcatttctgcccgctttaccggtacaggtaatagcccatattcacagtttgtacatttcacttacaataaatcgggtagcctgattcaggaatcaacgctcagcggagtagttagttatcagtatgatgaactggataacctgactgatgttactctgccggggaccggaacattaaaaacgctgtattacggtagtggtcatactctgcaaatcaacctgaacggccgggtaattactgaatttacccgcgataatctgcaccgggaagtcagccggactcaggggatgatgacgagcggacggcgttatgaccgtttgggacgcattaccggacgtactgtttcagcaagggaaggcagtttgcgtccggtggacgatatccgctgggactatgacctccggcataatttggtccgggcaaaggaaggaactgatccatacggctggaaggcctggcagtatgatgatacagaccgcctctctgacagaaaaagtaatcgttacagtcctgagcggtactattacgatccggcatctaatattcttgaagacagtttttctccggtttgtaccgataaccgggtccggcagtatcagggaattacctaccggtatgatatttacggaagaacaacggagaaacaaacacggactgaaggtcactgggcatacggatatgacagtgagcaccggatgatttcggcattacatactcctgttgcgtcacatgaaaaacggtgttttgttgaattcagttatgatcccctgggacgacgactgcataaagcagtcaattacctgccggcgctgtcggtgccggactttcagcaacgtctcccgctgaatgcgcatccggaaggaacgacgacatttttatgggaagggttgcgcctgctggaggagcggcgacccggcaacacccggatgttgtatgtctatgaagacagtgacagttactcgccgctggcccggattgattttcatcacggtaaagaagatatctgttattacaggacacaaccgaatggtttacctgacagcctgcatgatgagcagggtgaaacattgtgggaggctcggtttacctcatggggaagagccgaagttgaactgggaaccctgcattatctgacacctcaacgggatcagaacctgcgttttcaggggcagtacctcgaccgtgaaacgggtttacactacaacacattccggtattatgatccggacacaggccggtttacccagcatgacccgatagggctcgcaggtgggctgaatctgtatcagtatgcgccgaatccgttggtgtgggtggacccatgggggctggcttgtagtgcacagcaaagagctacaaataaggtaaatggaaaggctgctgaggcgctggttattggaaagttacagcgaaatcctaatgtagttgttttaggaacccaagtttatgttaaaacaccaggagcaggaagggggcgttatgttgatattcttattcaggataaaagaacaggaaaaattatagcggttgaggttaagtcaggaggagcaacaagatcgacaagacaattggcaaaagatgatgttattacatcgggaaatggaatgtttggtaaaaatgcaccaaatgatatgaatggcaaccctctcagtggttcgaatacttccggtgtgattgtaagtgaaaccaatgtgcctttatggaaattaccataa

SEQ ID NO: 285608 - DNA, 435 bp, Morganella morganii
atgacaacatattctttgaacgaagggacgtttgagctgccggtttccggttggcaggataatacaatgaatgtatttcgtgatccggttacacagcattctctggttattaaccggggaagaattcagccgggacgaactgatttactgggcgaaatgactgctcagatagagccgctcagaggggttgcgacgggcgtaacagttggtgagttttctcctgtcagactggataacgcaccggagtatgaagccctggaaacgacacttacctttgtccgggacaagctgtcatattatcagtttcaactatctgttttacagaatgataaggagaatatcttagtttttacttatacctctttacttccttttacggaagctgaccactgtagctggaacaaacttaagcactcaatttcactgacggattag

SEQ ID NO: 285609 - DNA, 312 bp, Morganella morganii
atgaaaataaaaattaatttactgttacctctgtgcctgcttctttcagcgccggtactggcggttgactgtaatgacacagaggtcagaagagagctcatcagcctgtataatgatgtcctggatgttaatgatgccggggtaaaggtattggatgcctataaccaggttactgaaaaatctgatggtaacggatatcagtgtgttggtttatatgatttcagtgacggcgataccttaaaggtcaggtataaagagtatacaaacagcctgggtgatccgctttattcttttgaaccggttgacgaataa

SEQ ID NO: 285610 - DNA, 672 bp, Morganella morganii
atgatttcactaggccagttaaacgattctaaaagaaatgctataaggttagtcagggatgtaggactccttggcaattttaacaatcatattgcataccctaacactatgccgggggagttgcgtccactctcttatgaaaacgcatggaaaaaatgcaaacaaaactcatggtttgatattgaacttgatgattcttcattattgatatttaaaaatgatagttattcttacgttcgagtcccattttttacattatcattttctgatttcgcagaagaattttacgaaagcgatcctgagtggagagaagaagagaacaaacacgtaataactgaagaatatgaaaagtacctagacagccaattaaagatacaaccaccaatgcctgttcgctttgatatagactcaaattattactgtgagcatacacaccctctttatcattttcatttcggcattgaaaatgaaagtcggattccttcaaatagagaacttacaccaatatcattcacaggttttattctgagaagcttctatccaaaggaatggaaagcatttgcgaaatctactgagttagataagtacctagtacatctcaaaggtaatttagattatgtctcacctaattactggaacgcatatgaacccaacttattttatttaggttag

SEQ ID NO: 285611 - DNA, 759 bp, Morganella morganii
atgaatctaggatactctattgatgagacaaaatataaaagtcaattcgagcaggatgaagatatagttgtctatcgcacagaacaggcatcaccttcattatataacgaaaacaaagaaaaccttgttataaccaaagaacatgatgatatctttgaagaatgtagttgggtggcagaaaaaataaatgctgatattaaagatcagggtttaaatgcatccgatatattaatcatttgtgccgatgatagaaactataaaagctattattcagtaatttcagaatacttgtccaacttcagcattgatattaataatgtcaatgctgatcgatataatatcaatgacttttcaatagataacaaagtaacgtactccacagtccataaagctaaaggtaatgaaagttacagtgtatatatagtaggtagtgagtccctttattataaccctaatgtgaaaaacagaaatttactttttactgcaatgacacgtactaaggggtggttagtcatgacaggtattggaaccgcagcacttgaactttttgatgaaatatctgatgcacttgataaagctccacatcttgagtttaaatacccgccagatacaaagataagacaaattgaaattgatttaaaacgggttgaaactgaaaataaaaatgatgagcttgaaaaactcatcaaagagtacggagctgatggattgaaagcaatgatccgtgaagtggaagctagaaaggtcagaaaaaaatga

SEQ ID NO: 285612 - DNA, 498 bp, Morganella morganii
atggatcaacaacagcaacaagagcaggcatcagaacaatgtcagattgagctggaaagcattttctcaactgtgactatcaactcattcaaaatgaaaaacaaaagtgtcactgaagactacgggaaagatatttggtgctctttagataaggacgtgatccctgcaataagcgcgataactgttcaggagattaaggcaagaactaatgttgaagcattggcgccaatcaaagtgcgtggtgcattagagacggttcgccgccaagtacaacgtattaatgaaatcatgatttatgctgtaaacactggccttattgatacaaacccagcgtcagaggttggaatggcatttgataaactaaaaaagcaaaacatgcaaacgttacggccagaaaaattgccgaagctaatgcgctcaatcacaagatctaacctgtctctccccactcgttgtctgattgagtggcagttactagaccttagtacgaccatctga

SEQ ID NO: 285613 - DNA, 1002 bp, Morganella morganii
atgaaaaagagatatgcaatcccgttattaatggcatttttacctcttccggcgctggctgtggtatgcagtaatgcggcgggcggaaccagtgaggtcttttacgatctgacaaacagctttacctcggccaataaccaggtcggtcagataaaaaccttaaacaaagagtttaatgaacgggtaatggcagtttgtccgagaagtgtcggcagcaaaagcaccacaatgcgcagctatgtggccaataccccggtggttgaaaccgaaggccgctataaatacctgaaactcaatgattaccttatcggtgccatgagtattaccgacagctatgccggtacattctacccgccgcaggaatatgtccagatggggatgcaccccaacgtggctctgggaagtccgtttgaagtgctggatcgtaactttattttccgtctgaaagtcacccggcgttttgttgaccaggtggttatcccgaaaaaaaccttatttactgtgtatgtcaccaccggcaatacggacccgctgagcatcccggtttataccatcagctacagcggcattattaatgtgccgcagcaatgcaaagtcggggttaatgatattgtggtgattaacttcggtaaaatcggttcacagttattcagccaggctggtgccggtaataagcctgccacggtgaataaaaaactcgaaaatatcgcgatccagtgtaccaacgtggaagcgaaagcttatctgacactgcgtattgaagccgaaaaaacaaacggtaatatgattgtctccgataacccggatgtcggttttattgtcggcgataaagacggtaatgcattaaccccgaatagtatcggcagtgttattccgttccagctcgacggcgccggttctgcccggacagcaattaccgcctggccggtcagtgtgaccggtaataaaccgaaagaaggtgttttccaatcccgcggttatttacgcgttgactacgaataa

SEQ ID NO: 285614 - DNA, 936 bp, Morganella morganii
atgaccagtttatataccgcaacaaaacatccggaacaactggagacaaccctgttaaccggggaaagtcatcggtatgatgatcctttagagccccaaaaactggtttttttggctgccgtaaatgaacagcgttgtgtgattaattcaccacaacgtaacagccaattaactaacaccatacctttttttatagccatactgattatggcttgttatacattattcagctttactgataatcatcttgcaaagaaagcatcgatggaaaggatgtctaaatatttacaagagcaatataattatttatctgaggatgaaaaaataaacgataaagctattgttctttactctccttttttttataaggaaaaaataagctggttggaatatataaaggcttacgattctgggagatattatattaatggacagtatgaaaaatatcttgtgattggctggcttattttatttccgggagcgctatggttgtttggttatctggccttttttacgccaccggtttatttaacagcagacagaaaacgggggatcctgtatagccatggcaggggaaaagtgcatgtcacccgttatgaagaggcacaaatcgggttagccggtaaaatgctggctatcaagctgtatgggattgatgaaaaatccggtgaactgaaaacgattatattccggccgaatgtttcccactattctgcgtttctgaccagcactgacagcgagaaccaccgctttattacgttcctgaatgcctatatgcaacaaggccgggatgctgtctcacccgtggattatcaggcgcgtaatccgctattctgctttgccaaaaacccgctcccggataattttgaacagcaggttgcacagattctggcagaattggataaaaggaagcaacgtaatgcgcagtcagattaa

SEQ ID NO: 285615 - DNA, 282 bp, Morganella morganii
atgacgatcctgattaattcatttattgaaagcatcaatacaccaattccggataaatctgacagctctgaaatgtcatttaatgaatgtaaatcaatagcgaagacagtcatctctgatttcagtaacgcttacccgacagtgattgacgttgatagcagcacgcattttaaagtaaaaatcgggtcaataaatgaggtgtttaccccggagtgtgttaatgatgagaagcgggtttacagggctaaatacaaacccaaaaacgtgctttcttcatcatga

SEQ ID NO: 285616 - DNA, 1083 bp, Morganella morganii
atgaaacgcaatattcttgcagtggttatcccggctctgttagttgctggtgcagcaaacgcagctgaaatctacaacaaagacggcaacaaagtagacctgtacggtaaagttgacgttcgtcacatgttcgcagacgctaaaagcggcgaagatggcgacagctcacgcgttcgtttcggtatcaaaggtgaaactcagatcactgaccaactgaccggtttcggtcgtttcgaaaacgaaatcaaaacccgtggtactgaaggccagaataacaacgaagttcgtttagcttacgctggtttcaaattcgctgaattcggttcagtagatttcggccgtaactacggtgttatctatgacgtcaacgcatggaccgacgttatgcctctgttcggtggtgatactcaggcacagtctgacgtttacatgaccagccgtaaccacaacctgctgacctaccgtaacagcgatttcttcggttatgttgatggcctgaacttcgctctgcagtatcagggtgctaacgacgagaactcaatcgaatctcagaaaggcgctaaagctaacggcgacggctacggtttctccactacttatgacctcggctggggcgtaagcgttggtggtgcatacgctaactctgcacgtactctggaccagcagttcgacagctctgctcacggtaaacgtgctgaagcatgggatctgggtgcgaaatacgacgctaacaacctgtacctggcagcattctacggcgaaacccgtaacatgactaagttcggtggcaacggtttaggcgacatcgctaacaaaaccaaaaacatcgaattagtagcacagtaccagttcgacttcggtctgcgtccatccatcggctataaccagtctaaaggttatgacctggataacggtgcttacaactcagacctggttaaatacatcgacctgggtgcgtactactacttcaacaaaaacatgtctgcagttgttgactacaaaatcaacctgctggacaaaaacaacgaagctggcgtgaacgctgacaacgttgttggtttaggtctgacctaccagttctaa

SEQ ID NO: 285617 - DNA, 1005 bp, Morganella morganii
atgaattatacaaaacacctctttttctgtctgtgtgcaggactgttttctgttcaggccggtgcctacgatattgcctatatgaccagtgtcacgattgacagtgctgcgcagcagcagcccaccggtaccacgctcggttcctggcaggatttaagcacctcaataaggtgcaccggaggcatgaccgcagatgcttaccgtttcagtaataacggctatagcaccacaggaataacactgtctgacggcggaaaaagctacccggtatttaaaacctatattgaaggcgtcggcgtggcactcgcgatacgtgaaaagggcacatcggcctggcatccggtgacagaaaatcagacaagtgtctcgctcgataagcaaagcgcgaatgcggcatttgacatgagaggtatttatgtaaagacccaaaaaacactggtaccgacaaaggtttctcaggagatcagtctggtgaaggcacattgcctgttttacggttcacccacaggcataccggatgaattgtccgtacgcagtaatggcgccacccagaaggccgaaacctgtaatgtctccaataaaacccagtctgttgatctcggcagtcacgaactgatggccgtcagaaaattacaagtaggtgagaattttggtcatgcccgtgccgggcttaccgtgaaatgcgatgccggaatgaatgtctattttacactcggtgaccatctgcactcagagaatattaataccaatacccttttccttgaaaatcataataccaacccgggattcggggtgcagatatttgaaccggaaaaatcagagccctacatgttaggtggtgataaaaaaaccggctcagcgcatcagtatccgttttataagaccggtaataacagcgcggagaccatcacaaaatatctggattttaaatatgtaaagctgtcggatgatgtaaaagcaacggaaggaaatgcgcaggcgacaatgacccttatctataaataa

SEQ ID NO: 285618 - DNA, 537 bp, Morganella morganii
atgaaaaagattaatttaattactgctatcctgtttactgctatttcagcaggtgctgttgcggctgatggtaaaattacctttaaaggtgaagtggtaaaacaaagctgtgtggttgaaggttcaaataaagataaaaccgttgaattaccaaaagtcagtgccaacgcattacagaatgtcggtgataccacaggtactaccccgttcaccattgaattatccaaatgtgcggcagcagattccgtgactgacgtcggtttaagttttgtcggcccgaacattgatttgacaaccaagaccctgaataccaaaggtattggtgcaacaacggccaaaaacgtcaatattgcgctgtataaccagaatgaccagtttattaaactgggtatggataaagacaatcagaatgtcggctttactaaattagcggaaggaaatgtccagttaaactatattgctaagtattatgccgtaggtgtttctgagccgggtttagtggaatctaacgttgattttgaaattatttacaaataa

SEQ ID NO: 285619 - DNA, 741 bp, Morganella morganii
atgattaaaaagatgatagctgtctttctgtcgttggtggctattccggcaagcgccgctattgtggtgaccggaacccgttttgtatatccttccgatgataaagaaatatccgttaatattgaaaacagtggtgaaaaaacagcgctgagtcaggtctggctgacaaccggtttttctgagaaacgttccggtaaagaagtcaccaaagcggatattgaagatactccttttgtcgttctgccaccgttatttaaaattaaaccgggaaatgtgcagaccgtccgtattctgtataccggcgaaccgcttcctgctgatcgtgaaacaatattcaccctcaatattctggatgttccgccgaaaagcaaaaccattgaaaacagcctgcagatttctgtcttatcaaaattcaaactcttttaccgcccttccgcgattgccgctgattataattccgccgttgataaaactgactggacaataacaaaacaaggcgcggacatctggttatccgctaaaaacaacagtgcattttatatcacaccggataaagccaaagtgattgttaatcaacaggaatatgatgtacagccgggtcttgccatgatggcacctttcggcggcagcacacaggcaaaaataagccggttaaccacagttccgtcatccgcggtcattaaattcagttatgtcaatgattccggcggcagttcagacgctgaaaaaaccgtgaattaa

SEQ ID NO: 285620 - DNA, 2517 bp, Morganella morganii
atgaaatggcctgtttatcttcctgttattgttttttccgccacgctgccattcagtgtggcatttgctgatgatgatgacgacgacgattatgaatttaacccggcctttattaaaaactatgcggtcagcggggatgtcgatttacgccgcctgaccaccgataatgaccagatgcccgggttataccgtactgatgtttatgtcaacgatcagaataccgggaaattcctgattaagctggaaaataataaagctgaaaaattgcaggtctgcttaacaccagaattggttgattcaatgggattaatcaattcactcgttgatgcctttcataaacaggcggaaacgcaggatgaaaacagctgcttttatttatctgatctgatccctgaatccgcatttgaatttattttcagtaaacagcaactgcatctttctgtcccgcaacgggatttactgaaaccggttccgccggaaagtaacccggttaactgggatgaaggtaaggctgttatatttaccaattatttttttaaccgctataccacccgctcagaaggctattccaataccaccaattcattaacgctgaattccggcattaatttttccaaatggcgtttccgtaatgacagccagataaataatgaaaaatacaccgctgttatgacctggcttgaacgggatattgattcggtaaaaggaaaactgacactcggggatttttattccggctcggttttctccaacggcagttcattacggggtgtgcgtttacgtaatgataacagtatgttatcgagccgtgagaccgggtttgccccggtgattcaggggatcgccaaaacccaggcgcaggtaaaggtctatcttgcggattccggaacggaaatttacaacaccgtggtacctgccgggccgttcgaaataaatgatctcctgccaatctattattcaggggatctgctggtcgatattattgaatccgacggcagtgttcagaaaatgcggatcccggtacaaagcggtttagcctttacccgtccgggtaaactcgatttcgatgtcggcgtgggtaaactgcgctaccgtaatacggtattcggtgatccggtaactgacgcctcattacgttacggtgtcagcaaccgtatttctgcctcactgggtacggtattcagtaacgattatgtatccggcgcggccggaatgaccattaataccccggtcggtgcttttaacggtgaagtgatccacgccaaagccacactgaaaaataatgataaaacccttgaagggaattcttataagctcagttacagcaaaacatttccgtcaacggaaacctatatcaacctctcttccattcagtttgataccaaaaactatgtcagcgtttataacgcgatgcagatgaatcacggctattatcagtatgatgaacagcagcagaataatgcctataaactgaaaacccagtacaccctgtcgatgagccagcgcctgccgtataacgccggcagtgtcagtgtcagcggttcaacggccgattactggaacagcagccaaaccagtaagcagtacaccctgtcttataccaccaccgtgtatgatgccggggttatcgcttctctccagaaaaccgataaccagtataataatgacaccctcttttcattatcactgagcattccgctgtctgccggaaataacacctatctgaccgccaattatctcaattccgacaataaccggaatatcggtaccggtgtcagcggcagtctcggggattctcttgattactcattatccgccggacaggatcaatatcaggatgaaaccagccgttacgccacagcaggcggccgttataaaaccggcattgcggatttctcagcggattacagccattatcctgactcaaaaacattaagtatgagtgcgtccggtgccattgtcggccacagcggcggattactgtttgccaatacgctgggaaattcattcgccattattaaagcggaaggcattgaaaatgcacaggtcctggggtcggatacacacacaaacagtgccggttatgccatccagccaaaccttgtgccttaccgcaaaaacctggtcggtatcgaaacccgcgacctggggcagaattacacggtggaagaatcaaaacggacgataattccccgctccggcagcgcgatatttattgagctggatacccgtatcggtgcgccggtggtactgaaaacccgcgattctaatggaaatctgttaccgctgggtgcaacagtgtacgggccggaaaatgagccgctgacgtttgtcggtcagggcgggaaaatcttcctcaatctgaatgaaaaaatgacaaccgtccgcgtggataccagtgccgccgacggacagcaatgtgtgattgacctgactgagattaatcgcaaatacctgatgaatgataaagtgtcggtcgtgacagcgacctgcgggataattaatgatgagaattaa

SEQ ID NO: 285621 - DNA, 1185 bp, Morganella morganii
atgatgagaattaaatcactgctttttgtcttcgccatgatggtcagtgcacaagtagccgctttcagcacagtaacggacattaaaggccacgttgcccctgtctggcggggggcaaaggatatcaaagccacaataggtgtttttaactcaggcagttaccggtttggcgatcctatacggaataccaacggacagttgattgaaacggagtatatcccgcattttcacttaagttattcatcgccccgcttccgctgcacccgtggtgaaacctatcgagcaactgtcacaacagaaggtatcggaacaattctgggtgagaaagacgggtatgctgtaattcagtccaatatcccgggcgtgggttaccgactggatatcggcggggaaatttccggaacatacgttaacccatcaattacccgctacagtaaaataggcgtaaatggtgcaaccgatattgatcttccctgtacatcacaaaaccagtttgcactgggcgtcaaagtgacactggtaagaactgatgaacagccggatgatagccaggggctttcatttttaccggtgcatattgcatcaccttatccggtggctatttcggtttatgacccggccggaaacctggtactggacggaagatggtcaattccgctgaaaaaaaccagtaatatcgcagtgaaatatctgaaagagtcctgtcagtaccgtttttccaaccgcgagcagatcatcagcctcggtaaagtggcatcagggcagttctccggtcccggcagcacggcctacggggaaaacggcccgcaatccgtggatgtgtatatcgactgcggcggcaccaactttattcagggtatccgtgcctctgtttttgaaggcaccgccggtaatgaagcctccgccgcgctgcgccgccagggggtattactgaacaacctgaccggacagaatgccgcaaaaggtgtgggggtacaggtactgattgataataatgtcaaaccactcggcacagatatgccggtttatattgatgatgatactcagtgggatgtggtaaaaggcggtgaaattatccggggtatctatcattttgcggtcagcggacgttattatcagacagagccgcaaattcgtgaggggctgattcagaccacggccggatttaccctgatctaccgctga

SEQ ID NO: 285622 - DNA, 720 bp, Morganella morganii
atgaaaaactggctgaacccgaccccgttactgaattttaatgcagataacattcagacactgattacagagcgccgctggcggacactgccgccgcgtgaacaaatgaaagcgatatatgatttctgccgtgatgatatccgtttcgggtttaataccgatgactatctgaccgcctccgcaattttgcaggatggctacggacagtgtaataccaaatccattctgtttatggcgttattacgcggtgtcggtattccgtgccgtctgcacggttttactatcgataaatcactgcagaaaggcatcatgaacggtaagctttacgccatgatgccgcaggaaatctctcacacctgggttgaggcacagattgaggataactggtttaatttcgagggattgatccttgatatgccgtatttacaggcattacaaaaccattatcaggaatttgaagggcgtttcaccgggtttggtatcgctattgattccttgcaggaagcaccggtggagtggaacggcgataacgacacctatatccagcgtgacggtattgtgcaggatttcgggatatttgatgatccggacagttttttcgcgctgcatgcacagaaaatgagtgaagatgataagaccctgtttgcacaaacattacgccatcagatcaacgataatattacagttatccggcagaataattttgatgcggtaaaatag

SEQ ID NO: 285623 - DNA, 780 bp, Morganella morganii
atggaaaaaacactgtttgtgatgcccgatcacctctctctgttcggaacggcaccggatgcccggcctcaccggcatgattttctgcatctgattattgcgccggacggtttaccgggagagtggattatcagcggagagacgtacaacaccagcgcggtactgattaacagccgtataccgcatcagataatcagcggcaaccggccgctctggctgatccttatcgatcatacatcgccgatggcggtttgcctgcgtcatcttctgctgacggatgatttcccgcaggcgaggtcactttctgcgcaaatcaccggtatgttgccggatatcaccgcgtttaccggcctgacatcaccgggagaaaaagaataccggcacttgtggcagaaactgactgcggcacttggggtaacagggtgttatcagccgcatgaaatcagtgatgcgcggatcagggcggtgatcacagcactgcgttcaccgtcaccgctgccgttgcaggacagcgatctgctggcggacatttatttatcgcgcagccggctgtcacatctgttctctgataccaccggcggcacactgaaagggtatattctgtttcagcgcctgatccgtgcgctgtctgctattgctcagggtgataccgccaccgcagcggcactggatgcgggttttgattcaccgtctcatttatccgcagtctgccggacactgaccggtattcagccgcgttttgcccggcaggtcagccgatttctgaaagtttcgccgtga

SEQ ID NO: 285624 - DNA, 906 bp, Morganella morganii
atgacaccagtcagatttatgaatgccaatattgagatggccggaaatctgtatttcccggcagattttgatgcgtcaggccgttatccggcgattatcatggttcaccccggcggcggggtaaaagagcagaccgccggcttgtatgcagaaaaactggcagagcacggttttgttactctggcctttgatgcatcataccagggagaaagcagcggagaaccgcgccactttgaaaatccgtacgcccgtgttgaggatatcagcgccgcggtggattatctggtaacccggccgttcgttgatgaaaaccgcatcggtgtgacgggaatttgtgccggaggtggctatgctatccatgctgcaatgattgaccaccggattaaagctgcgggaactatcagtgcagttaattacggtgatatgtaccgctacggctggcggggcgatcagacaccggaacagaccgctgggttgctgcaactggcggctgaacagcggaatgcagaagcaaaaggtgcggcaacggggtatctgccgactattccggcttcagccccggaacagcaggagccggatctggcagaagcatatgattactatcatactgcgcgggcaatgcatcctaatgcacccggcaaaatcaccacgcgcagcctggcgcaactgataacttatgatgcatttaatcatgcggatatctttctgacacaacctctgctggtaattgcgggaagtgaagcgggaacgcgctggttatcagaaaagatttatcataaggcggcatcagagaataaaacgttatgtgtggttgacggcgcaacccatattgcaatgtatgaccagccggactatgtggcgcaggcggtcaatcagttggtatcatttatgcacaacgcattgtaa

SEQ ID NO: 285625 - DNA, 891 bp, Morganella morganii
atgaaagagaacctcaatgatttgcagacattcctgatggttgtccgggaaggcagttttacccgggccgctgttcaggcgggtacatcacaatcagccgtgagtcagaccatcaataacctggaacagcgtctgcaactgaaactgctgaacagaactacccgcagtctgacactgacagaggccggtgagcgactgattgatctggttgcaccagcaatggcggagattacggacgggttggcacaactggcggaactgcgggaaaaacccgccgggacagtgcgaatttccgctgatgagtatgccgtacaacaggttttgtggcctgcactgatgccggtactgaaaaaatacccggagatccgtcttgagctgatcacggattatggtctggcagatatcgccggaggacgatttgatgcaggtgtacgccggggcggattgattgcggggaatatgatagcggtcccgatcagcggaaaaaacccgatggcactggtggtttccccggaatgtcctgccgcacataccgcaccggttataccggaggatttgctcaccctgccctgtatcaacctgcgtttatcaactcacggagaaaatttttcctgggtttttgtcagaaacaaccgggaacaaaaactgcgggtcagcggacaactggtagtcagcagcattaaccaggcactccgtgcctgccttgccggctacggatttgcatatctgccacgacaactggtcagtccgcacattgccgccggggagttactgagtgtgctggatgaatgttgtatcacctatccggaatattatctctattataccagccgcctgaaatcttctgctgctttcggcatcatcgctgacgcgctccgcaaagcggtataa

SEQ ID NO: 285626 - DNA, 372 bp, Morganella morganii
atgaaattacttgttatgggtatcttgttctctacatctgtaatggctgcgaatcaatgcaagcctgatgatgtttgcttgtcttttaaaaccagcaaagatgagctctctataacttgtaaaaatatagagtcagcgaaaatcagcacagttataggaaaaaatgactcattagatattcaccttaacggtgatactggcttgagtgatttttctgctaaaaatatgtaccaaacagcagagttatatattaacggcacaaaatatagccaggccgttataacttccagaatgagtaattcaatccgaatcaacgtgaaagataattctgattttcagttagtggatgatctgatgaggtgtgttgattaa

SEQ ID NO: 285627 - DNA, 237 bp, Morganella morganii
atgaaatattatctagaaatcagagatccggacgatagctcttgtgttgctgaccggtttgaaagtaccgagccattcatgtcatttagtgttggtgacactattaatggtcactctatcgaacaggaagagggtctatcgcctcaccttgttattaccgaaattgagcatttcatttttatagtaggtgacactacccaccataaagtaatgctatataccaaagtaaaaaaataa

SEQ ID NO: 285628 - DNA, 477 bp, Morganella morganii
atgaataaccgattatttaaaaaagtcatggctgcctgttctgccggtgcgattgccggtgcgctggtgctgatccccgcatacgagggcgttgagtacaaaccttaccgtgatgtggccggagtgctcaccgtatgttatggccataccggcagtgatattcagcccggcaagttgtacacggacgcagagtgcaaggcgctgctacatgacgacctaacgaaagtccggcgcgcggttgacccgatgatcaaagtgtcgatagatgacaacacccgtgcggccatctattccttcgtttacaacgtagggcccggtgcgttctcgcgttctacgatgctgcgtaaactcaatgccggtgacatcgcgggtgcatgtgacgaaatgaagcgctggacgtttgctggtggtaaacagtggcaggggctgattaaccggcgcgaaacggagaaagcgatatgccacggaaccctttaa

SEQ ID NO: 285629 - DNA, 183 bp, Morganella morganii
atgtctggcggtattattgattgcccttattgtggacgaaaattgcaatactgggagtggggaatcgttgggccggggggaaaagaaaaggagccggttatatgcccatacgaagactgtaaaaaagtcatttttgaaagaatgacggatgggatatttagcagtaagaaagtaattgagtaa

SEQ ID NO: 285630 - DNA, 819 bp, Morganella morganii
atggaacttccaataacagattcgattattattgctatagcaaagcttgtagatgatgctcaagttgagactcgtcaaccttcccattatgaccttgaaaatacatttagaagggctggcttgctcaccgctgaccctaaaacaaaaggtttgacggttggaaaagcaaaaagggtaacagctgttttaaattgggctattgaatatgaccaaaaatctggtagtaaattaatttcacacttgttgtctctaattaggagcgtaggtggattcagggaatcatctccaaatttcgtcggtaaagagcagatacagaacgcaatggatgcattcaagtctgaacattatattctttccgaggatggtagtatttctacaatgatattggatacactgagtggtaaaaaccttacagaagctttactctcatacgcaaatagagctaaaaaaggggttgaagatgctgcattattatctggcacaggcaaagatcttttagaagctacagctaaacatgtaatttattcaaaatttggtaatcaggttccagttaatactaatttcccaacattgcttggtcaggcatatgcagctttgcaaatggctacacctcgggatcctaaagaaattaatgaggcagcaataaaagattacgaacgtgctttgtttgatttggccttatctattaatcgagtccgtaatagagagggtactgggcatggtagactttgtattacatcattatctcaaccagaatcccatagcatcattcaggctgttggggtggtttctgaatatatgttaaacaagcttaaataa

SEQ ID NO: 285631 - DNA, 966 bp, Morganella morganii
atgtcaggacatccattaaaagttaaatgtattcgtgatgatggtagtcagttctggactgagggaaaggagtacccagcaaagtttaatatttccggccttctcatcatcgctgaggatggcgacgataatgcagagtggtctgcctcacaagttgataacagcggtttttatacagttgtcgggcttgattatttaactcattttgaactactgacttctgagggggaggccatgagagagcgcggaataattttcaacgctgagatggtgtgcgccattctcgatggtcggaagacacagacacgacgtgtgataagtgatcgacatcttcacctgatcgacgtcgcatcacaattaggtgaatgctaccccctggaatgtggcatagaccatgcaaacagccagagctattaccgttatttatgtccatttggtgatgttggtgaccggctttgggtgcgtgaaacttttgcattacttggtaacgaagatgatatttgtgtcgattggaatgaccgaattgtttatgacgaaaaagaagcagccagaatttatagagcctcttgtgaacaaaaagacggtgattacggcctatggtcaatccctgatgatgctgactggaagcctcatactgacaatcataaatatgatggaacatggcgaccatctatccacatgccgcgctgggcctcacgcatactgctggaaataactggcgttcgcgttgagcggttgcaggatatcagtgaagaagatgctgtatcggaaggcgttattactgcccgctatggtaataaaggtaactggctggagggcttttatgtgcccggaggcaatcagccacatcagactgcaaaatctgcatatagcgagctatggtgttcaatttacggcgtagatgcctggtataaaaacccgtgggtgtgggctatcgagtttaagcagactcagagaggaaattga

SEQ ID NO: 285632 - DNA, 180 bp, Morganella morganii
atggaaccgtggcaaccaggacaacaattactgaccgattttgatattaaattaggccgcctggctgccagtgtaaaaaacagaccatgcactccggcagatattaaacgcgcatgcgatacggctgacctgattatcttatcggtaatgaggcaagaccatgacgagagacaacaatga

SEQ ID NO: 285633 - DNA, 1041 bp, Morganella morganii
atggcaagaaatcgaaatacagcaaacaaagggcttccgcctaatttgtatctgcgcaacggttattattcatatcgcgacccgagaacaagaaaggaatatggcctcgggcgcaacagaacattggcgattacagaagcaattcaggccaatattgaattacttggaacaggggatagtctggtgagccgcattaatactgaatcagtaatcactgtcggtgaatggtgtttaaaatatgacgccattatccagcggcggggcctgagtaaaacaacactgagaaataaacggcaactgctcaaagctattcccgacgatatgcggaaaatgcctgttacccaaatttcagtgaaagacattgctaatttactttctgattacgtcgaaaaaggcgcatcatcaatggcaaaggtactcagatccgagttgagagatttattccgcgaggctatggctgatgggctgattatggctaaccctgtagagggtacacggaatcccagaaccagcgtttccagatctcgattatctttcgaggcgtaccgtgccattttatccgaagctgaaaatacaaaaccagcatggtttgtccgcatgatgaaggctgcacttgttacagggcagcgacagggggatttgtgccgaatgcataaagacaatattaagaatgacagattgtatgttgaacaaggtaaaacagggtcgaagctgtctatacctctagatctggaaattcgcgggataaaactcagggatatcattaatgaatcagggaacggatatttgttttcctccacaagaggtgatgcccccggagaacagatggtcagaaaacacttccagtcattgcgcaaatcgatcggcattaagtgggatggtacccctccgtcatttcacgaaatacgaagtttgtcagcgagactgtactcagaagagcgcggtgtcgatttcgccaagcaacttcttgggcataaatcagtgacgatgacagaggtttatcgtgacagccgtggaggctggaacgaaataatgttatga

SEQ ID NO: 285634 - DNA, 519 bp, Morganella morganii
atgaaaaaaagcatactcatgatgctattattacttactgcagtttcaacagttaaagctgatacatggaaagaatcaggaaactggggggtatatgatagtaagccggaagtgaaatttaaaccacttgatattcctgtgtataaaaaatatttttcaagagcagcaaaatatctggtttcagtttccggagctaatgataaaacgaataaattttgtctgattggttataaatggaattcagatagtcgtgatgagagagtcaatgtcatctgggatggccactatttaattacctgggaaacaccagataactattctgatgattcaacgtatataaagtcactttctatgtccaggggaatgattaacctgaaagaaaatgttgttccttatagcgaaattggtgtgcacacagccctttggccggaagagggagtgaagcagataacggatgactgtttacataatggtaatctcgttgagattaaaccatttataaaagatacagataattaa

SEQ ID NO: 285635 - DNA, 837 bp, Morganella morganii
atgtccgattttattatcagattgaataacggcaggaatctgaccagacaggaattcagactgacaccaaattattcagtcacattaaaaataagcggtttgcataaccgaaaacatttagaactgcaaaaaagtaacgaaagaatacgtttagatattaatgctgataacaaaaagttagagcaaacagtaaaagttacagcagtgagtgaaggggaaagtattgttacagcaaaaacagatggtattagccagtgtgatattcctgcggcaggcggtaaaatatcaaattgttttccaaaattgacttttattgtattacccacaatgtctgttcctgcagggttaacggttaatcaaaaactattattgcaggttttactggcagaaacatcaacacctgaaaagggatattttaaccagaaagaggccagagaggcgatgtctctgatgcatgatgcgctttataaccgaatcaactcgccggaatcccgtcgtcttgatgtaccggagaacggcgataaactgcaggggttaatttacaatggaagggttataaatggttttaaagcaggtaatatcgattcgaacattcagaaaagaattaatcaactgatagattatgcaaatgacggcggggataatatggataaatacagaattttattatcagatgctatagacattgcaaaaaaagagaacattattatatcacatgacgtcatcggatggcgaacagatagccatggtcttggcggaggaagtgttgaagtatttaaaaaacttcaggggcaggtttttctgaaattaagtgatagctttaataaaaataaatga

SEQ ID NO: 285636 - DNA, 444 bp, Morganella morganii
atgaaatccggtacaataaagtatggtgttatcagtctgctttttctgactttaacaggcgttgcgaatgcggatgtttaccgtgaccgcagcggcagggttacaggctcatcagtaaaaagttcaggcgatactatttatcgcgatagtcggggtgtgaatacgggcagtgctgtggagtcatatgatggcagaacgacacactataaagatgcacatggtgttgtgacaggatactccacaactgatgcatatggtaaaacgcagtaccatgacaggagtggtgttgcgactgggagtgctactaaagacgcatcaggaaatgtcacgtaccgcgataaaagtggcattgtgacaggaacagcaacaacagacgcgtggggaaaaacaactttccgtgatcgtagcggtattgtgaccgggacacagcaaaagcaaaattaa

SEQ ID NO: 285637 - DNA, 216 bp, Morganella morganii
gtgtccgccgataacgccgaagcccacatgcccaccggtcactcagacatgcacaccgccggatacaccgtggacaccgacaacaccgacaacaccgacaacgccgacgacaccgacaacgccgacgacaccgacaacaccgacaacaccgacaacaccaacatcaccgacaacgccgacaacaccgatgacaccaacgacaccacaaacacctaa

SEQ ID NO: 285638 - DNA, 381 bp, Morganella morganii
atgaatataagatcgggaatatatttactggtactgcttctgatgacaggaagtaatgcactggctgcctgcggtaaccggattgatatcgctattactatcggcagtcgtggtctggtgtacgggaaaccgggtgttccgctgaacgatgattcgctgggtgtcatttatagtggtgaattgtatatcctgcgtgaaaatggtcgtcaggttgctgttggtatggcgaacgagcaaggacaggttcgttataaatttaaaaccggagaagtctatcagctggataatttacagaacccgagagtttttgtggttaccgataaaggatgcaatttatctgcctatgatattcagaaaacgtggcagggagaataccggtga

SEQ ID NO: 285639 - DNA, 1074 bp, Morganella morganii
atgaaaataataacattctccttactgctgctgtttccggtactgtctgcacaggcagcaccggcagcatttgatattaataaaaagcaggaaaaaattaattttgtcactgtggcgatgcctgtttgtcaggatgcccgccgttttgatccgccgttaccgaaagatccggatgcggatttatactaccgggccgcgaaaaaaatactcggccagcgggataccgcaaattacagaaatatgcatatcatcggacggaaagcagccgatatggggcactggaaagccaaactgctgatggcgaaactgtatatgcaaaattccaaaaactattattcggaacctgacccggaacaggcgcgggcttatattgatgagctgatgagtcagaatgtggcggaggctttttattttatgagtcagtaccgcaatgataaccacagcggctttaaaactgccccggcaccagcctcattttatctttaccgtgcagcggaatcaggcgatccggatgcaatggtatccgtttccaatatattcctgacggtaaagcgttataaagaatcccgcgcattactggagtgcggaatgaaattcggcggcggtggtgcggtcgccaatgatatcagcgtcagtgagtttattaatgccagaacacaggaagactgggaacggggattccggtatttgtatgccagtgcaaaggcgggatattaccgggcaatggggcagtttcagtttcgtgaagcgatgtatcagaaaaaaaatccccgctattatctgaatgctgagtttatccgccgggcagatattttatcttttgcgatggatccgcaattttatcatgatgacccgtaccggaaagccaaagggttgccataccgtgttaaggggaatatcgacctgaaatttccgaaccttgaaaaaatcattccgttacctccggcaacattaccgccgtggaatgatgatattactgtgggaatgagtgcacaggacgcagaagattaccggaccgattttgattatgaccggctggtggccaaaattcagttgacggggctggcaaaataa

SEQ ID NO: 285640 - DNA, 1074 bp, Morganella morganii
atgaataaaatgactttctccttactgttgctgtttccgttcctgtcggttcaggcggcaccggcagcattcgatattaataaaaagcaggaaaaaattaattttgtcactgtggcgatgccggtttgtcaggatgcccgccgttttgatccgccattaccgaaagatccggatgcggatttatactatcgcgccgcgaaaaaaatactcggtcagcgggataccgcaaattacagaaatatgcatatcatcgggcggaaagccgccgatatggggcactggaaagccaaactgctgatggcggggctgtatatgcaaaatagcaaaaactattattctgaaccgaagccggaacaggcgcgggcttatattgatgagctgatgagtcagaatgtaccggaagctttttattttatgagccagcgccgcagtaacagccgcagcggctttaaaacagcaccggcaccggcgtcattttatctttaccgtgcagcagaattaggtgatccggatgcaatggtatccatttctaatatatttctgacagtcaaacgttataaagaatcccgtgcattactggaatgcggatttaaatatggtggcggcggatcagcggcaaacagccttgcgattgatgaatccctgaatgccagaacacaggaagactgggtacgggctttttattatctgtatgccggtgccaaagccggtgaccgtgaatcgatggctgaaatgcagatgcaggaagcggaatatcagcaaaaaaatccccgctattatctgaacgctgagtttgtccgccgggcagatgttttatcgttagcgatgaatccgcaatttcatcatgatgacccgtaccggaaggccaaagggctgccgtaccgcgtcaaagggaatatcgacctgaaattcccgaaccttgaaaaaatcattccgctacccccggcaacattaccgccgtggaatgatgatattaccgtcggaatgagtgcgcaggatgctgaagattaccggactgattttgattatgaccgcctggtggccaaaatccagttaacgggactgacgaactga

SEQ ID NO: 285641 - DNA, 2019 bp, Morganella morganii
atggataataaaattaatgcttataagattattggtgatactccttctatttatgctgaggttgatgagacccggggtaaatttacattaactcttttaaaagataacgaaacagttaagactgtcaccaatacggattgcggacagacatttaatgtaccttcaccgggtacttataccgtttccgttagttattccgctgagaaacattactctgctgagatttatttcagtgaggaagaatttaagaataataaattaaaattatcgtctcctgtaccagagcctgatatgttaaaaactcaggatccattactcgatgatgttgatgattttttaattactgtaaaaattaagaaaggaaaaaaatccacgttagataagcttataaaagggaaaagcgagctttttggtctggcaaaaagtttcattaatttaccttcgtttcctgaagatcaccctgttcatcagtatgagtattatacactcaaaacctcattgccttataatgatgcatacaaaaaatgtctcgaaatggaaaaatcgcaagacattatttatgcttctgtgacctcagggatgataaccgcaacagtatatgatgccggcaataatacagatagcgctgccgccccatcttccgcaacaccagattttaatcacctgcaaaagtatctggatgagccacacggtatgaatatccgtaatgcatgggccagaggaaataccggcaaactcgcttctgtccggcatatcgactttggtgttaatgaaaagcatgaagatcttcagagtggtaacgtaaccattgttgtcaatccgcctaacagtctggaaagtcagcatggtaccgcatctgtcggtactatttccgctgctgataacgggtttggtatgacaggaatggcgcattcggccaaggtatacacatattatgccaatcagcctgaacacaaaaatatcatgaatgatgctaagccgggagatattatcagcgttgatgcaggacgtcgttataataataatgatgttccctgtacagtagcaaaagacttttgggataccatcaataatatgacgaaaaaaggagccattgttattttagctgcatgtaactcggggattgatttaagtaaaccatctaatttcatggatcatggcgattgtggtggtatttttgtcggtgcctgcgatcccgcaacaggaagacgcgcaagtttttcaaattatggccactccacctcattagttaattcatgggggtataatattgcaacaaccggctatggcaatttgtacaaaagaggaaatgacaccaccaccatgtatacagacagctataatggtacttccggtgcaacacctttatgtgcaggcgccctggcattgctgcaatcacatgctaaaagtatgggtgttatgctcaacgcacaaagcatgcgaaaattactcagtaaatcgacttataccgaaggtgttattgatggcattggtgtacggccgaatgtggctcagttaatgcacgaactggataaagaaattttagcgcctcaggctggcgttaatccgttcccgcatgaatctggctatcataaccttctggtttctctggacagagagcaatataaagaagaaaacattccttttttctatcagtatactgatatgccatcaaacgcgtttgtttgttattataaggaacagggccccgctgatttagtctggctggactataatgttactcctgtaaaaataccagtgattgatagtaccggtaaaatttcagtactgtatttaaaaatatcaaaatggaataatgcaggattactttccatgaatacaggagcatacaccagtaccgaccacgggaatttcagaatgcgattaatttatgaccctaaagataatactcatctgaataaaaacgcatatagcggtatattttctgcatatgttacatcatggcattataacagaaaatacaaattgccgttacgaatcaatattcaaattaaataa

SEQ ID NO: 285642 - DNA, 459 bp, Morganella morganii
atgaaaacaagaccttcggcaagatttatcatcttaaacaaacaaaatgaaatattgttatttcatttccattttaacagcggagctctgtcaggtgaatcatactgggcgacgccgggcggggggcttgaaccgggtgaaacctatgaacaggcggcatgccgggaactcagggaagaaaccggaattatccgcgaaaagtttggtgctgcggtagcggaaaatacatttccgatgcttttgccaaatggtgaaaccgtgatggcagaggagcgattttatctggtcaatgtcagtgatgaagagctgaatttttctgactggacaacgcaggaaaaagaggtaatcaatgaccacaagtggtgggcgttaagtgagcttctgaaaacgaagcaacaggtttttcccgttgagattattgtgcggattttaagtcaggttgaaatgagtaataagtag

SEQ ID NO: 285643 - DNA, 291 bp, Morganella morganii
atggtggtatccggtttatcaggtaaaaacagtgctgcagatgagcagactgactcacctgatgtgattgaaaatacactggaaaaagagtttgaaaatattgtcgaccctgataatcccaatataattaccactaagaatgagccggatctttacgaaaaaataaaagagataacaaactgtgatgatattcagtataaagacacagagtcctatttcggaatattataccagggaaaaacaaacagatggattgtgcgctattacgataaagcaaatgcctttatctag

SEQ ID NO: 285644 - DNA, 687 bp, Morganella morganii
atgaaaccagggtttatatgtatggctgacaatggcaaagtacaattggatagtatgcatacggcaatgactctaatccggaagcaaagctttaattgtccccgggttcagaaaagtggcactggtgtaattgagacagtccctttccctactactgtgcatacaaacacccggcttattgcagctcgtgcggatttttgggtacgtattggcggacaaaactacaaaaatgggtccggtaatgcctatgtacaactgcctttttataagacaccaagtggaaatattactgtatgggaatttggagatgctcctgttaaacaatggaatgaaagaataggaattgtcgttataaatccggataccaataaagttacatacaattcaaattgggcggttgctaatattttagattttagacgtgtaaccataaatggcggatggtctatgactctgccaaataatggaaaaaattgtgcggtagttattggtggtggtggttcgttcagagcggattctgaggagtatgtggaattttattctttattttggcgtattaatggcgctaaattagaaattcaatccagtacggatcgttttgctaggcctgatatattagggggttctaatccgagtcatttttcaatgcctttatttatactaattgtagatactactgggatataa

SEQ ID NO: 285645 - DNA, 321 bp, Morganella morganii
atggcgcatggaattattatttttaaaagcgacggaaccaagcttttagatagtagtaaaaggatcgcccgtattgttggctggcatgatgttactcctgtgccggtcgggtcttttcgctatacatggaatcatacagatttacttccgtatggagatttatttgtatggacaaaccctaatttttggtttaaccaggatggttggctggatttacgtatcaatgacggaattattacccttgaggggaacttaaaacgaatagactctatttgggataatgaaacgtatatgcgagttttgtatggagttaaagcatga

SEQ ID NO: 285646 - DNA, 606 bp, Morganella morganii
atgaaaaatattggctatatccttatgggtgtcggattgatagcaatgctttgtgctatgagtatggatgtctcagtatccacatatgccggaagagttaacaatatcggtttaatgtctgagagacaaaattaccttatattcagtggcttcatctttattggtggtgtcattctggcaatattcggaagtaaatctgatacggtttcaggtagcggcaatgtgaaatgtgaatactgtgcggaattaataaaaccggatgccgttatttgtaagcattgcggcaaagatgttccggagcaccgtgatgatgcggaagttaataaatatagtacattacctgatcaggttgacgaggaattttcattccgcagatggactgctgcggaatttatcatacgtgatgaatccgggctgagattaaataaagatgcagtgatgcactttatacatgaaatgaaattatccagaccgggagaaactgatagtgatctggttaaattctataaaaatggcatagattcaatcaaaagaggtcttcctgagaaggtgaaaactgaatttgaaattgattttgcagctaagatggatcataaaaaagaatag

SEQ ID NO: 285647 - DNA, 813 bp, Morganella morganii
atgattgaaaaaactattttgaaatgggcgggttcaaaagtcggcattatggatctgttacgtccgcacctgccaaaaacaaaacgccttgttgaaccgttcgccggttcctgtgctgtgatgatgaatactgactatgagcagtatttaattacagatgtgaataacgatttaatcactatgtaccgcgaaatagcatcatttaaaaccaactgggttttagagacggcaaaggatttattcgagatcgaactgtgtgaaccaggttattacgaggaaagagatttttttaataaggctaaatcagcgctgccaaatgtagctattgccgcttattttatttacttaaaccgtcactgttataacggactgtgtcgttacaaccagaaaggcgattttaatgcaccgcgtggaaattataaaaaaccatacttcccggagaaagaaatccgcgcatttgctgccaaagcagtaaaagccaacatccagcacctcgtatggcaggacacgttatcgctggtcgattttggtgacggtgtgtattgcgaccctccgtacatggggaaaaatttcactcaatatcacgctgacggattcacggatagcgacaatgaagcactggcctttgccctgaaagatttgaatgatattcagggtaccccggtcacagtatcgaattcactggcagcaaaagagctgtatgcagatttaggcttcactatccacgtaatagaagcaccgcgcaccattgcggccaatggtaaccggaagaaagcacctgaaattattgctgtgctgggtggttgccaatga

SEQ ID NO: 285648 - DNA, 2433 bp, Morganella morganii
atggaatttgaccgcaaaaatttagttgttgcagatgaaaaagttgatttagaaaagttaattagaaaaattcagcaaggtaaagcgatactttttattggggcaggtttttctagaaatgcaacgaatatttctggaacctccttatctgaagcaaaagaactttctcatatactttgtcgggaatgtagtattccagaagatgataatttaagattcacctctgattattatatttctagaaactctcctgatagaatcattgaattgcttaataaattttatacaatcaaacacgtatcaaatgaacataaaattatagcaaaattaccatggaaaagatgttatacaacaaattatgatagatgttttgagttagcctcagaacaagaaggtattaaggttgaaacaattgatttaagtcacgaaacaacagaatattacaaacgtggtaacttatgtattcatttgaatggttcaattcatagtttaaacacgtctaccttaaacaactcatttaaattatcagactcgtcttactcctcaccggactcatttatagaatctgactggttctattatttcaagagagatttagacagaagtaactgtatagtatttttaggctattcaatgtacgatatagaaattaaaaaaatattatccagtgatcctgatttaaaagacaaaacattttttataacctcaccaaatcctgatattaaatcaaaattcaccctaagtaagtttggtagtattcttccaataggattggaagaatttagtaagattgtacatgaatcgtctgagtcagataataatgatgaatataatcttcaagctttagaactatataatttcactaatgaaactgaaaatataagtgatgatgaagttgaaaaattattgatgtatggggatttaaataatgcccatattgacaacttcatgttgggtaattcaaaagttccttttcttgtcagaagaacaatgattgataaaatactctcatttatcgattcaggaaggaacatcatactctactcatcactggggaatggaaaaacaatactaataaagcaattacgtagtttgttaacacaaaagggatttgagtgttacgaagtttgcgatgaagacgctgattatatcgatgatattgattttttatccaaatcaaaagaacaatgtgtaattattctagatagatatgagcaatatattaatattatagagcatatttcgctggctaattatgaaaatataactgttttggcagcatctcgaataggtgatcatgagtatcatcgagagaaattagatcaaataccttttaaatacgcagagataaatattgatactcttgatgaagacgaacttaaagaatttgtaaggataattgataacttaggtttatggggggataaggctggattaagtgaacatcaaaaaatcaagcacttacacgatgaaaatataagtcaattttccattactcttttaacattacttaactcaccacaaataaaaactaaaatatctagtcttttagttgaaatcaaaaaaaataagggctatgaagatactattctggctatttgcttgtgtcaaataataggggtaaatgccaacagaagtattatttctgaattagcaggcaataatgatatttacaacccacttttaactaataataaaaattttaaagaaatatttaactttaaagatggatgtattattaacagctcaagcttattttgtgctttcctagtacgtaataattttactgcaacagccataatgaatagaatgcttgcaatagcttctaaatttagtcaattggactctaaggattatgagcaagataaaatattcaaggcgatgttgaagttttcatttattgagcaactgttaccagaagttgcaaaaattggcaatttaaaacgatattatgaaaatcttaaggttgaggttgattggctaagatacaaccctcatttctggctacaatatgcaatgagctatattgcttttcaggatttccctcgagcacagcaatatttagatcaagcctacgcactggctgtacaaaaagaaaattaccatactaacaatattgacacacagcaggctaaattgcttttattagaaagtgaaaagatatccgatggtaatatcgtgtattcaaaatttgaaaaggcacatgggttgttgagtaatttacctatagatatatatacattaagacaaatatttaaatataaagaattctatgataaaaacttcaaaaaattatccgtaaagaataaaggccattttatctctgcatgtaaagacatgatgaaaaaaattataaaacatgaaaatgataataactttaattatgggattttgttaagaactaaagatgcactaatgaaaattagtgattaa

SEQ ID NO: 285649 - DNA, 897 bp, Morganella morganii
atgactaatattacaaactattcggacattgttacagtccaagcaataagcaaagtaataaatactgaaaatttgtttgataaatcttttaaggaacaaaaaatatctccattagatcaatttttgacaaatgctaacaaaataaatttattatggataaataatcaatctataacaagagaattttctacaatcgtatttcttggatatatgtcagcagttgagagttatgttcgtgctttggttcgaggattaatccaagttgattatctgtcattaaaaaatgcatcggcaaaagatattacttttggagcggcattttttcatacaaaagaattacttccagaagctttaatggatgaattttcttttgttcatagtgataatattaagacgacatttaaagatttacttggattacatttgaaacttaataataaagtcgaagaagagttcaataaaatatgtcaattacgacattgttgcgttcatagatttggaaagcttggtgctaaaaatgccatgaaattaggaatagacaaacataatgctttatttgaaaagccatttaatttatctataaatgatttaacgttaatcgctcaaaacttaagatcaattgttaaagaaattaacaatgcgttatataaggaaacattagataggacatatccagttccgaagaatagaaatcaaagaaaagagtttgagcttaatggcatacggaatatttggacaaagaattatagtgacgataaggatacttttaaattgtactatgacctattttgtacaaaggtagattctgttcaatcactaccacctaaaaaaatgtatgatgcttttatacaagctcgttctaatgaagaggcaaaaaaagcgaatgagaacacttaa

SEQ ID NO: 285650 - DNA, 1707 bp, Morganella morganii
atgcttggggatgttattgaacaaagagcagatttcattccctcaaaagatcttaaaaatgaaacttctgctaatgactattttaatagaataatagaaagccttctttcaaagaaactcaccctgatcgaaggccctcgtggttgtggtaaaacacatgcaatgagatacgctgctttaacatgttttgatgatgaatcaaaaccttttgctgtatatgtatcatttaaccgctattaccggctcgagccattattaacatcaaatatcaatgctattggtttattccattcatggatgctatctcaactaatagttgaagccctggatacactagaaaaattacgcccaggattaaaaaaagaagatattaatactgcattaaattacattgatatagatatactcaaacgcctaattattcaattagaacgaaatggtgagatatccactgaagaaagtatagttgaacgaaagctttccgtatctaatgtaagaaatatactagaaaatcttcgtatattatcgaacagaaaaagagcaatattactattggatgatgctgcattaacactaacacccgaatatatgaaggaattttttgatatattcaaaaatttaaaatccagccttatatctccgaaagcatctgtttatccaggaactacagagtatggagcacgctttcacccaacccaagaaggggatgtattgcctgtgtggttatccgtagaagaccaatcttattcagaaataatgaatgaaattgccagaaaacgagttactaacttcgatgcaataccaatagaagtcaatgaatatttaaaaatagcatcatttggtattcctcgtgcatatttactgatgctacaagaatttcaacttggaggattcaagacgttacaacaagggttaaatcggttaatacaacatcatgttgaagataaaatacaagaatttaactctattaaacataagtcaccaaagctaaaaaacataattgaagttggaaacaatgtttttaattacatttgttttttattaaaaaatgaaaatgacaaattaaagaataaagaagaaaaacagctgagaattggaatatcaggtgtaaaagggaatacctatgttgagagaatgtttaatttattagtagaagctggtcttctctatgaagtaccagaaacggtatctcatggtaaagagcgagactatattcgttacataccacatatatcagcgcttcttcaccaaaaagcatttacctcaggagaaagaggcttttctgttaaaaccgtaatagaacatttgaagtttccatccaaaaaacaccctgtgaggcgctctgtttctactctgataaaaaaagaaactctggatacacttacattcgatcttccaccttgtagttcatgtggtgctgtacgtataggtcaaacacaaaaattttgtcacaattgtggcgctgagttaatttcattatcaacatttgaacagtgtatgagactccccttgcatgaagtacctggattaacaaattggcaaatgaataaaattaagaatgaaattcctaagtttaagagtattggggattttttatcttctcaggacccaagtaaagaattaagaaaagctgaaagaattggttttgcccgagctgaaaaaataatcagtcttgttcaaggctttgttgatgagtttttacaatga

SEQ ID NO: 285651 - DNA, 1239 bp, Morganella morganii
atgctaattcaaactaaattattacaaaaaccattaggtaagtactttacacgagaaattattagtgacttgctcatatctcacctgtctgtagaaaaccccaaatacgtcttagacttgggaagtggagacggagcactgtcaaaagctgctgcaaaaagatggtgtgaagctaaatttattactgttgatatcgacagtgatactatcatatccgatcatattgatagttatagtactaaaaaaaatcaacattataaattggatgtattagagccatctttaatttcagatataggcttggatcccgaaggagttgaccttgcattgtgcaatcctccatttataaaacccaaatggaaagcaaaacattttgattttcttagaaaggttggtataacaaatgaattatgtggtgttgaaaatattaccgcagaagtgatttttattattcaaaatttacgctctctgcgtaatggaggccaattaggcttaatcatacctgatggatttatttctggagaaaagagtcgtcgattacgtgaatttattttaaatgagaattcaatagaccgcgttataaaattaccttacaattcatttgtaggtacacatattcaagcccatatagttataatcacaaagggcatttataacgagcatataaaactatctaaattaaatgatgacaatattttatcagaaacaatcactatcacaaaaaaacaaggcattaattctcttgattatagctatcataacggtgtaggagccacaaaaggacaatggccaacattattagatttaggctgtactatttccagaggaaaatttaactctaaacaatgtagagattctatagataatatatttcacactgtaaatttagatcaaaatataaaatacatcagctttgttaataccccaaaactacagaaaaatcaagattcaaacgtagtcatagccagtaagggggatatattaatagccagagttggtcgtaatctaacaaaaaaaatctgcatggtgaaagaaggacattcgttaatatctgattgtatatatcgtttaaaagtaccttccttttggagaaatcaggttttcgattttcttattagtaatgaagggcagctgctattgaaatcatgtgttcgtggcactggtgcatcatatcttactacttcgatgttattgcaactgcctcttgtaggcatattaagagaaaatagtaatgactga

SEQ ID NO: 285652 - DNA, 2022 bp, Morganella morganii
atgagaacactaattcatgaaattggcgttatagataaatatggtaaaaaacacccagtaaattttagagcaggattaaatgttgtaacaggtaaatcatcaacagggaaaagtgccttaattgagatttttgattattgctttggaagtagtgaaaacacaattcctaaaggtgttatcactgacagcgctgaaatttattatgttgcactttcaatcgaagaacaaaatatagtcattgctcgaaatcctaaattaataaaaaaggcattttttcgccgattagaaatatttaattcagataatattgataaaaatttttttagtaataattactttcgtcctattgatgaatataaaaagtacctgagaagcttttttttagatatcgatgatgttgatgaatctttaacagctagagctaaccgtcgatacaatgcaaaatctgcgactccatccatacgtagtttttcatcatttatgcttcaacatcaaaaccttgttgctaataaacatgctctattttaccggtttgatgaaaaagaaaagcgcgatcaagttattgatcacacaaaaatattcattggattagttgatcaacagtatttccatttttcacaagagcatgaacgcttaacagatgaactcaagcgattagaacgccaacaaaaaactaacaaacttacctccgatatttataaacaaaatgtctcacctgtattaaatctgctttatgatttgatggggtttaaaaaagaacctttagttatagaaacagtattgagtaatccacaagatgcaaaagagcatctcgataagttaattgttcctgagaatattgatcatggttccgatgcagtaagccaaagatataatcatttaaatctggagcgaactaaaaaaacatcgctgctcagaaaattacaaagacaagaatcttcaattaaaaagcatattcaagaagatgaacgcctcattgacgatattagtaaatttgaaacgcctaaaagtatatacatttcagcttcagtttgtccattttgtcatactgagaaaaataacctagatgaaagtgcaaaaaaattacaacaagcaattgtaaaaatatcaggtaatcttacacacgcaaaaccaatgaaagcaaagttcgaatcttctttaattgaagtgaagcgtaatattgaaataataaagaatgaattatgtactctgtctcaacaaatagccgaaatcgaaaaagtggagaaacaattgattgagcaaaagagtctttatgaaaatgtattaatgcaaaaagcaaaattatttatattacttgatactctaaacatggccaatgatattgaattggacaaacaaattaatgaattaaatgaagaactaaaaaatataaataaaaagctcgcgttatatgatgtaaaaaaagggttaaaagatgcttctaataaagttaatgattatatggctgaaataggaaagcattttgaatttgaaaaaagctatcagccaattaatctccgattttcctttgaaacatttgatttataccacttatacggcgatgaaaaaatttatctaagatctatgggaagtggtgcaaactggctatatagtcatgtcactctatttctagctctacataaatattttgctgaattaggaaataaatgttcaataccatcgatcttatttttagaccaaccaacacaggtatattttccaaactttagtcgtgatgatgctgaaacttttaaacaacaaactcaacaagaagcagaacagcgaacagcgaaagaaagaagcattgatgaagatatgaaagcagtagaaaatctcttcagtcaattatcaatttattgtgatgaccttaaaaaagaaaatggttttagccctcaaataatagtaactgatcatgctgatggtttaacattatcaggaaactctacatttgaagctttagtcaatggcaatagatggcgtaccagaggccttattaatccagtgacaaaaaatgaacagtaa

SEQ ID NO: 285653 - DNA, 591 bp, Morganella morganii
atgtccggttttatcgtaaatcgtggttatggtgaggatgaacacctgggcgggaatatcctggagggagacccgtatacctattcgccgacagtatgggattatctgattaaacgttttgcgctgcgctctgtgctggatatcggtgccggtatgggctacgcggcggattatttttaccgcgccggtttacagacgctggcggtggaagggctggagtccaatgttgagaactcactttatccctctctgaaggttgatttgacccgctcttccgttcagtgtcgtgtggatctggttcattgtcaggaagtggttgagcatattgaggaaatgtttgttgatcatctcctgcattcatttgcctgcggccggatcctggtgatgacgcatgcactgccgggacagggcggatatcatcatgtgaatttacagccaccggaatactggattgataatctgaaaagatacaattttgaatttctggctaccgatacccaccggatacgcaacatggccgaacaggacggtgctatttatatggcacaaagcggcatggtttttgttaaccgcgaacgactgccgttataa

SEQ ID NO: 285654 - DNA, 588 bp, Morganella morganii
atgaataacgccctgaaaaccgttttatatagtaccgcgttactggctctgaccggttgcggcagcatgagccgggaaattgacagttatctgcggggagatcagattttcctgtcttatgaggaaggaagcaaccttgcgggcagcaatacgattgaaattaccagacttaatcagccgtggccgatccggcctttttcggtcgtggtcagcactatcaataaagataagtttgcgcggcagggtaccgattattttatcagggatattacctttaaaaacaataaagcggtgatcccggtaccgctgaaaaaagggtatcagctggagtcggtgcgggcgtttgattatttcagcgtatctgcggatatcggtgttcagcaaaacaacagctactgttataacttccgggcaaccaccattaatgtgaatgaatcgtatatccgcaaggcagacagggaactgaacagcacagagttcgacagccgtctgaccatcacaccaaaactctcatttctgccgccgggcaccggtctgacctgcaatccggagagccggatgagcagcggaagcggcggtcactcataa

SEQ ID NO: 285655 - DNA, 690 bp, Morganella morganii
atgaaaacggaacgggggatgctgctgcttgccgccgcgtttatgctcagcgggtgtgattcgctgaatatcgtgctcgggcgggtgtttgagagtgatgcggcgaaggcgcgggatcaggagtcccgctggtgcaccacgtcaccggcccgctcaatggggcggagcagtgcgctgaatgatgaatcccgcgaaggcgctctgctgcgttatcagcaaatctgtcagaaatacggtatttcagtcaatgctgctgactggcaggccggatatgacgagggcgataaacactattgcgattataacactgcatataataccggcctgagtaacgagccctataacttttcccgctgtgacagtaaatcccagaaacaccgtaaaagcctgaaagaagcctttgccatggggcgggactattattcgctgcaatgggcggcagacagtgaatctgaggccatgacccgtgatgcggagcaactccgcgagctgcaaacccgccgtgaacgggcggaatacggcacagaaaaaatgacgtacagcgataaactgaaaaacagcgactatcaggcggcttaccgccgcagctatgcggaggcagaaggccgcaggatgcgttatatctcacaacaggaaatggccggaaagcagcatcaggtccggcttgcgcaaatggaaaaagaaaaatga

SEQ ID NO: 285656 - DNA, 384 bp, Morganella morganii
atgaaataccgttacggactgatactggcactgtttctgacatctgctgcggtctgtgcaccgtggcagaaaacggatatcccgcagctggaaatacaggcagagcagggggatgccgaagcacagtatgcgctgggcatgatttatatgggcagggagcggactccggaggagatggaaaaagcggtggagtatttcaatgccgcgcgggagaaaaggcacccgggagcaatgtatgttctcggaaatctctatctggagggggttcacctgcggcgcaattaccgttacggccgctggctgattcaggaatcctgccggggtggttacgggtttgcctgttcggagataaaacatctgccggaaaagcagcccgattactga

SEQ ID NO: 285657 - DNA, 318 bp, Morganella morganii
atgtctgtccgtttttattatactgaaacctttgttatttctgctaaaaacagccgtctggaaaaacaatccatcgcagaactcattgatgattttgaacagaagctgacaccttatccggaaatctgcgaagtttccggcatgctgcgtgacttgggtgttagtaaataccgggagtttttatcgcggaatggttaccggatattttattcagtattaaaaaataatttgaatgaacattatgttactgctcatgtattaatccaccagcggcaggatatgcaaagtctgctgtttaaccggttactggaatattaa

SEQ ID NO: 285658 - DNA, 228 bp, Morganella morganii
gtgaaaatagagacaatcagttatataaaaaagcatgcagcaactctggaattatcagaacctattttagtaacccaaaatgggcttcctgcatatgtaattgaatcatatgaggaaagaaaaaaaagagatgaggcgatagccttacttaagttattaacgctttccgagaaagacagtaaagacggaaatgtgtattcacgcgagcaattactagataatttataa

SEQ ID NO: 285659 - DNA, 927 bp, Morganella morganii
atggaaaaaatagtgtatttagattggaatatattccaagacctaattcagaatcggagaggggaaggcttaaaagagaaccttgatgcagcaaaacggaggggttatcgagtagtttattcatttgctcatatgagggatctatctcgctgtggaaataaggtgtatattgaaaaagatctatctgaagtgtcaaaattaacagataattggtgtgtaggcttaaaactagatgaagatactatcgaatgcatgcaatatacaccaaaaactataatcgaagaaatctataaacaacaaattcagagtcttaatactactgtaagttcaccatatagtttcccagcgtattctgtcgatgtatcaaaaatttcaaccaacaatatcctgactccttacttaaaaaaaagtaatggagtaatgtcagaaaaattactggatgatatagtaaaacaattatataaaacaatatttacagatcataaaattcaaaaacaattcagagattcactagccgaagttgtcaaaattggaaacccatcatttgcgtgctttctcgacctaccaatatacaaatatctattttcatcaaaagagagtattattgaaaaccttaatgatatcgttaactcatttttatcattaagccacaaaacattagataacattccatttggtgaaaaaatcaccacgacatataatattttagattttttccctgtattctctgaaagattacagaaaaaaaacaataccaataacattgcaaccgacgctgaacatctattgatggccagtgactcaaagtactttgtctgcggtgataataaaatgtttgaaaaagcaaaaatcgtgtatcaggcctataatattaaaacaaaaatctataaaagagaaagcttcattcagcaagtaacttttatctaa

SEQ ID NO: 285660 - DNA, 933 bp, Morganella morganii
atgaaagttgtttcagttataaattacaaaggcggtgtaggaaaaacaacagttaccgctaatctggctgctgagttagcgaggcaaggtaagagggtattattgcttgatatggatgcgcaagcaagcttgacattttcgttcgttactcctgactattgggaagatgagttgcaacatgatttaacaataaaaaattattttgattgtgtgacacaaggtacaaagcctccatcattatctgattttttgattgttccagatgaagttaatgactatcttggtgaattaggctgtcatggtgttatccatttaataccatcacacttaggattaataaatgtagatttagaattggctacacaacttggtggcgctaatttaaatcaatcaaagagaaattatttaaaggttcacggtaggctacgagaatcgattgaagagttagctcgagataattatgatattgtattaatagattgccctccaaatttcaatattgtaacgaaaaatgcattaatagcatcagatcaaatattaattccagctaaaccggactatttgtctactctgggtattgactatttatatagaagtgttaatcaactagttaatgaatttaatgaatatgctagtatggattcaaatataaaaataactgaccctaaaatattaggagttgtttttactatgattcaattatattctgaaaggccaatatcatcgcaaagacaatatataagtcaaactcgtaggttgggcctgcctatttttaattgtttttttagagaaaataaatcaatatttgcttctgctccacaagatggaatacctgtagctttacatgagtatagtgaaggtggaacatattctagcgtagtagatgaaattgttggttttgttaatgagttcaaaattgtatcggagttataa

SEQ ID NO: 285661 - DNA, 390 bp, Morganella morganii
atgaactataaaaaaatagtctcgaaattatttttggaattctctaaagagatagactctttatcagataatgattttgaaaaattgaaatcaggaaatttcaagataaatatagtatttaatgagaaaaagaaatttatcggtcataataatgatagtgagagatttactatcattttgaaaaaactccagtcttgtacaactagggaagaaggactaaatatattagttagtgaggttaagacacgaaaggagttggagattttggcaaaaaaatcagatatttatataatgaaaagtgataaggttgataaagttagagaaaaaataattgaaggaataataggtgcttttttacgttcatcttcaatacaaaaaaataacagataa

SEQ ID NO: 285662 - DNA, 768 bp, Morganella morganii
atgtatatgaaatattcgatagccgcggtattaccggtggtgttagtgatatcggggtgtgctgataagccaagattaccgactgaaacgaaaagcaccatcgcgacagtgaataaaaataatctcagtatcagtcttattgaagtcaaaacaataaacagtgagttaagcaataccaataacagtctgaatattgtcaaaaaatcagatactgccggaatggtggggctgacagcggtttcttttgtatcatcattatttgtcggcggggaaacacacggtttttccaaagaacagcttcgcggcacggatataaccgccgtcggtaacccgactttacggttatttcagccggaactgaccgcgtatattgataaactcaccacggaagataaaaaagggaaagtatccgtatttattcatcctgttgactttaagcttatttatgatggtctggataatggtgattatcagttcaattatcgtttttcagtcagttttggcgagggaaaagagagccactatgtttcctgtgatgtccacagtctggcgaaagaggaatatatccgccattatgatgagtgggaaaaaggtaattttgcactgacacaggcactggcgaaaaaaacggtcagtgcgtgtatggccgggatgaataagccggaaaatatccgcaaggcagagcaggcactgaacagcagcattgaggctgccggtgccgttatccctcagacaccttccgcacaaccggcagcaccggttctctga

SEQ ID NO: 285663 - DNA, 213 bp, Morganella morganii
atgacagataaagtaaaaaaaacggatagcgtaaatcagggaacaggaaagaaaagcgcgaaaaagtttcctttgccgacaatctcaataccactgatcacacctccgccgacattcgcaccaacaacgccgccagtcaccacgccgtcaatagcgatacccggaatcaccacaccggcagtgactacaccggcgctgaaaacaaaagcataa

SEQ ID NO: 285664 - DNA, 207 bp, Morganella morganii
atgacggaagtaaaaaaagacgtatgttgtgaaaacggacagacagttatcactattcgtgtgaataactgctgtcagtgttgttgtgaacacgagcacaaatgcaaagagccggagaaaccaaagccgacatgtccgcctgtacctacgtgtccgctggtaacaccggttccgacaagaacggctacagcgacaattccattttga

SEQ ID NO: 285665 - DNA, 354 bp, Morganella morganii
gtggtttatatctatacgttacaatctgaagatggcagagagccaacgccagaggaattagaacgctggaaaggcagtataaaacttcagccacagcagcaggttaagatttcagtgttagctgaaaatttatttactgataaacgtatcaggttcagtaatggctggtacatggggttggcagaaacccgtaccaattataatactcagggttttatcgttgatagtactcagggacattgtgaaatctatatcagtattcaccagacagactttacattatcaaatggtactaaaggcttttgttataaaaaattgcgtccggtaagcactcaatacggtgagaatgaataa

SEQ ID NO: 285666 - DNA, 558 bp, Morganella morganii
atgaaacctgagaatttatcattgtatgatattaagtgcctccgctatctcgccgggaatgatgtgctgatgtctgatactgataaactgaccattgactgggcagaagcactggtggtatccggatataaaagcaataatgcttatattcttgcttcgctttcgctggataaatatattgactcttatgaagtggagcattatttcggtctgctgtgcaaagagcttgaaccggcggcagtaaatataaatatgccacaggccgttttctgtctttttaaacaggatcttttacgtatcgcggatgcggacagccggatcgtgcaatgctatattttgtccgggctgatttaccgctggtatgatattaaccattacattttcaataagatactgacttacctgaatcagagctattattaccactacgattatctggttgatattgaaggtaatgttcccggctatgaggaacggtcatttattgaggtccgggagattgcggaacggttttaccggttgttatctcagctggaagcgatgaacattccccgctga

SEQ ID NO: 285667 - DNA, 498 bp, Morganella morganii
atgttaaaaaaaacagcattatttcttgctctgagcttggcagtacctgctgcagtgaccgcggcacaaaactgtcagccaatcaaatccgcgtcttcactgaaagccggtttacctgtcccgaaaaacttcgcttcttattctaatttctctgacgtcaccaaccgctttattgaaagaataacgcaggacagaccaccggaagatgcagcaaaactgctttgtaataaatacgccttttcttatattctctatatgggttccgaaaaagaactgtcccgtatctgttcagataaaaaaacctgtgaaaacgttggtatcatactctcagggatgatagaggagtcgtacagcgagaatcaagaagccaaaatacgtaatgcactcaaaaaaatgggtgtcaaggagcaggatattctcaatgctgccagcaatgctgaaaaatttatgagacaacatcaggaactcctgttgtcacagtttggcgagctgaattaa

SEQ ID NO: 285668 - DNA, 333 bp, Morganella morganii
atgaaaaatatcgccgccggaatactgatattaatacctgctgctgcattttccgcctcagcaccggatcaatatctgataatcggtaaagcatatgctgattcatacgaaaaaaataaaaccgctgagttcagcctgcataaaaacagtgtgtgccttgcgatcggacagaatacagatgacggaagctgtgaccggtatcttgatagaatcagtacagagaaacaaaaatcgatggtgttatattccgtaaaccggcgcatcccgtattatcaggactttattcagtttatgaatttatacgaaaaagaagaacatcattcctctttataa

SEQ ID NO: 285669 - DNA, 618 bp, Morganella morganii
atgaacaaattgtcaggtatttttatttttacattactgtttttgtcattcgcggaagccggacaaacgcatgtgcatgattcagaacagacagcaaaagacggcgaagccttaacccggtatgaccggacggttttttcagagacactttctgaagtaattaaagtcattaatcaagaaaaaaagctggcggaagctgcgcctgcatttgggcggttttttcatgcagagcctaaaatgggggctgcgaaaaggctgtattttgctaacgaacatgtctcaacaacgttattacgaaagaatgaaggggaagactggagtagcgcccggctgtcactaaataaagataatttcactatcacggattttgagcaaaaagactttgacgcgctgaatttgatttttgaacgtgtctttgaagatacatatctttccgcagcattaccggatggaaaacatctgaaggaagtaacacggttaccttgttataagtatcgtttcagccttaaatctaatcgtaaaatcaaactggatttttttgtgtatccggaaatgatgaataaaaatgaattgttcccccggaattttaactcagtctcggtttataaagaggaatga

SEQ ID NO: 285670 - DNA, 435 bp, Morganella morganii
atgacgatgatattcggatttattgaatgctttaattctgatgacaaaaaggtatttcacttcaatagaaaaattttggatcaacttcccgtgtcaggggcatgtatatgcaaagacatgttcgcaatgcttccggtgcataacaaagctctatgttaccctacatcaacgattattcatttcgccatggaagatcgacatgactattttttgagtcctgagcgtaaaaatgaatttgaacaacttctgtcaaaattatgctggacttcagcaatgctactggaaacgtactcaggaaaccggtatgaatggcatgcagatgccagttatcacaataaattacaaccaataaataagtggtctttcactgtatttgaatcacatcacaaccttaaggagattgaatatgacgaagaaggactagttaacccatag

SEQ ID NO: 285671 - DNA, 1005 bp, Morganella morganii
atgctgcggatggcaaaaataatagtgtatgttttatttatcgctgttgtcttgcctggttacgcagtgataactaattcagatgaagaaaatatagtactggttaataaagcgaatgctttgatataccttcagtttggtattatttatgatgaaggtctgggtgtttctgaaaattatcaggctgctcgtcactggtttgaaaaagcagcggaatgggataatgaaaaggcattgttttatcttggttcctattatatgcgtggtattggggttaagaaagatgacaggaagggtatttctttgtatcagaaagccgccggacttggatcatccaatgcaatgaacagcttagggttgtatgcaaaaaaagaaaaacgaactgaggacgcgatttcattttatcagcaggcaatcatatctggttcagatgctgctcttttgaacctgggggaactttatcatgaaaccggaaactatgataaatcagagaaattattattatcggcactcaataaaaataatgaaataaaatcagaggcgttgaataaatttggggatctgtattatgaatctgattttgaaaagtataatataaataaagcagaaaagtattatttagaatcaatatcgttaggtaatgaaattgccatgagtaacttaggaatgctttatgttgatatcgaagagtatcagaaagcattctattattttcaattatcggcagacaaaaatttttatgttgccatcaacaaccttggttcattgtacaggtatggatatggtgttaaacaggattacacaaaagcactgtcgttgtttaagagagcagcagagtcgggcagcccgggcggattatataatatcggcagtatgtacgaaaacggggaaggtgtaacacaagacgatacaaaagcactggaatattacgaacaggcattagccgcagggcattatccggcacagaaaaaaattgattttctgaaagcgaaacagaaaaaatag

SEQ ID NO: 285672 - DNA, 1068 bp, Morganella morganii
atgttagcatatcaattcaggagacggttaagtttagttattttctcagttttcctggttgtcacaggccatagttatgcaaatggaattattacatcagatactgtcagttctgaaattaaaaaatcaaatgtagaaaaaaatatttctgcagcattaagtgctaatgcacagatccagtttcagatgggcctgttgtatgaagaaggtattggttttccgcaaaattatatgtttgcccgttactggtttgaaaaatcagcagagcagaataatgcagatgctttattttctcttggcgaattttatatggatggtaccggggtcttacaagatgtgaagaaagggaaacaattgtatcaaaaagcagcgaaactggggtcttcacatgcaatgaataacctgggattactggcaaaacaggcaggtagaacggaagatgctatttctctttatcaacaggctatttcagccggatcggatgtatctctcttgaatctggggcggctttaccaggaaattggcgaatatactaaatcagaagaaatactgactatagcattgggtaaaaatagggttgtcagagcagaggcgctaaataaactcggaacactttataccagaattaatttcaaagactatgatataaaaaaagcagaaggatattatttggaatcggttaaattaggaagtgacgtgtcactaaataatcttggtatgctgtattttcataatgatgaatataacaaagcttttgattatattaaaatggcagcagataaaaatttaccggatgctatcaataatcttggtgcattatatcagcacggatacggtgtaaaacaggattacgcacaagcaatttcattgtatgaaaagtcagcgaaaatgggcagccccggcggttattttaacttaggcagcctgtatgagcatggggatggcgtaaaacaagacgataacaaagccattgagtattacgaaaaagcattagccgcagggcattatccttcacaggaacggattaatcatctgaaaaataaacaaaaaagtaagatggagaaataa

SEQ ID NO: 285673 - DNA, 480 bp, Morganella morganii
atggcaaatattatctatttaaaactggaaggaaagcaacagggtttaatctcaagaggatgctgtacatctgattctataggaaataagtatcaatccggtaaagaagattatatctttattactgaatttgactgtgcagtaacccgtgaccagaatctcagccatcatccgattgattttgtaaaattaattgataaatcttccccgttaattttagttgctatcgcaaataatgaaaaattaactctgacatttgatttcttccggacatcacaacatggcggtctggaaaaatactatacaatacgtcttaatgaggccagtattgtcaattacgcaacccgctcacctaacaatattctgcgcaatgatattcagccggaagagtatatctcggtcaaataccgtgatattacagcatcccatattatggccggaacttccggctacagtattaccgatgataacaattactga

SEQ ID NO: 285674 - DNA, 1011 bp, Morganella morganii
atggcttattgtaacgattttgaccctatggatcagttttattgtcgtgatggtgaaattgcggatatttcagaggaagcaaaagagcggatttattttatcagacggataatgcgttttctgaagaaattactgtctgaaagaaaaacagaaacatcatgtaaaccgtataccggactgggtgaatcaatttattaccaatgtgcggacagtgaaccttctgttgaaacggcaatgagtcgtattccggatgcactgataaaagatattgcggtgaccagctaccacggcgctgagcggacgataaatacactggctgatttcccttttacggttatcgatattccgatgagttttttgcgtcacaaacgcctgtccggcggatatcagattctgaaagagaacacggaagcgatttatcttctccgctttctggctgatccctatgaaaattttaaagaagcgattgagattatcgtgtcagcggttttagagaatataccggcatcaagaagaagaaagcttgatagtttacttggtgaagtcgtaacaaaacttgacggtagaaaattagaagaagacgttatgttttttacaaataattatattgatgaaaggagtgcacattatactccgataattataggagactctatattaaggcgatatatcgttactgcaatatctgccggtgttattgccgctgttgcctataaatttccagctcttttcagtaagaaagagctgatcatcaaacggtcggtggttattgctacgcttctgtacagttacgggactatcgaaaaaatggctcgtgcggcacaacggctgaaagagagaaactacgcggtttatcaggcattagatcgtgcacagctatcattgatctactattttctggaagaagaactgaaaacgtttgtggtactggccgcgaagccggaaggcacgtctgcggatgatgcctttgttcaggaggttcgcagccttatcgcacgttatcgtcagtaa

SEQ ID NO: 285675 - DNA, 882 bp, Morganella morganii
atgactgaaaacgcatctgtatcctgtatcccgcctctgcatagacaggtggccgaatatcatttccgcgacaaaattttgctgcgtcaggggattatgtctgtcagcgatgatattgcgctggaagagcgttatgacgcagggctcaaactgatcgttgttcacagtggccgggttcacagcgaaagcaccggcggacagcagatcacgatcgactcaccggcagtttttatcgcggcgggtagtgataattacatattacagaatcggtttaaagccggagtacccctgcattacacactcttacaactctctcctgactggcttgaacagcagcagattctgttaccggccgttttcggcagcagacaggcgctgtctctccgccatatcgctctcgacagccggatcgctgcctgtgccggacaactgtttgacagtacggtacaggatgcactgaaaccgctctactatgccggaaaagccggtgaatttgcggcattgtgtctgcaacaggtgataaccgccccggccgcggctcataaaccgctcagccgccgggaaataagcggtctgcagcgggcagaagaaattttgcgtgatgaaatggaaaacccgccgtgcctggaacaactggcgctgcgtgccgggctgaacagccggaaactgactcagggattcaggcagttgtatggtcagtctgtttacggctggttgcaggaactgcgcttacagacggcctaccggatgctgaccacgcagggggaggctatatctgccgtggcgtatcatgtcggttatactcccgcacatttctcggtggttttccgcaggcgcttcggattggcgcccggggaagtacgcaaacggcatttttgctga

SEQ ID NO: 285676 - DNA, 1716 bp, Morganella morganii
atgtatcacgacttacgggcgttgttgcgcccctatcataccctgctggcgacagcacttttctttcagacgatcgccggtatcgcctctttggtaccctggctggcactgtatcagtgggcagatgcacaaccggtcagccataacggctggctggcggctgcggcggccggcggtgttatctggctggcggctcagacactggcatttcatcttactcacattaccgatgcccgtttcagttaccggctgcggctgcaactggcggagaaaatgcgcaatctgccgctgaactggtttgtacagcaggggcgcagcggggtggatcagtatgtgcagcaggatatcagcgcactgcatcagctggttgcgcatgcaccggccgatattgtccggctgatactggttccgctgccggcggcacttttgctgttgctgattaatcccctgttgctgatcctgtcactgctgccggtgtgcggggcattctgctgtttccggctgatgcgttctcaacgctgccgcgatatttttgctcagcgtgataacgcattgcgtgcattatccggtgactaccggactctggccgaaaacccgctgattgcacagcagtttcccggccggggtattgtgcgtaagactgaattatcgctgtcacatttcctgtctgtttttcatcagtgggtcagaaaaaccggccgcccggcggcactggcacaggtcctgctcagtccggtgctgctgaccgtctggttacttctctgtgcgtttgtggccgggcagacattatcggcagcggcggtgatcctgtttattctcctgctgcgcagtattgcagagccggtcgcggcgatggggcacggcgccgatgcattgcgggccggagcccgggccgctgcgcgtatcagccggttactgcggcagccggaaatcgcctgtggcagcaggcaatatgacgatattgccctgctgccgcgttcagtgccgctggaggttttgaatatcacgctgagtgccggggaagagcatacaaagatgtctgtactgcgtgatatctcgttttcactggcggcaggagaaagtgttgcgattaccgggccgtccggtgccggtaaaagctcactgctgaggctgatagcgcgttttatgctgccggactccggcgatattctccttgcaggccggccgctgtctgcatggtcaggcaccgggctgaaccagctggtgacgatcgtgatgcaaaacagtgagccgctgcccggcacgctgcgtgacaatctgctgctgtttaacccgcaggtttcgcaatcacagatacagcatgcggtgactgccgcctgttttgatgaggtgattgcggcacaggtgaaagggattgatgcgcggatcggcacggatgttcagctttccggcggtgaagcgcaacggctggccattgcccgtgccctgattgcacaaagtccgcttctgctggcggatgaaccgacatccgcactggacccggaaaacgccggtatgatttttaatgcgctgctcagcagcccgggaacacggctgattgtcacacatgaccttatgctggcaagacgcgcggatcggctgctgtttatggcagacggcacagttgccgcaaccggcacacatgaggtactgatggcggaatgcgcggcataccgggaatttgtcacacagcaggagaagcaacatgaagcatga

SEQ ID NO: 285677 - DNA, 1704 bp, Morganella morganii
atgaagcatgatccgctgaaaatgcttatttattccctgaaaggaccggtattgctgatggctgccggggcggtacttgaagggatctgcggattattgctgatcccggtgatcctgactctgccgtctgatccgctcccggcactgcggaatctggggatcgcgtccgttatcacgctggtcgtacagtatattgctatgcaacagggctttctggccggaacaacggtgatgcgccgcctgacacttgcactgatccggcatatcccgcgtcgtctgtcaccggataacagtgccggggaattgctgacgggggcgcttatcccggcggcggcgattccggcgcatctgctttccccgctaatcagtaccgtcatgataccgctgacgattgttaccggtttgctgttttactctcccgtgacggcgctcctgttcgccgcaaccgccggtatactgattgccgcactccgcctcagtgcgcagcggctgaaacgggatgaatccggactcatccgggcccgggccggggctgcacaggcgctgggcgattttgcattccatcaggcactgttgcgcaaaagcggtcagatgagcggggctgcacagcaattacagcagacactgtcgggacagcatgaatctcaaatcaggcttctgcgccgcagcctgccgtaccatctgttatccgggctgctgatccagctgatttttattgtgattctgatcgcaggcgcatggcaggtttctcacggcacaatcacactgaacggctggctggcggtaatggtgctgatcgcccgttttattgagccgctgaatcagctttcccatattgatcaggcgctgcgtcaggcgaaagccgctctgaatgcggcagagcaggaactgcgcgggaaaaccctctgttcaccggtacacagcggaaaaccgcagtcagccggggtctcggctgagtcgctgacagcactgtctgatgacggaaaaccgttgctgcatgcggtatcagtgacttgtccggagaacggtctgaccgttattaccggcccgtccggtgccggaaaaaccacattgctgcacctgctggcgcggacagctgatccgcagagcggaaccgtccgttacggcaatttgccggtgatgtcgctgtctgaagcagtactggcctcgttccgtcagctggtgccgcaatcttcccggctgctgcgcggctctttgcgctggtcactgttacagggggccgcaaccccggacgatgcggagttgcttgcgcaactgcggaaaacaggtctgcaccttaccgcggcacaactggatgacgataccggtgaacagggtgatcacttttccgggggcgaaaagcagcggctgtgtctggcccgggcgctgtttgctgcaccggcggtactgctggcggatgaaccgactgccagtcttgacacggtcagccgtgataacgtcatccgtctgctgactgagtggcagggaacgcggattgtggtgacgcacagcccggagcttgcccgtgaggctgacagcgttatcgtgctggataacggttatctctgtgcgcagggcaccccggcggaagtggcactgcaatctgactggtttgccggtttttgtgccgccggacaagagacaactgaaattgatcggcaatcgacagaaattgtccggcaatcgaaaccgccgattatctga

SEQ ID NO: 285678 - DNA, 2160 bp, Morganella morganii
atgcgcctgacaataacacatacacagcaaacacccggtttaccggcccgttttacgctcagcaaatacacactgatgtgcgcactgctgatcccggcgctgccgtcagcggcagagacaaccacgccgggcagcagtgatgtcattgtggtcactgatcgcccggctgccgccggggatgattatattgcacccggtgtcaccacactggggaaaatggcactgaagccgcgtgaaatcgcgcagtccgtcagtgtcattgaccggacacagattgaacagcagaacctgaatacgcttgatgatgtgatgagccgggcgaccggtgtcaccagtgcgccgtttgttctgctgaccacggcgtattatacccggggttttaaagttgattcttttgagcttgatggtgtgcctgctctgctcggcaatatggcctcgtcgccgcaggatatggcggtgtatgaaagagtggaaattctgcgcggctctaatggcctgctgcatggtatggggaatccggcggcgacagtgaatatggtgcgtaaacatgcaccgcaccgggatcaggcgaatatcacgctgacggcaggcagctggaaccgctaccgtgcagaggcggatgccggggggctgctcaatgaatcgggcagcgtacgtggccgggtcgtggtggcgtgggaagatcgtgatttcttttacgatgtttctgaccagcagacccggctgatttatgccaccgttgatgcggatctcacaccggacacgttgttacgtaccggcctgcaatatcagaccattgattctgtcactaacatggccggtgtaccgatggcggcagacggcagtgatctgcatctgccgcgtgatacgtatctggatgtcagctgggataaattcaaatgggataccacccgtgcctttgcgcaactggagcatcagattaatgatgactggcagtttaatactcatcttgattatcagcatgtaaaagcccgcctgttgtatgccggggcatggggaaatattgacccgctgaccggagatggcgcgatgctgacaggcggcgcgtataaattccgtaaccatcagctgagcctggacagtaatgtgaccggcaaactgaacttcggcggtttacagcatgatctgatagccggtatcagctatgccggtgcggaggaagaacagctcactgctgcttttgatacccctctcaatgtgccggtcaatgtctaccgctgggatccgcacagtgtacctgtgccggggataggtacgtattcatcgccgggaaccacaaaaacgatccgcaaaggcctgtacaccatgggacggatcaaggttgcggagccgctgacggtggtagccggtgccagagccgactggtggcaggtacgcaagccggatgcgaaatttaccgaagacgggaaaatgacaccttacggcggccttatctgggattttgcgccggaatggtcatggtacggcagtttttccacggtgtatcagcctcagaccggtaaaacctacaacggtaacatgctgaaaccggtcgaaggacagacactggaaagcggcgtaaaaggttcactgcttaacggcggactgaatgtctctgctgcggtttaccgtattgatatgaaaaataacccgcaggctgaccctgagcatcccggcggtgcctttgatacgaactatatcagcggcgggaaagtggtcagtcagggctttgaactggaaggaaccggctatatcacgccgttctgggatatcacggccgggtacacctataccgacacccgttataaagaagatacacagaatcagggcgaaacctttaacagcctgacaccacggcatatggtccgggtctggacacagtatcagttaccgtgggatgaacggaaatggagtgtcggcggaggtgttcaggcgcaaagtgagttcagtaactccaacggccgggtcactctgcgtcagggcggatatgcggtggtcaatacccggctgggttatcagatagatgataactggtccgcagcagtcaacattaataacctgtttgatcgtcgttattacgccggattattcaccccgcagtggaataaccgctacggcgagccgcgtaatattatgctgacactgaaggcggatttctga

SEQ ID NO: 285679 - DNA, 264 bp, Morganella morganii
atgacatctgccggattacggcggtggatgctgctgatggcggtcattggctgtgttgccggtgcggtgactctgtcagcagtgatcaccgttttttatcccggcagtgatgcacttaaccgtctttatgccggggtttttatcccgttctttatcctgtgcgccattctgtgttatgccctgacatcccccggaccgggggcggtatttctgcgggcctggagctggtggccgccgcttttgctgctgccgggggtatgctga

SEQ ID NO: 285680 - DNA, 1437 bp, Morganella morganii
atgcgtccgcgactgaaggcatcgttcgcgcaactgcacagaagtgcggggtccgtatttggtgtggtgctgtttatcatcttattcagcggcacctggagtctgggcagtgacagtctgcgcttgtggtggcagcatttgcccgccggtgagccgctgccgctgtctgtgctgacagagcagggtatgacgcagctgaacggggagaacggcattcacatcgtactgccttcagcccgttatccggtgatcagcgtctgccgtcatccgggggattgcccggtgctgctcagcgccgtcaccggtcagccggtaagtactgccgcaccgacagatatcccggtgacactccacaaaaatctgtttctcggctttcccggccggatactgatcagtctgaccggctttgtgctgacagttttactgatcaccgggctggttatccatcaccgtaaaatccggttgctgctgcgtctcagatggcggcagggaatacggcgctttgcttttgatctgcatagtctgaccggtctgtggtgttatccgtggctggtactgttcgcgctgacgggtgcgctgtccggactcggggcattcgggacaatgatgctggctgaccgcgtcagtccgcaggcaccgcagcaggttatgcagcagctgatggggtcattccgtgagccggatgcagcaggagaaccggcgtttttatcagttactgaactgcttgcgcagttaccggcccgctatcccggctttatcccgcagatggtgtctctgcaaaatcccggacgtgatgaccgggtggtgactatcagcggcgtccgtgaaggacagccgggatcagcgtattttgaacagctgcgctggcagggaacaccgctgcgtctgaccggcatccgtgattctgcagagcagggaatctggacccgtgcttttattgcagtccagccgctgcattacggacaatatacctggcttgccggtgctgcgccgtggctcagcgcactgcattttctggccgggttcgcggcttgtcttctgacactgagcggcctgtcgctgcgggcactgaatgcccctgacagtctctcatcccgtttaaccatcggcctgtgcggcggtctggtacttacctgtactgtgctgctgctcagtgcgtggttctccccgttatcagcccctgcggtatttcctgcggtatggctgataacggtttttttcacccttttttatccgtcgctcagccgcgcactgatgttgatctgtctgttctgtgcagccgggtctgcgtttgcggcgctggttcatctgttttcctgcgccggtgcgcagtggtataccgatgccgcactgctgctgactgcggcggggtgtttgttatgtgctgttgtgttatggcggaaaaaccgctgccggagtgaattatgcatgaactga

SEQ ID NO: 285681 - DNA, 1248 bp, Morganella morganii
atgcatgaactgattaaacatcgccgcctggtgataaccctgggttttctgtatctggcacagggtattccgatgggtatcgctatggatgcgctgcccgcgatattacgccgtgccggaactgaccttgcggctctggcttttattccgctggtcgggctgccgtgggtggtcaaatttttatgggcaccgtttgtggataatcactggtctgtctctttggggcggcggcgcagctggatcattccgatgcaggtgatcgtcacactttgcctgctggcactcagtctgaccggtatcacggctgacaatgccggtttgtgtgttgccctgctcgcggtggcctctctggccagtgccacccaggacatcgccactgacggtatggcggcggaacatgcgggaggcagtctgctggcaaatatcaacgcagttcagatagccggtgtaatgggcggttttttcctcggtggcgccggtatgatgatgctcagcggtgtgctgggtcagcagggcgcattactggttttcacggcggtaccggcattcagcctgatcctgatcagccgtttccggcagccgccgcgttatcacgcggatgtccggccggatgaggcacaggccagcctgctgaaaactgtccgccgttccggggctgtccgtctgctgacgctgacgttgttatcggcagtgacggctgtttccggtttcgggctggcaaaattatttctcactgatgcgggctgggcgctggaagatgtcggtaaagcgggcatggcgggcgggatggtcacgctggtgctcggttgcggcggcggtgcctggcttatcggaaaaacaggggtatggcgggcattttcagcgggtcttctgtgtgcgctgatttcgtcgctgctgtggtttgcacagtctcagggcagtgtcagtgtcatcatggtggccgtgtgtattctgttcggatcactgtcttccgggataacatctgtggcaattatgacagccgggatgcgttttgcctcacaggcgaaacaggcaggaacggatatgaccgcggtgcaaagcatgcgggatattggtgaaatggcctgtgccatgatgctggtcagcctgactgcggcgattggctataccggcggattcgtactggcggcagtgattgcgctggcggcactgctattcactgtcgccaatgtccgttatcagcggcgggttcaggtgtcagctgagcggtccggcggagccgaataa

SEQ ID NO: 285682 - DNA, 534 bp, Morganella morganii
atggcaatatcagccttaaaacgtattttcagcgccggtgtattactgttgtttttcaattgtgccggggcaaaagaaatcaccgatctcgccgggaaccgggtcactattccggataaggtagagcggattgcggttgtgcctattccgtggatgtcgatgatttatgtggtggatggttcagatgcaaaaattgcggggatgcatccgtcagcaaaagaggcttaccgcaacagtattctgaaaacactggcgcccggtattgagaaggtgaacagcacctttgtgaataaagatttcacgattaacggcgaagagctggtcaggttaaatccggatctggtgattatctgggattaccagaaagaagaaaaagagaaactggataaactcggtatcccggcggtggcaatcagatacggtgatttagatgatgtgaaaaacgggatccggctgctgggcgatattctgggcaaagaaaagcgggccgcagatttactggctttttttgatcatctgacccgtcctgaatag

SEQ ID NO: 285683 - DNA, 219 bp, Morganella morganii
ttgatcctgaaaaaaacatcgtttctggatttaatatatatactatcaattattgctattggcggagcttatcttacaatatttgttcatggtgaaaaattcatgcttggtaaattatttatctctcccggaaatggtaataaaagcttaataacatggagtagtgtattctttatgttccttatcgctatttttgcatctcccaatataaaaaaataa

SEQ ID NO: 285684 - DNA, 855 bp, Morganella morganii
atgatggttatcaatggatttacattgttaatcacggcagggaatatggacgattttctgaaccggttggaaaaacatacatggcttttccgggcgggctgttatggcatggggctgttgtcagtggcacttatatttttatcgcgcggtaatccttatctgctggtgtcggcaaccggtgcgatggcggcggcattttacctgtttatgctgcacagacagtcttatgtaaccgggcttatcgcaaaagccgggggcgtgacggcatttctcgcacgggaagtttcacctgaggaatggccggtttaccgggatgttgcggacctgactgggatccggcgggaatttgatgcctggtgtgcgcaacaggctgtaccggtgactatcggagccgcagagcagacgctgggcgtgataatggcggaaacgtacggcattgagcgggaagtgcgggatgacgcttactcgctgaaatccatcataacagggcaggcgcaccgccagtcagtactgacactgctgagcgccgccttatttatgtcgggcggaatgctgctgttctgtggtttagctgttctccggccggaatttctcaatgacctgctgaccggtctgatattactgattgccgccatggtggtttactggctgacccggtaccgggaaaaacagctcacaatgcagatgctgacctctccggtgaccaccgcaaccctggacatactgatgagtgtggcggtggccgcagatattcatgatattttttgtgactatatgcgcgcagtaccgaaaccggtcaccatcggcagcgccactgactggctgacagcggagcagaaacggcggcagtgctga

SEQ ID NO: 285685 - DNA, 363 bp, Morganella morganii
gtggattttaagctaatagcaatcagcagtttactgatatccggcatcgccgccgcatccccgcaggatcgcctgctgctgaaaaatgcgctggaaaacttcaccctcagttactgcctggcgcagagtgaacccggtgaagttatgcagcgggaagccaatgccgcaaccggtgcttatgttgaacgcggccgttatcccgcagaagcttatgaagaagcggctcaggtcgcccgtgattatctgaaacgtccttataaaagtcatactgacggcatacaactaacggtgatgaagtgtatcgatgcctcacagagtgatgaaatcgctgccatcaaagaccgttatcctgagaaaaaatag

SEQ ID NO: 285686 - DNA, 462 bp, Morganella morganii
atgactaaacctgattttgtgaccatgtgggcaaattttgcgcgaattaatgtcagcgttaaagaagtgggcaaaaaaattggtggtaaagtgcaatacaatattgatcagggaatttttcagaatgcatgtgcaatccggatgagttatgcgcttaattattccggtgttccggtcagccgcagcccgcggtgggcgacttcatccggtgcggacaaaaaatggtatatattcaaagttgctgatctgattgattttttagagtcggctcttggtgccccggatatgaccgcaaaatcaaaaaaggaaatggaagattttcagggaaaaaaaggattggttgtctttaatgtttcctgggaagatgccacgggccacgccacattatgggatggttccggttgttccgatacctgttattaccagtcagccagtgaggccaaattgtggattttaagctaa

SEQ ID NO: 285687 - DNA, 372 bp, Morganella morganii
atgaaaaaatggttagggttcatatttttaccaatattgttcatgtggattgcagagccattggctttttttatccttaatccggaaagtggtggtttttggcaaaatgtactcaggtttattatccactttattggcggcgttattatatatcagtgttcacccggcaaaaaacatgcgttagcatatatctattcatgtttgtatatagtattaattttttatcttgccatatcgaccgatggtaatgtactggaaatcatggggcagtatattgttcagcggttctcactgattgaagagctggcaagatcatcaggtttgttgcttggtgtttggggatccattaagtctgatgaaagagaaagttaa

SEQ ID NO: 285688 - DNA, 672 bp, Morganella morganii
atggttgaagttaactggagttttgttgaaaaggttgtttatattaacctggcaaaaagaactgaacgccggaaaagtattgaatttcagatggaaaaaatgggtattcccgaagataaaattattcgatttgacgccattgaaaatgagaatggagcattaggatgtgttctttcccatattgatgtactgaagatggcaaaaaaaaacaattggaaaaatgtacttatcttagaagatgatatgattttcaatgatgatgatgaatcatcggaaaggataaattattattttaacagtcttaaatctgtatcatgggatgctgggctattatccggaagttatttctggcttaaacagatacatggctgtttttatcatgtccggtattcatatttatctaacagttatatagtcaatcagcattattatgataatttaattgatgttttcttgtcgtcagctgagagccttatccgggaagaagacagaaattattgtggcctggatgtcagctggaatacgttaatgaaaatagaccactggtatgctatttatccttgtgttggttatcaaatgacaggagttagtgatattgaacacgaaatcatggatagagaatgccattttaaaaggccattagaagatatatggccaacgcgtaaagagtaa

SEQ ID NO: 285689 - DNA, 1347 bp, Morganella morganii
atgaataataaaatttttgtcagcatagccagttaccgggatccggaactgataccgacgataaaaaacatgatagcccatgccgctaaccctgaaaatattgttatttcagtgtgctggcagacggaagagcgggatatctctgtttttaccgatatcggtgctgtggaaattaataccggatcagataatccggatatttttcgtcttgattatcagggggcattactgcatgttcactacgtacatatctataatgccagaggcgcctgctgggcacgttactgtgctgagcaggcatttaatcatgaggattattttcttcagatagactcacattgccggtttattgaaaactgggataaagaaattattgattattatcttgaattaagtaaaacgattgaaaagctggtcgtcaccggttatccgccctcatataccccggcaaccgaagatcaggaggaagtactcggcaccggcactgccagaatggtattgaacggatttagtgacagtgatatcccgtcatttaagcctgtcgcaatcactgaccagacccgctatgaaaaagggtgttttgttgccggtggttttacattttcggtcggagattttcctgttgatgttcccaatgatcccaatctgtttttcatgggtgaggaaatatcaatgtccgccagagcatttacccgtggttacaatattgtttatccggaaaaaatatttgtctggcattactatacccgggaagaatgcaataaaatatggggtgacctcaaccaggacctggttgacaaaaaagtggtaaaaaaaggatggtgggaatgggacttgctatcaaaacagcgtgtccgcactctgttgggtatcgaaattgatgaagaacttgatcttggtaaatattgcctgggagatgttcgtaccctggaacaatatgaatacctgaccggaatttattttcgtgagcagttagtcctccccgacctgattctggatcctaaaccttgtgctttcagcgaagttccggaatcacgggatgcctggctggcccgtctttattctccgttttatcaggcagtcactattgataaatcagagcttgctgctaatgatgacaatgttgattactggtcattaggtgtatttactgaagataaccaactgattgctatgcagcggctgaccactgaagaactggctgaacaggaatccggtgataataatgaaagttataaacttgaaattaaactgaaagataaatcccatcttattcctaaaaaactcaggctggcccccttctttaccgactgtggctggggagaaacggtggaaaaagtatggtaa

SEQ ID NO: 285690 - DNA, 1008 bp, Morganella morganii
atgaaaataaaattactggcggcactggccgctctgggaatgtccggtaatgcgctggcttatggtgattgtattcttgaggatcctccgggatatacaccggtaacacaaacggcacaaccaacagagggcgttattcatatacgggcagacactccgaaaggtacgcttattggccaggcaaactcgacagttctttatagcccggtaacttatgtgtgctataccgaatatttatatgcccgccgccccttccctcatcttcctgagaaatatcccgggcaggaaggtatgtacagaacaaatataaacggaattggtgtaaaatatgtctatagcgctaatggcagagaaggtatccttcctgtccctgagaaaatggtatatcccgacccgggtgcagaatatataagggtaactgtaagccaggaacaatttattgcatatttctataaagttgaggataaagtggagttaaaaacccgttatcctaacgaaaatatagtactggatagagatcctcttatgggtcaatactttatcgagaatactcttgtcctgaattatgccattgatccgattatcgttgtcagcacccctgtctgtacggttgataaaccactgcctgttgattttaatactgttaatgctactgatgtccggaacggtgtggaacggccatttgaatttggtatactttgcaatactgattacagtaattatgatgttactgcatcaatcagagcagaaaaggaaaacgaggattccactcgtataaaagtcaaagataataatggcagctatgattctctggtaatagaaatactggatgaaaataacagaaccattaaattgaatgacttaacaggaataccaataaataatattaaaagcggaacaaaagccagtttcaagtggaaagcgaaactaaccaaactaagtaataagccctatccggcaaatggtccgttccaggcatccgccattattactttaaatataaaataa

SEQ ID NO: 285691 - DNA, 603 bp, Morganella morganii
atgaacaaaatgaagttagcattattagttgctggtgctttggttgcaggtgtaagcacctctgcttcagcgtatgcaccggaaggacagggtcttgttcactttgaaggccgtttgattgatgaaacctgtaaaatcaccagtcaaaaagagcagacagtttacctgaaagcggcgtctattaaaacgctgactaaagtgggtgaggaagctggttttgaaccattccagattgatgttgaatgtccggtaccaattcagccgggtgtcgttgatccggctgccgatccaaatactcagcctgttaaaactgtcggtattcattttgaaccgatccctgacacaactgactggaatacaagtacaggtaacctgaaaaacaaattaacaggtgctgacgcagccggtaatgtggaaattaaaatttatgatactaccggtggcatccggactcatcagaaaattggtacaacagggactatgatagaaccaacaggtaacggcaaattctctttcacttatgttggtggctatgccgcagctggtcagacatctgtcggtttagttaaagcaacagtgatgtactctttaatgtataagtaa

SEQ ID NO: 285692 - DNA, 615 bp, Morganella morganii
atgtatttaatgaatatcatcagaaattacggaatatcattaccgtcctgtgcaatatcattatttatgcttttaggaatatttacattcgcgaatactaatgccaatgctaatgttatatgccaggatggttgtgatctgaaaaatattaaggttgaatttaaagggatctatcaggaaggtacctgcgccatttcaatcaatggcgcatcatccgaagaaaccgtattattaccaactatttcatataaaacattatcaactgccggtaaagaagccgggactactgaatttacggttaccctgaataactgtccgacaaatgttgaagtactgcttttttttaaaagctccggtaataatttaagtccggcaacggaaaatctgaagaatgataccggtgcagggttagctgcaaacgttgaactcaggttgcgggatgataagtttaatcatattaaaatagacaatccatcttcaggactgctttatcctatccccggtgagaagtcatcagtagaaagaaaatattatgtctcttatttttccggtgataacgcggtttctcccggtaatgtaagggctaagtcagtactcgaagttgtctataaataa

SEQ ID NO: 285693 - DNA, 681 bp, Morganella morganii
atgaaacagaccctccgcatgataattcgtatgacaacaacagcgtcgctgttgtggtacggcgccgcatttgcgcagcctgcggcggataacgttacacattctgcggggattatttatttttccgcgccttatacggcgcaggattataaagtgtgcattttcggtaccggagagaatgcccgcctgagtgatgatcagcagattggttgcgaggatcgctataacccggatgatgaaaacctcagccggcctcttccaccgcctctggcaaatctcattaaacagcattggggagagacagattttttcgccgtgccgtccaattatatttatcagttggaagaatccgtaacaaaccggtccgtttatctctggcctgacggtccgggctggatgacgcccgccggtgatgatcgctgcgccttacggcctttcgcactgatgctgagtaccgttaaccgcaccaccggtgatatccgctcccttcccgtgctcttgtatcagcacaatggcagtcagggcgcgcaatttgcagattacatttatgattttgacctcacccccgcgccggacaaccgcctgacggtgacgatataccgctatcagaacaaaaaacggatgcgcgctgagcagtacgccatcacgccgtccggtcagctgatttctgccgggcgctga

SEQ ID NO: 285694 - DNA, 1104 bp, Morganella morganii
atgaaaaaaaccagcctcatcagcactgtttttttcctgacgggactgaccgtgcaggctgccgctcagccctgtttttcactgtccgaggtgaaagatatccgctatcgcctgcagaccagcccggaacaatttacacagacaacgaaccgctacggctatgtgaatcacactgatgccacttttctggcgcagttccgccacccgcaggagcagtatctcatttcagaaagtaccgttttctccggcggcatggggctgcccggcggtgaacaggtatcgtttttaaataaatttccggccgggttatgtatcagccggttaacctttacggttcctgatcactatgtggcagcgtgtgacgattatcagacgcccccggtcaccctgaatttttacaaaactgacaccgcgattgcctgtgttatagattctgctttcaatacaaacatgtgcgttgccggacaactgaaaacgaaaaaaaacgggccggaagatgcctatatcgcttatcactttccggataaaaatgccggcgatccgctgtcgccgtttgcattttctcagggatcgaccgaaccgtttgtcgccggagccccggacgaaatggccgggaatcagttgcctgtagcgggagaatttaaatacgccgatttctggcgcgcggatgcactgatctggttaacggaagagcagggtaaaacctgggcatcggtgcatgcgtatatgctttcctggcaaccggggaccgatcagctaaccgccccggcgtcactgagcgccgtgccgctctatacggatacgctggcgtgcccgggggcagaactggcctttgtgtataacggtctgaggatcacacatttccgggacacggaagcctggctgaaaacccgcggtaaatgcaccgggaatacccgctggcagacccgtattatcatgtatgacgggaaacagttacacatcatgtccggcacatccgcagtaccggcagatccgctgttaccggtgaaaggcaaccgtgattttcagtttgataacgcgtttctcaccgcaccgcagccggtgcgggatttcgctgaaaagctatggttttcagaagattag

SEQ ID NO: 285695 - DNA, 417 bp, Morganella morganii
atgccaaaatggggaaaatcaatagcttcaacattcttccttattctgtttataggaattagtatattagtctatggttacaccatttcattatttaagatgacggatattattatattctccggccctattgcaatgttaacaatggcaatgcctcttgttatatacgctaatattgccatgataattgaatttttacttggtcaaaaatcaacgttatttaaaatactaatgaagtataataaatccataatgagatatttggtttatttaggtattgcgggagtattaatcagtttacccgtttcctttttggtaaacatccaccttctcgataacggctataagacatgtgacagaatctcatggatgtcaccaaccacttatgtaaaagagttatcgctttgtgacagatag

SEQ ID NO: 285696 - DNA, 435 bp, Morganella morganii
atggtaaagaaaaaatatattctgttatttataatagccattattccgaacataatgaatgcgatagctgtaaaaaatatagaaataaaagataccggtattacagtaacagagaaccccggcgcaggtgaaataaatgcctgtaaacaatttataccaaccaaaaatcagcttctgaatttttttaaattggctgaagaagctgaatataataaatggctgcatgagtactattcgtcttgtatatcaaccggaagtattgaatttgagaatggtacatcaggtgattgggttatccagtcaagcggtattgcatcagtcattctggatgacggcagttcggctgattttttctataaagataacgaatggtatgatccgaatgcctgtacctatggtttaggtgatgacccaaatcctgatcccgggtgttaa

SEQ ID NO: 285697 - DNA, 150 bp, Morganella morganii
atgccggacagggcaaacctgccgggaatgttacggaatgagactccgatgaattttgttacagcgatgtgttgtcacagagcggggcagttgctcattatgtgcttaccggcttgcaacccgggtaaaaacgcgtatgtttttaaatga

SEQ ID NO: 285698 - DNA, 930 bp, Morganella morganii
atgaacacgaccaccgttttccggctgccgctgttatttgtactggcttatgtgcttatcctgggcggctcgctggtcctggtttcttatccggcggtcagtgtccgctctcctgacttaacattagcagcgtatttatcgcggatattttctttccagctgattcagatgaccggtattttcacactgacatcactccttttttattataaccggataacacaactgaaccggaaaacggtactggcggttatcggcctgtcgatatttctgtatacggtaaacagtattctcggtggctttaaggcggcattggttggtttgctggtgaatcaggtcattgctgagaagattgagtttgccgatttaatcctgatggtaaaaaccaccgatatttttctgtatctgctctcatttgtattactcgctgtcgcgacccgtctggccgcaaaatattatctgaaaaccagccaaccggcagtgattccggacggcgcattaccggatatttacgccctgttgttcagcaccgggatggtgtatctgatgctgatgacgacatcatttatgatggctgtgctgtcccggtatcagcccggaatgcagccggaactgatctctgaaaatgtctataccactgcggcaggcctgctgatttcgggcgggattatttttatttttgtccgccgccagtttccgctgaccggcggtgtactgcggatcaggccgctggtgaaatctgttctgctcagtacggtatccgggcttctggccacggcggtcatctcggccggtactatttttatggtattaatcagtgacagcttccggaatttcggggaaacggagttatggattgtgacgctggtctgcgccgcactgacactgtggatctgccgcgcggttatcggtgtgatgttccgccggtaa

SEQ ID NO: 285699 - DNA, 939 bp, Morganella morganii
atgaaggattcagtctctgtaaacgcctcatttttccgtctgccggttttatttgtcgctgtgtttttcgcggctgatatggcgttattttttattccggagtttatggccaaaacagcggcacctctgttcagagacagagtcttgtggcaactgaacagagtggtggctcacctgctcctgctcttcccggtgatttccctgattttttaccggcagtgtctgaaccgggtgtccgggaaaacccttcttttcgtgataatcgccgcgcttctttatattgccggaaaaacagcggcagatatcccggtaatatcctgcatatatgatcttaaaaagtcgggaattctcaccaatagcgatcagatattctggcttctctggtcgggaagatgcttgtcttatattttactgctttgcggattatcgctgctgatttattgtcttcgccggtttttaaccggggacgttccgcgctttgtgatgacggcacacaatacccgccgggtttatacggtactgacggccgccggaatgacattcttattacagatgatgccgctgtttatgcaactgacagacatcagccgggaaatgacggttccggtgcgcgataacgccggcagtatgattccggggtttatcattatcgcagttgttgccgttttcacgttcaggccggtatttactttttacggagaaaaactgcatacaggccggttgcttattctgatcctgctgaacagcattattatgttcagcagtacattgatactgatgatgttctggcttgtcccggtgctggaatcagccatgacatccggtgatacacagatcatactgtcggccgggctggttatctcggtcctgctatcgctgagtctctgccgccggttcagccggtactttttccgcggccttcaggtcagtgctgactga

SEQ ID NO: 285700 - DNA, 873 bp, Morganella morganii
atgggtccggtgacactttcttcccctgagcagttccgccgcgaacggctggcgtttatccgcgataccttcggcgtgccggatgatgaactgaaccgtcaggcggatgccgatgatgccattctgcgcagcctgccgcagcgcagcggcaccgtgctgtggtgcgaggcagatccttacgaccagcttttcctgatcgccgtcttatcctctctccgtacgccgccgggaatgacgctggtgtctctgtcccgtctgccgggtgtccgtaaattcaccggacttggtcagttggcgccggagatcctgccctggctgtggcagcaacgccgtccggtaacacaggccgctatcagcaccgccactgaggcccggcgctgttaccgggatccgtctccgcttgcgctggccgcatttgtccgcaccccgcatccggaactgcctcaccttaacggcgcactgagccgcatgctgcgggaattaccggatcagcacaccgggctatccctgacagaacaactcgctctgcagatcctcagtgaacaggggccgatgactttaccggcgctgtttcgcatcctgctttctgaaaaagagccgctgccgtttctcggcgaccggatgttcttcgcacagatgcaacccctgatcacaggaagcacaccgttgttaaaggccggtactcaggcgttaccggttatctcactgacagaaaccggcagacaggttctgcggggtgaaaaaaaccggcttaactgcacgacagatgtgcgccgggtcggcggagtctgtatcacaccacagcaaccgtactggtgcaccggtgaaaatctggcgccggttctgacctccgcaactctccgccggacataa

SEQ ID NO: 285701 - DNA, 504 bp, Morganella morganii
atggattttgttttaacaaaaataactcaggttgattggtgtttttttaaagcgttgtatatgaacaatgacgttatgaggttcatatcagaccttatgccggaagaggaaattaaggattcttttgagagccggttaccttcatgggatatcctgtctcatcactggttatgctttgttatccgtgatgcgggcgacaataccccgatgggactgacaggccttaaaattgtcagtgaaggcgggcgtaaaatcgcagaggtgggttacattatatcaccggaattcagcggaaaatcgttggcaacaaggtcgctgaccaggctgatatcgctgcctgaactggctccgctgaatgagttccgtgcagttgtaacgggtggcaatactgcctctgagagtgttttaacgaaaaatgacttcattcttacagaggtcattaaaaacaactatgttataggcaatgaaatgtttgacgatcatatttacacattaacccgttaa

SEQ ID NO: 285702 - DNA, 2748 bp, Morganella morganii
atgagcagaaacctccgtttacaggtcgtgttaaatgccgtcgataaattaacccggccgttccgcagtgcgcaggaatccaacaaacgactggcgggcgctgtccgccagtcccgcgatgcactgaaagacctgaaccgtcaggccggacaaattgacggcttccgtaaaacaaaacagcaactcaccgaaacacagcaggcctatcaggcggcaacacaacgcgccgccgccctcgcccgcgaaatgaacgcctccggcaatccgacacggcagcaggccgaagcgcttaaacgcgcgcagcgtgaagccggtcaactgaaaaaccggtttgaacaactacagcgatccacccagcaacagcgcaccgccttacaggctaacggcatctcgacaacccaactcggacaggcacagcgccgcctgaacagcgacattgcccgcaccactcagcaactgcaacggcaggagcagcagctgcgccgcagcgccgaacaagagcgccggatggcagcggccaaaggcagctatcagaaaacgatggatgtccggaataaaatggccggtaccggcgcggcagcgatggcgaccggcggtgcggcgttatatgccgggaagaaatttatggcgccgggctatgagtttgaggtcggtatgtcaaaggtgcaggcgctgacccgacttgataagaactcagaagagtataaagcactgcgcgaacaggcgcggcagctgggggcgaccacggcatttacggcaaacgaagttgctcaggggcaatcgttctatgctatggccggatttaaaccggagcagatacagaacgccatgaaaggcaccctgtcgatgtcccttgccggtgatatcgacctcgccaccacagccgatatcggatccaatatcctgaccgggttcaaactgaactctgacgaaatgaaccgcgtcagtgatacgctcgttgccacctttacccggtcaaacaccaacctgaatatgctgggcgacacgatgaaatatgtcgcgccggtcgcgtccggtctgggtgttgatctggaaaccgccgctgttgccgccggtaaactgggtgatgccggtatacagggcagtatggccggtaccagtctgcgatctattcttggtcgcctcgctgagccgccaaaacaggccgctgacgcactggaagagctaaacatcaagacccgtgatgccaagggtaacttacgtggcctgccggaaatccttgctgatctggataaaaagacaaagaaaatgggtaccgcgcagcgcgccgggtacttcaaacacattgcaggtgaggaagcattttctgccctgtcggtactaacagaccaggcgggaagcggcgaactgcaaaaaatgatcgccgaagtcaaagcggccaaaggtgaggctcagaaagtggccgacaccatgaccgataaccttgacggcgatttaaaaaacctgacctccgcatgggaggatgttggtattcagatattcggcggcgttgacagcccgctgcgggatatcgcgaaatccattaccactattatcagtaaggttggggactgggcgaagcgcaatccggaactggcgaacacactgacaaaaattgcactggcactgggcgtgatcctcgccgtgggcggcgcgattgttctgatgctggccgcaatgctcggcccggtcgcaatgctgaagctgagcctgtcagtgctgggtatcaagggtgccggtgcttttggtctgctggctaaaggattaaaagctgtcggactggccttattcggtatcggaaaagccctgctgacgaacccgctgtttcttgccgccgcagtcattgccggtatcgcctacgcaatatataaaaactgggacactgtcgctgcgttctttaagaagctgtgggcggatattgtcagtgcctgtgatgccgcatggaaatggataggaagcatcatcagcagagcctgggagggaataaaaaactatttcctgaactacacccttgtcgggctgatttataaaaactgggacggcatcaagaaatacatgtctgatctgtgggaaaccgtgaaaaccaccatcaaaactaagtgggatcaaatcatcacggatattcagaacctcccggcaaccatgaagcaggccgcatctgacatgatagacagcgtcattaacggtattaacgagaaatgggaagacctgaagaataaatttgccgaaataaagcaaatggcaaaagacgctcttacgccggactggctgaaggaagcgaaacaggatccgaagttcgtggcggctgtagaggccacaaaacagagcacaacaaccggcggcatccgcaatgccaactggacgataccggataagaaatttgccggggcctatgattccggcggacatattccgcgcggtcagtggggtattgtcggtgagaacgggccagaagtggtggacggcccggcaaatgtgaccggcaggaaaaatactgcagcactggcaatgctggcactgagtaccctgtctcagccgatagctgcagcaccggcacaaaccggcggcggagcggtcagcagcgcgtattcatcacagcagaacaccgcgccggtcatcaacatctacccgacaccggcgcattccgcacaggatatcgccagcgaagttgcccgccagctggacgcgcatacccgccgacagcaggccagccgccgcagcgggtacagtgacacagaggagttttaa

SEQ ID NO: 285703 - DNA, 645 bp, Morganella morganii
gtgagattaagtagtattttagcacttacctttagctattatcccgcttgggccggtttggcattagccgcaaagttatggcttgaaatacctatcttgacagcaattggattagcgaccctcgcagggtttatactttgtactgcaataatcaaatcacaggaatataaatctgtacttaaattaaaatctcgaaaagagtcagcatcaaacgtaacaggtatttttactgagatgcaaaaagctaaagaagtagttgctttatatgagcgtgcaagttcagccagaaaaaagactcccccccctccacgtagcactcaaaaggatcgaactaaaccagatacctcctcaccttataagaatgccagagaaaaagccaaacagcgaatgcgtcaggaaaaagattccttctataaatcacgagaatggcgttcattaagatatcaagtcttacgtgaacaatctgtatgctgtgcttgttgtggccgctcaccaagaattcatgggattgtaatacatgtagaccatattcttccccgttcaaagtttccgcatcttgcattagataaatcaaatttgcaggtactgtgtgatgactgtaacttggctaaatcgaatactacttttgatgattggcgagaatga

SEQ ID NO: 285704 - DNA, 354 bp, Morganella morganii
atgaaatattacaaaacgaaaaataatgaagtttatgcacttgaagataacgactctgcaaaagagtggatagaagaaaaagtgactgaaatcaccaaagaggaagctgataacatcacaaatccgcgaccaacgaaagaacaactgatcgcaaaagctgaatacgataaacaggcgctgattacagaggttcaggctgaaactcagttactacaaacaaaactggcacttggccgtatcagtgataatgaaaaggcgcggttaaacgcctggctggattatctggacgaactggaggcagtggacgtatccaccgccccggatattatctggccggtgaagccggaggtgtag

SEQ ID NO: 285705 - DNA, 129 bp, Morganella morganii
atgaataccattcagccttttaattcctatgaaagtgatattgtaattaaactgaatgttactgataactgggcgggtgactggggcttccgaaaatggaatccatttgcagataaacatgctaactaa

SEQ ID NO: 285706 - DNA, 222 bp, Morganella morganii
atgagggaatcactcagagcaaaaatgatcgcggtatgtgatgataagatactgaaaaaaggtgagaatacaggtttatcgttttacgcattctttgccaataaaaatgatgatccggaattactgatggaagccgctacgtggtggattatgacccgtaagttggatcactttgaaaaggctcataaaataaaaaccctgataatgtccgaaaacggataa

SEQ ID NO: 285707 - DNA, 2955 bp, Morganella morganii
ttgggcatttcagtcggattagtaaataaaaccacccacaaaaccacgctggcgaccaatattcagaaatccgtgatgaatatcggcagtctggtacagattaatgattctgcggttcccggtcttggcggccgcaaagcacagacaaccacactggtgattcaggcgcaggccgataccgattaccttctgacggataagtccggtcagttaccgggaaaggttaaagtcagccgcgcgggcagtgacctctggatttattccgatccggataaagacgagccggacattattatcaaagattattacctttataagggtgacatcctggcagaaaccaccaatggtgccatggtgatgtatcagtcagaaagcggtattgccgcagattcactcagcagcagttcgtctgccgtactgacgcagtcagataccaccggaaataccatcagctgggaatccggaattccggaagtggatgcgggctggctgttactcggcgcactggggattggcggcggtgttgcgctggcaaaccacagcagcggtggtgacaaaggaaaatccggttctgatgatgataaaggtacaggaaaagcccctgatgtgccgaaggttgagctgaataaccgccatggtttatccgggaaaggcactgaaggcagtacggtgattattcttgatgatcacggtaaacagatcgccacaacaaaagtggataaaaacggtaactggtcgattgccaccaacccgctgaaagaaggggaaaccggtaagatttatgccaaaggcgaaaacggcctggaaagtaagcatgaagatatcaccggcggcaaccagaccgcgccggagcagccggttgtcacccaaaatgatgaattcaccctcgctggtactgtgaccaaaggctacagcgtgctggtcacctggcgtgacagcagcggtgcacataccgaagtggcgaccgtcaatccggacggcacctggtttgtcaaaaaaccgttaccggacggcgcactgattgagattgtgtcaaaagagccggtcagcggtaacctcagtgatccgatcagcattaatgtcgggcagaatgcaccgccgctggggccgacggttgaggaaaacagtactgctctcagcgggacaggcccggcaggcagtaaaattatgatcctggatgccgccggtaaactgattgcttccacgatgaccgattcatccggtaaatggcattttgcggataacccgtttgctgccggtgaaagcggcaccatttatgttgttaataatgccggacgggaaagtgcaaaacaggccattaccggtggtactgcggcaccgttaccggagccggtgatcaccaccaataacagcaaagggatgagcggtaaagccacgcccggcagtactatcacactgaaagatgcgcagggtgacgttatcggtaccacgaagaccaacgacaaaggggaatggaaattcgataaaaacccgctgggcgatggtcagaaaggaacaataaccgcatctgccgacggctttgctgacagtcacagcaaagagtttgacagcggggatcgtatcccgccgcgtgatccggtcattaccgaaaataacagctcacatctgtcaggaaccggtgagccgggaaccgggattattttcaaaaatgccggtaatcagatcatcggcaaagcccgtgtggataaagacggaaactggtcaatcgagccgaacccgtacacagcgggctcaaaaggtgtgatgctcggcaaagatgcggccggtaacgtaaccggtgatattgcggttgagagcggtattaaattaccgccgtcctcgccggaaattaccgaaaacagcggcggcaaactggccggactgggtgaggcggagagctatatcctgattaaggataaaaaaggcaatctgctgcaaaaagtggaagtgaaagccgacggtacatgggttgccgaaccgaacccgtttaaaaccggtgaaaccggcaccatcagcagtgccgataaacagggtaacgaaggtgataaaatcacggttaccggcggacattccccggcgaaagctgcggtactcaaccttgaggcagatacaggcgtttctgatcacgataacatcacatccaataaccggatgatggtgaaagacatgacggaaatgaaacgctgggaatactcaacggacggcgggaaaacctggagtaaaggctctcagacttctttcactatcaaagacggtacttacgatgcccatcaggtgcaggtgcgttattttgataacgacggtaacgccagtcaggttgcgaaatatgacaaactggtgattgataccctggcaccggcggcaccgggacagacgtttaacggcggtaaaattgttcttaccggtctggaaaatgatgcatcctgggaatattcagtggatggcggtaaaagctggctgaaaggtcacggtgacagcttcacactgaatgaaggggattacagccgcggcacgattcaggtcaaacagaccgatctggccgggaatatcagtaaaatctccggtaacagcgatacgatttcagtctccggcaaaacactgctttccgctgatgatgataacggacacgctttttcatctccggcagatatggacgggctgatgaccaaagcactgctgatgtcagagcagcacccgcaggatgaaaagggtgagcaggatcccgctgcggatatcgtgtcgctgcccgtttcgcaactgctgaccagcggcccgcagcatgatgatatcagcactctgctggcatcattctcatccgaaacaccggcaacccgtgcggaaagtgaaatcagtcatgacagcatgcagctctcttatgcgctacaggcggaatgcatggctgcaccggtggcggatttcgccggtgtactgacagaacaattaccgctgtattaa

SEQ ID NO: 285708 - DNA, 10224 bp, Morganella morganii
atgtctatagttatcggggtagttgataaaataagtcgtgttgccaagttcgccacaacaaccaaaaaaggcaatacattatttttgcatgcacaggaaggcatggattatatcgttgtcgataaacaaactggttttgccccggcaaaaattatcgccgtacgtgatggtaacaatctaaaattatttgttgagggtgaaacagacccttccattgtcattgaagactattatgtgtatcccgcgcaggttatcggccagacagctgacggcactgtccataactatgtcccgttgtcttcctctgagcaggagcaggttgccagccttaacgaccatcagtctgcaccacagattctcgacagcgctcagcaggcaccgatcacctgggataccaatgatactgactggggcttaattactctgattgcttacggtctgacggttgccggtgccatggcactgatgatcaaccacggcggcggcggtaaaaaagaagaacctaaagttgaagcaccggtgacaaataaagttgttatcgatgacattcaggattcggaagcaccgcagattggcagtgttaagcgcggtgaaagcaccaacgatgaaaccccgacactgcacgggcatctgacactgaatttagccgcagatgaagcggtgattatttaccgtaacaatgtaaaaatcggtaccgcaaaagttgccggagacggcaaaacctgggtatttgaagatactcacggcggtttaatcagcgataacacttacacctatacagcccgcgttgagcacactaccggtgttaataaaggtgaaccatctgatggttacgacattatttttgataataccgcaccgactcagagcatcattattaccggcgtggcggatgatgttgcaccggtcattgataatgtcccggacaatggttataccaatgatacaacaccgcttatcagcggtattttgtctcacccgacagaaaagggtgaatatgtcgttgttctgcgcaacggtgcggaaatcggcaaagcagttgttaacggaaccggctggacattcgctgacagcggtctgaacgacggtgaaacctatgtctataccgccgttgtcagagatgcggccggtaacaccggtgccgtttcaaaaggctataccattcatattgataccaccgcgcctgatcacacggtgacactggatggtatctatgatgatgttgcgccgggaacagggattgttggcaataatggtgtgactaatgatacaacaccggaactgcgcggtcagatcgataaagttctggcggacaatgaaattctggtggtttaccgtgatggtgtcagaatcggtgaagcggaagtcagcggcagtgcatggcgctataccgactccggcctggccaatgacagtcattacacctacagcgcccgggttgaggatgcggcaggaaataccggtctgtattccaatgaatacggtatcaatatcaaatttaccggcccgtcacagttagtcaccattacctctgtctgggatgatgttgagccggttattgccaaagttgaccataaaggctggactaatgacgccagcccggatgttaacggtacgctgagcgccgcgctgaatgccggtgaaatcctgtctgtttaccgtgatggtaataaagtcggtaatgccactgttaacggtaccagctggacatatcacgaagaatccgttctggctgatggtcagcacatctatactgcgtatgttgaagatgcggcgcataaccccggtgcggcatccaataactatgaaatcaatgttgataccattgcaccggtacagacagtcaccctgactgaaatcaccgacaacaaagatccggtgaccggtaaaattccgcagggcggcgaaaccaacgacgataccccgaccctgcacggtacgctgagtgcggcactgaatgcgggcgaagtggtggccgtttaccgtaacggtgtgaaagtgggcacagctgtgaccagcggcacatcctggagttatgaggatgcgggcctggccagcggttcacaatacacctattacgcgaaggtggaagacctggcgggtaacgtcagtcagccgtcaaatgattacagtattgcgctcaatactgatggtgcttcccaaagcacccacatcctgaatatcaccgatgacgtagcgccggtaaccggtaccgtccttgccggtggttataccaatgactccaccccgacactgaacggttacattacatcagcgctgaccggctctgaagaagtgctcattttccgtgacggtgcgaaggtcggtacagccaccgttaacggcaccacctggacctacacagactctcttgaaaataacgacggccactatatctatacggcggttgtgagagatggcgcgggtaatcagggggcgatgtcaaatgactatgatatttacctcgataccacaccaccgtcacaaacggtcactattgcttatgttattgatgacgaaggcgttgttcagaaaaacattctgtccggtgaagtgacggatgacaaaacaccaaccgttgtcggtacgctggatgcggaactggatgccaccgagcgtgttgtggtttaccgcgacggcaaaccggtcggtacagccacggtgcatggcacagagtgggcattcactgacaatctggccaatgatgcgacctatatctataccgccaaagtgatcgacaaagccggtaacgaaggccacctgtctgatgaattcagcattattgtggataccgggttcccgtctcagactgtgattatcaccgatatccaggatgacaaactgccgctggtggaaaccgtcaaaaatggtggttacaccaacgatgataccccgacccttaacggtacactgagtgaaaacctggcttccggtgaaaaagtcgttattttccgcggtgatactgaagttggttttgctgtgaccacagggaataactggacctttaccgacagcggcctgactgacggtaatacttatgtttataccgcgattgtccgtaatgcggccggtaatacgggtcacgaatccgacagctacaccatccatatggatacctccgccccgacccagagtgtgaaaatcaccggagtgtgggatgacgtggcgccggaactgggcaatgttgaccacaacggctggaccaacgacaccgcaccgcaggtgcgcggcaccctgagtgcggcaccgggcgacaccgaatttgtcgtggtgctgcgtgacggcgtcgaggtcgggcacgccgccgtgaccggcaccgcgtggacctttgacgacagcggcctggcggacggcggcacctacacctacaccgcgctggtgcgcgacctggcggggaacagcggcgcggtctccggcggctacaccatccacgtcgacaccaccgccccggacaccgtggtcaccatcaccgccgtgtatgacgaccaggcgccggggatcggcaatgtgaaaccgggcgagaccaccaacgacaccacgccggagctgcgcggtgaactcagcaaagcgctggcggacaacgaggtgctgaccgtctaccgtgacggcacggcggtcggcaaagcggtggtgaccggcaccgcctggacctacgcggacagcgggctggccaacgacagccactacgtctacaccgcgcgggttgaggacaaagcgggcaacaccggggcgtatgccgccgactacgacatttatgtcaaattcgaggggccgtcccagaccgtgcagatcaccggggtgaacgatgatgtgctgccggtgaccggcaacgtgctgtccgggggctggaccaacgacgcccgtccggatgtcagcggcaccctgagtgcggcgctcggcgccggcgaggtgctgattgtgatgcgcgacggcgtggcggtcggtaaggctgtggtgaccggtaccgcatggacctacagcgagagcgcggatctgacggacgggcagcatatctacaccgcccacgtcgaggacgcggcgcagaacccgggcgcgacctccaaccgctatgaaatcaacgtcgacaccgtggcaccgtcccaggcggtggtgctgacccatatcgtcgacaacaaagatccggtgaccggggatgtggaggacggggcgtacaccaacgacgacaccccgaccctgcacggcaccctgagcgcggcactcggtgcgggcgagatcctgacggtgtggcgcaacggcgagctgctgaaaggtgcggacgtgaaagtggacggcctgacctggagttacgaggactccggcctggcgagcggctcggactacacctactatgtgcaggtgcaggatctggccggtaacaccggcacgcagtccaacagccatacgattaaactgaacaccgacggtgcatcgcagggcacacagatcctgagcatcaccgacgaccagctgccgtggaccggcaccgtgaaaaacggcgagtcgaccaacgaccgcaccccgaccctgaacggttcggtgacggcggcgctgaccggcaccgagaaggtgattatcctgcgcaacggcagcgaggtcggcaccgcggtggtgaacggcaccgcgtggacctacaccgacgcggaaatcaccaccgacggcaagtacacctacaccgcgctggtgcgcgatgaggcgggcaacgagggggcgaagtcgaatgactacgtgatgtacctcgacaccacggcaccgtcgcagaaggcggtgatcgacggcatcaccgatgaccaggcgccgggcctgtacgaggtggccaacggcggcagcaccaacgacaagaccccgaccctgcacggcaccctcgacggggagctgggggcgggcgagagcctgcgcgtgttccgtgacggcaaggacgtcggcggggccgtggtgaccggcagaacctgggtgttcaccgacaccctggccaacgacggcacctacgagtataaggtggcggtggttgatgcggcccataacaccggggcggaatccaatgtttacggcatgacactggataccgcagtaccgacccagacggtcaccatcaccgaaattatcgatgacaaggcaccgtggaccggcaccgtgaaagacggcggcgtcaccaacgatgatactccgaccctgaacggtacgctgaatgcgaaactggcggcgggtgaaacggtggttatttaccgtgacggcagctatctggaaacggcgaccgtgaatgcggacggcctgagctggacctataccgacaagggactgcaggacggcaccacttacgtctataccgcgtatgtgcgtgacggggcgtataacctggggccggtgtcgaaagattacaccatcagcctcgataccaccgcgccgacccagactgtgaccatcaccgaaattatcgatgataaggcaccgtggaccggcaccgtgaaagacggcggtatcaccaacgatgacaccccgaccctcaatggtacgctgaatgcgaaactcggtgcgggtgaaacggtggtgatttaccgtgacggcagctatctggaaacggccaccgtgaatgcggacggcctgagctggacctataccgacaagggactgcaggacggtaccacttacgtttataccgcctatgtgcgtgacggggcgtataacctgggaccggtgtcgaaagattacaccatcagcctcgataccaccgcaccgacccagaccgtgaccatcaccgaaattatcgatgacaaggcaccgtggaccggcaccgtgaaagacggcggcgtcaccaacgatgacaccccgaccctcaacggtacgctgaatgcgaaactggcggcgggtgaaacggtggtgatctaccgtgacggcagttatctggagacggcgaccgtgaatgcggacggcctgagctggacctataccgacaagggactgcaggacggtaccacttacgtctataccgcgtatgtgcgtgacggggcgtataacctggggccggtatcgaaagattacaccatcagcctcgataccaccgcaccgacccagacggtcaccatcaccgaaattatcgatgataaggatccgcaggttggtaaggtcgataacggtaaatacaccaacgacgataccccgacgctgaacgggactatcaatgcggctctgggcaagggtgaaactgttgtcatcttccggaacggtgcgtatgccggtacggcgaccatgaaggcagacggcctgagctggacctataccgataatggtctgaccgacggtaatacctacgaatacaaagcatatgtacgtgatgcggcgtttaacgaaggacctgagtcagcaccgtacactattcatatggacagcaccgcgccggttcagactgtggctatcaccgaaattatggatgataagctcccgggtaccggcaaagtggaaaacggtaagtataccaacgatgacacacctacgattaacgggacgatcagccaggcgctgagcgaaacagaaatggtggcggtgttccgtgacggtgtattcctggattatgcgaaggtgaccggtggtacaaactggacactgaccgatactctggcaaatgacggccgctacagctatacagcaaaagtcgttgataaagcaggtaacatcggccctgaatccacagagtatgtcattaacctggatacgtctgtaccggcacagaccgttaagatcacgtctgttctggatgatgtgaaaccgttcgaaggcaatattgataagggcggatacaccaacgataagacaccggaactgcatggtaccgtcagctcagcgctgaaagccaaccaggttctggcgatttatctgaatgataagtgggttgccaatgtcactgtgaatgatgacctgacctggcagtataccggcacgctgtccactgacgggcattacacctggaaggcggttgtggaaacactggccggtgttccgggggcatccgatgaatacgatatcaacctggatacatccgtaccggcaaccctggcgacgattgataaattctgggatcacgtcggtgcagaacagggtgaattcaaaaatggcgatgtaactgatgaccgtaaccctgaactgcgcggttcattgtcgcaggaactgaaagcccgtgaatctgtactgatctttgataccaccaaaggggtaatcggcagcggcctggaagtactgatgggaaccgcaattgcgaacggcagagagtgggcgttccttgtgcccggcgatcaccgtctcgagaacggttcatcaccgaagtttgaggccctggtgaccaacggctcaacatacggtaagccatcagcagactttacgctgaaagtggacctggatatcaacgtcaatgtggtgaaaacgctggatacacatccgatcatctccgggtctgtgggcttccagatttacaatgatgagcacgtcaaagtgaccgtcaacggtaaaacttactcctcgctggacggcggtgtggtggttgacccgctgaacaacacctggtatgtgaagttaccggccaattcagggctgacacagggtcagacttatgacgtcgtggcaacactgtataacaacgacggccgtgttgtggtcaaggataagacccttaacgaaatccaggtatcgaaagaaccggctgcaccggatattccggccagtgatgacgcagctaacaaagcgaccgggatgaccatcggtgaaaacggcgcatggcgtatcttctccaacatgaacgtgctggatcagaatggtacgaatatcaccaatacatcatcgtttaaaaccaataccctgaaatcgaatggacaggcaggtgtatatgggtcgatgtctttcgtagactttgaccgcgacggctatatggatattgtcgggctggactccaaatttgcggatgggcagcaggcctttaaatatcagccgggagtgatggggatatcgagtcaggataagaaagtatcagaccgggtcactaatgatgaatattatgcattcattattggtgatgccagtagcggatatgccggagccgtagatccaaaatacagcggcggcggttccggaagtgccggtacattctcctggtggggcggtaccgcgctgtatgacaaaaatggcgacggctacgttgatatcgtacacggggataaaacaccggatgatgctaacggagggggaggttacgacactcagtttatcatcaacgataaaggtcaattccataaagatgcgacctatgttgacgggttgtatggtgccgataaggatcctttattcgcgcagcacggtcagcagaaacaatcaacaccggataaattagtgtcctccgttgacctgaataacgatggtaacgtcgatatcgtctacagcggtgacaatggttcaaactttatcaccggaacaggggccacctactcgggagcgaaaagcagcggtaaactggttgttgtttccaacaccggcgccggtggttttgatgtcaaacagatcctgagcggcattgaaggaaccggtttcggggcaaacggcgtcgccggtgaactgcagagcagcagcttcaatggccagtctctggtctgggctgatttcaacggtgacggctggctggatatgtttgtcggttcagcgggtgtcacggaaggtacgctgaatcttaacagtgcaattttgttcaatgacggacatggttatctggctcagaataccgcgttaggcaccatcagcgaggcgaaaggtgcttacaacttcatggataaaggtgatgtgggcggtgcactgagtgttgactggaacatggatggtaagaccgatatcgtcaccatcccgcgcctgaacgacagcggtgcgccgataaaaaccctgatggaagttgcgctgcagaccaatatgtcagcaaacggtgtaacgcagttccggaaatctgttctgcactcaaccgatatcggttcactgaaaaactctgccggtaaagggtacagcggcctgctcaatatcgacgtagactgggacggacgccaggatctgatggtatttaccggtactcagggcgcgacactcattaagaatgaaaacgaactgaaagaaggcaccgcaatgcacattaagatcctcgaccacgaggggattaatgccttcttcggtaacacagtgaagctgtatgactctgacggtaacctggttgccacgcaggtcattaaccaccaggcgggtaaccagaccagtaacagtaccggtttactgagtttctacggcctgaaagccgatgaaacgtataacgcggtgctgctgcgtaacgttaacggtattcagcagaacgtcggggcggaaggccgtgtgggtgattttgatatcgctaacgtcaatgccagctggggcggcctgacaaccggtaagaactgggattcctatgttctgaccgcagaatcaggtacctcaaccagtaatgccaacatcggtaacggtgtggtcggtaccggttacaacgataccttcttcgccacactgggtgaaaacgcctatgaaggcggcggcggcagctatctggtgaacggtgcccgtcagtggagtgataaaggcggtattgatatcgttgacttcaaacttgccggtaagactaacgtaacggttgacctccgtctgacggattaccaggaaaccggctacggtaagcagaagttcagcaatattgaagggattcgcggcggggatggtgatgatactttctactccaactctgcggataacttctttgacggcggcgccgggaacaacaccttccatctgggtgccggcggtcaggacaccatcatgtaccgcttgctggctgatgataacagcggtggtcatggtgttgaccagatcaacaacttctgggccggtacggtcgaagcaacagctaacgcagatattatcaatatcaaagagttactcgtcggttataacggtaaggcatacgacgatgtggcgaaatacgttaacggtaaagcggagatctcggataacacgatcaccaactatctgaaactggaaaatggttcgctctatcttgaccgtgatggtctgggcggacgttaccagtcagagaaactggcggatatcgacttcgggaatgatccgaacggcgataaagtggatctggcgatgctgcttgccaaccaccagattgtattctga

SEQ ID NO: 285709 - DNA, 126 bp, Morganella morganii
atgagcgataaaaaatatgatccgacatggagtgggtatatgggtgattacctgcgcggaaatgtaggtatcaaccaacttaagcctcaacatgaattttttgatgctatcgggctggaaaagtag

SEQ ID NO: 285710 - DNA, 1128 bp, Morganella morganii
atgagtggtagttatcccccaaatgctgcattaacaactgctttggcctttcattatcaagtattgataggtttggataaatgtttctctctaactgaaggacaatcaatctggttcgaaaaagatggtgatgtctcttttttagctcaaagtgatgaacaatcaacacaatttgaaataaaaaactactcagcccctttaactgatcaccatgaaaatctatggaaaacattaaaaaactggttatcactagaatttgaccactctcaatatagctctttggtgttacacaccactcaggcatttggttcaaaaacacgtttgaaagactggaacttgaaaactccagaacagaaactacaaatattaaaagatatttttgaagaaagaaaaaaagagcaaatcagtacccaaaaaccctccaatattgcaaaaatacaaacggaagtaatgggaactgatgagacttcattaaaaaccatattgagtaaattaactttatttacagaggccgataacgcaccagacttagaagaaaaaatactgaatagacttataggtattccaaaaaacaatcttaatagttatttacaagggcttataggttttgtttattctcaagcaactcaaaaaaactggaatgtaaaatatcaagatttcaatgctaagtgtctggatttgacagctaaattatgcaaaagagagttcacttttcctgattttacagggcataaagcatcgctttcagaaataaacgagcatagcaataaagattttgtgaaaaaaataagtgaaattgaacatcatacaatgattccagatgctatagggaactggattgaattacacaattcattaaacgaacaattagacgagtatcccctctatagagaaaaaacaataaattaccaaaatcaattaatcttgcagtttggatatgcatattcaagtgctcaacttgaggatacagatccaattaagagttcaaaaaaattgtataacgatattattggtagacaaccactaaatatgggtaatgacattcctcctatcgaatataaaaatggattaatacatgaagcaatggatgatgatagccgaaatttaaaatggaaggttgagccatga

SEQ ID NO: 285711 - DNA, 1260 bp, Morganella morganii; identical to SEQ ID NO: 285587

SEQ ID NO: 285712 - DNA, 237 bp, Morganella morganii
atgacagatggttatgactgctaccagaatgcactggcggagcgggtaaacggtatactgaaaagtgagtttttactctctcgtccgtcagacctggcacaagcccggaaaatggtaaaagaatctgtaggtatttataaccatgaacggcctcatctggccctgaaatacaaaacgcctgatgatgttcaccaggcgttttacaggcaaaaaactgtcaacctatataaggactag

SEQ ID NO: 285713 - DNA, 300 bp, Morganella morganii
gtgctcactcagcaaactaaacaggcgatcacgccctattttcggtgtttctcccgcctgattgttcagcaaatagtgcagttttcgcgtacctatgcgaggctggcggcaccggatacgtgcaacaaaagtaagaatgtcactattatgtgcctgtcgttttttacaccttttattgtactggtaccacgcctgcctgctgtggccaaggaactggcacgcacgggtaaccgttattccggaggcctgactttgcgtgaggacttgccgggccgcttttttacaatgctcactccgtaa

SEQ ID NO: 285714 - DNA, 399 bp, Morganella morganii
atgactgaattcaaacgcacgcaacgtgattatcctctatcctttaaagtagccgttgttgagcaggtcgaaaaaggcgagatgacctataagcaggcccagcaacgatatggtattcagggacggtccaccgttcttgtctggctgcgtaagtatggtcagcttgactggagccccggacttcctgacttggtgaagaggaaacgcccagtgactcagacagcccacccgcttacacccgaacaaagaatcaaagagcttgaagaacagcttaagttggcaaaccagaaagctgatttttttgaatcggttattaacgttctgaaaaatgattacggagtgagcattgtaaaaaagcggcccggcaagtcctcacgcaaagtcaggcctccggaataa

SEQ ID NO: 285715 - DNA, 252 bp, Morganella morganii
gtgctttatctgttcccgacaccggaatctgaaccgattgaagcggcagcgagggaacggatagcgcggtatgtgaaagagcagcaccgtatcgggcgtgatatccggctgtcggccatttacgccgccctgcatgttgagggggttcagcgcgtcgaactgaaaagcccggcaaaagatattgtgatcagcaatacccaggcgtcattttgtactgatgtgacggtgacagtcggaggttccgatgagtag

SEQ ID NO: 285716 - DNA, 609 bp, Morganella morganii
atgagtagccgcctgctgccgaccggatccagtccgctggaacttgccgctgctcaggcgtgcgcagaaatacagcgcgtgccggtaccgataaaaaccctggtcaatcctgatacctgtccgttgcatctgctgccctatctggcgtgggcgtggtcggttgaccgctgggatgcagactggccggagcggacaaagcgggacgttatcaaagcgtcaatgttcgttcacaagcataagggcaccatcggggcgctgcggcgtgtcgtggagccactcggctatctgatcagcgttactgagtggtggaaaaccggcgaccggaacgggacattccgcctgacagttggtgtatcggaaaccggcatcaccgaagaaacctattacgagcttgaacgcctgatttttgacgcaaagcccgtcagtcgtcacctgctggggttgtctattaacctgagcacatcaggtaatttttactgtggcgcagctaccaacaccggcgacacgctgacggtatatccctacatcccggaaaccgtccgggtggaaagcgcggactattttggcgcagccctgataaccattgataaagtgagagtaaacccatga

SEQ ID NO: 285717 - DNA, 270 bp, Morganella morganii
atgaaaaacataagcgccgaccggcccggcaacactcatcccttcaaacgcctgcgggatgcgcatccggaaatcagaatccgattcataaacggccggcagtggctggatagccgtatcgtcagccgcctgaatgaccagccggggaacattgttattcgcgcccaactgatccaaatctgccccgtaggcataggcaaccatacaggcgcgggcggcttcattgacccgctggcgcagcagcatttcccggtaagcattttcctgtaa

SEQ ID NO: 285718 - DNA, 189 bp, Morganella morganii
atggtcaaactgctgcaccagcatctcatcttcatgaccctgcacatagatgttaccgacggattcagcggtaaacgcaccggcagtgatattgccctgagttttaccttcgatggagatatagcatggagttggcatgataaaattccttatttattaacaggtaacaaatcgttaccggacgagtga

SEQ ID NO: 285719 - DNA, 990 bp, Morganella morganii
gtgagtgattctgcttacatgaattctttagaagaacagtttggtgatttgagctattcaaactttattgttcaatttatgccaccgataatttttgtttgtggtgggccaattaatgctaacccgataagtgtaagagattattttttctctcatgttgcccaacataatccaaagttgcttggttctcttgtcttggcagaagatttcaaagactattttaaagatggagcctattctgatttaatgagctttgaggatgatatagctaatatttcgactttagtcattatatgcttagaaagtgcgggttctttagttgaattaggcttatttgttaatagaaagaatttagctcaaaaattacacgttgttgctccacttgaagaaattgaaggaacaccaaataaaaatatgacaccaagatcttcatttatttatttaggacctttagaatatttgaaaagcttagagccaaattcagtttcagttttcccttggccagataaaactcggttaaaatatgacgaaatagaacttatttatgatgatgtaagtactagattaaaaaacgtcaaaaaaacagaaaaatataatagtgaaaacacagggcatttggctattttaatttatgagatcattttactatcagaaccaataaaaaaaacagaaattgaatgggcgttatattgtattgatatagatgtttcgcaaaagttaatatctagattgctttatcttttaactaaaatgaaacttatttcttcaatctcatatagtcgcacagattattattatgttattggacataggaagagtaagattaagtttggtttaagtaataaagggaaaataaaagactctatgaatataaaaatagctattagacagtcttatttaagcatggatgcaaaaaagtctgatgaaacggcgagaaagagagagaatgctttaaaacatataaatataatcagggggaatgtaatatga

SEQ ID NO: 285720 - DNA, 939 bp, Morganella morganii
atgaatttattacaatttatagcaaatggtctttatctaaccgaagatgaggcgatgagctacatcactacgatccctagaagatataaaaagttccatattaaaaaacgaaatagtacggagtacagattaatcgcacagcctgcaaggcaggtaaaatcgttgcagaaggctgtattgaagcgtatggagcagtatttttgtatacatgaaaatgcttttgcttatcagcatggaaaagatataagaaaaaatgcactattgcatagtaataataagtttatattgaaaatggattttaaaaatttctttttaagtataaagcctattcacttaaaaagatttttagtaaatacagggagagaattaactgagaaagatattttagtaatggagaatttgtttttctggaaattaagaagaaatagcccattaagattgagcatcggtgctccatcttcaccaatgatatccaatgttataatgtatttttttgattgtgaaatatctattaaatgtcaaaaattaggagttaaatactctagatatgcagatgatttaacttttagctctaatgtaaatggcgtgttatttagtgtccctaaaatagttagagaaactctaaattctgttgatttaaatgatataaaaataaaccataaaaaaacggtcttttcatcaaagaaatttaatcggcatgtaacgggagtaacaattactaacgatgaaaagttatcattaggacgagaaaagaaaagattactcagaagtaaaattcatcattatactttaggggttctttctgaatctgaaattttgaaattaagaggggaacttgggtatgcaaaattcattgagcctagattttttgaatccatgacttctaaatatggacacgatgtaatggattcaatagctaaatatggtaattgttcatga

SEQ ID NO: 285721 - DNA, 1113 bp, Morganella morganii
atggatatcaatgaacatagaaaaacgctcatccagtatcatggccttcaaaatactgatgaggtctatacgttttattatgatgaaacgaataacattcgaaagctatatttaaaaaattctggctttaatgttaacaagacggataatttcatccttgcaggcatactacacaaaggattaaacactgacagtgattattcagctctatttaaaatgcttaatcttcaaaaaagcactcatgagctaaagctcaggcatattgctacgggtaattttttgaatatgcttaaatctgataaacttttaattattctaaactggcttatagaaaacaaattttacatccattattttaatcttaatatcgtatactggtctgttgttgatatcattgattctattattggtgaattaaatcatcctttttataacataaatcacatgttacttaagagtgatttctatgagcttgccaatagcaattctgatgttttcctgaatgctctatatgaatttaactatcccgatattccagaagaaaaagctcatttattttgcctatggcttatcgattttacatgcatgcacagttatatgctgtcagattttcgagcaaatgtactcgaaaatttggttaaagaatctatgaaaattgaagaactaccgtttatatcgggatttcatggtcgagaactgattgatagctttatggtgttttatttaagaaatttgtatctatttaaaaattccatccacatatttgatgaagaaaaaagcattcaggatgacgttaaaaattttccgttaactgaaaatggcaggccaatacataatcatgaattcgttaaatcccacaactcagaggctgttcaactatctgatgtcatcgctggctttttaggtaagtatttttcttacttaaaagatgtaaatgacaagcagttagtgcttgataaggcaaatttaactagtcagcaaattaagacactttctgcgttaaaacacattattgatgtttccgatgatgttagcagaggattttttaatgtagtctgcagcgagcgagaacaacaaagaaataactggtttttacatggtgtaaaattgtaa

SEQ ID NO: 285722 - DNA, 1515 bp, Morganella morganii
atgataatagatgatattattgctggaattgacgatgatgggccagggagttattactcttttgagacgtttgttttacatcttcttaaaaatcatcttaggaatcaagataaagagcttcaagtatcccgagaaagttcaaatattggagacgctttagctccgaacggattcgatgagtttgatgggcctacattaattgaagttaaatttaatctatctgtgctccctacttctgtttttttagaaaaatatatattgaaatctatggcggagcaaattaaatatcaatttaaatatatattatttatttcggcaaaaccaattccagaacgaacgctgattaaatttaataatataattaacaataaatctctcccgtttgaggttgttttttgggggccgtctgagttaaataaaatagtattgaaaaataaaaaagtcgcaagtaaaattactaaaaatcttttttctttgaggctttcatctgctatatcaaatccagttatggattggaagaaagagcgcgatgatatattggataaattaaaatattcctataacaaaggacagttctcattattcttaggtgcgggtgtttcaagtagtgccggaatgccagactggaatactttattgaattcattatttgttacttatcttacgcaagagttcaatggtaacgaagcaatggataataccgatgttaatgatatagtaaatagactgaataatattaatgaaccctcggcactaatggctgcaagatatctcagaaaaggactatcaaaaagtgatagcgaaacgaaagagttcatagatgctgtcactaaaaacctgtataaactcagagatcctaaactttcggtcgactcagagctaataaaatcaatagcatcaatgtgtcttccaaggcgaactggtgccaaagttaaatcggtcatcacctataattttgatgatttacttgaaaggcaattaagtaataattctattttatatagatgtatttatactaataatgaaatttatgaccctgatgagcttccagtctatcatgttcatggattcttacctgaggatagaaaaccttatgatgacttagataaatcaactttagttttttcagaggaaggttatcatcatatttattctgactcctatcattggtcgaatcttgttcagttaaattcatttagagaaaatagttgcttaatggttgggttgtcaatgacagacccaaatcttagacgattattagatatttcttcaaaaaatattgagcgaagcaaacactttacttttatgaaaagaatttcaccgaatgaattctgctatgagaaaaaaacagaagggcagttaaaagttattgaaaatatcaattcagtcgaaaaatttctgaagcgccaccataccttaaatgaagagttaatgaaagaattaggtgtaacaattatatggtatgaaacatatgatgatatccctaagtttatcagagaagtaacgaaacattaa

SEQ ID NO: 285723 - DNA, 1035 bp, Morganella morganii
atgaaaaaaaagaaaacactgcccgtcaccaacaaagcagagttacccgctgacaaacagtgtgctgcattcacttttgataatcctgtgccggtcaccggtgcttatgacctgctcgactgcatggaatgcgcgaaaaccgataagtggtatgaaacgccgttagacttctacagcatagcccgtgcattccgttcagcggtacaccatgaatcaccgctgctgtttaagcgcaacgttatcatgagctgttttatcccgcataaatccctgtcctatcaggaaatgaatgcctacgttcttgattatcttgtattcggaaacggatatcttgagcgccgccgcaatatgctcggcgggctgctgcaactgaaacgatcaccggccaaatacacccggcgcggcattgacctggacacctattatttcgttcagacatggcaggatgcgcatgaatttaagcgcggcgatgttttccacctgatcaacccggatattaaccaggagatttacgggctgccggaatatctggccgggctgatatccgctaaactcaataaatcggctaccacattccgggttaactactatgagaacggctcacacgccggggtgattgtttatctcaatgacgcactggccgacccgaacggcgttgaggatctgaaaggcgcattgcagaaatcacgccgtgacggggctttcaagaatctgtttgtttattcggccaacgggaaaaaggacggcattcagatcctgccgttcagccagatagcggccaaagatgaatttatgaacgtgaaagatgccacccgtgatgatttgcttgccatgcaccgtgtgccgccgcagctgatgggtatcgtgccgaccggcgcgggcagcttcggggatgtggaaaaggcggcgaaagttttttctatcaatgaactgatgccaatcatgcagagcctgaaatccgtgaatgattgggtcggtgaagaggtcgtgcgcttcaatgagtacgccctgcttgaagccctcggcgcaaagtaa

SEQ ID NO: 285724 - DNA, 987 bp, Morganella morganii
atgagcataaaaaaacacttacaaataaaaaaagaacatcattatatctggcaatattatctaaaaaactgggcaactggaaataaagtttggtttttatcgaagaatagaaaattaattttcgatagcacaaaattaatagcaaaagaaagaaatttttacattgtcaatgaaatatcaacatcatgcatgaataaaataaacaaactattgcaactatttccttcagagcttcgagaaatatatatatctttattgcaacatgtcagactattacaaatattaaataacaaatatgaagattcaaaaataaaaaacaaagagattgacgtattatttaatgccttcaaacataatacactagaggatttacattcagactttgaagccaatgtaattccaatcctcaataaactttcaaataaagacttatctgttttaaattgtgaaaacaatttagtcagttttacatcttttataggattacagttaaccagaacgaaatcatttaaaagtattatgatggaatttagtaaaaacaaccctacaacatggttatcaaaggatgagattgaagaatcatggtggttaatcagctatatgtttggtattaatattggtcattcaatattctccgccagaaaaataaataattattgtttaataataaataactcatcaataccatttataactggtgatattccagttataaatgtacacccttctataagtgatgaaattaagcctcttactgacgaccagatggatattttctatcctatatcatcgaatattgctattatgataaacagttcaaatcaactaccttcaggaactaactatgtacaagaggaatttgtgcataaaaataatatattaattgcaaaaaattcacaaatccatatttttggaaaaacaaaagaatcaatcgaaccgtatataaaatatgtaggatcttatataaaaagattaaatacagaataa

SEQ ID NO: 285725 - DNA, 210 bp, Morganella morganii
atggtcagacgttatctccctcttaacccgctgcgcgcctttgaggccgccgcccgtcatctcagttttacccgtgcggcgattgagctgaatgtcacccatgccgccgtcagccagcaggtcagggctctggaagaacaactcggctgtgtgctgtttacccgcgtctcacgcaggctggctgctgccgcgtctggccggattttatga

SEQ ID NO: 285726 - DNA, 183 bp, Morganella morganii
atgaaaaatagtcaccgctgcgaaatatgcaataagcgtcttaatgaaagtgagcgattttattacggctatacctgtgaaaaatgtgaacgccacttcattactgagcatgaaggaaataaattcaaaaccacactttcgcttatcaggctctatttcagaaaggtaatttactcagcgtag

SEQ ID NO: 285727 - DNA, 339 bp, Morganella morganii
atgaacaaatatcgtgacaaatcagactttgagattaataaggctgtggctgaaattacaatctacggtgattggtatttgtcaccaacggatgaacaacctttcacattcttcaattatggtattaattcaagcaaaacagtagagctacctgattattgcaataacccagcggacgcaatgccgattattattgagaatgggatatccagtttattcaacggtgatgaatggatttgtagcgcctcggatggtgaatttctttccattaatgaaaatttataccgcgccgctatggaagtattcctgatgatgaaggatgcggagaatgaaaaatag

SEQ ID NO: 285728 - DNA, 282 bp, Morganella morganii
atggcaacaattactgttattccaaagaaagacaacgcgaagaaccgccggttagcaaagcagatggcgttctgggacagaaagcgtgaggagtatgcagcgaagcctaaaagccgctcagtggaggagatttttgattcaattatcaagcctgaatgccatttcgaaacactggctcaggtggtgattgaaatgaagaagctgccggaagcaccacgcaagcagctgagaatgaaccgcaagccgattatgcctaacggcgatatcacagcgagagcataa

SEQ ID NO: 285729 - DNA, 582 bp, Morganella morganii
atgaaattcaagtttattctttttggtcttctggcgctgtcgcctttgtcttttgcagaccaactatctgatttagaggctaaggccgcgaaaggagatatgatttctcagtcatctatgggccaaaaatactactccggcgatggcgttaaaaaagacaaaataaaagctgaaacgtggttctctctggcagctaagcaaggggatcctctttcccaaacaattcttggaagcatgtactattacggtgatgacggcatcaagcaggattacaataaagcagctgagttgcttatccctgcgtcaaagaaaggcgttcaagaggctgagtcccttgtgggtttaatgtacctcaaaggaaccggcgtaaaacaaagttatcacactgccagtaaattattcatctcagcagcaaataaaggtgagcctatggctcagtataatttaggattaatgcacgcaaaaggtgatggcgtaaggcaaagttattccgtggcaaaggaatactttggaatggcttgcgataatggtatgcagcagggttgcactgaatacaaacgacttcaccttgaaggctactaa

SEQ ID NO: 285730 - DNA, 204 bp, Morganella morganii
atgttcacagacatagcggcggctatcgaagaggccaggtggctcaggcgtgaaacaaagcatcaccacgtagtcacacagaaaagagacggatatctcaaggttcgacaggaagtcggcgaaagcagggggttgctactgaggaaggtgttcagcaccaggtacgactgccacaaacacactgttttgccggaggtaagatga

SEQ ID NO: 285731 - DNA, 840 bp, Morganella morganii
atgagactcgcagatttaccaaaatacttttcacctaagagtccgatgtttagtgactctccagccgcaacagctactgattcactttcaataaccgatgtcatggcctcgcttggtttggcgaccgcaaaagcgtggatgggtattgaattgtttttggcgaaacacggaatcaatcagccggatgaagcggtggagagcctctatcaatatgcattaactcaggcgcataaatacagcgttatccaaaagcttgatgaggatgttagaacatcagttctgcaaatactcgcaaattatgcatttcaggattacgccaggagcgcggccagtaaaaaggcatgccctgattgtgatggcggcttcattgaggctgaggtgttcactaccaaatcatccattaactttatggcaaaagaagatatggaatttgacagaggggccgggatcaaggttatccctgcaacatatgccagttttcgcagtgttcgcgagataaccaaggtggcctgtccgacctgcaagggtaaggcagttattggccattcgtgtcggtgcaatggtcgtggcgaggtactggacaaggcagaaagtgaaaagcagggggtgccggtatataagacgtgcccgaagtgttcagggcgtgggtattcacgactaccggctgaagatgtacgccgggcaatatgtgaatccctgttcgatatcccggaaacatcatggcggagaaacctgaagccattctatgaggcattgatacaggaatgtttcaaggaggaagctaacgcagaatcaattctgcaaatggtaactaaaagagaatcagtttctataaattag

SEQ ID NO: 285732 - DNA, 129 bp, Morganella morganii
atgcatgcttcgacacaaggccagtttcccgccggtgtgcgtcgtttacttacttcctcgctctgcattctttcgacctctcagccgatgcggttcgagtcccagccctgcggcgaagtgacgaactag

SEQ ID NO: 285733 - DNA, 519 bp, Morganella morganii
atgaatgaggtatattcagcaatgccgattaatatcaccacccacataaagcaggtaaaaatgactgaaaataaagaaagagcgactaaatattatatcgagatagttaagccaactgtcgatgagtttatgaatgacaaatgcagtattagaaaaggaatgctggcatcaatcaccatgaatcacataattgattacctatatgacgacagttcaaaaagcgatggtttcagagtttcgtcctctgaatgcgacgctctgaacaccattaaagatgtctgcaatgcatctaaacactgtgagttaacaagaggaaacccatcaataaaatcatcaggccaaataacacaagatgatgttccaggattattttccgctccgtttggaacgggtggatttcttgaagcaagttatgttttcgttaaacttaacgatgaaattaatggcgataaattcaaatgcttgccgaatataataaaagaggccgaagattactgggataaacgactttcgtcataa

SEQ ID NO: 285734 - DNA, 255 bp, Morganella morganii
atggatattagtaatgttataagcactttgattattactgcgggaagtgggaataagtacagaatagagataaacaaggatattaccaataaagactactttggtatcctttatgcgcagcaagatatcgatactgataaatttggccgccgccctgtttggtgtcaaataaatggctatattcaattaggtggaattgatattcaatcttgtgaaagcgaggcactgagagtgctgaaagaccaattgaaataa

SEQ ID NO: 285735 - DNA, 846 bp, Morganella morganii
atgaagaaattattaattactgatttggataacacgttatatgattgggtttcattctatgcccagtcatttactgcaatgctagatgtattagtcaatattttagatgtgcctaaaagtgagttgcttgaagaatttagacaagttcacatcaaacatgggaattctgaatatccatttggtgctttagagatagattcagtaaagaaaaaatatgcccacctgactagagatgaggttgctgtaaaactcgatgaggcttttcatgcctttaattctactagaaagaaaaccttaagatgctatgagggagttatcgagaccttagcctacctcaagaatcaaggggtcgtcattgtaggccacaccgaagcccctgttagaaatgctatattccgattgaaatctcttggcattcttgaatttatgacacatctttatacccctcaagatagattctacgatgaattggatgttaaaactaagtcttggattgaatcatatggtgattttatttatctattaagtgaagaggaaaaaaaacctaacccacttttgttagccgacatttgtgctaaagaggggttcagtacaagtgaggcagtttacattggggattcattagttaaagatatctccatggcaaatgatgcaggtgttgaatcaatatatgcagagtatggacgacagcatgaaaaggtatactgggatattttagtttcaataactcattggacgcaggaagatgttcaaagggaaggtaaattaaaggaactttataaacatgtcgttccaaatcatattataaaatcttttgataaagtaattgatattatcctgaaataa

SEQ ID NO: 285736 - DNA, 1611 bp, Morganella morganii
atgaattgcaaaactatcattctacgtttcagagatttggtcactcccgccggagaaacaatcactctacatcaggaaataatcaaatctaaaggctcagtttggtggggatggtgggcaaagccggatgaaagagtttcttctgaattcataaaaatcaaacgaaatttggcaggtaaaccattaggcattttcctttttgatagtgggcaaatgaagttgtatgaagccaagttgaaagatatttttttaaatggcgatttagctccgtgtcctaacccagaaatgtctcctgcatattatgcggagcaatgttataatttatggtttgaattatttgatataaaccaaattaatgatgacgtgattaatgattacgcgtactctgacaaggttaaagacttttttgatgaccatactttattttcggtattcgataacaagcaggtgtcaggacttagggagttaagatttcaagacagaaccatttggtttgttaatgattatgaccctaaaaagcatgaatctcatgaaattttgttgaacgatgcaaacattggaattcccggagtgtttccaaaacgcccagtagacttacacaatgggaaagtagtttggttttcggatatccatttcgatgaagataaggagaaacatcaatttaatcaagttaatcagttgccgctttctaagatattaattggcaggcaggatcttgacatagacgggatgattatttcaggtgatttaacttggaaagccacaaaaaaagaatttgaattgactacgaatttcttcaatgacatctgctctgttaaacgagtaaaatatgatgcgataggattttgcccaggtaatcacgatgtcagctttagtaaaacactttcagctgacgtaaaaagagcactaaataactatcatgaagctcagatggggaagaaaaaaatcactaaagctgattggaatattcttgctgcaaaaagtctctctagtaaaagtaaaaaaaactatgagaatttttttaaattgacagtaggtacagagcctaacgaatttctttcgatgggcaaacgctttattattagaaaccaaaagatagttgatttctgtttcttaaacagcaattttcttcagcaacatcaacttgcttttcaaggtcaaggatttgtcggagcagaacagcttgatgatgctgaaaagaaaatgctttggcaaaataatgagaaaattaaaggggggtaccgggtggttgttttgcaccataatttgtatccagttaattatacctcagagccgtatgtgagtgctccagctagtctggtatatgatacggaagcaataattcaatggtgcttcaaacatggagttgatttgatacttcatggccatacacatgaacgtttcatgactaaggtatccagaaggatagatggttgcgctaaaagtctatggatcactggtttaggtagttcaggtgtgatctcttctcaccttgtaggttttaatgagtttgcagaaattgatttcaatgatgaaaaaataaatatcaagttctataatataaagaataatgcaattgatgaccaatttgaaatcattaacctggactga

SEQ ID NO: 285737 - DNA, 234 bp, Morganella morganii; identical to SEQ ID NO: 277530

SEQ ID NO: 285738 - DNA, 867 bp, Morganella morganii
atgatgtttaatagaataaagttatctttactaagtatcagtagtgcaattatattctcaccaactgtatattcacacgattatattactagccagtctatttctgatgcaccagtaattactttgtccagttataatattatggcctcagaactttccagtctggaaagcttaaaatcagcactgcctgatttaaaaagtgatataattgcattacaagaagttgattataacactcagcgttcatcaaaaagctcgcctggaaacataccagtaaatcaagctgcaatattagctgaggatatgtcaatgcatttttcagaatgtcatgctattagtttcgaaggggggtattatggaatggcgttactttcacgatatccaataagtaaaacagaaaaaataaaactagggaatttaaataacagagaggaacgtgctgcatgtgttaattatatatctattcccggaataccttcaccggtagctattataattacacatccggaccaagacagggataacactctcagaatcaaacaaattcgagagctgatgggatatgttgatgaaattagtaagcatgctatacctattatgattggggatttaaatcttgtaccagcttctccggaatatagtgaattaatgtatcaaatgaacgatacgttaccagtaaacgagtattatacatttcccagctggaatcctaaccgcaggattgattatatattaacatctaagtcacagaaatggaaagttattaaggcacaggtcattaaagaaaatgcggacacattaacaaagtggactcaaatttctgatcatttacccatcagagtgaaaatgaaattgatgaaacaataa

SEQ ID NO: 285739 - DNA, 1641 bp, Morganella morganii
atgagcattgttaaatgggctgttgttggttcttttttatcttcgctgctattaatcgctttttctctctaccaggatgctttcctgccacgtacagtccctattatttatttcttcctattagttatactactatgcggaacccgctatttttatcgtaatattgttaatcttattactccaaaaggtttgcctgttgccatttacggtgcaggtgaatcaggacggcaattactgaccatccttcgggaacataaagaatataatccaatattttttatcgatgataaaaagaaacttcagtatcatacaattcacggtcttaaggtctacccttccgataacctggctaaattaatagataaatataatatctcaaaaatattattggccatacctagtgtatcttccaataaaagaaaaaatattttaaagaaattagaacctttacacagagaagttttaaccattcctgattttaatgagttagttgatggaactgcacaaataggtcacctaaataaagtatctatatccgatctgcttggccgtgaacaggttgcaccaatcaatgaattactaaagaaaaatatttttgagaagaatattttcatcagtggtgccggtggttctatcgggtctgagctatgccgtcaaattctatctcagagtccaaatttaattattctttatgaaatatcagaattttcgttatacagcattgatagagaattgaatagattaaaatactctaaaaaattgaataccaccatcatcccaatactaggtgatgttaaaaataaagaaaaaattgattttatcattaagaaattttcaattaatactgtatatcatgcagctgcttataagcatgtcccccttgtagaatataatatggttgagggaatccaaaataacatcttgggtacactatccctcgcacaatcagcaagtgaaaacaatgttgaacgatttgtattaatatctactgataaagcggtcaggccaactaatactatgggggcaacaaagcgttttgccgaaatgatattacaggcacttgctctcactcaatctgaaacacacttctcaatggttcgttttggtaatgttctcggttcatctggctctgttgttccattatttgaaaaacagatcgcaaatggtgggccaattacacttactcataaagatataacccgcttctttatgaccattccggaagccgctcaattagttattcaggccggagcaatgggaaaaaatggtgatgtctttgtccttgatatgggagagtcagtcaggatatacgaccttgctgaaaaaatgattaacctttcaggttttactattaaagatgaaaaaaatcctaatggcgatattgagataaaagtaaccgggttgcgtcccggagaaaagctttatgaagaactattaatcggagataatgttcagggaacattccatccccgaattatgacagctaatgaaaaatatctcacttgggataaactctcacaattgattgctgaaattaaaatacactgtgaacaacgaaatctgacagctttacgcgaattattattgaaagcacctttagattttcatcctcgtgatgaaatttgtgatttactgaaataa

SEQ ID NO: 285740 - DNA, 1389 bp, Morganella morganii
atgagcaagacgttgaaattaatagcaccttgggttgaacatctttgtattcccatacggaacggggcaaacgcacacctcctcttggactttaatagatacagatatcgcggggttcctaaaacacatgaaataaatcagggaaatgttcagttattagaccgtgatgatatagcacagagactgtttatcacaattacgagcagggaagatgcttcaccagcaaccaaaggtaacgcattcaccgcagctagaagacattttgcgttttgtgatgcgcaaactccaccgcttcaaccgctatctgaaatggcatttgttaaagaattagaacataactccatccgtcagcggcttggggagatcaaagatagtacagaaagcaagctacggggtgatttatcatctttataccagtggctagatcttcccgtgcgacacatttatccacaaggggttcggtcaggacgcacgcaaacagagccaacacgcggctatagtgacgctgacttaaagcaattgcttccgttgctaagaagtatttttaagcagttgtatcagcaattcattatcgatccagaacttcatattcaagcaagttctaacgctcatacaatggttttttcttggaaggggaaagattatccagtagccggtggtgcatcaaaaattttttatgtcgcaacatttctcctaagttattacacgtggagtaacagtaccgtcttatacagcttaagacgcccacaaactagcacacatgccatatcaagcaattggtatcaaatgccagcatttaaacgtagagcatttaaaactatcactgtagagctagggggtcataacaagctagaaattcctaagtatgcaacccagttttttgaccagttaatgaccgcctccaaactggtcgatcctaatcctgatggtttgctgttaccagcttacagctacagaaaaagaaaagttcagatgatgagcggatgtctacttaatgacttcaaagctaaatggttagctaggtactttccgatgaccgatgaacaaggagaaatactatggcctgtaccaagacgcttccgcgcaacagggagtcatttaactttggcactaaaaagtacactggaagctgcaattcttctggataacactcctcagacggttgctcatgcatactcaagtggaaacaagtatgaaaacgatctgatgaaccgagatacaagccaaactttagaacagatcgtgcgtgacagacaaagtgtggagtcagcgaaacaaaaggttagagaagcacaaaaagtggaagtacttgcctatgaagcatacatccgacgagcatctcctcccactcgtagcgctcacggcagttattgcaaagagccgatgtga

SEQ ID NO: 285741 - DNA, 1368 bp, Morganella morganii
gtggcttacttgatcaaatcagacgacgttcatataggtggtgaaatcatcactgaaacggcccctatagagtttctgaatggccgaaatctagggtcattgcctactatttatgaccaaaactggggatatgttgcaccagtaaatcactggttcattcatcttaaagcgagcaaacgacttgaaaatctaagttcctacgcacgagcgcttttgcattattggaattttctagaatcagaaaatttaatctgggatgtcttcccattagcaaaaggtttaaagcctacatatcgatataggaatgacaaacttctcaagagtgttaaagctggtgagctcgcatactcaactgccaacacgtatatgacacatgtcgtccagttttatttatgggcagcacatgaacgttattacgacatcagcgagaaacacaaacccttcgaaatagaatttgtaagaatacagagaagcgacatgctggctcatatgatgcctaaatttctggtccaaactacagacttgcgcatcagaacgccgagagatgcaaccagtaagaatattcgggggctaaaacccttaactcaaactgcactcactcatttagctctgcatttacgtaacacaccttgcgaatttaggctgatctgtttgctcgcaactcaatgcggcttacgtatccaagaagcgtctgggttgactttggccgcactagaacaatcggttcaacgctcaggttctataactcatttcgagttaacaataggaccaagtaatggtgtacctacaaaatacaataaaactcgaactattgagataacaagtcgccttttatcagacttgaaaacttatgccattagtgagcggcgaatgtgccgacttgacaaacttcttagcaaaattgagttccacaaaggcatccatgacataaaaaaatcccacgatgttcatgtctcaaaggaaaaactcgacgcgctgaccacagcccagcgatacgaacccttatttattagccaacaaggtaatccatacgacccaaacacgataggctctcgctttggagaagttcgccgctcaataattaagtcaggaatacaatttgagcataagtttcatgaccttagatgtagttatgcaacctatcgactacatagcctacttgaagcaggtattgagcctgcgaatgcactgagcttactgatggggtggatgggacataagaatgaatccacaacatggaagtacttgcagtacctcaaaagaaaagaagcgttaaaagagaagatatctgtactagacagcattatgcatcaagcattagaggaagctaatgagcaagacgttgaaattaatagcaccttgggttga

SEQ ID NO: 285742 - DNA, 831 bp, Morganella morganii
atgggcagtactaaaaactattggtctgaccgaattgaagcccaaagaaactaccgattagctaatcttctaggaattacagaagatgaacttgaacagattacttacgatattgatgccgattgcagcagagatggaatgctttacggatatattattcgattcgacagtaataatgatccttccatcatggagaagataagtggtctcacttcgggatcatacgtaagtttatcccaatgggatctagaagacccggaagaagatgagcttgagtgggaagtagatcattcagaccaaatggaaatgtttaataagcaagtatctgaaattcccaagatacttcagatagacattgccggaaatactcaatttagcttgttggtaatgctgcacgctcatgtggtttctgctctagagcattttctatcaactacatttatccaccgtgttacaaactctgataaattaacaagaaaactaattgaaaccgacccagaatttggaaatcgtaagtttacggtaaatgagatatacgctcagcatagcaacattcgatcaaccgttgccgagtacttaaagggtattatctttcatgatatgcgcaaggtaaaaccaatgtatgcggaagtattggcgtatgattttggggatatatcatggctctttagagccgttagaataagacacgattgtgtgcatagggccggttataacaaggaaggcgaggccgtcaccttgtcgatggaaagcataaatgagctagtcagaaattgtcgtggtttagttgaaaaaattgaatctcatgtaacgaatttggaaaatgaatga

SEQ ID NO: 285743 - DNA, 834 bp, Morganella morganii
atgaagctcaaaaaactattgtcactggatttcatgcaaggttttcagtctcttctggagacagaattcgagaatcgactatttgtggccagcttaagaaactatgcgtcgcatggtaatcctctaagatttcacaattttgctttctcgatgagagagctggtattgcatgtaatccaaagaaaagcaccgcctaagcaggtaaaaaatgctatttggtatgagcgcgagagtgataggcatgaggttacaagaaggcagcagattaaatactgcgcgcaatcaaatatatcagatgcttaccttggcgaagccgtacttgagcatttgaatgagtgtatttctgagtttcttggcgaattcaatttcttcaataaatatacacatataacagagaagtattttgatgtttcgccgaagtcgttttttcaagatgcaaaagtagttatagaaatagcaaaggattcactaaatcaattaaatgatcttgagagaattgttatcgaagcgcttgaagaaaaggtaagagaggccgttatttctaccgctgtgagcgctatacccgatagtttgtcgcttcttgcgaatcatgtttatattgaatacaccgaagttgaagaaattgagtgtacgggaattgataatgaatttatctatgtggttgccagtggcaatgtacatgtcacacaagaatatgggccgaaggacgatctttgcgaaataaatgaatgctacccattcacattgagtatgaagtcccatgtagagaaccctgaaaaatttaccgtcgaatctgaagagctggatgtagatacttcttcatggtacgaatag

SEQ ID NO: 285744 - DNA, 1269 bp, Morganella morganii
atgatagagaagctaataaaatacaaaaaacaattaagcaattttttctatctttcctgcttacaatttgtaaatatgatactccctctgattatactaccttttttattacatagattagggctggaaaattatggaaaggttgtattttcattagctattgcatcctattttactatacttatcaatttcggatttaatgtcgcaataacaagagaaataagtatacatagggaaaggaaagaaaggctatctataatagtatctaacacacttttcataaaattaattttaattatcatttcattttttttagtttttatagtcaaccaagttattttgaaaaatagtgatgtcatatattattatgcattattaattagttttggtgaaatgttatttccattatggttcttccagggaatggaaaaaatgaagtacattacatacataaatgtcactataaaaatagcattcacaatagcattattgttttttataaaaaataaagaagattatatttatgttccaatgttacaaggcatttctggcataattgggggcgtgatagcccttatttttgtatttcagcagataggaatacgagtgaccgcgcccagcgcacgatatatattagttttaataaaaaaaggatatgtttttttactggctgatattgctgcagtaataaaagacaaaaccaatattattgttataggtcagttaattggcatggttcctttagcatactatgatatcgcagagaaaatagtatgggcattccgctccttatttgtaaatataacaaatgcattctttcctttctttgctaaaaacaaacccgccgatgatgttaagttaattataaagattacgtttattttaagtataatatgctatctcatactagctatatttagtgggaaaataatattgctgctttccagtgaaacattactccctgcacagtatttactatatataatgggtacttatattatctttgctactctcagtagtaacatcggtcaatctatactcattgtaaattcattgtacaaagagtttttgcagaatttatttttaagcacattattttatttggtgtttcttagtctgctaatcattattaatgtcgacttatatatgttaagtatattatatatatccagcattatctttgagttagtacacagagtatatactgtctcttatacacatctgacgctgccgacgaatagagaggtatattgtttttttgccagatag

SEQ ID NO: 285745 - DNA, 153 bp, Morganella morganii
atgagccacaagccacgtgcagagatgatagaagaaacgcggaccaagcttatccgtgctgcacgccagcagtttggtaaggccgggtacgccgcgacggtgatggatgatctgacggctcacccggggggcgctgtatcatcactttggtga

SEQ ID NO: 285746 - DNA, 807 bp, Morganella morganii
atgttacgcatcaccgcactactggaaaatacgaatactgacccgaaactggattctcaccctggtctcagcctgttgctggacgacggggaaacctcgctgctgtttgatacgggcgcggatgatacctatatccgcaatgcacaggcactggggatttcactggaaaatattgatgcggtggtgttgtctcacggtcattatgaccatttcggcggattaacccgtacggaacggcataatctgccgtcggcgctgaaggtgattgcacacccgcatattttcgagccgcgccgcgccgcattgtggctgggcagttacccgctgaaattcaagcggttatctccgttattttgtgaagaaacactgcgccgtgactatcagttcgtgctgacggaaaaaccgtattctatctcatcccgctttctgttcgccggagaaatcacgcagcgggccgtggtgcgccgttacggggtactgctcagtaacggtgaggcagattatgtgcgtgacgacagttttctgatctggcgcggggaggaggggattgtgattatcaccggatgcagccattcaggcattgagtcagtgatacaacatgcgcgtgccctgacagataatgcaccggtgcaggcggtggtcggcgggctgcatctgcgccgggcaacaccggcagcactgcgccgcgcacaggaggcagtggatccgcaaacccgggtgtacggctgtcactgtaccggtgccagagggcgcaatgccctgaatgcggacgattttaataccgggcagcagctgacattccgctga

SEQ ID NO: 285747 - DNA, 990 bp, Morganella morganii
gtggagggcgaaacgctggaaacccacgcccctcatttctggcgctggcttgaccgcgctgccggaggcaaaccggaaaaacgcgatgtgattctggccgtgctgtttatggttctggcgaaccgttacgactggcagctctttctcgaagtcaccggccccggcgagagcggaaaaagtattctggccgaaattgcgaccatgcttgccggggaagataacgccacgtcggttaccatcgaaacgctggaatcactacgtgagcgcacgacgctgattggcttttcactgatacgccaacctgatcaggaaaaatggagcggtgacggtgcaggacttaaggccatcacaggcggtgatgcggtatcggtcgacccgaaatacaaggatgcgtactccacccatattccggcggtgattctggccgtgaacaataacccgatgcgctttaccgaccgcagcggcggtgtttcccgtcgccgggtgatcctgcatttcccggagcagattgccccggaagagcgcgacccgcagctcaagaacaaaatcgcccgcgagctggccgtgattgtgcgccagctaatgcagaggttcagcgacccgatgaccgcccgcgcactgctccagtcacagcagaactccgacgaggcgctcagtattaaacgtgatgccgatccgatatttgatttttgtggttaccttgaaacactgccggagcctgagggtatgtatattggcaatgcaaacatcattccgcatcagccgtgcctgtatctgtatcatgcctatctggcgtatatggaagcccacgactacaggaataccctgagcctcaccatattcggtaaggggttgtctgctatgctgaaagagtacgggctaagttatgaaaagtgcggaaaaaatcagggcatacaaaacaatctcacgctaagagaggaaagtaacgccgactggctgccgaaatgtgatgaccccataacgaaataa

SEQ ID NO: 285748 - DNA, 846 bp, Morganella morganii
atgttgaagcgaagcgttagagcaaataaagcaaagtctattttttttgaagactacaatgatatcgatgtttatacagaagatactgccgctggctataaaaagttatattcaaagttattaagccgttattttgatggtggttataaaatagaaaacatcttccctttaggcggtcgagatgctgtattagaagcatgttcaaaagataaaaacaaaagatctaggcctcgagtttatataatagatggggatttacatcttttgagaaatgacatcccaaacctccccggactatttactctgaaggaatactgcattgaaaacactttaatttgtgaatgcgccaccattgattttttagtggatgaagaaccgacaaaagaacacgatgatatcaagttagagcttaatttccaaaagtggctcaaatacaacgaaacccttcttatcaaactttttattaactatgcaatatctatggaaatgactcctgaattacccactgttagtttaaagataaatgattatttgaacgatgacactgggtatgtagacgcaataaaagttgaatcacgaatagcttctaggagaagtgaaattatatccagagttgggcaacatagctataatgaacgcttaagcgaaatagagcatctcattgaagggaaagaagataaacatgcttttatttccgggaaagattatttattaccgttacttcaaatgagaatgaggaaagtaataaaatactctgcatcagccatatcacttaggcacagattatcaaaaacctgcagattagaaatattcagtggtcttaaggataagatactaactgactaa

SEQ ID NO: 285749 - DNA, 1329 bp, Morganella morganii
atgaaaatagtatctttatttgcaagcaatgtatatggatatatagacttaaatatatcatttaatgatgatataacctttcttattggaggtaatggttcagggaaaacgactgttttaagactattacaagcggtaattacaccgaatataaaagacattattacaattccttttgaaaaggttagactcatacttgaggaagattcgcaaaaaatagaaatatttgcttccaaaaatgaacgcagtgttgatttaagtatttctggaactaaaaaaatactttcaattcctaatataaacaattcagataaatatatattaaatagcaaagatgacgaagatgaaatatatcaaaaaatagaaagagataacttttcaaatgaagtttacctacgactcaaaaaattagataagccgatatttttaggtttggatagaaaaactgattttcatgaaagtaatgattacatgtcaaacaatgaaatatattatcgccgtaggaccagttcaccaaaacgcagagtacaagggactctaggtgaagcattaataaataccgagatgttaatccaggaaacttatcgtagaataagagacttcgaagagcatcaaggattctatcttcgtgatcagatattaaaatcctcttttaaattcacagaatttaaccttgagtcttttgataattcaaacatgaattggcgcgagcgccaaaacatcataaaaagaaaagaagaaattaaggaagctatacataaaataggcaaagtggatgactctttaattaaggaaatggactctttttttaacaaaataacaatgctttttgaagaacttaaagaatcagatggaaaaggcttcaacattagctggcttgtaaacaaagcacaaattgaccgtgttgcagatatattagacgtaatcgacagctctaatagtagagtaagtaaactctatagtcctattatatcattccaaaacatagtaaatgattttttatctgagtcgaataaacgcatagaaataaatacagttggcagagtagaagtagtgaggcctgacggcactagatgtttaatcgacagcttatcctctggtgaacgccaattaataataatgactgctaacgtattatttaataaaaaaatggggcgttctagtataataataatagatgaacctgaattatctctccatatgagatggcaagaaatgttttcagaaaaaatactaagcattagcccaagaacacagtttataatggcaactcattcgcctgaaattgttggtaacctagaagaaaaaggcataagggtaggccgataa

SEQ ID NO: 285750 - DNA, 1179 bp, Morganella morganii
atgccactaacagacatacaaactaaacgagcgaagccccaagacaagccctacacattgaacgatagacaaggcctgtcattactcatcaacccagacggctcaaagggctggcgcttccgctttgccggtaaagcacggctaatgtcatttggcaactacgaccttgtgagcctcgcagaagcacgtgagaaacgcgatacagcccgtaagcaggtagcaaacggcatagacccagtagaagaatgtaaagcccaaaagctggcacagcaaatctcaacagagaactcattcgaagccatatgtcgagaatggcacaccaacaaagctgaccgctggacagtagcctatcgcgaagaaatcattaagacatttgaacaagatgtgttcccgttcattgataaacgccctatcagtgaaatcaaaccattagaactgcttgaagtattgcgacgaatagagaagcgtggagcactagagaagaccagaaaagtgcgccaaagatgcggcgaggtctatcgctatgcaatcataactggccacgctgaatacaatcctgcgcctgatttagccatcgctctggccgttcctaagcaaaaacatcatccatttctatccgccgaagaattgcctcattttattcgggatctcgaagcgtataccggtagcatcatcaccaaaaatgctacgaagatagtcatgctgactggtgtaagaacgcaggagatgcgctttgctacgtgggaagaagtcgacctcgaaaaaggtatatgggagataccagcagaacgtatgaaaatgcgtaggcctcacattgttcctttatctactcaggtagttgacctttttaaacagcttaaacctattaccggccaatacccttacatctttattggcaggaacaaccgcagcaaaccgatctcgaaagaaagcgtatcgcaagtgattgagttacttggttacaaaggacgtgctacaggtcacggttttaggcatacaatgtcgacaattctgcacgaacaagggtttgatagtgcttggattgagatgcaattagcacatgtggataaaaatagtattcgtgggacttacaatcatgctcaataccttgaaaagagaagagaaatgcttcagcagcatggggattttttaatgaataataaggattttaatttatga

SEQ ID NO: 285751 - DNA, 240 bp, Morganella morganii; identical to SEQ ID NO: 16823

SEQ ID NO: 285752 - DNA, 549 bp, Morganella morganii; identical to SEQ ID NO: 16825

SEQ ID NO: 285753 - DNA, 387 bp, Morganella morganii; identical to SEQ ID NO: 218220

SEQ ID NO: 285754 - DNA, 276 bp, Morganella morganii; identical to SEQ ID NO: 16862

SEQ ID NO: 285755 - DNA, 1110 bp, Morganella morganii; identical to SEQ ID NO: 113667

SEQ ID NO: 285756 - DNA, 399 bp, Morganella morganii; identical to SEQ ID NO: 16863

SEQ ID NO: 285757 - DNA, 837 bp, Morganella morganii; identical to SEQ ID NO: 16864

SEQ ID NO: 285758 - DNA, 2652 bp, Morganella morganii; identical to SEQ ID NO: 16870

SEQ ID NO: 285759 - DNA, 303 bp, Morganella morganii; identical to SEQ ID NO: 16869

SEQ ID NO: 285760 - DNA, 831 bp, Morganella morganii
atgggcggatttccacacggcagcggcgcccggcaaggtgggccgattcccacgcggcagcagcgcccggcaagatgggccgattcccacgtggcagcggcgcctggcaaggtgggccgatttccacacggcagcggcgcccggcaaggtgggccgattcccacgcggcagcagcgcccggcaagatgggccgattcccacgtggcagcggcgcctggcaaggtgggccgatttccacacggcagcggcgcccggcaaggtgggccgattcccacgcggcagcagcgcccggcaagatgggccgattcccacgtggcagcggcgcctggcaaggtgggccgatttccacacggcagcggcgcccggcaaggtgggccgattcccacgcggcagcagcgcccggcaagatgggccgattcccacgtggcagcggcgcctggcaaggtgggccgatttccacacggcagcggcgcccggcaaggtgggccgattcccacgcggcagcagcgcccggcaagatgggccgattcccacgtggcagcggcgcctggcaaggtgggccgatttccacacggcagcggcgcccggcaaggtgggccgattcccacgcggcagcagcgcccggcaagatgggccgattcccacgtggcagcggcgcccggcaagatgggcggatttccacgcggcagcggcgcccggcaagatgggcggatttccacgcggcagcggcgcccggcaagatgggcggatttccacacggcagcagcgcctggcaaggtgggccgattcccacgcggcagcggcgcccggtgggtatttgcattcacttga

SEQ ID NO: 285761 - DNA, 189 bp, Morganella morganii
atgaatgttaaaattaataaagaaattaaaatttcattatcaaaaataaataacttatctttaaataatacaaatagcatgagctttgaaaagataacggttaaaaatactattttctcaggagaatgctttttatacaaagacaatacccatatagcgaatattgtctttgaacttgttgaaaaataa

SEQ ID NO: 285762 - DNA, 306 bp, Morganella morganii
atggatcataataagctggctgaatttactaatcagaatcgtgatactttgcaaaattttttccaaatggctcgtaaatcccgagaagtccattcattagaagatcgtattctcgctctcgaagttatgacctgtgctatcgcggcatcactcgaaggaaccagcagagaaaactttcttgacataatgaactcacattcacatgtaaacacccccggcaaaaatgatgcattcaaagctgttgcagacctcaatgtattaagtgccgacttcgttactacattttccactctgaaaaataagtaa

SEQ ID NO: 285763 - DNA, 351 bp, Morganella morganii
atgtctaacatagaggaaacactgccaggaagtgcgatcagttcttgggggggcttcgtttaccaagggaaagtggctctttatcactgtcttaaactattaacagagaaatcatttcaacagagaataattgatgattttgagttgcaattagatagcactgatgactttgctatttattgtggtggcaaggtgatttcaactcatcaagtgaaagcaaagctatcgcaatatcgttctgaatatgtcaaagctatttataaagccgcatgtataactactgactgtgatgaaaatacaatcagatattttcatgtagctaaaatactgcttactatcaaaaataaatga

SEQ ID NO: 285764 - DNA, 1266 bp, Morganella morganii
atggcgcgtcagacaaagccccttaacaacaccgaagtcaaaaattccaaagcgactgaacgtgccactatcctgtatgacggggacggcttagaactactggttaagcccggtggctcaaaactctggcgattccgctattacaaacctttcactcgcaaacgcgcaatgattagctttggtgcttaccctgctgtatctctctctgaggctcgtcaacttcgtgaagatgcccgtcttctattgagcaaagatattgatccgcaggagcataaaaaaaccgagcagttgcggcaaaaaagtgccacagaaagcacctttgaaaaggttgcaggagactggtttaaaaccaaagaatcagcggggctggcaacccatacgttaaacgatatctggcgttctatgagtaaatatgtgttcccacatattggctctatgcccattgctaacatcacggctcagcagttcatcggagcgttagagccaacacacgctgccggaagactcgaaacggttaaacgtctaagccagcgtatcaatgaagtgatggattacgccctcaattctgggctggtatctgtgaaccccgcagcacgaatcgggcgaacattccataaaccaaaggtaaagcatcgccctgcccttcctccagagcaactcccccttttaatgaaaactctggcatttgccagtatcggacgacaaacacgctgtcttatcgaatggcaattacttacgatgatccgacctgccgaagcgtcaacgactcgctgggatgagatcgactttgacgcgaaagaatggcgtatccctgctggtcgcatgaagatgaagcgtgagcatatagttccgctttctgagcaagctttggctattctggaagtgatgaagcccattagtaagcacagagattatgttttccctggctaccgtaatccgcttgaaccaatgaatagtcagacagcaaacatggcgcttaaacggatgggcttcaaagatcttcttgtcgctcatgggatgagagccattgcctcaacagtgcttaacgagaaaggttttcctcctgatgtgatcgaagctgcgttagcgcatatcgatactaacgaagtcaggagagcctacaatcgcgctcaataccttgaacaacgtagagagatgatgagctggtggggtgagtatgtagaagcagcatcctttggaaactcatcaatcagtgttattggcaagttaacctcaacagaaggatataccgataaaaatctttag

SEQ ID NO: 285765 - DNA, 1323 bp, Morganella morganii
gtgaaacttttaactgatatcgttgcccgtcacaaacggggtgagaaaacagggatttatgctgtctgttccgcccatccgtatgttctgaaagcagcggtatgttttgcccgtgaacaacaaacgccgttactggttgaagcaacttccaatcaggtggatcagttcggcggttataccggcatgacaccggctgacttccgtgattttatgtggaagctggctgatgaacatcactttccccgtgaaaatctgatcctcggcggcgaccacctcgggccgaaccgctggcagaatgaaccggctgaagatgccatgacaaaagccgatgagctgatccgcacttatgttgctgccgggttcaaaaagattcacctcgactgcagtatgtcctgtgccggtgatccggtgccgctgacggatgaaatcgtcgcacagcgcgccgcacgcctggcggtaattgccgaggaaacctgtgagaaacatttcggcgtccgcgacctggtgtatgtgattggtacggaagtgccggtgccgggcggggctcacgaagagctgaatgagctggcggttaccacgccgcaggctgcatccgccactatcgccgcacatcaggacgcatttgcgcggcatcagctcacggatatctggccgcgcattaccgggctggtggtacagccgggggtggaatttgatcataataatgttattgattaccgcccggaaaaagcccgcgccctgagtgagatggtcacacatcatgaccatctggtgtacgaggcgcactccacggattaccagaccccgcatgcactcagtcaattagttgacgatcactttgcgattctgaaagtcggtcccggtctgacctttgccctgcgtgaagcgctgtatgccctcgccgggattgaagatgagctggttgctccggcagtacgttccgggctgcgtcaggtgctggaagatgtcatgctgaaacaaccgagctactggcagagttattacaccggtgatgagcagacccgccgccttgcccgcagctacagctattccgatcgcatccgctattactggccggatgagaccatcagcgcggcagtgacccgtctgctggaaaacctgacagaaacggcgatcccgctgccgctgatcagccagtatctgccgttacagtatccgctggtacgtgccggaacgatttccgccgcaccggaagaattaatcatcgcacacattcagactgtgctgcgtcactatcacgatgcctgtaaaaccatgcctgccgataagagcgagaaacagccatgccaaatattgtgttaa

SEQ ID NO: 285766 - DNA, 171 bp, Morganella morganii
atgctccgtatcaacgtactttttgacagaaaactcaaagacactttacctgccggtatttttaacgcacttcgtggtgagatcgaaaaacgcattcctcaaaaatatcaggtgtctgatatccggatcgcctggggattgatctcttccctttcttcagtaccggtataa

SEQ ID NO: 285767 - DNA, 4125 bp, Morganella morganii
ttggcaacgatagacttcaatcaaattcgatctacacctaagagtaaaaatgacagctttgaatcgctcgcgattcaactttttcaagcacattgtaaatcaccacaaggttcgtcgttctttagtttgcgaggcgatggtggtgacgggggagtagaagcgtattacaaaacccctacaggcgatattctaggaattcaagcaaaatacttttttaagcttggaaatagtgaatttggccagatcaagaaatcattaatcactgcattaaaaaaccatccaacattatctgaatactggatttacataccatttgatctaacaggcaaagccgcagaaggaaaaagaggaaaaagtgaagttgaaaagtttgaagaatggtgcgatgacatcaaaactcaaaaaccgaatcttcatataaaactggttacggctgaagtatctagacagcagatattagaaatagacaaaagtggtggttttgtagcctactggtttaacgaaaacacattaacatctcagaagatacaaaactgtattgactcagcagcagccttcgctggtccaaggtattgcagtgatttagatataattaccgaagcccatgatgctttagattcatttggggagatttatgattttaagcagtggctagttaatatttggaaaccattaaaattcagtttcaggaaaaaagctcaatattcaggaaaggtattttctcagacacctgaaagcgagagagtgcaagcgatacagctactaaaagtacttttagataaaacttctagtaagcacaacattattgaccaaacagttatttgttcaactttagatatcataagatcacttaagccgttctgtgaaaatgctgtaaaacagcaagagaaaaagttttttgcggaacacggtgaaggtagtgatacgccttcatttagacaattccaggctgaatatatgtgtgtattccctgctgagaacctagatgcctcaagagaattacttgcttcgataatagatattgaaatttgtctcaacagccctctgattcagtcctgccatgctcgatctttcctactaaccggtccggcaggtgcaggcaagacacattctatcgtaagttttgcgaagagaaggctcgacaaaggcgctcatactctggtgctatttggggaagattttgataacgcggaaccttgggatgtggtaagaagcaaactaggctttggagccgatgttggtcgagacaaattactatcttgtcttcaagcaagtgctcaagccaataactattgttttgttattgctatcgatgcgttaaacgaaggagcaaaggcaagaaagtggaaaaacaaactgccagaaataatccaacaattaaatgaatatcctcgtgtcaagattgttgtgtctagtcgcgatatatataccaatttagttgttgatgaacgattccctggctatgcatatagtcatattggattcactaggaattttcacgatgtcctctcctcattctctcaacgctacaatgttgaaagtgagataacacctatttttacagatgagctacgaaacccattacttctacatttagtcttcaaaactcacaagtcggaggactcttgttctcttgacgtatcgactagtggcttctcaaccattttttctaaacacctcaagcaaatcgatgactcattgagagagcgattagactatgttagtcctaaaaatatcgttagagcggtaatgagcaaattgtctgattttctagctcattcagaaacccaaactataaattgggaaactgccgtaaatacaattaaacctattctaggtaatgagctacttccagaaaggtttattgatgagctagttaaagagcaactgctaattttatcagcaactaacgatgaagattttcttattaggtttggttatcagaggtttggagatatgctgcgcgcatcttcaatagttcaatcctatcaagaaactggcaatagtgatctatcaatccttgcagaaaagctggcgattttaacagatatggagagtggcgttttagaagctcttgcaagcattctccctgaagagatcggtatcgaaatcactgataaccgcctgggcttagacaacgatttagcacatagcctttttgtaaagtcactaacttggcgttcaaagcaaagtgttacccctgccattaaagaacatatgtttggggcattaagaacgggtggattgtggcagactgtttttgaaagcctattccaactatctatagttccaagtcattatcttaacgcagaaagttggttcaaagattttcaatggagacaagactctccatcaagagatacctacctttctgtcgccttatcagagtcatataataaaaaaggtgcaatttggtttctaattgaagctttggaaaaaatagaagcaaccaattggcccgaagaaagttataaattagcatcctcggctttactttggtgttgttcagctacggatcgacgagtcagagatcaagcaacaagatgccttggcttgctttttaaacaataccctgtgatatgcctgcatgcagtaaacacgtttactggatgtgacgacgactacatacttgaaagcttgattctggctatgtatacgtcctgcttgctttcaccagagtcagttgagaacttcgtacagccattaaatagatatattagagcaaatagcagttcaaataacattttaattcgcgagcattcccagctattgagacaggagcttgtgaaactagggattgaagaaaacagaatatcaaatcaatatgtaactccttcactaccattaacatggcctattctaagcgatgtgcagaccttgcttacactagaaaatttgccctcaaacatgcgcctatggggtgatcaattaggtcctgacttttggcgctatgtagttgaaccaagacttagagcctttgacttacaatcacagaacataactcttgagaatattgcctgctggattatgagagaagccgaatatatcggctatcccggatatggtaatggagccctcaagcatgacttggcaactcttcataaatatggaagaggaagagcaaagccaggctatgcagaaaccatcggaaagaaatgttattgggttgcttttcaccgattgataggtctgttagctgccaatgtagcaccggtccaatctcgttgggagccacaactaacctctgatagattctggtcgttagaacttagaaaagttgatatatcagacataagagatttgtcatcaaagcaaaagtaccctcttagaaacctaataatacaagagcttgagctgccagaaagtaatgtggactattggttgcagactgatgattatttcgttgcaagcaacgtacttgtcttgaatgacgagagcagtacaacttggattaacttgagtttttattcagaggttcacgctaaacgagatgaggacgacgtctcgttcgacgctgaaagcttccttggtatatctagttataacggctattttgttgaccctagcaacactgaagcattcgaactccacaatcatagtaatgaccactgctaccgtgtctacttggcggagtaccctagaagcccagctttcaagcaatgtattgctgaacaagatacgactatttcagatgaccagcgattattctctagcattcaactattgagaggtggggagtggcagtacgattactcaagcaatgttgaacaaagctctattaatatgccttgtcctgatttaattgagaagatgaaccttagctgggatcaagacagtggatggctcgatgaaaaccaagacttggctgcgtttagtcataacattgatagaaattcttctttgtttattaggaaagacaccttagatagttacctatctaagtttggtaaatctttggtattttcgcgttttggtagaaaacagatcagccagggttttgccaacgatgcaaaattaatggaagtcactagtaggtacgtttacataccaagcgattgctctttaaaacgcattagcgaagagatcgagtacttgggctttgagcctcgcgaagcaccggagtaa

SEQ ID NO: 285768 - DNA, 261 bp, Morganella morganii
atgggtagaaaacttgaagacatcattgcagagcagcctcaagaggtcgtttactccgccgaagagatagcctcgaagcagttgattcagcttcgtctgatggagctactaaagcgtatcggtgctgatgcaggtttccaaattgatagctgtacggtcgatggcctacaccagttgaaacaaattgttgaatcaggcggaggaaagctccaccttcatgttgacttaccagacggttcacatcacggctttaagatatga

SEQ ID NO: 285769 - DNA, 441 bp, Morganella morganii
atgaaaaagtcagaaaatacacttctcaatcttgaagccgctttgcaacgaatcatcgaacgaaaaaccaaacgaatacccgatcaccgaaaattatcggttcgagctgtagaggaagaagccggattgggaaatggcagttgttattactatccagatttcaagctcagagttcaatcagaagtacaaaaactaaagtgccttacgcttgataccgccgttcaatccgacgttgagattttgagagaaaagcgcaaccaagaaagaaagataaaaattcagtatcgtgaaaaggttgctgtattgacccaaagattaacttcaatggccgcagaacatcatcaactaagtcatgctctaaggagtgctctttcacatattgaagatcttgaacttcagatagttgagctcaaacagagccagattgtgagaatcaagtga

SEQ ID NO: 285770 - DNA, 2124 bp, Morganella morganii
atgaaaccactattacatttgccaattgaaacgcctagttcactcaatctttacacccaagatgtggaacgattagtcaaagagcgtaactgggacaaattgaaccaagtacctgtatgcatagatcaacatcaaatattaagagcatacttcggccaaaatcgctgggattgtagcccatatgcctcggataaaggcagtgataaaaaccaaagagaatttgatttctcttatttagttgactcgcctaacttgcttcttgaagcaaaacttatagcctatggctggctatatgaacaagggcattgttttggacaaaaatgcaaactatccactttgacatctaggtttaatattggtttaaaaagggcgttagtcagcttaaaaaataacggatccaatagttttagtgaattaaacaactatgatgtctggcaaaaatttgaaatagatttgcaacatgagtcattaagcaaacgcactcttgaactcgctttcacagctattcaatcagttgaaaggctgaattcgtggctaccttttcagttaatattaccgagcatcaactatagacagttggcaaaaaagctggcagatcaagaaaaattagaacataagcaatcacttgctataccacaagcattgataaacgtactgtacgggcaagctgtcagctacgtggaaaatgcatggccgcatagagaaaaactcgcccaactcgaacgtgatttacaatcaaactatgatattggccgtgcagccgtagactataagctagccatcggtagatggaagtggctttatgatgtggaaggcaggcttaatagcaaaaaatacgttgaggaaatcaacaaagcaactcctcgttctcaatctgagatcatcacgcaacatcttaggggaacaggcttactacccaaccataaagttgacggaaattggttatttacatggagagcgaatcttcaagccgcttgttttatatgttgcggcgcattcagcggaatgagggtcagcgaactgtttgaactccatgaggatagttttcgcacttacactatcaacggacaactatttcactctgtatcagcggcaacacataagcttgcagctggtagaaaaaaagaagagtggctcaccagccctatagtagaaaaagccatatcgctcgcaatttcattgagcgcatgtgcccgtgaacaattggtaaaacttgcagcgcatagtaacgatcctggacaagtagataagctaatggaaacatccagtaacttgtggcttagccaagcgcaaaggaaaaacttaccgattctcatatctcgtgctaaatggaatgatcggctgaaaaacttcgcgaaaagtgttggtgcaattgttgatgaaaaagcattatctgaatgtcgtcagcttaatccaagaaatgggggagcaatagaggacaaagttaagttaggagaaccttggccttttctcacccaccaatttcgacgcacttttgcctgttttgccatccgcaatggactgggccaccctatatccattaagcagcaattcaaacatatccatgttcgcatgagcgaatggtatgggaatggcgcaatcgaatcccgcctacaggatataaaggtagacagtgagctaattaacttgctcaacgaagtaaaacttgaacaaacaacggcgcactttgataaatggttcaatagtgatgaaaagctaacgggaagctttggtaaggctattgtcgccatgcgtggcgacaaatctgtgatctatagcaactgggatagcttgtatcgattggttaaagagaaacgattaactttacatggcaccctacatacctattgtaaaaatggctatgaatgtgacatggatggagtaataaatgccgcattctgcgtcgattgtcgtggcggcggtagcgtcgtggatgataaaaaggcgtcatggtggcaaaagaaacatcaagcgttgagtagctatctgaagcagcaatccgatgtcagccatgcagagtatgctcactgtattacacagattcgagctgccgagaaagtgttgaatgattttggactgaaatttgaaaaatataagcacccattacaggttatcgatttatga

SEQ ID NO: 285771 - DNA, 261 bp, Morganella morganii
atgactgaacaggaagctgaactgaatgctatccgggaaatcaccggatttttgctgatagatgataaaaaacggtacttaacacgtctcgggttggtgatgacgttcttctttaaaaacggttataccccagagaaaaaaaacgccattctgcgctgctactgccggtttcgtgagctgtatgcaggaaaatataaggaatggataacttatgacgaattggagaaagatgattcgggatggcggttttctctgggttaa

SEQ ID NO: 285772 - DNA, 915 bp, Morganella morganii
ttggtagaggcacaaacacagcttaaatttgacaaaaagttgtttgacagtttacaaaaggcagagagtatttttgaaaaaataacaaaaataaatgaaaggctttcacaaataaaaatatcttacccgcagacttttacagatataacagaggaaatagaatcaaggaaacaatcattaatatcgttgatacgtcaacaaaagaaaaatgagctgattacacttcctgaaggttgggaatcagtattgaatgaatcattcgctacaccagatgatgttttcaacatagacttagaacagatcaatcgaaaagaaaaatatttcttatacaaaaagagtgaagccaataatcttcgacttaaaactttaaaaaaagagcttaaggatttgttagacctgcataacgcgatatcaaatgctaaacagaaaattatcacattaaaggaacaactaactatactaaacagagattattctaaaaaaactatcgctgatatagagttaacgttccatatttatagcggtagacttatccaaaactaccaacgtggcttaggactatttatagatgaagggaatggagatagactgaggttctgcacagcagaaaaatcagaacatgacgcaaccatgtcaatgagttctggacaactatcggcattaagcttggcttttttcctatcacttaataaagtgtatgctaagtcgcctcttgttctgatagatgatccagctcaatctcttgatgagataaatattgcttctttaagcgacttgctacgctgtgagttaagtaataggcagttgatactctcatcacatgaagataacatttcttcatatctcaggtttagatttatgcgtgcaggcttgtcgcaaaaacctttcaacatgcaatcacatattggtaaataa

SEQ ID NO: 285773 - DNA, 207 bp, Morganella morganii
atgaatcagcataatacccgccttattcgtttaccagaggttctgcatcgcactggatacggtaaagcttggatctatcacctcatcaaccaaaatcgttttccttcccccgttaaaatcggtgcgcgctctgttgctttcattgaaagtgaagtagacgaatggatccaattgactatcgaaaaatcacgaaagcacgttgcctga

SEQ ID NO: 285774 - DNA, 852 bp, Morganella morganii
atgaaaaactggtcagttgagcatacgagagaggtgaagaagtggctggatatagatacatatcgaggattcgaagatctgactctcatacagctttaccatgagctattggcaagaacactattctttaaggtttatcatgaagaattcgaagcagaagcggtcaggctttacattgaacggattttcagcggaaaaccgtttctcattaccgaaaaacatcttggctatcttaccagagaagataccctgtaccagccacctcacttctatctgacaacaactgaaagactggcgcaactcagtattgtcgggctgcgaaattcacttttcttctgggagggtggtgatgagtactcggttaaccgcgaattcctcgatagccctgtttcagaagctctccccaagttgttcagggatactgtcatggtcgaaatcgatcttgcaaacgggacagatgaagagatcgctgaatcactcaaagctgcgctacctcaatggcgtaaagtacggggtatcgaagccgatacatctgattcgatcaggtttggctatggcaccatcaagaaaatcattaattacagactcattcccatgatcgacatcctggtatggtcaaaattacataaagtacgtatatcagaagaccgcctttctcgcctgttgtatacagatgacgatgatgagatcaacactcgcctgaaccaccaaatcagggatacagacaaaccccttgctttgaaggcggcgagtataccttttattcgccagtttcatctgttcatcaacaagaacagccatttgaaaaagatcagagtttcagaggtgatgaaaatctcagattctgactaa

SEQ ID NO: 285775 - DNA, 1650 bp, Morganella morganii
atgacaaaaagcgtaattgagcatgttttaagccgtctggcagatttaggcatcaccgatattttcggtgtcgcgggagattttgcgttccccattgaagatgcggtctgcgacggtaacacacaacgctggattggtaactgtaacgaactgaacgccgcctatgccgcagatggctacgcgcgtatcaagggcgccgcggcgctttccaccacgttcggcgtgggtgaattaagcgcgatcaacggtattgccggttcgtatgcggaaaacctgccggtttttcatctggtcggcatgcctgccagtggtgtacaaaagagtggccgcctggtgcatcacaccctgggcgatggcaatttcagcctgttctgtgaactggggcagcgcctttcctgtgcccacgccataatgaccccggagaactgtgtggcggagacggaacgcctgattgctgccgcgctgcgcgagcgccgtccggtctatatgggtttcccgtttgattacgccacacagccggttcagataccggaacaccttaccgcaccggcacaaccggtcagtgacaaaaccgcgctcactgaagcggttgccgcgatcagggcaaaactggcggacagcccgtccgcctgtatcctgccgggcatgctggccgcacgttccggactgattgatgacgtacaggcgcttatccgtcagaccgggctgccatacgccaccatgtttatggataaagccatcatcagtgaatccgacccgcattacgccgggatgtataacggtcatctgatgaatccgcaggtcagggaatttgttgaaaacagtgactgtgtgctgggtatcggagcggtgatgacagactttaacaccggcagttttactgctgatatcgcaccggaaaagctgatcagcattatggcggatcatgtccgggtcggcgcaaaaatctggcagaatgtgtatatgcgggatctgctgcctgccctggccgccggacttccgcaccgggaatgtcatattccggcagcaaccgggctgggtaaaccggtggctgacgcttccggtaatattaccccgtcgtatctgtatccccgttttgagcaattgttcagaaaaaacgacattatcatcgctgaaaccggtacggtttcaatggggcttggctttgcactgctgccggaaggagcgcaattccataaccagacgttatggggatcaatcggctgggcaacacctgcggccgttggagccgccatcgcggcgcctgatcacagattgattctgatcaccggggaaggctcacaccagctgactgcccaggaaatcagccagtttggccgttttggtctgaaaccacttattttcgtgctgaataatgacggctatctcattgagcgcctgctgtgcaaagacccggaagccgtttataacgacctgccgcaatggcgttacgcacaactgccgcaggcgctgggatgcgataactggtattgccgccgcgtcaccacctgcacggagctggatgaggcaatccgggaagcggaaaccggtgaccgcgccgcctatattgaaatcattacggagcgctatgccgcatccgatctggcaaaaaaactcggtgaatcagtagcaacactgtactcgttttaa

SEQ ID NO: 285776 - DNA, 288 bp, Morganella morganii
atgatgaaaaataaagataactatgtaaatacctgtgtgggtcgtaagatcagggcaacaagagaatctgtcggaatgacagaaagccagctggctcaactcacaggactcagccaacaacagatatcgcgctatgagtccgggaaaacatcaatgaccatagatacggttgtgatgattgctcatgcgcttgatatttccttaagtaaactcttatctgattatcttcctgcctcagaagaagataactcagtaattctggtaatccctcacgataaaaacagatag

SEQ ID NO: 285777 - DNA, 1650 bp, Morganella morganii
atggtgcagataaataaaaatattattgcctctcccgtatcggctctgaatcgtttttttgccaagtctggtattatcgctaaaccaggatttaaccgttggttagtccctccggcggcgctggccgtgcatttatgtatcggtatggcctacggtttttccgttttctggttgccgatgtcccaactggtaggagggaacgctcctctgcaatgttctgctgatatgtcgttatggcaccaattgtttactcagaagtgtgactggaaaatttctctgctgggctggacttacacgctatttttcgtttttcttggctgttcggctgcactgtggggaagctggcttgaaaaagtcggacctcgtttggtaggttttgtcgccaccttatgctggtctggtggattactactatctagtatagctatttactttcatcagctgtggcttttatggttaggtgcgggaatgatcggcgggatcggtctcggactgggctatatatctccggtttctatcctgttacgctggttccctgataaacgcggtatggccgcagggatggccattatgggatttggtggcggggcattggtaggagcgccgttagccaactggttgatgaattttttttccagtggagaaagtaatggtgtctggcagagcctattaacgctggcaataatttatgcgttgtttatgttgtgtggcacctttggttaccgtatccctccgatgggctggcaccctacggaaaagaaaacagaaaaggtatatcaaaacaattccaccatacaggtacatgtcagtgtggcatggaaaacacctcagttttggctgttgtggatgatgttgtggttaaacgttaccgcaggtatcggcattttggggatggcatcacctatgctgcaggaaatcttctctggcaagctgttatctacagaattaagttggcaggaactaaatggagaacaactgaagcgcattgctaccatggcggcaggatttactggtttactaagtctgtttaatattcttggacgttttttctgggcttctgtgtcagatatatatggcagaaaggtgacctttgcactgatcttttccttggggatcttgttatacggctcgttgccactgattaaccacagcggttatattgccttattcgtatgtgcactgtgtatcattatttcgatgtatgggggtggtttcgctgctatacctgcttatcttgccgatgtctttgggtcacaaatggtaggagccatccatggtcgactattgacagcatggtcggcagcaggcatcaccggaccggtactggtgaattatcttcgcgaataccagttagcacagggcgtttctcctgaaaggatttacgatataaccttattagtgctgacaggccttctgcttgctggatttatttgtaatcaattgatccgaaaggtacctgaaaaatatgccatgactgccgagcaacaacagcacgcaaaaggtctgtataccattaataatgatgcccaattgacatggatacccaaaccaactcctgtgttactgataatatgctggatagctgtcggtgtaccgctactgtggggaataggcactacgctgcaacaggcagcaaaattttttatttaa

SEQ ID NO: 285778 - DNA, 1692 bp, Morganella morganii
atgatttacacagacggcaccatagccattaaagccggttcaccgattgtgaccggcaccggtacacagtggaaaaagaacattcacggtgtggcccccggccagctgatcagtattgagaacggtacgatacctgtcagcatgatgatccgcgcggtaaacagtgatactgagctggtgttgtcattcaatgccccggtaacgctcagcggcgcgaaatactctatcgccaccacggtaccggataccatttcagatgcagcccgtaccatgtcagcaaaccagggctatatcgtttactttctccaggcaatgcagcagtggatgacggacaccggccaggtggaaattgagctgccgaacggccagaaggtgacgttggatagtattaaagccatgaatgacgctattcagggggcatcaacaacacggaaggggatcgttaagctcgttaaaggactcggggactcagctgaattagtcatgccacagtcagagataaaaaaagctttttcaggatttggtattggagaggcgatccccctccatggatttcaggaacagaatctgaacgattataaaatgccgggaatttactgtcaggcatataacgctaactgcaaaccggagaataattatccggatagctatgctggcgttcttgaagtattacagacgataggatctccggggaatgcttgtttgcagcgatactccacatatacaaagctgagttcatatgtgcgttcatttgcaaatggagcctggtcttcgtgggtgccgatatcaaacggtatgatactgaccgaagatggtaataccacgtccatgaagtcaccaaatacaagaaggttgattctggtcacaaaagatacgggagaggcaggtatttgggatgcggcaaataccaggtgggtattccatcataatcaggcatctgcaactatgtacgggtcatgtaaattcatttctccgggggattactccagtatcaatctgacaaagagtgatggtcgttacgtttctatcgaaacaacgccacatgcaggcagtgtcaagatgataaattttatctacaggcaagcgtccggagagaatcagtatatcgtgaatattccttataccagtggtacagccgctataatcggggggaatacatatttcgacgggagtggctatctgaaaaaatcatccccgattatccaaatccacccggacggcaattacgaaaccaatgacgaatccgaaggtgcagaagtccgccgtaccggcaccggccagtatcacattaccggtatccttggttacaactcagatggtgcatggggtgtaaacggcggtatctcggtaccgaaagacaataacggccttgagctggtttatgtcgatgacagggtgcagagtgacggcagtctgattattgaaacctgtcaccgtcagcacgcgcatttaccggaacgtttccagaactggcggctgaaagacatcaccccggaaggcgagcgtattttctatcaggacggcgaaccgtgtgatcttccggaatccacccgcctcgatgtacgtgttgaaatgccgcagggctctgtgtggaatgtgaaacagcgtgaactggctgaacagatggagcgcgagcaggtagagcgtgaagcacggggaacagtggagctggtcggagacacagaggaataa

SEQ ID NO: 285779 - DNA, 603 bp, Morganella morganii
atgtctaagtcaccgtggaataaaaatcgtatcattgggcaaaaacgaccgcttaaaatatctcatatctgggggatccgtattagactagagttagaaggtaaaattcgcgacttagctttgtttaatttagccttggatagtaaacttcgaggctgtgatctcgttaagttgaaggtttcagatgttgcatatggcagttcagtctccagcagagcaacagtgttacaacaaaagactggtagtcctgtccaatttgagctgactaaagggactagagattcagttgctacatggataagaatggctcacttgcatagtgcggactatattttccaatcccgagtaggttctgctcaacatatttctaccagacaatacaaccgtatttttcatggttggattgaaaagctcggccttgataattcgttatacagcacgcattcaatgcgcagaaccaagccgtatctgatctaccagaaaacaaagaaccttcgtgtaattcagctattacttggacataaaaaactggaaagcacggttcgttaccttggcattgaagtcgatgatgcattggagatttctgagtcaattgaagtataa

SEQ ID NO: 285780 - DNA, 606 bp, Morganella morganii
atgaataacgacacatattcttgcttcgctgagttaaaagaaaatgaagctgaggggtgctttaacattagcagtgaaataacaaaccgcagcaacgaatatgcaattgtggctccacatggcggaaagctcgaaacaggaacaacagagatctcgctagctatctctcgtgaagatctatctttttatatatttaacgcaaataaacgcaataataatagaacccttcacataacaagcgctaatttcgatgaaccacaatgcgagaaaattctaagcaacgtagcaacggttttggctatacacggagcaagagatcccgaaaccgagccgaaagaaagagtctgggttggtggaagccttcgtgaaacatttgaaattcatttgaaggaaacattgagaccattagggcttttaattgaaatcaactctaatttcttgggtaaagaaccgaacaatatctgcaatcgagggattagccaacaagggatgcagcttgaactaacaaagtcactccgtgacaggttaaaaatggataaagaatttctagaacaattcagtgacgctgttcgtgctgctatgatgcttacatatccatcaccttag

SEQ ID NO: 285781 - DNA, 1542 bp, Morganella morganii
atgggtgccaatggtttactagcagtcttcgccatacttattgcttggtacactctcttaacaaatgagaggcgaattgatttaaaattacgcctatctaaacttaatattgtatttattattttttttatatcgacaattttggtgattatatattccaaggttttgctaagcatatttccgttaaaaccgatcccatgggtgctaggttttaacgaggatacactgtcttttacttgcctttgcattataattgcattttttggatttaaaatcctaggtaaaagaataccaaaagcaaaccttactaattggattcgcgtttcagaaaagtatatgcgcgaaaaaaaaacggaacaacttggatatctttttgataaataccatgagcagttgttcgatataattagtaataaaaaatggtatgttcgcgtgcatgattttttaaacccttcattatcttccatgataatagataaggaaaaagcaaaaaaaatacgattcaaaaaaagcagaagacttatttcaaagcttttcccttgtgaagacaaaaatcaggaagccattcaattaaatatttctaaacttttgaaatcaaaacccttcgcccactatttaattgatacttaccctcacatagcaatgaaggctacctgtttatggtttagggataaggatgaatattacacgaatttctttacttatttaatatccaacccgaacagcattatgtatagggagttgcgcgataatcaaagtcgcttacatactggggagtatgcactcgacgagagtaacgcctttcttaatttttatttaaatgatattcgtacggcgattaatttaggaatatggaaacctgtaggtgattatgtagttagctatataaagaagcaaaaaggaaactctaacttttacaatcaagcggataattatttttcaagtagtaatgagcgctgggaatgcccaatcttcgttggattggtatttttcgatgtcatgatatcaacagccatattcaaacgttcaaaagatcatatgtggctcatgtattatcgttattttcttgagggaattattgagagctatgaaatatcagaaagtatagatgtaaatagagaattccccacgcgatttgattatctaatatatgaattaatctataattgcaatatatgggcaggtgcaactgaatacctttgctataacgactggacaatggaggaaataaagcaatctccagagtatcatgcgtctattaccttgggggcaatgatgcgtttgattattacttcagacaaatttcaaaagaatcaaaaaacatatcttttggaaattataattaaaagaatgaactccctcgatcaaaataaaaagtctttttactcagaggcaattttcatcaaccttacccggtcgtgttcttggtcaagggttgacacaaacgcagtaagtgaattgcgacaactatataaaagtgttgatcatgttctaaaaattaaaaattcaacttttgaagttgaactttcaaaaataccttag

SEQ ID NO: 285782 - DNA, 489 bp, Morganella morganii
atgaaaatcgtagaaatagatgaatgggatgagtttgagaaaagattgccattggaattaaatgaaattgaatttgatggtttggtactagccagaaattttgctcttgaaacttatgacgttaacaatgaaaatagcgatccagtagatagattcagtcttgctaaaaacaccggtactgaccgtgataacgatagcattttttggaatgaaccagggcatgactatgagcatgataaatatttctctggaaaatccccagcagacattatatatgcctatgtcgttaaaattgattctgatggttatagtgtttactatcggcaggatattcctgagaaaatggatcttatagatggtctaaatgaatgtgatggaatattgatatatgatcaaagcaaactagagcgtgtgtcaaaaaatgaatattggttttcttcatcccctttagatgcattgctgatgatttttaagttaaacgattgctaa

SEQ ID NO: 285783 - DNA, 336 bp, Morganella morganii
atgaatatttttgtcagctacacgactagagataataatattgataaaaaactattagagtgtgtagcagaggttgtttcactttatggtaattgctacatcgatcttttacataacagtggaaaagataaacagcggcatgtcgaattcatgttatcacaatctaatttactaattttaattgcatcaagctcaatatttacttctaaatgggtccaatgggaacttgatgaggcaaaaagatgctccattccaattgttgtagttgaagccaagtcagacataagtaataccttaaacaatttgaaatcactattagcaactaatgtttattaa

SEQ ID NO: 285784 - DNA, 441 bp, Morganella morganii
atggaagaatataaaaaaagctgtgaggatgagcttgattgggttgttgtgaatcaactccatgaagcgacacttcaaatgagtaagagttgttttgagttcaaaaagatatgcgtagggcttatcggtgcaactttggctatattagcaaaacttaccgatggtaaacttgatcattcttatttttatataacttttattctatgttttggtttctggatcgcagatttttccgcatattatttccagagaaaaacgagagtggccatgaataataaactgattgcattggccaatagaaattctattaatgactatcctactgaaaatttagaggtaacttggtttaaagcagcgtttaaccattcaatggccctatactatacttttgctattatagaaattattggttggcttgtttatgtacacataggtaagtag

SEQ ID NO: 285785 - DNA, 267 bp, Morganella morganii
atgaaaaagacacgttataccgaagaacagatcgcatttgccctgaaacaggctgaaaccggtacccgggtagaggaagtgtgcagaaagatgggtatttctgaagccactttttacaattggaagaaaaaattcggtggtatgggcgtgacggaacttcgccgcctgaaacagctcgaggaagaaaaccagcgtctgaagcgcttggtggcagatctgagtctggacaaagagatgctgcaggaggtcatcaaaaaaaagttctga

SEQ ID NO: 285786 - DNA, 1179 bp, Morganella morganii
atgactgaacaggaagctgaactgaatgctatccgggaaattaccggatttttgctgattgatgataaaaaacggtatttaacccgcctcgggctggtgatgacgttcttctttaaaaacggttataccccggagaaaaaagccgctattctgcgctgttaccgccggttctgtgagctgtacgccggaaaactgcgctttcatacccataaccaaaaggggatgaaaaaatactctgaggaaaatattgaaaaactggagcagtatattaaggcatccgggcctaatgacgttgtggaatggcttatcagtgatgcgaaaaatggtgatgaagctcctgaatatgtgatgcgatgtctgaattcttatgaggtagatggtgcctggggaacttcgtatttatctttatatctgccgtgggatattttgttcacagaagagggtaagcaggagtttcaggagtgggtgcagtttttatgtaaagaactggaaccggatcacggtgactgcggttatacgctggtgatgccgcgtgattattatttgtttatgcctcaggaatatgaactggcacaacgttatccggcaatggtcgtcaattcatcagtctatatagcagcctgtcaatatgaaaattctatccgtagtgtgcaatggctgacattcctggctgaccgttatattgagcgcctcggtggtgagccccatgtccgcaaaatattatctgctgacccggagattaccctgactcgttactccggcgggctgattatccgggccggtgactatccggatctcacaccgggcacaccgccggaaagttattaccggattaatgaacttatccggccaatccgttatgtgaggcaggaaggacactctctgcattttctcggagaggggcattttacaggcgaaacaaccaggcagtggtatgagcgttatgaccgcggtccgatggtcgtttctccgttgtatgcgggtgaaccggcccgggttgacggttactggacaaccaaaggccgcgagaatgtggagaccatttttcttcagggcacaccagcgattgatattgagggcaatccgcccggccggacagaatggcggctgatccgcgaaattccgcatgacaatgaacgggatctgaccctgctggagcaaaaactcaatggccggtaa

SEQ ID NO: 285787 - DNA, 1767 bp, Morganella morganii
atgtattatagtgactttggttatttggctggtctgaaaattgagtatccggggactgcaaaagagtctgctgctatttacggaaacggccttaatatggttgaggttctcgtcaaggtaaagataatgaattacagggatccctcagctccggtagaaatgacaaaagatgagatggaaaaaagtatttttttgtgtgattaccaaacgggggaaagaatacctttctattctgagcctgaaataaaatctgactggcgtgtcagcttcaataaaaatgactatttaggtgctctggaatattcttcgtccaggacaggcgctgaccatgatttattttcgggggatgattataactatctcacattatatgtgtactgtacaaaagggaatcttaacaagaaaatagctgcaggtatcgttgttccggatgtcggtgtgttcaatactacgtccggaggcacaaatacaactaacggttcaggcggagcgcctttcagggcgcctgatgatatcgaaatcagagctatcgaaccacacaggtatacgcttgacgacttctctatgaacacggattcatccgatatacccggcacatcgaatcagggagccagtttgtataatcttaccgggacaaactattatctggatattaagaaaccgtttcataaaatttcctcggtgaaagccagcaaacagtccggttctatattcggaagcgactatagctggtattggatttggcaggcgtttgactgtgctgcggattatggaaagagccatttgtcaaggacattcaccgtcacctttagtaaatatgagttcccctgtaaacacacgataaataagcaacccggcgtctgttttcccctgataagcggtcactgttctgtcatgacgtcctgggcttatttcggggaaacctacgttgatattgtcgataatttcggcaaccggacttcccccgtgattaggttcagtaacaaagaaattaaacacagtggttttcgtaacaactcacgggatatctctgaatccacagtacgacatgtcagcaactatggtgtccctgaggatattattcagcgtattaccgacaatgcccctgatatgatttgtggtgtactgttgcaggatgacaataattcaggattcaaaccctgtgttaatgcttctccggcacctgaacagggggcaataattgatgctgatttcctgcggacactcaggcattcacatgaaatcacccatgtcatttgcagcgtgcctgatgcccggagccacgatatttctgattatcaggcaatgagtgaccgtgatggtctgccatacctgcttgttttatggcccggcctgcaaagcctgactatttttccgcagactgaactggactatgaaaaccgcccctacatctatggccaatacgactgctactctctgatcaggggttatctcctcagggagaacggcattgcactcaatgactatccgcgtgaggtctattccctcagttcagggaagaatatctttgaagtacaggctccggaggaaggcttcgtcagaattgaggatacttctcttcaggccggtgacattctggtctttaatctgccgtcaaccagactgcagcacccggcagtctatattggtaatggtcagatgctgcatcatttgccgccgggactaagttgccgggaagcttacagcgaaaaatgggaaaaacgcaccagctcagtctggagacataataatttaattattaagtaa

SEQ ID NO: 285788 - DNA, 1665 bp, Morganella morganii
atgaatgagagttttacgtcacagacatccaactttatcagtgcgatgagtaccgatgttgacccgcgcaccggtcagtttatggttaatttgcccgtggtatcgttagtcggcaatcatcagctgggccctgaactccccctgcctctgagttattcatcactgaacaacattaacagtggctttggcaccggttttgccctgagtctgacacagtttaataacagaactcatttactggaactgagtaacggtgaaaaataccgggtcatccccggtaccgacaaggtacgcgaccagaagctcaacagtttccgttttgtgtttaccaatggccggggagacggggaaggatacaccattttctggaaagacggtaaaaccgaacgactgacaaaagccagagataacgacacatttctcaccacgacggtcatatcacccgccggacgacagctgtatctgacctgggactggaacggacaggtgtcccggttgtctgaagtcagggatgagtcagtcatattgtgccgggtaaattaccagactgaatcgtcagtgatgacactgtggccggataccggagatgaaaaccgcatacagtttcaactgatggatgataagtatctgacccgtatttttcacaaaatacaggacggtaatattctgaattgtcatttcagttatgatgctatatccggaatgagtaatctgttgctgaccggcgtgaaatatccggccggcatgacagacgacgtggtttacaacagccgggaggggctcaggtatcccgcctcatccggtgtcactgcccgtttacctgtagtgttcacgcatacccggaatccgggggccggacagccggaaacaatccggcatttctcgtacaccacgcaaaacttcctcggtttcaacggcaattttggtgactggtctgccgacagtgattatatctataccacattaacggattatacctacggttcagaggaaagtatcaccagtgatggtgtcaccctcaccacgaagcgggaatacaataattatcacctgcaaatctcggaggaaacccggaaaggcagctgtactgtccgggaggatatcacctattatgccaggcctgatgtctttattgacgggcaaccggctcagtttcaaatgcccggaaagaaaacggttaccctgactgataccgctctgcctgccgcagagcagacccgtacggaaatgacagaaacaacatttgatgaatacggcaatccgctcagtatgaaagcctctgacggcacactgaccacctttgaattttatccggcggaaggcggggactactgtccggctgaaccgaacgggtttgtccggttcctgaaatccgtgacggtaacaccgcgggacagtgattatgatgacacaccggaaaaaaccacagcatacacctaccgcctgttaggcagcagtccgggctgtgtggtacaggatactgaatccgtcttcagcggtgatacgctgttatctgtacgtaccacggaatatgaggaagacgccgaaaatacagaatatggccgcgtcacatcattcaccgatacccggtacaacccggatgcagggggcagccgtttaccggcagacaggattttgatactgatgtcagcgacagcggcctga

SEQ ID NO: 285789 - DNA, 3336 bp, Morganella morganii
atgacacaaacggttatttttaccggttatgacgggttacagtcatccgtcacacagagccggtctgtgtataacggacttttgcattctgaggtttcactacaggggatcgaaacccgttacacctatgatacaacggggcggatactgacgcggacagagaatgccggttccgccgggtatgaaaacaccacggtatggacgtatgaaatcacagctgagggtccggtcacgaccctgcggaacagtaccggtaaccaggaaaaacattatttcgacggtgccggtcgtcaggtacgcagtcaggtgttggatattgaccatacacacgaatggtttgatgttacctcagtacagtatgatgctttcggtcaggaacagagcagcacgcgacaggaccggattacagccgggacggatgccggcaggcgctttaagatcagcggttccatggattatgacaactgggggaatctgtctgaaacggccttttcagacagtttccgcgaactgacacagtcagatcctgtccggcagattttccgcacacattcacagggcggggaaggaacggctttggtaaaaagcggcactgtcagcacccggctggataacatcaccgggttgccggtgcaggaaacgatgacggatgtctccggggctgagcaggggcagcacagttatgtctatgacggactgaaccgtctgcgggaagagaaagacacagacggtaatatcaccgcctattgttatgacctgtttgaccgggaaatttccaggacactggctgacggcacggtggttacccgtgaatatgcccctgcttcagataacgggcaggtcagcgcggttaaggtatgcggtccggggactgacggaaaaacgctgaccatggggcagcgtgaatatgacagtctgggccggttaacccgtgaaacgagcggcggccggatgaccgggtaccgttatgacggtgcttctccggtgccggctgaaatcacgtttccgtcggggaagtcactgaaatatgattatattccggagctgggtaatgttccccgtcatgtgagcggtgaggaaataaatcagacgtatgactacgataacctgaccggcgcgctgttaagtgcccgcgaggcagataccggatacggctgtgtctggtcaccgtcaggcaaactgattcaggaacggtttacccggcggaactgtgagcggcaggctggctataccagtacaccgggcggcgctcagctcagctatacggatattaccggggcgcagacatgttatacccgtgatgaatacggacgggttaccggaatacaggacagtgaacttgacgttgcgctgaactacgatgccctgaagcgcctgtccgttcagactgtgacagacagagccggcggtgcccggctgaccacggtatttgaatatgacgatttcagccgtgaaatcagccggacactcacagacagtaaaggcgttacgctgaccacagaaatgcaccggctgaaaaacggactgctgagccggcatgtcacccggcagagcagcacggtgctgaaagatgaatactatgaatatgaccgccgtcaccgtctggtcagttaccgggtgagcggcagcaccccgccgccggatgcttacggtaacgtgctgtcaggccagcagtatcagtatgatgcgataaataatctgatcacggttatcaccacgctggcggacggcagtaaagataccgccgtgtatcactaccggaataccgcagatcccgctcagctgtcagaagtgacacatactcatgcagcctatccgccgcggattaaaccggaatatgatgccaacggcaggatgatacaggatgaggcaggcagaaccctggtttacgatgtggcggggcggctgaagggggtcagcggagaaaatattaacggcggccgttatcagtatgatgccctcaaccggttggtgagccagcatgtcagcgacggggatgtacgggagctgtattaccgcgggaacaccctggtcaacgaggttctggcggcaggccggcaggagacgcggctgattaaacggggcggtcactgtctcggtatgagtcaggggggggatctgacgctgacggggacggaccacaacagcagcctgatatggtcggagaataaaaatgacggggcaacactacataactggtcaccgtatggcagcggaaatccggttgatttactgccggggtttaacggtgagcggtgtgacccggtgagcggcagttaccatccggggaacggctaccgggcctataatccggtgctgatgcgctttaactgtccggacagcctgagtccgtttggtgagggggggattaacccgtatgcgtattgtgccggagacccggttaattttaccgacccgtcaggccatatgagaaccggagccggcatggcaatcgttgcgggagttgccggtattcttgctgcgtttaccgccggattgtccctgtacgtagcgtcagtgcccgtcattatgggggtaatatcaggtagtatgtcagcgggaacggcggctgtgtcggcatggggctctgttattgcagcggtcggctcgatgtcagtaacatccctggtgctggggggaggcgccgtcatttctgatgtgacggcaatcgccagctatgccacagaaaaaatctatccgaaggcatcgtttgctttggaaatgacatcgctgatttttggtacagtcgcgataacaggattcatcgggaaaggtattgccgttaaaattgcgggaagcatgaaaacatcaatactcaaatacagcaatcgttgggctgatattgttgagtttgatacatttgtactcattaaaggtgggagtaaccccgaaaatagggtggttacaactgcagatggcgttcaggcactttttaatcgtagaatatcggtaccgccgggccagaaaataagattttacggaaatgatggttacgcacttaataaccccggtatatccagagtaacaggtaataaagttactcaccgtgagtcttttcggaatccgtcaaaaataagggattactatttgtctttttataaagaggaggatttgctgagtttaagttatacagccgacagagataatgttgatataattatgataaaaaaactaaccagtttaggacatatatcaaacacgttgagacaagacggaagaaattataacatcgtcgatggcgtattttgcagatcgactattagagatactcttctggattccgtgggaagagaaatgccatctcaggacgcgttggaggctccctttagaaaatga

SEQ ID NO: 285790 - DNA, 396 bp, Morganella morganii
atgcattatgtagttatatcccatttatcattatgtctgcttgtcggatgtgccgaggcaggaagtaaaacgcgttccgaattaaccatagccaccactgatacacacgataatcttatgaataatgcggccgtaaagccgtcttacatgctttccggtcgctctaaatttgaacaggacgcagaggaaagccaaaataaactgaatgaaatttttaaagccggactaaaagaaagcaaaaataccggtattgatagtgatttttcttataaacctgatgcgtttacttctgatgtctatggtcagtatacgtccccggaagttgtctggaatagtgaaaagcaaacttatgaagtaaaaccatcagcacgcatgactttcacaatagcaccctga

SEQ ID NO: 285791 - DNA, 219 bp, Morganella morganii
atgaaatcagtcaaaaataaatgcgcagcagcgcttattaaccattatttccctgatttatctgcagacttgtccgattatgatatcgcggagaataatcattttttcagtgtaagagtctggattaaaaacgaaatttatcctgattatattatttttgaaaagtgtactttgtcaggagagctgtatctgatcaaatcgctgtcagactgctgttaa

SEQ ID NO: 285792 - DNA, 207 bp, Morganella morganii
atgcacaagaccggaacattattaattatcgtaccttttcttttggctgcaggatgctcatcaaaaatcaaacaccaaaccgatcaggatgcatgcgtaataaaaatggatactccggaagggaaccagccgggcaaaatagaccaggttgacggaaacagccctgagtgtaaagctatcgaaaaatcaataaataaagccatttaa

SEQ ID NO: 285793 - DNA, 489 bp, Morganella morganii
atgccttatctgtattctgctattttggggcatctttgtaatttttcacctctgtcacaaagtgacaaaacagtatcagtattgattcttattatcatatatgaccatgttaaagtcctgccaatggcacaccaatctacgggagaccatacagtgactaaacaatattatattcaaaatatgtgctggggatgggttattagtttttggcttttatatctgtcatggggtgatgactttaaatataaaacagcccttttagttattatattttttggtttcatattctatccgtttactaaatggcgtgttgaatgttttttcttaacattcactacaaggaaattttggaatagtggtttttttatagatactccggggaaaatggggctacttgcaatatacagttgcagtacttttttactatccattccaattataattatttttattctgacacatattataaaaaggctgctgataaaataa

SEQ ID NO: 285794 - DNA, 2079 bp, Morganella morganii
atgagaaataaattagcaggatggctgttattattaccgctgcttctcaccacctggggtgccattcagtattggcgggtcagtgatgcatatcagtcttaccaatttgtcatggcagagaaagaggatcttcagcgtctgattgccaaaaatccggatacacagattatctatgatgacggggaaacggtatctgccggtcagcagctgggaatgatcaaccgtgaactgaataaatacagcagtgaaattacgatgattctggccagggtaggtatcagtcaggggactgtcgccaccggtattttatcattgctgttcggtgccggggcgatttacctctgtatcagcagcggtcgtgctgcccggcgctcccgcgacacactgctgaaggtctttgcccgctgccgcaaaatgctgccgtttatcctgaccgggcagatgacgctggtcggcctgagcatcatttgtgtgatggcctatgaagcattgtggttcgccggtaatttcgccatgagcggcggcgatgcaaaaatcatggtttttatcctgatcagtattgtgctgattatctggtacatcatcaaagggctgtttaagctgcgtaagagttttacaatgttccgcagcgaaccgtctgatgtggcagggcatgctgtcagccgtgaggaagcgccggggttgtggcagtgggtggatgagattgccgcgaaagtcggcacaacgccgccggaccatattattgccggtctgatggaatgcttttatgtgacatctcaccgcataatgctgaatgaaaatcagctgattgaagggaaaaccctgtacttcccgctgctctattccgcactgctcaaccgtgaggaagccagtgcggttatcgggcatgaactggggcacttcaccggcgaagataccacctacagcctgaactttgcgccgatctatgccggtatgagccacagtatttcgatggtggcgaatgaggtggaagattactacagtaaagtgatcatgagcccgtcggtgtatctcgggatctttttccttgagcagtttgatttcgcggtcagtcactggagccgtatccgtgaactggaagcggacaacgccggggcatcggtcagttcaccggcggcggtggcatcatccctgttacgaatctccgccgtcagtgaggtgatttcggaaaccctgggtgagctgtatgaaggcacgctgaaaacggatgatttattaccggtggtgatggcgcgcctgcgcgagcgtggtgtaccggaagccggtcagtttctgaatgaggcaaccagccacccgagcgacagtcacccgcagacccgggcccgtattgaagcgttgtctcaggatatcagtgatgagttgctggcagctgcttcccgtgaggtacagtcggatgattacgccaatattgcggatctgtttacggatgccaaagcactctcgatgatgctgacagcgtcactctccggcattgttaccgagtgcatcacacagcggacagaagcactggaaaccctgctgcatgaatctgtggtggcagatgaggtggttatcagtgagggccggagaacattccgtgtgatgttcaccctgggcctggtggttgtggccgggatggggattgccgccgtgaaacttggtgcggaaaacctgataagctccggtgcggtccacggcctgtggctgctgttgttgttctggggggcggcgtttatgtaccgtgacagaggaaaagcaccgctgtttgcttttcgtcacggacagctggtcagtgataagctgatacaggcgtatccgctgcactacattgttgattatgacatcacggatgtctacggtgtggcgacgctcacactgtatgtggctgacggggcgcctgcaccggacatggcagtaaaaaaccgtttctttaaatacgatgccaaaaagcagaagctgataattatgatagcgggtgtccgcatctggcagggagaatcgttatcggcgcaggatttatcggagctggtacatgggcagttgcagatggcacatgtgaagcatgagctgaggcagtga

SEQ ID NO: 285795 - DNA, 804 bp, Morganella morganii
atgcggatttcaccagcagcagataattttacagcgatctcttatagtgaaacagaccctctccagccacaggatcatgagcagtttgctgacatcatcagcgccccggaaagcgcaggcttttgttcatggctgcattcattcatcaacaggctcctgggtatttttggtgaaaagctgtctccgggtcaattaaatcagagcctggatagcattttttcagaagataaggggtggcagcaaagcagagacgtcaatgcgtggggagtaaaacagacagtcctcagagtaaaagaatctgccgggattgcctatatcgtttgtgccactacacatgacctgccggagtctgattctgtcgccgcacatatggcggggggccgatcgcttctccagacatttacagcgttagctgacgcgtatcagcaaggttcggcaaaggcgctgattcctgtcgctcagagcaatacttatggtccatttggcccgcgcggacattttaccttattagaagcagatatcgataatggcattatacaaagcgcagttcttcatgatcctaaaggtggctttgttgatatgttctatggcggcgcgggacgtttaacagcgatcctgcggaaggaaaatttaatcggggatgatttttctgtcactgtcgagcatcgcggggatcaatctctgttaaacgggaatgattgtggtcgttttgcagcttactatgctgctaaaattacggctgaaggcggtctggattgtgctgacaaaaaaggcgcggttgctttttttgcagagcatttttga

SEQ ID NO: 285796 - DNA, 912 bp, Morganella morganii
atgataaattcaaaccgtccagtgctaaatctggatctcgatctgctgcggacgtttgtggcagtcgcggatctgaataccttcgcagcggcagctgcggcagtatgccgtactcagtctgccgtcagtcagcaaatgcagcgtctcgagcaacttgtcgggcgcgaactgtttgcgcgtcatggccgtaacaaattactgaccgaccatgggttacaactgttaggttacgcccgtcagatcctgcgggcaaatgatgatgctaccgcatcactggcttataacgatgcagaaggggagttacgcatcggtgcatccgatgattccgttgactcactgctgcctttcttactcaaccgtattgcgtcggtatacccgcgtatggccgttgatgtccgcatcaaacgcagccagtacattgaaggtatgctggataaccatgaaattgacctggcactgaccaccgcgcgtattgcccatcacccgcgtaccgctctgcgtaccgcaccggtgctgtggcattgtgcgccggatttccagttacagccgaatgagccgattccgctggtggtgatggatgaaaccaacccgttccgccatctggcggcggaaaccctggatgaggcaggcgttccgtggcggattgcctatgaggccgcatcactctctgctgtccgtgcggcggtgaatgccgaggtcgggatcaccgcccgtccgctggaaatgcagaatgctgacctgcgcattctgagtgtcagcgaagggttgccgcgtctgccggaaattcagtactggttataccgtaacattgacgagcagagcgaatcagtgctgacggtctaccaggcgattgaaaataaaaagacgccgtatactgtaacaccggcggatgatgacaaagccgcagagtaa

SEQ ID NO: 285797 - DNA, 1749 bp, Morganella morganii
atgcacacacaaaccatgccggctgaccggcttattacagctgatgaaataggcccggctacattaaagttacttctcaatgaagaggaggatactttccgggctgcaggtatattcacacataatgacctgattcatatcaaacgctacattaattacggaatgacacttccacgggaaaaagaagatattattgagtttatcggctaccgcgatactgagctgccgggattcgaaccccataatattcagcgtctgttttctcatatttatcagcacgcgctgagctgggaacaggttgaatccatgaccaaacaacaggcgattgatcttgaaattgccggtgccggtatcacgacaaccgggaattatattctgaatgccataaatgaaatgccggttattactcaggcaaacataatgatgcaggatgcatcaccgccgaatttaaaagatattatctataaaaggcaggatcggattatttccggtgaactgacaaagatattaaccgtcatgcgggatgatatcgcggaagaaagaaaaaaaacacagcgggtaaaaaattgcatcgcccggttccggctcgaactgatcgggggtattgatgattccggcaatgaaattccgtcgctgatctatgaagtaaaacgtaaacaaaaagtcttattaaagaatcagactgacgataacacctcagatttgcagtcagaaatccgggtcagaaacgatgagattgagatcctcaagcgcgaatacaaccagtttgtgaagctgtccttctccggcctggtcggcggtattatcgggcttatcatcaccggcggcattttcggctaccgggccgaacaggtcaggcggcgtaaaaacaaactgattgaggaagtcgcggcgctggaagaacagattattactcagcagaacatccagaaactgattgttaagctggataaagaactcaatacactggacagctattttgcggatgcacacattgccgtcgatcatctggattttatgtggcaggtcatgctgactgaaattaatgaatccctcaatacctttatgcagataaatgatgcatacagccttttacaattttcattacagctgaaaaaatcacccttccctggcagtgggttcgtggttatgccagagaacttatcgctatttttgataccgctaatctggccgcataataaggaaaatcacatgacacattctgacattaatcctgaacatattaccctggcacacttaagagctaaacatcatgatatcagtaacggtgccgaaacattatcactgcccgccactgatctgcattttcagatccgtgatataaaaaaatggcagacccggatactgaatatgatttccgctgatgccgccattatttatacgcatcttcataattttgatcttgaaaatttactcggtactctttctcctgatacagggatgaatctgttttcacttccccatgaaaaacaaatttatgaatttttaaccagccagatgaatatgatttatcattcggtgaataacattaacaccctgtttaatactgaatttgatgccactgctattccgttgttacagggcgggttattgcaccatcagtcttatctggacaaggctatcagtaatgcactgccggatattgataaattcagcagtgataaactctattgggaagagaagctgaccgtcattattcagtctgaggaaattattcatcagcgctga

SEQ ID NO: 285798 - DNA, 762 bp, Morganella morganii
atggaaaaacgtcatattgcagtctggatcggtctggttcttaatctggttttcctggggattatctcctatattccggcggcacttgagccgtaccgggatgaactggattatcagatgcagcaactgattgaagtattaccgtacgtgaaaattctgatgaccggcgggatagcagctcagctgctcagcctggcatttttgcgtaaccagccgaaagcgggtctggttttcgccatgatcggcggtattatttttattccgctgggctttatctttatcgtcggttacctctacgactacaaccgtgtgatctaccgttcactgaaaacagtaccgaaactggcacaactgccgtttgaggtactgctgaaattcaataaacagcgccagataaatatggtgatgctgtacggtgcgatcggtgtggtactgctggtgatggggatggatatcggcgggatcatggttgctatgagtattgtcctgctgattaacgcacggcgtatccagtattatccgatgctggcaattgtcggcgataacctgctgtttaccccggggcagtatgcggtttgctatgaagcgccgctgagtgctttcaccgtgatgacaaacagccgctcggtgctgaaactgcatattaagaccggcgaactgaaccgcgtcttccgtattgccaaatccgatctggcagaagatgaaaataacacgctggataaaatcctggcacggctggaacgttccacgctgatacagtaa

SEQ ID NO: 285799 - DNA, 927 bp, Morganella morganii
atgattaacaaaaaaatattattatctatcattgtattatttacatttgaaacaaacgctcagtcagaacatacccttcaatcaggtcgcgagataaaaatagaaaaccagaatgctgagattaagcaaggaaatataataccggaactcctgttaaaaaataaagatcatgaccacaagtcttatattacgtttagcaaatttaatgttgataaagaaggtttggatattaacaacacaataaatgccagacatattattacagaagttatctcagataatgaatcctggattaacggaaatataaatattactcataatcccgcaaatttattaattattaatcctaatggcattattattggtgacaaattcaaaataaccaatacgataaaaaattatatcgtaacaggaaaaatggcaactgaacccgatgattgggaagatatcactgctgagcagtttgagagcagtggcggaaatctgattatttatggtgcagacgcccatgataactttaacaatacgactttaatcagccggaacattgagatccgtaaaagtaagttatattcagataatcttcacattgatatcatgttaaatacagacggcaggtacacgcattctccgaaaatttctattgatagtgactctgaaattaatgccggtctgttaagcggtaacttaaccggagtaagattatctaacgcaggtaaaataacagggaatattgatctcagaacgacggattcatccatagataattcgggagagatgacagggaaatccggaaaaatcacatacctgggtaattttcattttaacgggaaagataatacaaaatacaataaccgtgatatttttcaggcaattgacgaccacagttttttcgatacaggacttaaaacagtcaatattgaataa

SEQ ID NO: 285800 - DNA, 612 bp, Morganella morganii
ttgtcacatatcaaatatgacaaatttaatgtcggcagcgaaggtatgatttttaataaccgcctcggagctgacacgattattaatgaagtgatctctcagtcggcctctaaactgaatggcgaggttcgtattgaaggaaagcaggcaaaattcacattggtcaatcctaacggtattgtttgtgaatctggttgcagcttctcaaatactgcctctgccaatttggttgtcggaatagaagaactttctgatgactatattgtcggacgttctgcaggtaacagtaaattaataatcaaaaatacaaaaaacaaaatcgctgaaaaattaagagtcagcagtaaaaatattgagatcaccaacagttatgtcacagctgaccatttccggtttgatagctcttctcaaatgacgtatgaatcaccggaaagaagcaatataatgattgataaacaatcaatagtacaggccggagacattgatatgtacctgatggaaaccgatatgactattgatggcagagtcgagggcaaaataagtggtgtgagctcaaaatcaacgattgtaactaatggctatatggttaatacatatagtaagccattttaa

SEQ ID NO: 285801 - DNA, 153 bp, Morganella morganii
atgaaaaaaaatggactgttactttcttttttagctttatcaccgttatcgttttctctggcaaatacaacagatatcagtattgtgaatgatgctgcaaagctcagtcacaacggtgatcagagtattgttactattttgaaaaatagatag

SEQ ID NO: 285802 - DNA, 1767 bp, Morganella morganii
atgagtgtatcttctgattatccgactcagcgtgaatgcattgaatctcactttaccaccagtgaccagcagcagctgtttttccgccactggccttccgcaacggcggaaaagaaagctattgtgctgtttcaccggggacatgagcattccggacgggtggcgcatctggcggatgagctggcgctgcctgatttcgcggtatttgcctgggatgcccggggtcacggccgtaatgacgggccgagaggctacagtccgtcgatgggcacatccatcagcgacatcaatgaatttattaatttcatctcatctgaatatgaaattccggtcgaaaacatggtcgtgttcggacaaagtgtcggcgctgttaccctgaccggctgggtgcatgatttcgcaccgaaaatccggggtctggtactggcttctccggcctttaaagtcaaactttatgtgccgtttgcccgcagtggattgaccctgatgcagaaaatacgcgggctgttttatgttaattcctatgtcaaagccaaatacctgactcacgacccggtgcgtatcgcttcatttgagcgggacccgctgatcacgcggccgatcgccgtcaatatcctgctggagctctacaaaaccgctgaccggctggttgcggatgctgccgcgataacggtgccgactcagctgtttatctccggcagtgaccacgtggtacaccgcaagccgcagaatcagttctatgcgcggcttaacacgcagtataaagaaaaacatattctgccggggttctaccacgacaccctgggcgaaaaagatcgtcatatcccgctggcggaaatccgccgctttgtcaccaccctgtttgaacagccgcgctatcagcacgactaccggtttgaggatgtgtgcagcgccggtgccgatgcttatcgtgaattgcaggctccgctgccggattactgcccgaaaaatatcggctacaaactgctcagcaaagcgatgtccactctcggcaaagcctcagaaggggtcagtatcggctatgacaaaggctttgattccggctccacactcgattatgtctaccgcaatcaggctcagggcaaaggtattttcggccgcattattgaccgccagtatctcaacagtatcggctggcaggggatccgccagcgcaaagtcaatatcgaaaaaatcctgcgccgcaccatccgcgcattacaggaagaaggccaaccggtccggatcatggatatcgccgccggtcaggggcgctatctctttgatgcgattaatgattacagccggatagaatctgttctgatgcgtgattacagcaccatcaatgtggaacagggtcgtttgcaaatcaaagagcgcttcctggaagacaaaatccgttttgaagagggcaatgcctttgataccgccgatctggcagcggtcaccccgaaaccgactctcggcgtggtgagcgggttatatgaactgttcccggaaaaccatctgctgcgcgattcccttgccggactggcacaggcgattgaaagcggtggttatcttgtctacacctgtcagccgtggcacccgcaggtagagatgatagcccgcgttctgccgagccatcagggcggcaaagcctgggtgatgcgctgccgcagccagggggaaatggatgcgctggtggatgaagccgggtttgaaaaactggatcagctcattgataactggggtattttcagtgtctcagtcgccagacgccgctga

SEQ ID NO: 285803 - DNA, 189 bp, Morganella morganii
gtgaaagacaaagaacttttaaaggtggcggtagccctgcgcgaatatatcgacgccctaccgctggacgtggtaagcaccttgccagtaatgccgggcgttgatcgtgactgggttgatgaggtcattgataacgctcagcgcatggcgggcaatgagtttcctgatgatgaaagaggcggagaatga

SEQ ID NO: 285804 - DNA, 333 bp, Morganella morganii
atgaacaaatatcgtgacaaatcagactccgagattaattgccaagttctggcaacattcgtaccagatattgaacacatgtgtttaagcaatgatgaaaggtcattttatcattgtggatttgatggtaatggattctatgaaactaccattccagactattgcaacaacccagcggacgcaatgccgattgttattgagaatgaaataagcatggttcgcgtaaataacgaatggtcagcgcgtcaatttaacaatcactgcatcgaagttaacaatagtaactattatcgcgccgctatgatttgtttcctgatgatgaagaacgggtga

SEQ ID NO: 285805 - DNA, 210 bp, Morganella morganii
atggagagtgaaccaattcaggtaccaaaggacttattggaagaattagcatctgaatatcaatcaaaaatactttggtttatgcaggcttatagcggttattacaacatagttggcactcgctggaaccgtgattataacaattatgtcgatagttttaatgccgccgctgagttattgggctgggataagatggagaaaatagaatga

SEQ ID NO: 285806 - DNA, 195 bp, Morganella morganii
atgaaaatcacagacgaagatattcagacgataattttaagcttaagcggggactttttatttcatatcggcgagtcacttgagtttcagtactatgacggtttaatgccgcaagaggagcaatataggttatatagagccttgcagatatggattaaaaaatcagctggtgaatttaagcaggatcaggggtga

SEQ ID NO: 285807 - DNA, 756 bp, Morganella morganii
atgagcagaccgttaattgcagtatggttttcctgtggagcagcaagcgctgtggcagcaaaactcacagtagataaatatggggatacgcatgatattcgcgtattaaataatccggttaaagaagaggatggagacaatatccgattcctgcgtgatgttgaaaaatggataggattaaaaattgaaaccgttgttaatcctgaatggcctaacgcatctgcggttgaaatatgggagcatcagcagtacatgtcaggaatagctggcgcgccctgcaccaggggattgaaaaagttggcccggaagtattgggagaaatcaaacccagctcactctatcgttcttggcttcacatcggaagaaaagtcccgcattgagaacttcaggaaaaatgaacgacatgaccttattcctatactggcagatgaaaacttaactaaaggtgattgcttcaaaatactacttgaagctggcttaacactgccaatggtttatcgccttggttatccaaatggcaattgcattgggtgcgtaaaagcaacgtctccaacctactggaatcacgttagaaaagttcatcctgatgtttttgaaagcagagctgagcaatcacggcgtattggtgctcgcttagttcgccacaaaggggcacgtatttttcttgatgagcttcctgtcgatgccactggcaggccaatgaaagacatggattttgaatgcggcatattttgcaaacaaaacaccgaagattaa

SEQ ID NO: 285808 - DNA, 204 bp, Morganella morganii
atgacagaggaatacgaacacgcatcaatccgtgtagaaatggcgagcgatgcgactatcagggattattttgcagccagggccatgaatggtcttttagccaaccatcaaagcaccccattaggagtgagtttcaaacctgattcattagctggagttgcataccgcatggcagacgcaatgctcagagcaagggagaaataa

SEQ ID NO: 285809 - DNA, 216 bp, Morganella morganii
atgaatattacatttgagtgcgctggattttcaggggctggtcagcgtagtaccggcagagttgagattgatgtcgatggtgcggttctctgcgggttcgttgacgcatcggaaattatcgaagaatactccgcagagacgcttctcgaagaaattggtgatgacgatatcatcaaatatctcaccgagcagggatacgcagtaatcgaaccgtaa

SEQ ID NO: 285810 - DNA, 450 bp, Morganella morganii
atgagccgggaagatataaccacgcagattttatactctcattatcttgagaagctttacgccaccgctatggggcgtgttgataaaataatctcagtcctgattattattttcggctcatcaataatcctgaacggaaatccgtttattttcggtgtgcttgttgtggcattaactggcttacagactgtattccagttcggcaacaagtcaggtactgccagaaagaaatcgttttactatcagaggctgtacacaaccgaatcaaaatataatgatgacgacctgcttttccagatgctggaaatagaatcatctgacgaaagtatctgggcatccctggaagagattgctgcggttaaaactgaaataaaactcggcgctgccgattcttctgagctaaaaaaactcccgctcagactgcggttgcttcgttttatttgcggttaa

SEQ ID NO: 285811 - DNA, 216 bp, Morganella morganii
atgaaagataaggaattatgccctgcgtgcggtaagggtcgtctccacccggcgcaggaagaagttgaagttgaatacaaatctgaaaagcactcggtcactctcatgtctcatatatgtgatgagtgcggttcagagattgctactcgcgaggacgcaaaacgcaacaaagatacggtgattgcactccgccgtgaccgcgattcccgccagtga

SEQ ID NO: 285812 - DNA, 1128 bp, Morganella morganii
atgaggtctattttatttttatgttttgcactcttcccagccttggtagcgatagccgggaatacagggcaaggcatcccaaccgacgcggaaggccaaagagagctagggataatgtacattggaagcgatgatgacatggcttttttttggacgaaaaaggcagctgaacaaggtgatggtatagcccagaacaaccttggagtaatgtatgaaaagggggtgggtgtcaaaaaggatgcggatgaatctttaaaatggataagtaaagcagctaaaaatgatatacctgaggcccagtatactttagctatggaattaattaacggtggcagattaaagaaagatccagctaccgcattaaatttattagagaaatcagccaacaaaggacatagccaggcgcaacttgagcttggtttatcgtacttattaggtgacggcactaaaaaagattataaaaaagcaatatattggcaaaaaaaatcagccgaacaaggaaataatgtcgctctatttaatttaggcgttcattatttaaaagggacgggggtcaaggctgatggtaaaatagctctagcatatttcgagcaatcatgtaaggaaggataccaaggtggatgtgatgtgctttcctcttacaaatcaccacaatcacaaaaagaaaatactgagttaatttttgtaaatattataaaaaaatctcaatcagaatcgctattagcaaaaaatgacatgcagcgcggtggaataaaatccataagagatgaaaatctgtgcgcaatcctcaagagtaagaaaataaaaaactgggacgggtttgtcacaaaaataagtgcaaatgaggatggcagaggtgttttatctgtaaagatagcagatggagtaacactgaaaacatggaacaactcatattccgactctaaatttggaactttaatagaccagaagtcagaactattcacggcagcatcctcacttgaggagggggatcacgttgttttttctggtgaattctacagcgtaaatagcgatgcaggatgcatttatgaatcaagcataggactcagaggcggactacaagaacccgagtttattttcaagttcgataaaattcacaagatataa

SEQ ID NO: 285813 - DNA, 258 bp, Morganella morganii
atggatgaaattatcaaatacgcgaccatcggcctgatggcggtgggttatttttggattatcgcaaaagcagtcgagtggtttctggggctgatagcaagaaagtggatccggcgcatgattaaagaccgcaagcagaaagcagtaaacgagctttacgatgcctatgacctcggtaatatcaagcagggcggagatgtcaaaatcgcaatgaagggcgggctggttattctcatataccgccagtcaaaggagtag

SEQ ID NO: 285814 - DNA, 252 bp, Morganella morganii
atgaatgaggcaagaaccaaggcaacggtaactattctgaccgcgctgattaaagctgcgacatggtctttaatggcatggcttttatataacgcctatgtgattcagattgaccaggaaaagcgcgaaacaatagcaagagttgtcattagcgggaaagaccccatcagggttgtttgtgccgtcgatggcgacaagcttgcttcacgaaaaatgtgcatacaggcagcgagtgaaggggggcatgattga

SEQ ID NO: 285815 - DNA, 198 bp, Morganella morganii
atgaatttacatggttggaataagcctcacatcaggagggaatctggggtatgggtggcatggtttgggcgatggagaagtgacgaattcagcattcaccgttacatgtggtccggatggggcgaaacgccacaacaagccattgaggaattgcatcgccgcacagggcaacagagtgcaaaaatgcgcttagcttga

SEQ ID NO: 285816 - DNA, 1425 bp, Morganella morganii
atgagcaagagtaaaaaaacacaacagcctgtcggaaaaccaccgttcaggattagtgaggttgatttagaaaaggcatccgtctcgggtgaagaaaagaaattcgccgaatttaagcggtacgagcctttacccggagtaataccagaggccaaaaaggacgatgtattcgcaatggatgccacgccatatgacctgctaaataacatgtctattggtgatgagtattccggatttcgtggttaccctcagcttgcggcaatgtctcagcgggtagagtactcaaacatgcacagcgtatttgctgacgagatgacccgtaactggattgaggttaaaagccgcaaagatggggaccctgaaatcgaagcaatggaacaggcgctgattaaatacgatgtgaagcgtctgattcacgaagcggtcagacaggactcgcaatacggcgtggcgcatatctacatcgataccggcgctaaaacggatgatgaactggagaagccgttatttcttgatccccgaaaaatacctaagaactcactgaaaggactgcgtgttgttgacccgacctggatttatccggcgatgtacaacacacaatggcctttagccgaaggattctataagccgcaggcatggttcgtaatggggaaaacggttcatgaatcgcgatttaatgacattgttagccgccctgttcctgacattctcaagccatcctataactttggcggattatccctcactcagttaatggaagattacgttatagattggcgcgatgccaagaagaacgtaattaagatactccgcacactgagaatgagagcgcttaaaacggacatggatgctcgccttcaggttcccggcgagttcgataaacgaattaagatgtttacgaaataccaagataacttcgggctttgggcggtagatacgaatgaagatcttcttcacatgcaaacctcgctcagtgagctttctaatttgctgtcgaattaccaagaccagctttgcattccttcccggatcactaacctgaagctcctgggtaacgcccctgcgggtctaaacgcatcaggggactcagagttggatacgtggcacgaaacagtgtcaggctatcaggacggtaatctgcgtaagcctttggagaatatcttcaagattatccagctttcagagtttggggaaatcaaagaagacatttacttcgagtttaaaccactcgatgaggttacggaaaaagaagcggcggatatcatccggacgaaggttgaaacaattgctgctgccagtgattcgcaaattatccttccggaagaagcaaggatggcactggaaaatatagaaggctttaagtacctgaaagatattgaaccggaggatgaatggcaagacgacccagaagactccgggctgtaa

SEQ ID NO: 285817 - DNA, 348 bp, Morganella morganii
atggctaaagttttaacgtatgtcatcggctgcaaacttccgaacggcctgactttccggcatgaaggtaaatccatcactctggcaggggctaactcatccctgctgcttaatggttttggtattacccgcgatgttcctgctgatgcctgggaagcgtttgagaaggcgttcaaagatcagaagattatccgtaatggcattgtattcgctgtaacggattacgcctctgctgaagatgcctcaaaagagcgatccaagcagaagaccggactggagcaggctccaaaagtacaaaaaagcaatgacccgaataatgacggcatctcgccactcaccgaggattaa

SEQ ID NO: 285818 - DNA, 405 bp, Morganella morganii
atggcaatcgtggaactgaaaatagccacgttccgcgccatataccctgagttttccaacatctcagacgacttactccccttcctgttcgataacgccaccgattacctcgataacaccgaacaatctcttgttgcacaaagcgataagcgtgagcgattgctctatctgcttatggctcacctggcatacatgcgatacggcgataaagatcgtaatggtggctccggcatggttgggagggtgtcgtctgcgagtgagggaagcgtgtccgtgtcttctgatcttggtcaggttgagttcagaaatgcatggtacacgcaaagcccttacggcatggattactggcaggcgaccaaggtttacagaatgggggtatggttcagtggcacagactgtcgttga

SEQ ID NO: 285819 - DNA, 1344 bp, Morganella morganii
atgaaattaaatgacattcctaagctgatgccggttccttttggtgttaacgggccacgtgaggagttactggagacgtctccggcaggaaaccgctccgcttcatacgctgacggattcccgccaatcacaatgctgctgaagcaagccggaggactcccgcctaaaggcgaaaacatgaaccaaattctgtttgaactggcaaatggacagcgctggtcaaactcaggggctggctataaattcaataaagcattcagtgaggccgttggtggttaccctaaaggagcgcagctactttctaatgacggaacaaaagtatacgtcagcactaaggatgacaataaaacagatttcaatacatcacctggcgatgattgggtaactcttgggaattatattggtctgagcgactacgctgcaaaaacagatcttgataaaaagctcgacaaaacctcagtagttcagaataccggcacatcaacaacggaggtgattagtcaggatggcaccaccaaagagttagaaaaaaaaatagagaaaaattccgctgcatcattgttgcgcctgacaacaacgagtcaggatgcaatacggatgaaaagcgctgattacggagttctgctccaccagaataataaagaattgtttattctgatgacaaacgaaaaagaccctgacggtaattataatgctttgcgtcctttccggattgacctgaaaaccggtgaggtgtcgatatcttcccttactcttggggcgcttaaccttcaggactttacgccgcttgataaccgctatctgaaaaaaggcgcaacagcgacagaccttaagctcaattacgccatgtttgtttttgattcaaatcagacatgggcagtaccgtctgagtttattggccgcaaagctaaagtgactgtttcgggtgccggtggcggagggtcaacaaaagcatctggggccgggttagttccaaggggggggatgcccggaggtaacggcggcatggcagtaaaaataataacactctcagcatctcacacggttgtagttggttctccgggcaacggaggcgtattttcttccagttcagagaatggggcgggtggtggaaacggaaattcgtcaagttttgacagtgtatcagcgacaggtggtcaaggggcatcatcacaggccggtgtaggggtgaacaacgggactcccggatatggaacgggcggcgatatcaatattatcggcggcggttcttccggtggtgtcggcggcccaaataatgggtctgaccctggtaacgggcgaaacggaactaagggatatgtcattgtagaggtgatgccatga

SEQ ID NO: 285820 - DNA, 372 bp, Morganella morganii
atgaagtatggaagaattgaaggtgatttaatcgttgagattattgactttaatccggctggtaaatttaatgagtctcttatctggattaaggttccggagagttgtgaaagcggctgggtggtaaaagacgggaaagcaaagcagcctgaaatatcacaggctgaattaactgagcaagctgaagaacgtaagagatatttgattgcagaagcaatggagataactcaattatggcagactcagctaattctcgggattattactgaggaagataaggccagtctaaaagagtggatgctgtacgtgcagaaggtgcgggcagttgacgtatccaccgccccagatatcgtctggccggttaagccttaa

SEQ ID NO: 285821 - DNA, 1974 bp, Morganella morganii
atgtcaattaaatacagatcagatatcgacgggctgagagcaatagcggttctctttgttgttatattccacagctatgacaatctgatcccatccgggtttattggtgttgatatattttttgtgatctcgggattcttaatctcatcaataataaaacaacaacttattgacaagaacttttcatttccggatttttacagacgtcgcctctggcggctgcaacctgcgctgttattggtaatgttattcgttctggtgataacatcaatattttatttaccggatgactatattgatgtcatgaacagtgagaaatatacctcattgtttttatcaaatcagtatttttcacgggtaacgacaagttatgccgctcaggattccgtctaccttccgcttttacatacctggtcactggcaattgaatggcaatggtatcttctgatgccgcctgcactgtttttattgcacacattatgccgccgctatcatttcagtattgtgcgggtggtttccttactgacgatactgaccgtcattctgtccctgtttttgtcagataattacccggataaaaattattatttattttcatcccgtatttttgagtttatgatcggtgtgacaattgcttatatgcctgaaaaaacaaataataaaaaatcagtctgtaatatattgtcaattgccgcttttgtcgtattaatattaatcgccagctgtgatgcggtattaccgggttatcctaatttttatactgttgctgtttgtgcctgtgctgcggtcatcatttatacaggacaatacaaaacgattatcagcagaatactgtcaatcaatattgttgtatttattggtgctatatcatactcactttatttatggcattggcctgtttttgctgctgcacgttacaccggttatttcgatagcaataccgagaaactggccgcgatgtttattacgctgattttctcttatttatcttatgtctgcattgaaaaaagattcagaaaatctcagctgcgctttgcatatacctttctgattttatttattattcctgtcatcatcacgctaacattaagtaaaattactgtaaaccatgacggattcagtttcaggctcggagatgcgtatctgaaaatggaaaacgtactgaaagagcatcattacgacaatcgtccgttatgcctcagtaatgataatgcggcagccgacggtgtctgccatatagggaaaaaaggggcggataaaaaagcctttttatttggcgactctcatgccaaccatttttggggctttatggatgtcatcggaaaagatgccggtatggatatccgggcacaagcgacatcatcctgcctgacactgccgggcgtctatctttatgactggtggaattataaaaataccgtgtaccaacgctgttatgatgatactcagcagtattacaatgatatcagaacaggacattatgattatgtcattattggtgaggtctggagtaactatgccggtgatcatgtcatcaatcagaccggtgatacccgatcaacagaggaatcccgatcacgcacagaaaaagcattacgtgaagcgctggatattattgtaacctccggtgccaaaccggtgattatcaaaaccattaatccgatgccgcataattttatgacctgtttttatcagaatgtaaaattacgccgtgattaccgcagtaatcactgtggtgccggacaatttaatggtgatgagcaggaatggttcagccggttatttgtaaaactaaagaatgaatacccgtcgctgacgatcattgatcccaaagatgttcaatgtcataacgggcgttgcctgaccgatattgacggcattccggtttaccgtgatgtcggacatttaaccgactacgcttccgttattttcggcacctggtatttaaataaatacccgaacccgtttaaataa

SEQ ID NO: 285822 - DNA, 327 bp, Morganella morganii
atgaaagagaaccttaatgatttgcagattttcctgatggttgtccgtcagggcagttttacccgggccgcggttcaggccggcacatcacaatccgcagtaagtcagaccatcaataatctggaacagcgtctgcaactgaaactgctgaacagaaccacccgaagtctgacgctgacagaggccggtgagcgactgattgacctgattgcaccggcaatggctgagattacggagggactggcacaattggcggaactgcgtgaaaaaccggccgggacagtccggatttctgctgatgagtatgctgtacaacaggttttgtag

SEQ ID NO: 285823 - DNA, 801 bp, Morganella morganii
atgtcccgcataaccacaaataccacaccaccggtactggttgcagagaatatctgtttttcccgccacggacagccggtaatcagtgatatctccctgacattacactgcggaaccatcactgctgttaccggcccgaatggtgcgggaaaatcaacccttcttcgtttactcagtggttattgcccctgtgacagcggacaaatcatgctgcgcgaaaaaccgatgacatcctggtcgcccactgctctggcacagatcagggcggtcatgacacaacaaagtgctatctctgccccctaccgggtcagagacattattgagctgggggatttgcacagagaatatacacgtcagacgaccattgatgaagtgatacacctgacggcctgcgaatcattgctcgataaacgctggtatcagctttccggtggtgagcagcagcgggttaatctggcacgggcactgatgcaactgagcggcccgttgcccattccccgcctgctattactggatgaacccactgccgcgctggatcttcaccaccagcaacgcctgatacggatgctgaaaaagcgggtgagcacgacctccctggccgtcttctgtattctgcatgacctgaatttagcgtctttatatgctgaccacatcataatgctgaataacggatgcattgtccgtcagggaacgccgggagaagtactacaaaaaacggtactgacggaaacctatcaggctgacctgataacgctccgccatccgcttaccggcaataattctgtgttacttaccccgtaa

SEQ ID NO: 285824 - DNA, 828 bp, Morganella morganii
atgaaaaaatatatcttgctgctgctgttctgcttttgtccgtctgcactcagtgttcaaggtggtattattaccctgggcggggatgtcaccgagattgtttttgcactcggtgccggtgatcgggtcattgcccgtgatacgaccagtgagcatccgccacaagtcactcagttaccggatgtcggctatctgcggctgcttaatgcggaaggtttattatcgcttcagccctcactgatcctcgccagtgaactggcctatccttccgccgtattatctcagatcagtatggctggtatccctgttgtcaccgtgagtgccaaagcggagcttaccgctatcaccactaaaatcagccagattgcggaagctctggctttgcagtcagcagctgcggccctgactgccgaccttgaccgtaaactgaatgccgttccgcaaacgcccctgccggtgaatgtactgtttctgctcagccacacgggtaccgccccgatggcagccggtacagataccgctgctgacagtctgatccgcagtgcgggcggaaaaaatgccgccggttcttttcgccgctaccggcctctgtctgcagaagggatgattgccgctcagccggatttagtggtgatcacccgcagcggtctggcttcactcggcagcaccgacaagctgtggcagttaccgggactggcgcaaacccccgccggaaaacaccagagcgtattgatagccgatgacatggggtttctcggcttcgggttacaaacgcctgaaacactgcgtcagttacgcaaagcgatggagacaacagctgcgctatga

SEQ ID NO: 285825 - DNA, 1068 bp, Morganella morganii
atgagcgacaaaaaactctcccgttacatcgccctgagtaaacgggatttattcgcctgttcctatgatattgctaaaaaaatgcgcatatccgaggcggagctggcacactgccgggtcggatatgatacctgccgcctcacaccggatatccccgctatttttcgtttacttgccactgccggcgacctggccggcgttaccgaaaatgacaatgcgatgcaggaacactacggcacatatgctaatgtcgagttcggggaacatgcaagcctgctgctgaatccgtacgggctggatttacgctttttcctgtctcagtggcactctgcatttgtgttagcagaaaatacgctgaacgggctgcaacacagcctgcagttttttgatcgtcacggctatgctgtccacaaaatatatactacacgtaatacggatatgaccgtctggaaacaactgactgcacaatttgccacgcatgacaatccacgggttacccccaggcctgtcgtcattccggcttccgtgccactgacaccggaacagcagactgaatttacccgcaactggcagcaaatgaccgatgtacaccagttctttactctgctgaaaaaatttaatatcagccgcttacaggcattccgttatgtggataacacgctggcacagcggatagataacagtgcattattacggctgctcgcactgtgcgaaaaagataagaatgacatcatgatctttgtcaccaaccggggatgtgtccagattttcaccggcgccatcacccggctcgaaaggatgatctccgcggatagcggaaaatactacattcatattttcaatgagttattctctttccgcatagctgaatcacacattgcggaatgctggataacccgtaaacccaccaaagacggtattgttaccagcatggaattatttgataaaaacggccaggctatcgcccagttgttcggccagcgcaccgaaggtgaaccggaacaaactgtctggcgtcgtcagattgataccctgctgtcagacaatatcgataaggctgtagcatga

SEQ ID NO: 285826 - DNA, 411 bp, Morganella morganii
atggtaaagatgaaatacattttgttacttttaatcgctatcatgcctaatttactgaatgctatggctttgaaaaacatagaaattaaagacgccggcattacagttaccaaagatcctgctgagggtgagataaacgcctgcaaaaaattcaaaccaactaagcagcaacttatagcgttttttaaatcatctgaagtctcgaaagagaacaaatggttgcatgaatattactcttcatgtgtatcaaccggaaatgttgagttcgaaaatggtgtatccggtgaatgggttcttcaatccagtggtcttgctatggtaatcccggacaatggcgattccatttattttttcaaaaaaaataattcatgggaagacccgatggcaggtacttacgggttagataactaa

SEQ ID NO: 285827 - DNA, 609 bp, Morganella morganii
atgctgtatattgatgataatggaatagtaaagtcaaatcgtataaaaactaagatattcagccatattgaacgcggaagaatggataaggtgaacggtatcgttgttcaccaaaccaatacctccgctgagactcatgtttttaatagttatagtcatgctggtagtaatggcgctcattttttaatcgataaggatggtgttatttatcagactgcctctctgtttaaggtcacatggcatgtaggaaaaatgaaatcacgctgtttgattgagaaaaaatgtgaaccttcagagctgacaaaaatggccaaccttgagttaaaaggaaaaaccaaggaaatttctgatatagaaaaaatcagatcatttccggatcgttatcctggtaacatggatagcattggtattgaaatagtcggtaaagcatacggtattaaaggaaaaactgtggaagaatatgaaaatgttaatccgcaacaaaatgcctctcttaaatggcttgtgtctgaattactggattctatggatatttcagcatctgaggtgtacagacatcctgatgtaggcagaaaaaatgaaacagaagcgagcacagcatcatggtaa

SEQ ID NO: 285828 - DNA, 435 bp, Morganella morganii
atgcgcagattgacacaggtatgtaacgcagtgctgttgatgaccggacttttagtcgctccggtagcgtcttatgcggaccgggatcatgataaaagacacggtcaccggtatgagcataatcacggtcattataagcacagagataatcattaccataagtacaaaaaagatctgacttacgcacaggcacgctggctggcgtcagaaaacggattactcggctatcacgcgctgccgccgggaatagcgaaaaatcttgccagaggaaaaccactccctccgggcattgcaaaacgcgcagtacatgcccatatgcgtgaccgactgccgcattatccgggctatgagtggaaaatagccggtgacgatttagtgcttattgcactgagtaccgcggtggtgacctacattattaatgatgtttttgagtag

SEQ ID NO: 285829 - DNA, 783 bp, Morganella morganii
atgcagccagtttcaacaggacagaatgtcagattaaccgggtatatttcatatcagggaaccgatggtatgatcggtgacttaaaagaatcagcctccgtaaaacaatcgggtttatctgagcggttcactgagatccgtaacagtgcagcagagtttttcacagcagtgaaaggcaaaataaataatgtgtttgagccattagggaaccggataaataagatagcaatccgggaagaaaaaacgcaatctgattctgctcagacggtacagggtcctgctgagacagcacgtatggtgctggatatagcacagcgaaatgtgcagaaaaaagttgatgacgtcaaagcattcctgggtgaaaaccagcctctgaatacggattcactgcagaaattctcaaaagacattctgagaacattagtcacattgctgagtggtgtggataaagcaaaaggtctcggtatggataaagcaacaaatgtactcatagagaggcttattaaaaatgtaaacagcgcgttatccggtgctgccgggtgcggcccgaacccggatgaaaaaatagatcagcttgggtctatttgtgatagtgataaagcaactaactatttaaatgcagcgaattttgatcagaacctgagatccagcataatgaaactggtgaaggttattgaaggaccgattatgactgacctgatggatctaaatcctgcagagatcatcaaccgggagaaaccgcagactgagaataatgtctggcgccggttacctgataactga

SEQ ID NO: 285830 - DNA, 708 bp, Morganella morganii
atgaaaaaatattcattatttattatattaagccttctcactgcgtttcatgctactgccagtgtcacgatgctgggaaaccggattatttacaatgaaaacagccgggataaaacgctggtattttcaaatgacaatgatacaccgtcattggttcagatctggacagatattaataatccaaaatcatcaccggataatgccgatggcccgtttgtcgccgtaccggctatttttaatattgctgacagcagtaagcaaaatgtcaaactgacctataccggcggtaaattgcctgatgatcgtgagagtgtgttttactttaattatctgagtattccttccgtcaaaaaagaagatgccgaaaaaaataaactgatgatcgtcgttactaaccgtatgaaattattttaccgcccggcaaaaatcgggaatgacgccggtgacgtgatcaacaaacttgaattccgccgccagggcagcacgcttgatgtccgcaacccgacacctttttatgccagtgtttcctctgccgcattatctgccggaaataaacaagggcagattgataatacctcaatgatagcccccttttcctcagcgcaatgggccttacctgccggttatcagagcgggaacgtcaccctgatcctgggtgttattaatgactatggtgccgaaaaaacgcgctcagttaccctgaactga

SEQ ID NO: 285831 - DNA, 363 bp, Morganella morganii
atgtgggatctggtttttttacgtgagctgttaatctcaggtgttagctatctgcagctttttcttgaagctatatccgtcatttgcgtcgcgacagggcttgttaaaacgttgtatattttaattacggtaaaaaatggcagagttgctcgtttttatttcggtaactggctggcaatggccctggaatttcagcttgcagcggatattttgcttactaccgttgaccctgatttagacagcctcattaagctggcaattatcgccgtaatcaggacgttcttaaactactttcttgccaaagagctggagcacaattcttcaggtgaggaatcaaacggtaaggcaagtaaacatcaataa

SEQ ID NO: 285832 - DNA, 417 bp, Morganella morganii
atgccagggtgggtaaaggcgatagtgtcaggattgttttttatattatttttagctcttagcatgctgatgtatgactatatgatttctttattaaaaatgcaaagtgaaattatattttccgcgcaaaatttaatattaacattcgggcttccatttgcgttatacgttttttttggaatgacagttgagcttttttttggtgaggattctatattttacaaggctattgcaaaatataaaaatataataatgaagacgacatcttacttgttttttattggtcttattgcaagcttccctgtttcttttgctgtaaatatctatcttctcgataagggatatgaaacatgcgggaagatttcgtggatgtcacccaccacctatgtaaaagatttatcactttgtgacaggtaa

SEQ ID NO: 285833 - DNA, 126 bp, Morganella morganii
atgggtgtctttatcttttttgtgactcagcccatctttagtactcaacttctgtccaccccaaaacaaaaaggccacaaacgtacagttgaaaaaatacatttagtgatgcgatttgcaaaataa

SEQ ID NO: 285834 - DNA, 1644 bp, Morganella morganii
atgtttaatcgaattaaaatatccgcttcttttctttttatcttgttattgttcttcgtaattcagatagtaagtatctctctgacgattacttatgcagaaaaaaatcactcaagcgacattgctgatagtatcaatacaaaaaatgcagcagatgcagatgatgttatatataggttacgaaaagccgggtactttattcaaaaggcagcaaatgaaatttcctcaggtaaaggcggcgcgccttcggatagtttaagtgctgcagtaaaggaaatagataaatccggggaaatctggagctcatttattgagcagcccgctgaatttataagtagcaatgacctgataaaattaaatgaatcatttaataaataccgggatgaattaaataattccattaaacttttaaaggggaatgacgttgctgcatttagtgagaataacttaacgtctatcgcccgggattttgacagaagctatgatgtataccaggatggatatatcaattcatatgaaaaaaccattcaggattcatatgatgactataacaaaacaatatatatatccatggctatcattttaacgtcattactattaatcatactttcttgggtttacattaaaaaagtcattatttctccattgaataatgttgttgataatattcaggatatagccaaaggaaatctgtcaaaaaatattactatttcaggtgctaatgaaataatgatactcgcggaaacattgtgccatatgcagcatgaactggcggtcaccgtcggtgatgtccgtgatggtgccaatgccatttacagcggtgccagtgagatctcggccggtaataacgacctttcttcacggaccgagcaacaggctgcgtctcttgaagaaaccgccgccagtatggaggaactgaccgccaccgtgcgtcagaatgccgataatgcccgtcaggccagtcatctggcgctgactgcctccgagaccgcagaacgcggcgggaaagtggtggatgatgttgtggagaccatgcgtggtatcggcgacagctcgaagaaaatcgccgatatcatcagtgtgattgacggtatcgccttccagaccaacattctggcgctgaatgccgccgtggaagctgcccgtgccggtgaacagggccgcgggtttgcggttgtcgccggtgaagtgcgtaatctggcccagcgcagtgcgcaggccgcccgggaaatcaaaaccctgatcgaagattcggtcggcagagtcgataccggtgcggtactggttgagcgcgccggtgagacgatgaatgaaattgtcagcgccgtcacccgcgtcaccgatattatgagtgagatagcgtccgcctcggatgaacaaagccgcgggattgaccaggtgggtgtggcggtgacggaaatggaccgggtgacccagcagaatgccgcgttagttgagcagtcagcagcggcagctgcgtcactggaagaacaggcaggcagactgactcaggcggtatctgtttttcacatacaggcaggagaactgaagagcaacgttaaaaccagtaccgtggtaccgttacagcgccccgatataaaaaaactgaaaaataatgacgaggatgactgggaaacattttag

SEQ ID NO: 285835 - DNA, 189 bp, Morganella morganii
atgccggaattaaaagaaagtgcaataccggactcaacggatgtaacaataaataatatgaaacagacacagcatcgctattccgtgtgtactctggctgcaattagtgagtcagaatacggaaaagggaaaatattcagttgtatttcagatttaatggcggaattacaggatggcggagacaattga

SEQ ID NO: 285836 - DNA, 735 bp, Morganella morganii
atgtcacaagataaccgcatagatccttggcttaaaagaattggttacatctcacagattggtacattaattgtaatggtaattacaatcttttatacagtgatccctttatataaaacagcatcattagaggaatcaattttaataaaagaaaatgaactaaaaaaattaaaactaaaaataaaaaactttgaaaaaaaagaaaggaatctatacattgcaaactatacaagaactgtctctttgcattgtacatctttattaaaaccagttttagtttctctcccctctagtattgacgatgaagcctataaaataaaagaaccaaataatctaaatcaaaatatcgaatcatgcttaaaaaaatcagagtacactgatattattagaagtaatttatctgaaaaagataaagttacattcgataaagaatttaatttattcattgataaaataggtgatttaagacagcaaaaaattagtgaatattataaggcggaaagtgatctaaaagcatcccctgaaaaattcattacagataattctatagataccagtaccatagaatcactaaataatataggtaaagccttaggtatctctaatgaaaaaataactattcagtggataaactcagtcctttctcgcttcgaggcaaaactagaaaatgatatccgcgatgaaatttataattttcgcaatattgactggcaagataatgaggaaattgagtaa

SEQ ID NO: 285837 - DNA, 765 bp, Morganella morganii
atgagtgtattggagctaaaagcaggagatcatatttattccccgaggacaggttacgaccatcacggaatctacattggtgatgataaagttatccattactcagggctttcgaacggaatatcaaaaggcggaatttgtgaaactacactttttgatttttctggtgataaacaacaagttggagttattgcccactcaaacgccgcttaccttcctcaagatatcgtccaaagagcaataaaaaaaataggcgagaatgattacaatgtagtcaccaataattgtgagcattttacaaactggtgtgttacgggtgtaaaagaaagcaaacaggtgcaatcagttgtaaagtcgacagtagacatcgccagtatctcatataaaggatacaaaatttatcaatacgttaagaacgcacaaactggtgcaaatttaataagcgccgctatgaaaacagcgggtgttaatactctcagggtatctgcaccaacaatgataaattctacaattgcatcaaccgcaacatcaagtgtcgttaaatctgctatggcaactactactgcttcaaatttagcaggtatggttgggggaggtactgcaggtattactagcgggtttgcggtttcaggggggactacggccgttttatcagcagttacgggtgttagcgctgtaggcgcagctcctgtcgttgttggaatagctgttgcaacaggtgtaggatttggtgttaagtatctttggggtaagatatttgattag

SEQ ID NO: 285838 - DNA, 711 bp, Morganella morganii
atgccgtggactgttatcagacgagattttactaatgccgatagtattaaatgtgctttggggtgcgggcaacctataaccagcggtatcgcttacgttgttcaggatgaaaatgggcagatcggatttgccgggtcaacatgtgttaagcagacagtaaattatgccactgacattgcaacaattcctgatttcactgcttctacatatgcagaaaatgttggcggtggtaatggtggtaatggtggtaatggtggtaacaacgccggtgctcatcccgcaaataatcgccaaattgcaataacatacttactgctaaggtttgagcgtttaaaacactaccaaatattggctggatctaatcgcggtaaactgacacaaatatatgaccaatatcgtaacaaccaaaatatccaaaacgccgacatcggatatttattaacatgtgccaataatatcgccaatcatttaaggtttaatttaagaaatcttatggctttctataatttagacaatctttgcaatatcattagccggagcagacatcaaaatattcgccgtcaggatagagataatgctgctcgtatagctcgtgatttataccgcaatacacatgtccctcctgctgacatacagacgataaatcacattttacagataataggatcaagacataggatgagaaataatgcttttcaaatcatggggtaa

SEQ ID NO: 285839 - DNA, 261 bp, Morganella morganii
atggtaatcacgactattccgagcaaggtcttcaaccaggatatcggtgcggctaaaaaagcggctaattgtggtgctgtgtttattacaaacagaggcaaaccgacacacgtattactatctatcaaggattatcaaaaaatgacatcctcagataaaaatatcgtcgatttgctggcgatgccgccggagctggctgatattgagtttgaagcacctaaattaaattctggtgtgtttaaaacagtggattttgaataa

SEQ ID NO: 285840 - DNA, 423 bp, Morganella morganii
atgtatttgatcgacacaaacgtgctttctgagctaagaaaagccaaatccgctaaggcagacctgaatgtaatcaattgggccaacagcgttgaagttggtaaattgtttttgtcttcggtgacggtgtttgagattgaaacggggatactcaggctggaaagaaaagatcccggccaaggttccgttttacggggctggtttgaaaatcaggtaataccggcattttctgaacgtattattgcttttgatacaaaaatagcactccgttgtgccagacttcatgttcccgagccgaaatcggaacgtgattcaatgattgcagcaacggcattagctaatcattttgctgttgtaaccagaaacaccaaagattttatacatacaggtgtgcaactgataaacccctgggagtttaattaa

SEQ ID NO: 285841 - DNA, 153 bp, Morganella morganii
atggatctgacatcaaagaatttggatgaatttttacgggacagaatgaatgccaataagaatagtaagtggggaaaatcttaccgggaattagtcgaacgggttaaaagagaatcccccgatttactgaatatcaaattatctctgttctga

SEQ ID NO: 285842 - DNA, 1365 bp, Morganella morganii
atggcaaaatataaggcgtatccggaatataaggattcgggggttgagtctttagacactatccctaagatgtggtctataaaaaaactcaaatatatttttgagattaaaaaaagaattgcaggaaagataggctttgatgtcttatctgtaacccaaaaagggataaagataaaagatattgaaagtggagaaggccagctttctatggattactcaaaatatcaaagggtatatcctggtgaatttgcaatgaaccatatggatttattaacaggttatgttgatatttcaaactatgatggtgtaactagtccagactatcgtgtctttgctgtacgagacaaacatagcttttatagccgctactatctttatttactgcaagatgggtataaacagcgtcgcttctttcatcttggacaaggaagcgctcatttaggtcggtggcgtttacctactgaagctttcaatgaaattgtttacccttgtccctcgctgaaagaacaaattcatatcgcttctttcctcgatcacgaaaccgcaagaatagacgatcttatcgaaaagcaacaacaactgattgaactgctaaaagaaaaacgtcaagcagtaattagccatgctgttaccaaaggattaaaccctgatgtaccgatgaaagattcgggtgttgagtggttgggggaagtgccggcgcattgggaagttatcaaaattaaatatcttactgaagtatttgaacaaggttggagccctcagtgtgaagctcgtcgtgcagaaaaaaatgaatatggtgttcttaaagtggggtgtgtgaactcaggtaaattcgattctctagaaaataaagcactccctttaacattagagcccaaaatacaatatttaataaaaaaagatgatttattgatatcacgtgcgaatacaagagagttagtcgggagatcggctgttgctgaagaagattacgataatctgattatctgcgacaaactatatcggttaaagcttaagcctattgcgagcccctatttaatttccgaatttttagggacatctttagctagacaacaaattgaattagctgctagcggagctagtcattctatgcagaatattgggcaggatacgatcaacgaaatggcaattgcattaccccctcaaaacgaaactcagtatctacttcgttatattagcgcacaggttgataaatttgctacgctaagtgagctttcgcatcgtcaaatttccgtcctccaagaacgccgcaccgccctaatctccgccgccgtcaccggtaaaatcgatgttcgtgattgggttgcccctgatacacagaaaactgaggagactgccgcatga

SEQ ID NO: 285843 - DNA, 777 bp, Morganella morganii
gtggatctgaagcggtttatgtcggatgcggattttgcattcgatcatggctttattgaaaaagtgatttatattaacctgaaatccagacctgaccgtgatgacgatattctcggtgttctggagaaaatagaaattccttaccgcaaaattatccgcttcgatgctattgaaaagacgccgggatttctgggatgtgcactttctcatgccgcagtgatgaagatgatcgctgaaaatggctgggggccggtattggtcatcgaggatgacagtgatttttattgtgatgatgaacatatccggcaggctaatctctttttatccgcgcttcataaaagagagtggaatgttgcattattgggcggaaattatttcagtgcttttgaacacgaaccggaaaactgtttactcagtctgaaatatgccttttgtgccaacgcttatattgttaatcgtggttatgcggaaaaaatgatgcatgtttttgagaaatcagttcgcctgattactgcaaacggcgaaccggatgaatcaaaaagtattgatgttatctggcatgacctgatggaaaaagataactggtttggtttgtatccgtgtatcgcttatcagacaaaaggattttctgatattcgtggcgggccgacggattatgaattcttatttaataaaccgctgtcagaactaacattttttacccgcgacggcaggatgaaacccagagtaacagaacaggaaacagaaaaagaaacatccgccggagcggatgtttaa

SEQ ID NO: 285844 - DNA, 582 bp, Morganella morganii
atggcagatttacgctatattacaggcggtgcagatggctggcttaatgtcaaaagagaacccgcacaaaatattattgcactccccggtacattaaaagttgatgtgaccagtaataagaatggtcgcgactattttacagcgttagaaggtgttgaaaaagggaaaaacttttctgttaaagagggatatttatcacgggtcagtccgaattaccgatcagccgcgtcactcagtttttctttttcaaatgaaatactggaatatccttacgggaaaatacatgccttcaccgatgatatcaacccaatccccgtgggtattcacaatattcaaatacctgatttcccgcatgatggcggtttgggatataccgtacaatcaccgtttgccaaaaattggttttatttgggaacaggaaatgcagtcccgggtaataatgaccggtatttacatcccggaagaggtactttaggctgtattactgttgaccctaccaaatggacagaattatacgaatatcttattcgttgcaggagcggagatggaaaaactgtcggtcgtgttactgttactcgttaa

SEQ ID NO: 285845 - DNA, 528 bp, Morganella morganii
atggaaaaactgtcggtcgtgttactgttactcgttaatagtctttttattgcacctgccagtgccggtattgatacgcttgttttgaaaaatacggctgatgcccggcaacccggcctggttcttgatggactgaaaaatgctgcgatatcacctgatgatgccgtgctttcgcaatttaatacgccggctgtcaacgcaatggcaaaaaaaaactggtcagctgccggaaaaatgtatggtgaaaagatgctgcgttatccttcacctgacactatcgtgcactatgctgatgcccggttattaatgcttaaagacgtaaaaacccggaacaatgccttaactgagtttaataccgtggttgtaccggatacacttctctattaccgctcggctgaaaccgtggataatcagattaatcagttatccgcagatgaaaaacaacaccttcgcacaaaaatagcctgcattgagacgtttattgcagacaaagaagcaaaaacatttacctgcccgatactccggtag

SEQ ID NO: 285846 - DNA, 129 bp, Morganella morganii
atgtcaacattcagtctgctgcacgttcttgccttttccccgttaacggactccccgctgccactggtgcttaatttcgaaaaccagttatttatgctcacaaagggcctgatcatgctgatgatatag

SEQ ID NO: 285847 - DNA, 153 bp, Morganella morganii
atgaaattgcttgttttatgttactgttattattcattcctgttatcagaaatatatttttttatttttcatattgttattgttttttttaaatatttatttagtgattttgacagaattaacagcaaaaatgaggggttattcatcatttga

SEQ ID NO: 285848 - DNA, 1935 bp, Morganella morganii
atgcgttggtatccgtcccgtatttcaactcgtctgacgatcggtggtattctgctccttgctgtcaccgcggcgattattattattgttatgctgtggcgcgggcagccccgtgtggtggaaattaataccgcattaattgaagaaaccggacatggcctgacctccagagtcagtaccattttatctcacaccggcggaaatactgtcagcctggcgcgcatggcagaggttctgcccaatgatgaggcactgtaccgttatatcccgcctaatctgattgaaagtaacagcctgatcaccggtggcgggatctggccggaaccgggggcattcacgcccggaattgagaaacgcagctttttctgggcacgaaatccggccggggaactggtcttttctgacgagtataataaagacagtaccgataattatcataatgaaagctggtaccaaaatgcacaggacgaatcgacagaacgctgtttatggtcagatgtttacagcgacacggtttccggtgtgaatatggtaacctgcagtgtgccgtataaaacgggcgggaaattttccggtgtcgtcacaacagatatccgcctggataatattgccgccattatgcagcaatacggcaacagcaccggcggctacgcctttgtgacagaccgtcacgggcagctgatttattttcccggtgatgacagtaaaaaatttaaaacctttgatgagctggccgcccaatccggctggctggcaccggtggctgccggcctgaagctgcaggattctgagcaatccgctcccggcagcatccgcattgatcacgacggacagctgaatacatcgtcacaggtgatgctgttcccgatggcagataccggatgggttatcggccttgccacgccggaaagccgggtaaccggtctggcgaacatcatgatgcaggatgtgctggaagtcctgctgccggttatgacgctgttattgctgggctcctggttagcagtccgtcgtctgatcacccgcctgaatgagacatataacgcactcgatgatattgcccgcggagaaggcgacctgacgaagcgtatggcgatagccggtaatgatgaaatatcggatatctcacgggcattcaatctgtttgcggacaaaatatcagcgatgctgctgaccgtacgcagcagcagcgctgttgtcgcggaaaataccgtcagtctggccgataataacaacgagttatcagtccgggtgacacaacaggccgcagccctggagcaaagtgcggcggcaatggaggagctgaatgtcaccgtgcgtcagaacagtgacaacacacacatggccgataaactggcagaaaccaccgcacaaaccgcaagccgctgcggggatatgatgcataatgttatatcaacaatgagcaatgtcagtacgtcatccgggcggatgtttgaaattgtgtcagtcatcgacagtatcgcatttcagaccaatattttggccctgaatgcggcggtagaggctgcgagggcgggtaattcaggccggggttttgccgttgttgcgactgaagtcaggtctctggctcagcgcagtgcccgggcagcccgtgagattaaagttctgattgacgagtctgttcagaatattaaaacaggcagcagccaggtgcatgaatccggtgaaacactgaatcagttggtggaggatgtcctgaaagtcagacagctgatgagtgatctccgggttgcgggagaggaacaaagtaaagggctggctgaggttaccatggcagtcaccgaaatggataccaccgtgcagcagaatgccactttaattgataatgccgtctcgcggacacagcttctgaaaagtgaagcagaacagctcgcacagatggtctccgtttttaaattaccggaaacacactga

SEQ ID NO: 285849 - DNA, 912 bp, Morganella morganii
atgtttgaattttttatgggaacaatgttcccggctaagctaaaaacacaaaaaattacgtcttaccaggaagactgtcgttttacggattccctggaagacagtccttatttattaaaaataaattcagaacaatgtaaaataaaatcgactaactttaattatcgaaaaatcgtctcaattccattgtttttggttgtggtggtgacttccatatttagtgtgtatttttttataaatgaccatattaggacgtatcgacaattctattctgaagttagtatgtatgagagaatatatgctgaaacttctgttattagtgagccagccgaacagtatctcccgttttttaataaagaacctaatttatttgactatttaacgtctttttattcaggggatttttatgtaggggcagactattcaatatatttaacgatactactggcattaggaatcgcttattgcctgtatattacgggtaaatcggttttttggggaccttaccccattttggtcttagacagaaaacgtcaaattttgtatacatgggaaaataacaaagtttatatggcccgctataaagatgccggatatgcaacaccaaataataatttatttataaaattgttttcgtttaatgccgaaaaaaacagactggacacaattttgtttcaaccgaatgcatccgatcacagtagcttatttctcagtgaaaaatatgaaaataatgcatttattagttttattaacacgtatatgcaaaaagggcgtgatgctattacagatcatgatttcgaatgtgagccattgacactgtattttggcagctataatcccccggcggatgctgacagccaaatagcgaatacagtaggtatgctggataaagagacggtttctgatgcgtag

SEQ ID NO: 285850 - DNA, 927 bp, Morganella morganii
atgaataacccgtttacagtatcaaggtttccgtcacaactgaaaacctcacgtttggcggatgcaaattatccttatgatgacccgttaccactgaaggatctggtttttttgcaaagtatcaataaacacgagtgcagaataaaatcatcacaagtcaatagccggatatcgaatacgtttccgatgtttgtggtattgctggtgatgatgttttatacattatttatatttgtcgatggacatagacacaaaaaagctgactttgaaaaaagagtggcacgtgcagagttaaaatataagaattatcaagacctaaataaatttgaccgtgactatctaacggcatatgaaccctatttggggaaagataaagtaagctggttagactattttaaaaattattatattgatgaatactatagtggaactgaatacgataaatatttcattatcggatggttaatattctttccgggaggattatatatcataggttctctgagtttttttgttccgatgacctggctggtagctgaccgaaagcggggcatcctgtattcctatgtggacgggattgtgatggccgtgcggtatgaggatgcgcagtttggttttgcaggcagaatgctggcatttaaattattctatattcatccggaaaccggaaagttaggtacccatatttacagacctaacgtttcgttctataccggttttttaatgagcacggataccgaaaattaccgttttattacgtttttaaataagtatatgaaagagggacgggatgccgtttcatccgtggattatcaggcacgtgatccgctgttttgttttgccaaaaatccgcttccggatgattttgaacaacaggttatacaaattctggcaaagttggataacaggaagcagcgtcatgcgtag

SEQ ID NO: 285851 - DNA, 924 bp, Morganella morganii
atgacccgtttatataccgcaaccaggcatcctgagcagctggagacaacattattaaccggggaaagtcacacctatgatgaccctttagccccccgtaaactggtgtttttggatgctgtgaatgagcagcgttgtgtgattaattcaccgcaacgtaacagtcagttaaccaacacaattcctttttttatcgctatcctgattatggcttgttatacgtcattttattttgttcatgaacatactgcggctaaggcttcaatagaggatatgtctcaatatttatttaaacataatcaggattttaataaattagatgctcttgaacgaaattctatagaaaaatatgaaccattctttgggagagaggatataagttggtgggaatatattaaagcttataattctggtgagttttttaccgggagtcagaatgaaaaatatcttgttataggctggcttatcctcttcccgggggcgttatggttatttgggtatctggctttctttgttcctcctgcacaccttattgccgacagacaacggggtattctgtacagctacggtatgggaaaaatatatgtaacccgttatgaagaggcacaaatcgggttagccggtaaaatgcccgctatcaaactttatggtcttgatcagaaatccggtgagctgaaaacaattctcttccggccgaatgtctcgcattattcggcttttctgaccagtacggacagcgaaaaccaccgttttattacattcctcaatgcctatatgcagcagggacgggatgctgtttcagcctcggattatcaggcgcgtaaaccattcctgtcatttggtaaaaatccgcttcccgacgattttgaacaacaggttacacaaattctggcaaaatgtgatgagagagataatcgtaaatga

SEQ ID NO: 285852 - DNA, 270 bp, Morganella morganii
atgcgtagtcaggtgaatggccgtaagatcattttaaaaaatgacaccaccaataccggaggtaccgttctccggggctcttctgttgcgaaacaaaccgaagggattgcctgtgtgggtgacccggtatattgcccgtcgtgtaaacagacggggacaatcgcggaaggtgacagtttgatgaagataaacggcataccggttgcccttgaaggccataaagtgacatgcggatgttccggagggtgcctgctggttgcagcgggttaa

SEQ ID NO: 285853 - DNA, 927 bp, Morganella morganii
atgagtaacccgtttacagtgtcaagacatccgtcacaactgaaaaccacacgtctggcggataaaagccatcagtatgatgatccgctaccgctgaaagacctggtttttttgcaaagccttaatgagcaggagtgccggattaaatcatcacaagtcaacacccggttatcgaatacttttccgatgtttttggtattgctgggaatgatgttttatactttattcactttcgtcgacggtcatagtgctaacaaattggattttgaaaaaagtgttaaacgtattgagtctaggttgggacattctaaaagtttagggaaatttgatgcaaagcttttggaaatttacagtccttattttggcaaagctgagatcgattggtttgattacttaaaagcttattatattgatgaatactatagtggtactgaatatgacaaatattatattatcggatggctgatcttcttcctcggtggattatatatcctgggttcactaaatttctttgttccgatgacctggctggttgctgaccgaaagcggggcattttgtattcttacgtggacggaattgtgacagcggtgcggtatgaggatgctcaatttggttatgcgggcaggatgctggcgtttaaattattttatatccatccggaaaccggaaaattaggaacacatatttaccggcccaatatttctcactataccggcttccttctgagcagtgatacggaaaatcaccgttttatcaccttcttaaatgcctatatgacagagggccgtgatgccgtctcaccggcagattatcagacacgtaacccactgttctgttttgcgaaaaacccgttaccggagaactttgaacaacaggttacgcagattctggcaaagctggataacaggaagcaacgtcatgcgtag

SEQ ID NO: 285854 - DNA, 3288 bp, Morganella morganii
atgactgaacatgtcagttctgatgttttaaccccggaagagaaacacttccgtaaaatggtggaggcggttaatcaggccgcaccgcgcaatttaccggcagatgcggtgatttgcccgtgtgagaatgaacaccgtccggtctatccggtgcgttatgcctattcgaatttattcggcgataaaactgccaaagcggcgatgccgccaccggtaaagaaactgctggagctctgcccggcacaaccggacattgaaatatattcccctgaaatgtgtactgttgaagatacgggagggtacagcgcacgtctgctgcgttcaggatgggtttatgtctttgaagagggagaatacccgaccaggacagatacagagggacaactactgatttttaaacacacggttacctatgcacataacgggcgtgtttatgatgagacggataattcagaagaagcgggaaaggcggtaaaaggcggagacgctgatgaatattttataccacatgccagaatatataacgcagagtctcagactactgagcttaaagaacaatttccgtatttaccttacctgccgataaaaaaagatgttattaccgcacggttctttttcagtgatatacctttatcggattatacattaaataaaatgattactgacccggagttccgtgcatcctttatgcaggaaattaatctggtgaattttgacgataatccttacgcacttgaattgcgggaagagcatatcgattatctggtggaggaatataaggatgaagcacaacgatttgtttcatttgtggaacaggcaaaaaatacaggtgcagatttaccggaagggagttatttctcagaaataaccaatacccctgatgtgtcaaaaggctcagaatcgctgcttgcacaggtcaaagcctcactggatgagaatgagaaaagcagcctggtgatattacatgacccggtgggttatcagaaagatatacttgcactgtattcttttgtgacagcggcgtacgctgcatttcagcatcactggagttaccctaatcaggtcggtcatcatcttctggcgataaaaacacatctggaccatcccgacattgtacatacggggaacggataccggctgaacgaacaatttttagataacatagatatgcagggctggcaaacctactggcctcagattgaaaaggggtatgaaaaatttgagcagcttcagcaaaatatcgttcggttgtatgcggattttttaacaaatcatgaaatgataaataaagcaggtggaattaaaaattatattgatcatgtttttttaattcaggaacaatatgagacaggggatttccggcaccgtgagttttttgaggaagtcatacggtacagtacatttcatgagctgttattatcgccgctaaacagttcaaaagcaggattacagacattaaacctcatattttcagttgataaaccggaaggtgagatttggaaagcgatatccgacattatgatcactttgatcagtgaggaaaaactgagggatggcggggcctattatttcaaagaccatattcttccttcgctacagtcgacacttctgatttgctgggatgcgttgggatatgcttttgcagtaacccatgagcaattaaaaaaaacagcgggaaatatacgtaatatcacacaggcagggattgatcatctggcaaaaaaaatactgcctgcatttttagatgtttttggtatccgggtagatatgaagacgcttcagccaatgtccggaaagaaatttatgagttggatggattcattaaacggaaagacagcaccggttaaaaacgctaccggccagatgagaaaattactggattgggatacagcactaagaaatccgaaagtaacgaatgcgattaatactattcagtatcactacacatcaacaggactgcctgttgataaagaaacatttaaaaatacgttgagtttaagtgcatcactttattcaatgctgacgggtatgctcgggttatatacagctaaaatgacagagtatgataaaaatgatccgctgaatactggtgcggtaaatatttttcgcatgcaaatgatcgtttattttgtcagtacagcagaaggggttattgcaacccgtcaggcggcaggtgtttatatgaatcgggtcacttacccgccgctcagacacattctgatgaaaatccgtttaccggaagttacatcagggctgggcaaactggtcgttaaaaatattggctatgttgttgcattactgacgatagcattaccgataaccgaaggtatagcagaactggataaaaaaaatcacgtggctgcaggagcaaaatttacagaatctgcggcaacacttgcactgagtattggtgtggcgggggtcgggaaggctaacgccattatcaggggagcagagatgctcagcaccaaccaggtaattcgatttgtgactatttatgcgtggaaaattgtccttggtgccgttttagttcttgtaggtagcgctatagtatattatttgttcaaaaccgataattttgaagagttgctgaaaaattgcttctggggaaatggaactaaatattttgctggaggatactccaccaaaaataacaacaatattgataggccaaagaaaaaagaaactcaacttgaaaagtacattggaaactttgcacaatacacggaatattaccaaatggaattgcaggagtttttaaatttattttttacgccacaaatgaaaattacggctaagcctaaaattacagcgcagctgaaaaaggaaatagataaagccccgtatatgattcattatcaattcagattggctaattttcagtgtggtctctcggatattgagtatcagctggtaaaaataaagccgacagtaatgtatgcatctcagatgcccgtagagcatcttcctccggaaccggatattattcaccggcgtaatggatataagtatattgcatccgataatcacaccttcagcctggcatttgaacgggcgctcacggcagcacttcagaacacgttactgcaggatggtgaatttaagtttagttttgaggtggatgcgggaatgcacaccagtgacccgttaaaaaataattctgttccgtctcttttttggtattatctgattgaccgtattaaaggcgatattgcaccactgcgttacagaaacgggaatttacagaacaaaatttatggtcttattgatgataagggaatggaatga

SEQ ID NO: 285855 - DNA, 1227 bp, Morganella morganii
atgatgccggtctctcaggctgttttccgggcgtattgggtggcgcagtgccgctatacccgggatgacatgcagttcagaggggtaatgaccgtggcgggggcggacagggatcaggccatccgcaatatgcgccggtatttttcagcgcagccggaacactacagtgccgctcagtacgataccctggagccgctgacagcgtatgccggagagagtcagcagccggagttaccgttactgcggcaggttatccgccagcatgatgagggaatgcccgccgtattaaccggtgaacataatctgacctgtccgttgccgtcggaaaacggtgatattcattatcagccgggcccgccggggtttatcccggggatcccgctttttgcggtgatcgacagcggtgaatatcaccgtcagaccggacagcaccttgttccggtgctgctcggcactcacctgccgtggcagtcgctgtatcagggggaaacgcaggaaagtcttgccgaccgtgcgccgtatctggtgcaaatccgtgcggatcgtgcgggaaaacagtttctggctcattgtcagaacctgccggataaagccgccgccgggttttttatcagcagcagcaaaccctttccggaaatgcaccggcagttacgcaggatgacgtatctgcgtaatcaggtcaccggcagctggagttttttccggttttatgatgtccgccattttattccctttgctgaatcactgacgcacgggcaactgctcagtgtcgccgggggcgtgacggcttttgcggggtacagcccggcatatccggagggggtgaccatcaccttttctgccggtgttaccggtacgggacggcgcgaagcgctgtttatcaatgagcggctttacggtcattatgcccggctgaccctgatgagtaccctggcaaaaacccggcagctgattgagcagcacggtgccgggtccgcgccggaacaggacggcggtgaaaccgtctccggcagttatcttatccgtgaagccaacctgagctttctggcgggagtcacccggatgcaggcgttaatgtaccggttatccgcccgttatctgtgccgtcacgataccgcgctctgggaacgtgcctgtgagcatgcacggccttatcagcacaaccaggtgttatttaattatcattgttatgccttttgtatacaggcgcagggagtccccgtatga

SEQ ID NO: 285856 - DNA, 2037 bp, Morganella morganii
gtggttccttctctttctgatctgctgccgggcaattccggactggtctttacctgtaaaatcgggcggctgccggaaaacaccttccgggtgaccgcgttcaccctggatgaaacgctttctgccttattttccttatccgtttctgcagtcagtctgctgccgtcagtcgattttcaggcctgtctcggttctgccgcctcactgacagtcacccgcaacggcgttaaggtccgtaccgtgcagggattgctggcctccgccgaacagggtaatactgacggcaacaaaacctggtatcagtttatgatccgcccggaaatgtggatcatgacgctcaatcaggacagccgcattttccgccagcaatccgtaccggaagtcctcgccaccctgctgaatgaggcgcatgtcaaaaatgacctgaaattttatgacggcgcactgcacggtaagcgcgattacatcacccagaagcgggaatccgcttatgatttctggtgtcgtcttgcttttgaggaagggattaacttctggtccgaggaaggcccgaaactgttttacagtgacagtcatctcggcatgacagcgggtattcacctgacctacaacccgcaggcggatacagacacccgcgacagcacggcattctcctggcgctatgctgaacagttatgcggtgatattcagatccacaaagattacaacccgcagaatccctcctatccccttgaacatcagctgaccggggatgttcaccggcaacacaccacctttgaaagctacggccgttttaagcaggatgagcagggcggttactttacgatgctgcgctatgagcaatcccagaatgaacgccagaccggcagtgcgggcaccaactgctttgcgctgaggccgggtaaactctttaccctgaaaaaccacccgtcagcagccatgaatcagtcgtggcaggtgatcagtgtcagtcaccggggtgtgcagccgctggcagacaacagcggcggtgaggggaccaccttcagtaataccgtgcagtttatcccgggcgctcaggaatggcgtccgccgttccgctataaaccgaccgctgacggtaacgagctggcaacggtcgtcgggccaccgggggaggaaatctataccaacgctgatggcgctgtcacggtccgttttcactgggaccggcgcggcaggcctgatcacagcgcctcctgctgggtgcgggtggcccacggctggaacggggacggtttcgggtttatgtcgatcccgcgtatcgggcaggaagtgattatttcttaccttaacggggatatcgattgcccgatcatcaccggctgcacgtataacgggcgcaacagtccgccgctgaccctgccggtcgagaaaacccgcaccacgttccgtaccaaaacccataagggggagggatttaacgagctgcggtttgaggataaagacgggagtgaagagatttacctccatgcccagcgggataataacatccatattaaccacaacaaaacccagcatatcggacatgatgaagtgcataccgtggtgaatgatcgtaagcacaaggtatgtcatgacgaatttattcatgtcacgaatgagcagacgctgaacatcggtgtgaatcagtttgagcagataggtaaagaccgtatcacccggattgataacagctggaaagaagtgatccgggccgggcattttcaggaagtgggtgaaaacaaacagagtgttgtgcagggcgattatacattaaccgccggaggcggcattcacacgcacacccgggtgcatacgctgcaggctggcgacactgttcttatcagaggaaaagccggttctattcagctggacgggcagggcgtgacgatcaccggaaatattaccctgaaaggcccggtgtcaatcgccgcaggtgcgccgggaacggttgttttaccggaagcggcggtgaatgaaggactgccgctggcggaagactgccgggcaaaagccatgaagaaagggacgtcatga

SEQ ID NO: 285857 - DNA, 1143 bp, Morganella morganii
atgaaagttgcccatctgattaacctatccggttttggtggtgtcgaaaaacgcttttctatgtttatagagaatagtcagtttgataacacaattatatgctgtagtaacagaattgatgacaaaatatctgacttatttgatgataaaaaaattaccttcgctaacagaatttttaacaacgtcaatataaaatacccgactgccttacgaaaaaaagtccttattgccaggataaacacgttacagcctgatatcttagtcatatgggatttcatgccacgtatagacctgagtgaaataaaatgtaagaaaatatattatgattgcggatgtgggtggcgatatccgcaaaataaaaaaacagatgactttttcaaaaatatcgacagcgttatatccaacagcaacgcgtctaaaagaatcatccagttgcgatataatttcaataaggatatcaacgttgttctcaataggctgaatatgccgatatcaccggaaccgagagaaatatctgatgaaaaaattgttctcgggaccgcatcacgactggttgagatcaaaggtatcgggatatccatactgacggtaaaagaactgttagataatggcgttaatgcattcctgattattgctggtgccggtgacaacaggaaagaacttgagaagctcacagaacgtctttcactacaaaaaaatgtcatgttcatgggttatcagtctgatatgactgatttttatgatgaaatcgatatatacctcagtacgccggtgactgaagcttttggcctttcctgcatcgaagcaatgtctcatgggatccctgttatatatccattgattgacgggcaaccggaagctattaaaaatgaatatagcggtatagccataaaaccgactctcttaccggatgagtataaagaaaaaacaaatatcaatattgactttccctatgatgtctatgatccgactgatgataaattaacatcaattaaacttatatcaccttctgattgtatggatgcgattcaccatatcattaataactatcatgaactgagtaaaaacgcccttatatggtcagaaaatacgatggattttcctttttttattaatgagtttgaatcagcaatcgccggttga

SEQ ID NO: 285858 - DNA, 294 bp, Morganella morganii
gtgaaagatataaattttattgtaggtcagaatatccgcagcttaagacaccgtaacggtatgacaacgaaagcattagcaaatcagctgggaatatccccgcaacagatatcaaggtatgagcggggaatcaataaaatagatgccagtattgtatttaagataataaatatatttggtgttccttatgaggctttattcccggaaccggaaactgaggatttttctcagacaaaagcatcacttatgtatatggatccaatgctattccataatgagtatcagtcttattag

SEQ ID NO: 285859 - DNA, 1305 bp, Morganella morganii
atgctgcgaatcactccgtcattcccctcaccggtttctgtctgtacaccggatacgcctcatcagcccgcagctgaaacaaaaaaagaacgtccttttctggtcaccggccaggcagacattcttcaccgcagcggtattgctgaaaagcatctcacaccacttctgactttcgcagaaaaagaaaaactggttatcagtttccggccggttgaacgcgccgcaacaggtcttatcaatgccggttatccgaccaaaagttttcatatcaaaggtaaaagcgctaatctcgggccaatggcggggtttattccggttgaacagcatcttagcaagctgggtaataaaccgggtgataataccggtaaaatcagccggatgaatgaagagatacagcaatgtatcaggggaaaatacgccgaacccggcaatttgattatcaccacacaacgtatcagagaattgattgagatgaatctgatcagtgaatgccagccaccactcagccatgatgagacaggaaaaatcacttatgcgttatccgtattttcgggtagccgggaacagatcacccgttatatagccaaacctgccggtgatgatttgtacaccatttttccggcaaacagtgaatgtccggtacaagtgttatattctccggaggttaacaagccactgaccgcagattatgacctgatgattgtttcacaccggatggaagatcacggcatacaggatacagtcagaataaaaagcatcagtccggaagaacacatacgccagcgtgcctatctgctttcctctgataccacgcaaaaatctttctcccgccgtgccacagtagcagaaggactgaaaaaaccggtttcattgcccgcgaaagagattttacgccgggcatctgctcaggatgctatccgcaaagagttactggcactggcacatccgggttatggcaacagttcacagcgtattgttgatctgataccggcgatcaattctgccctgaactgtaaacccggctgtgacgttgttcatcacggcatggatgcggcaaacccgtattctgaactggatgataattttcccgccactttctttttgccggaacaaatggatgggcttcctcaggtcgtcacagcggaaaataaggacgggctgaaacagcttttacacatattgcatcagcatggctattatattctgtttaatccgcgctgggattctcacttaacctcaccacgccgcgaacatttcgaagccacccgcaatatctttgaaagtaaaaaattcagcacactgtga

SEQ ID NO: 285860 - DNA, 879 bp, Morganella morganii
atgaataacataaatccctggggtgatgtggttttgccttcacgaccggcataccggttttccgccatgtggcttaccctgctttttgccctgattaatatcgtggtctggttctggcagctgcactatgcctcaccactgccggagcaggagtataacctgctgctggcgggtgcgaatgtgtatcagttgtcactgaccggcgactggtggcgttatctgaccagcatgacactgcatgctgaccctgtgcatctggtcatcaatactctcgcgcttatcgtcatcggtattaactgtgaagccatggccggtaaaatacggatgctgtttatctatctggtcagcggtattgccgcctcttttgtcagcgccacatggttgtggtctcagcgtggcggattcagtgcgtatgaaattccgatcaccgtcagtgtcggcgcttccggtgccattatggggatcgccggtgccgtcatgatgtacctgataagggcgcggacagatccttcggtttctgttgctgaccgtctgcgttacaaaaatctgctgataaccatcatttcactgctcctgctgacattattaagttcactgcacaataatgatgataccgccaccgataatgtggcacacatcagcggctttatctgcggcgctacgatgggatggctttacgctgccgcctccgggatacacaaaacagggatggatcgctggtcatgcctgatttccgccgtttcagcagggctgattatcctgctgctgtccgccggttccggcagtcatgaccggcgtctgatgcttgaacgggaaatgatcctcgaagagatcggtatcatggttaacgcacaggcagaaaaacaattaaatgattga

SEQ ID NO: 285861 - DNA, 189 bp, Morganella morganii
atgaaagaattaaatcaggaacaattattatctgtttcaggtgcagggtttatctctgcaggaatgattttcgccggtattgcatttgatgtcagcgctgcaatgatgtcaaatatcacccggaacagcgaagaaattgtttttgctgaacataaggatatttcccgtctccgttatgaggttatataa

SEQ ID NO: 285862 - DNA, 252 bp, Morganella morganii
atgatgaaaaataaccggtggtcattcctgatgagaaagaagaatattatgcagaaggcaatcaatgatctgaaagatatacgattgtggtctatgaatatcagcatgatactgacatctctggcagtaacgaactcgtcactgcgcattgtcaggccggataatgtgatgaccgatgtctttcttatccctgttatttatccggggttttatattctgataaaaaagatgctgtattttatagttgaataa

SEQ ID NO: 285863 - DNA, 705 bp, Morganella morganii
atgaaatcatatctgttattaattgtgtattttatcagtgccttttctttggctgacggtatcagtgcgaacagtacacggtatatttatccggaaggtgcttacgatattacggcacggataaataatgaatccgccactgcggcatttgttcagtactggcttgacccgggagattccgacgctcttcccgcgaacctgccggtcacgccatttgaactgaccccgccggtttcacgtattaatccgggagcgatacaaaatttacgtatacggctgacagataaaagcagtatgccgtctgacagggaaagtctgtggtggctgaatgttctggatattccgccggtcagtaaaacggcttcaccggaggcaaaagattccatacaacttgccgtccgttcacggtttaaagtcttttaccgccctgccggattaagtgacagaaatgccgccacacagcaggttacatttcagtccggcagtcattcaatacgggtcaataataattcgccgtaccacattaccattacggaaataacgctggcggataaaaaacaaatactgcataaatcctttatgctgacaccgaaaagccgttcggaaatttctgtaaaaagagccgttacacgcggtgaccatctgattgtcagtaatatcaatgattatggcagtaacgtgacctttaccgccacggcagaataa

SEQ ID NO: 285864 - DNA, 738 bp, Morganella morganii
atgtataaaaaattaatatttctgatgttattacccggtttcagtctctgtgcttactcagaaagtcagtggaataacaacattactgtgtatgaatacaacccaatagaactacgctatgatccggtattaccagaatatgccccctatccaaaaaatcaaaatgagctgaccttgctgattaatagagcaaaaagtggtaatttaacaagtcgttatacgttattctccttttattataataactgctaccacctgcagcaattaagtggtaacacgggcatttcagaacattgtaataccgctgtttaccatctggaagcgttactctcttcagatcctgaaaacccacttgctttattccactatggttttattttatcccatggttacgggaaagaaaaagatatgaagaacgctataacttactatgaaaaagcgtgtcacattggcagaaacagattgatttctgcctgtgattttgtattttcagcatttttaaatggtgaggaaaacatagataaagatatcgataaagcaagagaacatgatgccaccgtcgctggctacggaaataaaaaatatcagaaatatattgataattgggattacatcctattcagaataaatacagaaaaggaagtgaataattgtatagaatccgggggaaataccgctgagtgcataaagtcaggaaataataagatgaaaaaatataatgtaaagtatgaaaaataa

SEQ ID NO: 285865 - DNA, 1929 bp, Morganella morganii
atgaaaaaaaaggttattgcaatccccgcactgttggttattgcggcgggaatgacatactggtttttcgggtatgaagaaaaattaccggagccgtcacaggaaaccctggactatataacaaaagagtttaacgacctgacgccggaagaagcagtaaaaaaaatacaggcacagaaggataactttgattttttcctggaaataagaggaaatgaaactctttacagtaaacggaaaactatttcgcctgaaaaggaagaatacaaaaatgcattttctgttctcacccctgaggaatataaaaataaattcaataaagcgctcaaggaaatagtatttattcaggatatagaacatgggtattctgttcttcattttattattccgattatgacgacagaaaaacaacttgtggttaaaattaaaaaaatcacctacatggatggcagtgaagaaataaaagacagaaaagcagataataagatacgattaaatacacagaaaaccataaaaagtattgatgtcagtgttacataccgctatatcagtgaccttggccattatcatctcacgccggacaatccggagatttcacagaatggttataaattaacgctggcagaaaaagataaaaactatctgaaatatacactggatggtgaattgtatattgtcagcgaagatgctgctgataaaaatggtaaaatattatcatcatcagcctgttcccgtggcaaaatcggctatgccgacaaaatggagcgttttgttaatagttcagttaaagctgctgaaaaatacggcaagaacaaagatgaattaataaaaagagttgccggttattatgagcactttgaacaggaaaccgatgaaccggcaacttatctggttgaatgtacctaccacggtacgccggaatcggtgaccgtatatactgcaaataagcgggagcgtgaagaacaaaatattacactgacacctctttataccagtctctacccggttattgaagatgagaaaacacaaaccttttatatcatcgatcaaaacggtaatgagataattaatcatggcaaggagggcgtgtacagtgtggagaacggttatttctttacccgttatactgaaaataaaaaagatgaaaatgacgacgaagaatatgaatcgacctactatcacattcataaactggatacggtaaataaaaaactgaattatattatgagagttgatcgtgtatacagtctatctgatgatgcatttgttgtctctgatgataatggtatccggatatttaatattcattatgctgaaccgatagccatatccggtaaaaatcttgaagcagatatcgttaaccgtaatgatggtaactttgattttttctattataaagacagcaaaggaacgcatatcgtaaatgataaaggtgaggaaattcttcctgtgtctgattaccggctggaaaaaggcggagacaatacaataaaaatcagaaacagtatctttacggatgatatagcaacagaagataaaagaatctattttatcaataaagatgcaacaatccgcctgacattaaaaggctatgataaagccggtgaaatcagtaatgagatgataaagacagagaaagatgatttatacggatttgctgatgtaaaaggaaatgaagtggttgctccgggttatcaggaagcccgtgattttgataacgattatgctctggtgagaaaagatgaacagtggggcgtgattaataagcagggcgacgtggttattccgtttaaatacagtcatcataattccatgtcatccatgaacggacggatatcttacagtattgatgataagcattacaccatgcaggaattactggacgcaaacggtgtgaaaagagacaaaataacagcagcagaacattaa

SEQ ID NO: 285866 - DNA, 123 bp, Morganella morganii
atgacaccgggttaccatacccggatgaataaggaaggaacggtgctgaatcatagtgataatattcagcaccgcaagtacctgtttatttcagtgtatacatggtcagtactgtataagtga

SEQ ID NO: 285867 - DNA, 771 bp, Morganella morganii
gtgaaaagaatatcccatgctccggaatatcagccattacatgccggaaattgtactcagaatcaacctgttttcagccatctgaaagacaacctcgcttccgttattaatagtttcaaaacattctcaaccggatgtcatacacagaaagatcataatatccgcaaagtatgtgaacgattaattgcgctgacctgcatgacccccgaatgttatctgacacccatactagaaaagtgcgctgcggaactcggctttgtattaccgaatcagaccgaaccagtttcagccgaaaacgggcaggcaacggcatcaatcggtaaattatctgtattatccacctcatctgtctccgcgcaggcagcatataatatgctcagacaacaacaggataaatatctgtcagcaggatacgaatgctcacaggagagtgcggataccatacagatggtgcttgagatggcagaacagggcttttgtctggccagagatcattcttcccgttatggggacaactatattgttaccacaaaaccggcagaaaacacgccaaataaagagatctgcattacaccggaaaaacgtcgtctgcttcacagcgcagcatatcggatgaacctggcactgacccgtcagctcatggctgcgcattataaaaatgaaagtatcatgagtaataccgggggttctgcattgagcggagagaatttatcaaacctttcgcgtcagcttttctatcctgattttaataatatatctatcgcgacataa

SEQ ID NO: 285868 - DNA, 411 bp, Morganella morganii
atgagtgaatctttgaagccatttaataatatccgtactcttcgcgctcaggcgagagaatgcagcttagaaatcttagaagaaatgcttgagaagctcactgcggttgttgaagaacgccgttcagaggaatctcaggctcaggcagaaaaggaagagcgtacccgcaaattagaagaagtccgtcagttaattctgaagcagggtatcaatccggaagaattaattcagtctatggcaaccggcaaagtggcaagcaaatccaagcgtgcccagcgccctgccaaatacgaatatatcgatgaaaacggtgaaaataaaacctggaccggccagggtcgtacaccggctgttatcaaacaagctatcgataacgaaggtaaatcactgaacgatttcttaatcaagtaa

SEQ ID NO: 285869 - DNA, 642 bp, Morganella morganii
atgaaaaagctttctgcagtgtgtttagcactggcaacggttttaccgtcagtttcaatggcacaccaggccggtgattttatcattcgtggtggtaccgcgactgtacgtccgaatacaggctctgataatgttctgggttttgccggctcttttgaagcaaataacaatacgcagctgggtctgacctttacttatatggcaaccgataatatcggtattgaattattggctgcgactccgtttgaacacaaagtttcactgccgtcatccctgggtgaaatcgcatcagttaaagatctgccgccaaccttaatggctcagtattatttccgtactccggaagataaactgcgtccgtatttaggtgtgggtgtgaactataccttcttctttgatgaagggtttaacggtaccggcagtggcgcaggcttacgtgatctgagtttaggtgattcctggggctttgcggcacaggctggtctggattatcagttagatgaccactggctgctgaatgcgtcagtctggtggatgaacatcgaaacagatgtggacttcaaagcaggtaatgacagttactcttataaaacccgtcttgacccgtttgtctttatgtttggtgcgggctacaaattctga

SEQ ID NO: 285870 - DNA, 282 bp, Morganella morganii
atgaaaaaaatagggttattaatttcacttcttatattatctgccccggcgcttgctgaatgtgatttcaaaaaagcggcccgtaacaaaatgcttgatcaaaaaatcggaatttcgggtagctgtgacacgaaaaaagccgttaaaactcagacaacacatcaaatcgatgatgcactgaatatcgattcaaaaaaaatcaaaaatgacagtctggaaaaaaaagagactattgagaaaaaagccaatacaaccaaaaaggtaatcagcattgtaaaatga

SEQ ID NO: 285871 - DNA, 216 bp, Morganella morganii
atgagaaataccgggcggcgctgtctgaccgcccggtataaggaaaacagccttgtttatcacactgccatcctggcgggttttaacgacaatacagtctgtataaacactatgatagcctgtatcgtgttaatcaatgaaactcacctccagcgtggactcgtgataagagacggcgaaccgggtttgaacgtttttttctgtccggcaaaatga

SEQ ID NO: 285872 - DNA, 1608 bp, Morganella morganii
atgaaaaagtcgttagttgctgttggcgttattgttgcgttaggcgccgcatggggtgtggcttcatggcaaaccggtaaggaaattgaagcaaaccttgatgaatatatcgccaaagcgaacaaagcaatcaaggataaataccctgatattcctgttacgctgactgccaaagatttttcacgcggtattttcagttctgatgtcaaactgatcatcaaagaaacgaaaaaaagcggtgatactggcggcgaagaagaagaactggtgatcctcaataccatcgatcacggcccgttcccgttatctcagttcaagagcctggtcttctcgccaaatctggcgtcagtccactctgagctggaaaataataaactcaccaaacgaggctttgatatcaccggcggtaaatcccctgttacaacggatacccgtatcagctacgaccagaatttcgatgttgatcttgctgtcagcaaaatcaactataaggaagacggtgaagatctggcattctccggtgcggatgtgaacgtcaaattcgataaagaattcaaaaatgtcaaaggtaaaggcagcagcaatgaactgacttaccgtaaaggcgatcgcgaaagcatcgtgatgaaaggtctgtcttttgacagcgatgttgccaaatccggtgacagctacttctatctgggtgaccagaatctgagcctgaaagagttagcggttgttaagtacagcgataccgtttctctgaaagatctgaaactaaacggcacatccggcagcaaagataacaaactgactgcagatattgattacagcctgggttcaatgagctaccgtgatgccaatctcggtgctatcagcctgaaaggttctctgaaagatctggatgccacttccgcaaatacactgatggcatccctggaagagtacaccaagctgtctgaatctatgtacaccgaagatttcgacgatgcgaaaatggaagcactggatgaaaaaatgaaatccaatgcactgagtctgttcaaatacagcccgtcattcgctatcgcgcccctgagctggaaaaacagcggcggtgaatcaaaagttaacctgaacatgaccttcaatgcactgaatgaagagagctttaaagcgctggaacacgcaggcagctttgataaagttctgccggttctggtgaaagagttcggtttcaatatggatctgtccaaaccgatgctggctgatctcgttgcatctgccatgcagtctcagggtatgggcgcgaaagaagccaaagaacagagtgagcagggtgttactcagatggccagcatgggtgccatgatggaagtcgtgaaagtgaccgataaagcaatcaccatggatctgaaatacagcaacaacaacatcgatttcaacggtaagaaatataccgttgcagaattcctggaaaaatatgaccagtacggcgtactgagtgatgacagcagtgacgacgaaagttacgaggaagaaacaatcgaaatggatcctaacggtgacgcagtgacgttcggtgaagaagcagtgactttcggtgaagagccggctgctgatactgcggcacctgctgcgcagtaa

SEQ ID NO: 285873 - DNA, 192 bp, Morganella morganii
atggtgttcggcgcggacacggacatgggccgtcagcggacagagcaaatgttatcgcactatttcgggctgaaaaccattatccggctgaatggtatccgtaatcatgatattactgatgcacatattgattttttatgcacggtgcataatttctttactaccgacggacagacacatgacaccgattaa

SEQ ID NO: 285874 - DNA, 150 bp, Morganella morganii
atgaaaagtatttatgatcattatatcgccttcagtgaattccggatcccgggtgcgggaaccacttttgataatttcacggcaatcaccggaaaaaaaccgatgtccgtgaccgattttatccgcaaataccgccaccatttccgctga

SEQ ID NO: 285875 - DNA, 1263 bp, Morganella morganii
atgaaaaaagtctgtttttttgatctgccttttatccggcaggataacaacgcgaaaccggaacataattaccgccggatactggcgggtgataaggtgttttatacctttgtctctcagttcagtgacaaaacggtgctgaaaaaactccgcgacggtgaccggatctttatcggtgcccgtccgctggctgacggcagttactggctgcactggctggtatcgccggaacgcggtaatctggaaccggtaaccggaaccggtaatgtgcgtaacctgaaaaaactggcgcttgccctggtaatggttattttttcttcctggttgttcttcacgcaactgacgaatgtgattgccggactggtgctgatgcttgttttcggcggcggattgtggatgctggcatcgtcagttcaggctctgctggtgaccaacagcagaaccatgaagcagcttctgaacgggctggcacaggtgaaagcggggaataccgctatctgttctcaggctgaatatctgctgcccggcacagcggaaagcacacggcaccggcggacgggggatgacggacgtttcaatgaactggattcggtccgtcctgaagactaccgtcatgcggaaaaactgacactgaccggtgtgcagggaccggttaccgacctccgctcagtccgcgattttaccggcagtggtaaatcacggcgtgattatattgagtattattttttatgtaacggcatcccgtttacactgcgtaattactacagttcaatgacagaggacatcaatccgctgtttttccgcagccatccgtttttcattgccggggaagacgctgtaaacctgatcgtcaatcagcagaaaggcgtgattaccggtctctacaatgaacgtgatcacagtgcttacctgaagccggacggtatggcggtatcctcgcagcaagtgaaaatgatgtataaagtgttcaccggcatttttctggtgatgatgctgatggtgatgatttttatattccatgatttgtggagtataaagggcatgccggataaatgggactggctgcatgcggcaaaatcgctgggtggtatggcactgatgtttcttatgatgatcagcggcatactactgctgatggaaatggtgacgctgctggtgcggaaaaaatcagcaggtgcagcccgttttgtctttgtcaggcagatgctgatacaactcaggatccggaacggcaaaaatactgttgtacaggaaattaactga

SEQ ID NO: 285876 - DNA, 1308 bp, Morganella morganii
atgtttgccgacggacgcccccggattaccctgctggctgtgatattcataacgtcactgatgctgacgttttcagattcgtttttttccgcaccggacagaaaacgcacccgcagttatcagccggaaaaacaaaccgtaaaattatcctcactggtcatcagcgcttttcagaacggcgtgatgataaccggtgtcagagatgccatacgggtcgatttggagagctgcgaccgggaaacccgcacgtgccgccatagtaaaaatgtgggttttgacccggcaaaggacacggatataccactgctgaatctgacgatttctccggataaaaacgtgatcagcgattatctggaaaaacagacctatgaactgagacgcagtgaagtctacggcagcaggccactggtgccggtaacctatattatgacagagcaggacggggatttacgcgtcagcgccatgtttatggggcaggcagaaagccaggcctgtgataagcagggtcagtgcctgatcctgtttcaggattacggctcgtataaaaagtatgttttctattccggggacggtggtcagaactggcgctggttatcgcagtggcagatgccggaagtcgcgggtgatgcaaaaattatcgccgttaccgcaccgggcagcggactgatggttcagaacaacacactgtatcagatgcgtgattacggacaaaactggcgtttgttattcagtatgggtcaccgcaaaaaaagaaccactgatcgttacgggcaccggtatgtcagcctgaaaagcatttactggcactataacggtaacggacaggtcacggcatggatggcggatgaaagaaacgacccggaaaatgttgctctggtctgctttaatacccggacactgaaaacggagtctgatctgcttatcccgggggagataggggcactggacagtacaaccggcggtgaattttatttcacactgacagaaaaagcgcgcaggcgtcagagtgtgaatcatctgaactgtaacggcgattattcaccggtactggagaccggcggcagttatatttccggtttgtatgccggcactgatttactgatagctgagttacattcagacgcccgggtatctgatgatggcgggcagaactggaataccgcagcggcactcacgaaagcatacggggaaaccgtgttatttgataaatggcataaccgcctgttttattttcctgacggtaactacagcagtaccccgaaaggaaaccgtgacggactggagtatgcaacctcatctgtgcagtaa

SEQ ID NO: 285877 - DNA, 504 bp, Morganella morganii
atggataggaacagaacagggaatattgtaatgaaaaatggttttatttttgtactttcatgtctgtttatcgcaggatgcaaaccggatacgttgtcagaacagtctcaaaaaatccatcagtttgacggggtttatgtatgcaatataagcaagtcatttaatcaaatagcaattgagcagaaaaataaacacgtttttccgtctgttatggtgaaaactacgattacggttaaagacggagttatgacaattcatggcatgaaatcaggtgattacgtttctcacaaaatgtcggtcactgagccaccggttaccgacaacggtcgcgtactgcattcagaagtggaacttcgttataaagatggaactatacaggaggacttcacaaagaaatatggtattgcatcagtatctgaaggtgatccttttgataaaggatttatgcagcaactcagtagttgcaggctgtcgccggatggggtgatcccaagccaaagataa

SEQ ID NO: 285878 - DNA, 333 bp, Morganella morganii
atgaaaatagtaataatatttttattcgtcttaatagtaaccggatgtgattcacatgaaaaaatttatggccactgggaaaatatagatgccagatgccgtagtttgtgttctttttctatagaaaagcacgataacaaatactcagattcagtcattatctttgataaaccacaaccgccatacgcaaaaagtaaaccttttattcgtgataaaaaacataaaaacagatatctggcaaaaggtgagaacggtgatttcttatttgagctttataaagaccgtctctatggtgctgataattctatatatgaaaaaacaaatcccaaatag

SEQ ID NO: 285879 - DNA, 477 bp, Morganella morganii
atggcacatccgatttatctgacgttaaccggtaaaattcagggactgctttctgcgggatgttcatccgttgattcaataggaaaccgttatcaggccggacatgaagatgagatcctggtacttaatttaaacacaggagcatcccgggcgcaaaatgccacctacaaagaactgatattcactaaaccgatggataaagcctttcccctgctttactcctgcgtcgataacaacgaaatactggaagcgactttcaaatgctaccggacaagccagcacggacaacttgaagtctacgccacatataaactgaccggcgcatcactggttagcgttgatgatgttaacgctaacttagtcagtgaaggcagcgaagacccttatcaagtcgtcagaatgagataccagtccatttcaagggaacacctgaaagccagcacctcaacatacagcattaacagcgaactgatttaa

SEQ ID NO: 285880 - DNA, 882 bp, Morganella morganii
atgggatataaatacgacccggtgctgaaaacaatcattccggaagataagccgtatagttttgagcaacgaccggattatgatgaatttatccatcaggcgaaccggcttaaaatagaatcaacgattggtgatgatacggatgacgagaatgtttccgcactgattacggttgaggaagcggagtatgttttaaaaaacaccaatacatcgaatcctttttcgacagcgaaagaggcattgtttggtgtcggtgatttggtttccaattttgccggtagtgtttatgaatcaggccgtgtttaccgcattattaatgaattcggtggtcttggtgttaaagccacggaatacatcggtaaaaatggtaatatttatatccgcctgtccggtcattcgggcgtgagggtttttcttaatgcgacccggtatttggctgacaatcctaaagtattgtatatgggcatcggaaccatggggcagaatgatgtttcagtcaggtcagcccggttttcaattgtgtattctctggcgtatcgtgcggttgagctgatatttaaagatgaatatacgctgacgaatttttttgtgaatgtgacaatggatatggcaaagcttgtggtcagtatgcaggtgggtacggcggttgttaccggactgatgacattcagtagcatcgctgctggtagtgttattgctgtatctctgcttatatttactgctggtcttattatttcgtttttattatacgaattggatgaacagttcggcataagtgagtcgataattagagagcttaaaaagcagcgcaaagtacgatctgatggtgagggacggcatcatgctgatacctttttcacgaattttcatcggttcggttaa

SEQ ID NO: 285881 - DNA, 561 bp, Morganella morganii
atgacacaccgggtgaacctgaccgcctggcgctcccggctgaaacggcaaatctgccgccggatggctgtccggtttctgatagcaggaagtgtgttgttatccgcactgctgccggtttatctgcttcattcactgaatgtgcagcatctggtggtgttacaggccgcatttgatgagcgggaaatccgtcttgagccgcagcgggctgaatttgcccgtcagcgcgcggtacagcggcaggcggaagcggaaaatctgcggcagcagcaaaccgcacaggaaaaccgtcgtttccgggatttgctggtttttttgcaggtgcaattgccggaagatgcctggctggcgcgttatcaggcagagcggcaaaagtatgatacagaaaacagtgtgcgccatgtcctgtcggtgaaccgccatcaggtgatcgcgccttcgcatcctttattacaccaggttgtaccggggctgatgccgctcaggctgatcaatctgcaacatcacaaaacagccggtatccggcagtttatattggtgaccgggaggagccggtcatga

SEQ ID NO: 285882 - DNA, 579 bp, Morganella morganii
atgcgtcttttttcttctgttttactgattgtaccggttgctctggcaccggcggtgttagccggcgggccgggtgcggagtacaatgtaaaaattacggtgatggggacattactgctgctggcaaatgtgtatctcttccgctataccgcaggcaaagttgttgtcgccctgctgacagttttatgggggctgaacttatccgcatctgcttttttctgccacggagcgggggttgagtaccggacaatgcttcctgatctgcttcatcagaaatacgcgttatcagccggtgattccccggctgaaaacagtggtatcgtactgttttttatcgtggtttccggggggtattttacggtggttcatctgctgagccgcgctctgccgcgccgtgctgtccggaatgccggtatctcgctgttattactgtcgtttattctgcctgttgaatattacgcgatggaaaaaaacaaaacaccggggctgacggtgtatgaccattatctgctgggtacgccattttatcatcttgctgctgtaccgatggcatggcggggatgcaccggcatcagctga

SEQ ID NO: 285883 - DNA, 1068 bp, Morganella morganii
atgagaaataacatcatgataatgtcaaagaaaataagaaaaattgcggctgtatccgccttgctggcagccggatacctgagtgtactcccggcgcaggctgcgcaggaatgcacaccgggcggctccaatgcacatatgccgatgacggcccgggttgatctttccctgagcggaacggttaagaagaatgacaaggtcggtgagttcttttttgatgggccgggttacggaacacatattgccaactgcggcccggattccgaggtctatggctatgccacctatggcgaaggcagcggtattatcgccagatattacggcgatattgacggcaatcccgcctatcacgtttccccttccggtgtgcaaagacccagctatgtttatgtgctgactgataccagtacaggcaccgtactccgcacccagcccggcgcccgtattacggtgccggaaggccggctggaaccgctgaaactgaaaattgaaatctatgcggcagttgataatccgcccacactgtcactgaataatatgacaatcggtgccatcctgctctcgccgtttgataagaacggcggaacaacccggtacacctattcctatctgctgaaaggaacactccagcaggcaccggtttcctgcaatgcagagagtacaaatctcgaatttcgtctgccccgtgcgccggtttctgcattccgtgaaaaaggatttcctgacgcggaatacagcgcagaagataatctgacactgacctgtaccggcgatgtctcagcaaaaatcaaattactctctgataatacagccgattacaacgggaaaccgtcggtcgtcagggtgaataatgaaggcagaaataataattcatccggtatcggctttgtggtcacgtcacccctcagcgatgaaacaccgctgatcagtcaggagtttgtcaaactggccgatctgaatgaaggcaccacgacagtcccgctgaaagcacactattaccgctacgggaatgatgtatcagcaggcaaagcagaagccaccgctcagtttgttttacagtttaactga

SEQ ID NO: 285884 - DNA, 2523 bp, Morganella morganii
atgaaaaataaccgcgctgaaatccgcacacatctgctgccgcttctgatgatcccggtatgcgcggcggtacttccccgtcatgtgacagccgctgactattatccgcccggcctgctgaatattgccggcagcggacaaacggtgacaaatgaagagctgagtgtattccgtgacaacgatgtggcggaaggaaactacgatgtcaccctgtttatcaataaagtaaaaattacccggatggctgttccgtttgtgctgatgaccggcaaagaggataaagaaaccctgcagccctgttttactgaagcacagtggcatgcgttcggcattatttttccggataacaccgctgttcagaccacacaggacggatgcgttaatctcagcggaatggattttatcagcggcgatctggacttaaacaaccagatttactccctgacagtgccgcagtctcagcttaatcaggacaaaatccgcagcctggaagaaaaaaactgggataacggcattccggccgcgtttgtgaattacaatttttccgcatttaatcagcgtaatcgtggcaacacgcaggacagttattacggaaatatccggacccgggtgaatatcggcgcctggcgctataaaaattataccgtctggacacataaccaaagcggcggtgataaatggaataccatcagtaatacaatctcacgcaatattaatccgataaaaagtgagattgcggccggtaatctgtatacctcatcacaattgtttgacggcgtgaaaatccgcggcgttaatctgaaaaccgatcgcattatggagcctgccgacaaccgcagctatgtgccggtcatcagcggtatggcaaattcagaagcggtagtgtccattgtccagaatggcgaaaccattttccgccagacggtaccggcaggcccgttttccattacacaatattacccgatgagtaacggcggtaacctctatgtcaccgtcaaagaaactgacggggcggaaaaccagtttattgtgcctttctcgacaatcgccaaccttgagcgcaaaggcggtttccgttatgccgtttctgccgggcaatacgacagcagtaatgacggtgacgggaaattcctcagccaggctgaagccttttatggcgcgaccgattacatcactctgtacggcggaacatttattgctgctgactatcattctgccggactcgggaccgcgctgaatatgggaaccgcaggtgctgtcaccacggatatcctgcatgcccgcacccggctgaatgatgaaaaaaccatcagcggtaatgcatttcgtatcaattacgccaaacggattgaatccaccaataccagcctgacgctggcaggttatcgtcactttgataccggtttctaccggtttgaggatgccgccgcccgtaaggaatatcagccggatcagcaactgaaattaaaaaatgagtacacactgacactgaaccagccggtattttctgaccgtgccacactcaacctgacgtcagtgatttatcagtacggtaacgggcagaccagccgctcctataacgccggttttaacagtgatttcagcggtatcagttacggtgtgtattacacctattcacagggtaatcagtttcaggaacagacaaaaaacaatcagagcctgagcattaacctgtccgtacccctgagcttcggtgattatccggtacgcgcggcttacaacctgtcaactgacaacaatcaccagacccagcagaccgcccgcctgaacggtaatttcggtgaacatagtcagggcagctgggatatttatcaggggtataccaatcagggttccggctattccggcggtatcagctcctcatatcagtcatcgtatgcggtgatgaatgccggttactcttacagtcaggataataaaaacctgagttacggcatcagcggcgcactggtcgccacacagtacggcatgctcgcggcaccagacttacaggaaaccaatgcccttgttctgaccaaagatgccgccggtgtcggtgtgatcaacggccgggcaataaagaccaatcatgccggtctggcactggtatccggcatgacaccgtaccggaaaaacaatatcagcattgatacccggacactgccggatgatgtggaaatcgaaaataatatttccggcaacatgatcccgaccaaaggggcattaattctggccgattttaataccaaaaaaggctataagctgctgctgcgcctgaaaacagcagacgaccgggaaattccgctgggtgcagaggcggtcatgaccggtgcggaaacacagttagtctccggatttaacaacctctattttctgaccgcacaaccggcaggtgaaatccggattaactggaaacaggatggtgccgctcacacatgcagcattcattatgataccgcccacactgtaccggtaaacggactctatattgcagatgcagactgccgcacaggctcacaatga

SEQ ID NO: 285885 - DNA, 684 bp, Morganella morganii
atgttcactaaaaaaaatattctctctgcttctctgttttttttattcaccgttaacagctatgccggatttggtctggaaacaacacggctggtttataacgaaaaaaataaaagcgaaggtgttgttgcttttaatactgataagaaccggaattatttactgcaatcctggattgaagatgcaaacggcaatgtcagccctgactttgtcaccacgccacctttactgaagctccgggctgaacaaaaaaacaccttgcaggtcacaaaagtcaccggaatgccggcagacagagaaacactttactggctgaatgtgaaatttgtcgctcccagcagtgaagaccaggaaaacgttcttcgttattccatgaccaataaaatcaaagtgatatatcgtcctgactctctgccgggtaaaaacctcgatcctgcggcagaaaaactggtctggaaagccggtggccggactgtcacggtgaaaaacccgacaccgtattacatcaatatttccggtatcagcattaaccagcgtgatgtgccgttcacacagggttattttgccccgttttctgataccgcggttgcactgccgtcaccggcagtccggaacgcgcctgtttcggtaatgtatatcaacgactacggaaaaagcatcgaaaaacaatttttactccaataa

SEQ ID NO: 285886 - DNA, 576 bp, Morganella morganii
atgaaaaatgtattaacgggcaaggcattattatcactcttattagccggttcagtaatgagtgcatctgcagaagaaacacaggatggcaccattacattctccgggtttatttacaactcaacctgtactatcgacctgaatggtgataattcaccggatgcacatgtccagatgggccgttacccgacaagtgccttcggtaaaaaatatgataccgcaggcggtgaaggtgtctacggtaaaatcgatatttccttaatcgattgcccgggtcaggggaatgtgacattaaaacttaacggaaaaccaaaaaatggcgaaagtgatattttagaactggataatccgggagatgacagtaccgcaaaaaatatcggtattattatctatgaccgtgatggtgaacatagtggtgacggtattgatatcgatggttcatttgaaaaagaatatcacgttgaaaacagcgccagctgggaagccagctatgtcgcaaaatatatcagcatggctgatgatgttgaagctggtcaggcaaatgcaacattaaactacaccctgacatataactaa

SEQ ID NO: 285887 - DNA, 765 bp, Morganella morganii
atgacacagttgactgaacccaaacgcccttatcaggaagtcggccatgcgttgcgccagatgatcaccaatatggattatgtcatcggtgacaaactgccgcctgaacgcgaaatcgctgaaatgctggatgtctcccgggcagttgtccgcgaggcactgattatgctggaactggaaaacctgattgaagtccgcaaaggttccggtatctatgttgttgccctccctcacctgagagaaagtgcggtaactgacccgtgtgcgctcaatgccgccggtccgtttgagctgttacaggcgcggcagctgctggaaagcaatattgcggaatttgccgccacgcaggccacgccggtggatattgcgaatatgcgcagcgccctgcagcgggaacgcgacgaactgaaaaccggggaagatgaaaccggtgaccgcgagtttcacctggccatcgcacaggcgacccataacagcatgctggtggagttactgaagcaatcctgggcatggcgggaaaacaacccgatgtggctgaagctgcatacgcgtatcaccaataaagattaccgcaaagagtggatgaccgatcaccaggtgatcctcgccgccatgattaagaaagacccggcggcagccaaagaagccatgtggcagcatctggaaaatgtgaaacagcgtctgctggagctgtcggatgtcgatgacccgaattttgatggttatctgttcaattcctaccctgttgacctggtacggaactga

SEQ ID NO: 285888 - DNA, 423 bp, Morganella morganii
atgaagtatctctgtcaggaaggggctgtcattttaccgtcagcgcagtatgaggacagcagcatcaatatcctgaaatttccggagcacggcgccagtatgaccctgacccgggatcgcctggctgaagggcaaagtgcggggcagtatctggcggcacaaaccgccatgctgcagaaaggaatgaaaatatacacgatcacggagcctgccgtatttgaaacacatgccggaacaacgggaacggagttctattgtgagtcggaccggcaggggcatcaccttcggcagtatattgccgcgtacgatctcggcggccatatttttgtgatcacgtactgcctgacccgtccgttcagtgaggcagacctgcaggactggcaacatatcaaactgggttttacaccgtcatcaccggcatga

SEQ ID NO: 285889 - DNA, 132 bp, Morganella morganii
atgatggatcgttttgacggaaatcagggtaaactagccgccagcgaatcattgtcatggctgcgggcgtccggaagccatgaatatagttttgtactgttcatttacacggtaaatgttaacacaaattaa

SEQ ID NO: 285890 - DNA, 1923 bp, Morganella morganii
atgacgcaggctatcaacacaagaatttatcaagaaaggtctcttgaaccctttcgaatgagaactatgacactgaaaaaaattaaaactctcagcctattcactggtgcgggtgggctagacatcggctttaaaaaagctggattcgacatcctcggatgcgtagaaattgagcctgcatatgtaaaaacgttggagcaaaacaaaggtgaagggaaatttttcggaccaaatttaaatattcattgtcaagacattcgcgagtttgacccaacgccctacatcgatattggaatcgaatgcgtgatcggtggaccaccgtgtcagacgttttccgctgcaggacgtaggtcaggcggtgtactgggcacaatcgacgcacgcggacgattgtttgagtcgtactgtcgtatcttgaaggctgtatctcctgaggtattcgtctttgaaaacgtatatggtttgccaggagcaaatgaaggccagccatggcgcgaaatctgcgaagcgtttgtcgaacttggatataaactgctgcatacagtagttgacaccgctgactatggcgttccacagcaccgagaacgcttactcatcgtaggatttcgcaacaaagcactgaactacaagtttcctgctcccacacatggtcctgactcgactacgagtaaagaccttgtctcagtcagtgatgcaatccaagacttgcaagatccagccgagccattccatgagttcgatgggctctatggtcatttattatcactcgttccagaagggttaaactattcattcttcacacgtgagatgggctatcctgagccgttctttgcctggcggtcaaaatttcacgattttctttacaaggtggaccggaattccccttcaaggacgattaaagcccaaccaggaaagtttacaggcccattccactggaagaaccgtcattttactgtggatgagctgaagcgtttgcaaagttttccagacgagtatgaaatggttggttcatttggaaagattatggaacaaatcggcaattcggttccgcccgaattagcgaaaataattgctgtatcggttaaagagcagctcttacgtcctgtaaaaaacctaacctactcttctcgccatgataatttttcatcaactttccgacagcgccagagggagcggacgaaacacttcaaattggtagcaaaagaagaaatcgcaaagcgttttcctaatgagatcgccacggagatacctattctaaacactaaaaaagaattttttgcagggtatgaaggtttctttataaaagatatttccgataaaatggaaaatccagatattatgaaaaggtatttttctatatctgataaacgaagtggaactcatattgaattactgatttctcccgttattggagaacctaagcgacagatagaaataactatatctggtttatcaaagtatctactttcagtagatactctctattgcaaagctggatatattgaccaaaatgatatattcaggatttgggatttaatcgaagatgccttaataaaggatagtcatttctttacgttaattgatatttacgggcattatgcaaatcgcggcgatacggtaaaagtgcaaacaacaattatcggaactcgtaagtctattattgagagatcagttgagtttcttggttcttctgaaaactgcggacaatttatatctaatgacgtatttgcaaatgctatcgggatcgatattcatggtgttcgtgatgttgtttataatatgagagaaattaggtgggatgttagattgcctgagacgcatgcaactatacgcgatggacggatgttgtgtacatatccttttcctttattatcagaaaaagctcaacttcaacgacgcaaaacactgaaaaatgaaaaatga

SEQ ID NO: 285891 - DNA, 1170 bp, Morganella morganii
atgtctctcgataaaatagttaatgcaacttctgtcgaactggggaagctggagaggtttaaggctgtactccaagatagctacgacaaagcagaaaagttacttatttcacaggatttctccgtgcagaaagcggtgcttggcgatgtatgcttcgatgatgtattaaaattatcggaggttaaacatgcagcacggggtatcgccataactttagctgcttacaaagctattgagccaaaccaagatattcgctttcataaatctgagcatgaaggcggtttttctgcacgttctatcgacaacgtgggtacgattccattcttacaagccaatagcctctattacaacgtcgaaacgcactggctgagtcaaacattttcgttcgccggtccctatatggctgatttggtgttgaagacacaaccaaaagtagctggtccactcatgatcaaagtggtcaactccatccaggactcagatgattcaatcaatcatgccaaggcggttttgcaggttatctttgtctcactgatcaacgccaggaatcgaggtaaggttccactggaaaaaccacaaaatttatctattgaacagactatctccctactggattctcactttttttatggctacgaaaaaaatagccctaggttacctcaggtcgctatatatgcgatctatgaatgcataataccaacgatggctcgctacaataatttgacgcttggacctttggaacggatgaaggctgccaaccgaaaaagcggatccgtaggtgacgtggatgtaaataagggtacagaaccttttgaagcggtagagataaaattcaaggtaaatattagccgagagcatattgcagaggccattcaaaaaataaagagcgtatccgtacagcgctatcttattttgtctactacgggtgttgaagaatctgacattgaggaaataaataagctcactaatatttttcgtcagactaatgggtgtgaaattattgtcaatggcgtattagatactattaaatattatctcagattgattgattctccatctagcttcatcaatcgctacacggcacttgtcgaatccgatccagatttgggatatgaacaccgactagcatggaatgctgtctgtgctagtcgacatgtccacttcccctaa

SEQ ID NO: 285892 - DNA, 1647 bp, Morganella morganii
atgcttggtcgcctaaaggtaataaccttgttacttacgactctgattatattttccgggtttcaattgttaacaagtggtttttttcttaatgcaacgaaaaatgatgctgtgatttttaatcagttaaataatttggctatgcgagtaaatgtacaatctgatgtttactcagagttattgaaggctagattaaatactaatcgagctattactcagatgcaaaataatggcggtaaattaagcgaggcatcaatacagtttttaaataatgctactgaatatctcaagcaatctgaaaataactgggctctatttgattctataccaagtagaacaggtaaaaaaagacaagagttagaggatgcctataaccattatcattcaactcttagtgagcttgtaaagttattacatgacgaaaatattaattctgcattatcacaagatacacaagcaagccagatttcttatgaaaagcaatataatctttaccgattgtcaaataaagaatttacagaaaatgtagtgaatgaaagtagtgaatcttattcacgaacaatatttatattgatcactattctcagtacaatactactcattgtgatagctgtgtggtttggtattaaacgtatactgattgcgcccctaaataatatattggataatatccagtatattgctaagggagatttgaccagaactatttctgtaaccggctgtcgtgaggtgaatgaactggctgacactttacgttatatgcagcatgaactggccggaaccgtcagtaatgtacgtgatggggttaatgcgatttacaacggtgccagtgagattgctgccggtaataacgacctatcttcgcggactgaacaacaggcagcgtctcttgaagaaaccgccgccagcatggaagagctgactgccaccgtgcgccagaatgctgataatgcccgtcaggccagtcatctggcattaaccgcctctgagaccgcagagcgcggcggaaaagtggtggatgatgttgtggataccatgcgcggcatcggcgacagctcaaagaaaatagctgatattatcagtgtgatagatggtattgccttccagaccaacatcctggctctgaatgccgccgtggaagccgcccgtgccggtgagcagggacgcggatttgcggttgttgccggtgaggtgcgtaacctggcccagcgcagtgcgcaggctgcccgggaaattaaaaccctgatcgaggattcggtcggcagagtcgataccggtgcggtactggttgagcgcgccggtgagacgatgaatgagattgtcagcgccgtcacccgggtcaccgatattatgagtgagatagcgtctgcctcggatgaacaaagccgcgggattgaccagattggtgtggcagtgacagaaatggacaaagttacccagcagaatgcggcattagttgagcaatcagccgcagcggctgcgtcacttgaagagcaggcaagcagactgactcaggcagtgtctgtctttcatatacagggcagagaactgaaggccagcgctcaaaccagcatcatggtgccgttacactcccatgcccaaaaaaaatcaacaaataatgttagtgatgattgggaaacattttag

SEQ ID NO: 285893 - DNA, 162 bp, Morganella morganii
atgactgaaaaatacgaagtcacggccaccaaaaaggacggtacgacataccacggactgattagtatttctggtctggatggctcatggatatataccgcaccggatgaaagcagcgacattagatacattccgatggttgaggaaaagagtaaggaataa

SEQ ID NO: 285894 - DNA, 585 bp, Morganella morganii
gtggctaaattgaaaataactgccgtctgtttagtggcattatctcccttactgttcttgtctgaagccttggctaaaaattgcaaaaagggaattccctgcggaaactcatgtatatcagcaaataaagtttgcaggataggaacaacaaacagttacagcacaaagagttatagtaataaatcgacttcaagcaatagtaaaaaatccctgtacggctcaaccacagcagcgacaagcggagtaagcgcggcatctttagctgtcggatcgtctggcagtgacggttcatccggttctggtgttgtttataattgtatttattctaaggccgtgattgttggtgatgccatggggcctatgcaaggccgatttcactccacggtatcattgagcaactcagcattcacggcgttcaggcctaactgcagtaaaatttccagtccaaagatgaaaacaaaaaaggatggttattactttgagcaggatgacaaaattatttatgtcatgtcagtgggtcataaagaatatgctgtttcagatttcaaaactaaaactactgagcaatggactgagtgccaatga

SEQ ID NO: 285895 - DNA, 2433 bp, Morganella morganii
atgccggtatcagcatcgcagcacagagtgtcaaccggaacttaccagaataagcttcacaatactttcaggctaaactctgcaacacaaaatcagggcatcaatcgggattgccccggtatcccggatgaaatacaccgcgtaggacgcagtattgacagcatcgtcaattctcacggagaactgagcggaccatcgaatccggccacatctgcgcgacaaggcgcagttgcaccgctgttaatgctgttaagccaggtcagatttgatgatattttacccgcagcaaccaccaatatatcggtatttacctcagagagacgtgtatttccgtcagtttcccgggatagcgcgtatccggataaccgtgataccggattcactgctgtgctaaatccggttatgaatgcactgcatgaaacaggccggtttatcgcccggcatgatccactgcaatttccgccggcggatgcatcacccgtgccacaggccggaacagaatcggcaataatgccggctatcacacgggatttgaaaagtgacagttatatcattacaggtgagcagaagaagaatgaactgatttccggcgtggtgcagtatctggtatctgacgggcagctgactgcagatgaaggtaataacgttgaactgtggctgcgggcggaagctgccggtatgccaatggttgccgcccgtctggataatggcggttcgggtgcaaaccgaacgaagcgggcactgatgccggagctggatccccgaaccggagaacatataaaagaacactgcgcttttgaagaagaggtgctggatgcgcagggtgaaaatcagggcaaattgcttttattcgaggcccagagagccgaaaatccattccgtatgatttatgataatcatccggatagccggccttctccggaggaacggggagccgctgatggcctcaatatagcgactgacattcttacgctgggggttaaacctttaatcgggaatcttatcgcgcatgccaaacgacgggcatattatcaaaatcagggggataagatatgtgcggaacgattcagaaggctgtttatagcggaggtgttaacctcacttgatgatggtggtttgtcgtatcaatctgcatcacgtgcagcctcccggcgtgtaaagcccatggaactccttcatatcgcaccggcacaggacagagccgctttttacaccagaaatccgcataccggcatcaaaaatgaaattctgctgaagctgaaaggcgcggtaaatgataatggacgggaggtttatctcaaaccgactgaaaaaccgaatgagttttttacgtattaccctgatgcggtaaaaccggaacggctggaaagaagagttattgttgatgaaagtaacctttcatggcgttatgccgacagttttgattcatcaaaactcaatgttgaaatcagtgagggaaaacggcaaataaggctgcataatactaattttgaacttcagcagaatggtgccggtaaatatgaaattgttgtgaataaagtctcagggataaaagaatttatccctgtttatatggagcccttatctcgaacatggcatctcagtacgcataatgaacatgctgtcttcagtaatcagcagattgatattataaaggaaataaaagtaagtaaaaaagagggattctattatacaccaatgggaaataataatccggactactatggaagtggtaatatatattcacaggaaaagataggtgaatcaggtcattattcctggggacaatatgttgaaatgaacggtgaactggttccggttaaaacagtcgtaacaccaaaacatggcatccattatgaagtttatgacctgaagtttcctgaaaaaaatggctatctgattgaatgggatggtaatcgctggttatttgagcgaaaaacctctgttcatgtatctaaagagttagaagatctcatcttaccagaaatgatttctgacaacgtgaatgcaggcaagctttctgcgcctgaccatcagggattaagatatgatactgatggaaatagatttattaaagtcgatgatcactttgtgaatattcataaatgtgaacatcgttactgcattaaagatagaaataatgataatatatttgttgattttaaaaaaaatgaatttattttacataaaaataaagttacagatagattcgatgctacaaaagtagcgagcatagatatatccgggctgggtgttcacgctattcctgaatataaaaatatttacgttacagataatggcagtttttatataaagttaaataatgaatactatccgattgaatttgcgggtaaggatagaagctgtctcttagacacatctccgagcccacgagacaggcagaaatgtggttcttattggctcaccaaatga

SEQ ID NO: 285896 - DNA, 669 bp, Morganella morganii
gtggttcttattggctcaccaaatgaaatccgtttcgcttgtatatacaaaccagaagacggcagcttaaaaaacatcggtgaaagccttaatcagtccatactaatgtataataaagatattgacgtatatatcagttcagatatgtcatcagaaaaaacatacgttatgaaatttgataaaataaaaaatgatctggttaatatccctgttcattcagtaaataaactaaataaacaattatataaagtagagtttaaaaactttagtctgtatattcctcaaaagacgtcacatgatgtataccttgcagcacacgctgggagaaatattaatttttccggcagaatacctgataacctggaattgaaattttataccgaaaaagggaaggttcttcatggtcatgttgatgatttacaagatttagtgaatggaaagtttaatgaggtggaaattaaaaaaggcggtgagagcattgagtcttatgctataagttttgatcatgaatcgcaaattaattacgctaacttagcaatggaatcaaaaaaaagtatcataaaagttaaagagaacggggaggtaatgttggaacaattactccgtgatatatctgcagtgtttgctgaagacaaaacaatccatctgtatatgtgccgatcgttttaa

SEQ ID NO: 285897 - DNA, 1140 bp, Morganella morganii
atgactgggaaaaaaataaaggttggattgattgttgacgaatttttcggggcattgaatacccggtttggtggttatgggtacctggccagatactacatggcgaaatatcttccgaatgaagaatttgagtttgacattttactgggtaaaggtaaaagccatttttttgcagaaaaatatactgcggacggggttaatttatataaattaccacgaagaaattggtttgcaaaacaatggttaaagaaaaaaaattatgacctgtatttcagtgtggagctgacatacgaacatgtgataaaaaatgaacctgatccgaataaaaaactgattttgtgggtacaggatccccgcccgatgtatgaatgggatgaaatttttaccgttaagcttatttctgaaacgtcatattacaatcagcgtatttatgatcttgttcatgactggtataaacaagatcgggttaaatttgttacacaagcaagatgtctgaatcaaaaagccattgacctctacaatctggatccggatgttgatattacttttttaccaaaccctattgatattgattataatttcgatgtcacgacttttcataaaaagaataatatcgttttcttaggccgtattgcatcagtgaaacgcggatggatgttctgtgaaatagcaaaaaaaatgccacagtacaacttttttgttttaggtaaaatattccgtgatgatgataaaaatcatgagatcatgaaggaatatgaaaatattccaaatctgcactttacaggtcatgtcgaaggtgaagagaaaaataaataccttcgtgaggcaaaaatccttgtaaatacctcgattcatgaggcattgccggtttccttcctcgaagcgttatcattcggaacattactggtcagcaaccgtaatcctgacgaattaacctctaaatttggtattgatgtcggtgaagtacttggtgatggatttgataaagttgatttatttgttgatgctattgataaactgatcaccggtgaagaaaaccggaaaaaattatcggttgaagcagtggaatatatcaaaacctatcattccgtcgataaatttgtttcagacacacataccataatcagaaacgaactttaa

SEQ ID NO: 285898 - DNA, 678 bp, Morganella morganii
atgacggtgcagagcccggcaggtgttttacccggctattttaccccgctgccgggggctgacagggtgctggctattatatttctgcagcgcatgacggtgtatttttctgtcttctttctgttttttcttcttattttttttccggcactgaaacccgttgctgctgaggcaaggtgcaatagcttctccggaaaatattatcttttatccggcattacactgcagaatttttaccgggaaatgtattctggtaatatggcggaacggaaagcattactaaagcacacatctgatgagctgatactgcaatatgccgtaaaccggctggcattgtttgactgtgctctggataaagatccttccgggctgcgttatttcagttttatttatccggcagagccggataccggaacccgaattaatctttctcccgtaaaaaaaacggcgccggatttatctccggcagaaactgacgcattatatctcagcatctttctccggttgcgctatacctatggtcgtttgctcgatgcagaagaagcggaaacgctggaaaaagacgtcattctggcctgtgaaataaaaacagcgctgtaccagagtatattacagctcagtccgcaggatgctgccggggtattacgctatatctggggtaacaacgggattttctga

SEQ ID NO: 285899 - DNA, 255 bp, Morganella morganii
atggaaaactacgtatacatatcaggggtggttatttcggcggctctgattatttatattttaatcagtaaacgggtaccgtcaaaaagaaaggtcgtctacgggtttgtattgtttacttttattctcggatttaatgatacccggcaacaaactgttactgcacagaagaccgcggagcagaatagccataacagtatgacgctggcagagaatgatcaccagcctgcggtatcagtcattaccggaatgtaa

SEQ ID NO: 285900 - DNA, 201 bp, Morganella morganii
atgtcagagagtatgaaaaaaccgcgtatgacacaggaagaagaggacgaaatagagaccctgacaaaaggtctggtcatgcgggataaaatgaaactgccgaagattgacagagaagtcgaacaacagcgtccggcgcgtttacgcccgtggttccgggaacgtcttaaattccaccgtgatgcggtcagaaacagttaa

SEQ ID NO: 285901 - DNA, 1128 bp, Morganella morganii
atgtccaaaaaatttaaacataaactggttaatctattcttacggctttatacccgccgccgtgatttttcacactccgtcacggcttttaaacagctggagaccatcgacttccgcaatattgtcatttattcgacaacagcactcggggattttctgatgaacaccccggctatccatgaagtccggaagcggtttcccgacgccagaattaccgttgttgccggcaataaaatggcggcctatattcgtaccggcataggtaaagactgggatgacgtcgtctgctggaacagtaaagtcaatacagtgactaaactggtcagagatttgaaagcgcacggaacaccggatctgattctgattatgcactcacataacccgtatgattatctgagtgcggttatgaccggcgcaccgtttgttttccgctgtaaccatccggcaagtccgtgttcacttattgaaccctggctgaccaattacaatggtcccggtcatcgtcatgctattcagtcccgcctcgatctgatagcaccgctgcaatgtcagttcaccggcaaaagcattgagatgcgtgttccctgtgaggtcaccgcagagccttccccgtggcacaacgtgggctttcagatgggggcatccagtgaagaacgctgctggccggtatcttactttgtgcagcttgccaccgccctgatgtccgcagatgataaaatccggataaccctgttcggcgcgccgggggaagtgtatctttcagagcagtttatgacgttacttcccgccgggtttcatcaccgtacggaatccctgatcggcaaaacctccatgacagagctgactcaggcggtgaataatattgatgtgctggtcaccggagatacgggtaccatgcatattgctatcgcgctgaaagtccggacggtcagtctgtttgtcagtgccgcagctcacgctaccggtccttatcaggatccgtcgcttcaccgggtgatctccggttttaccagcccgctgttaacacctcccggaaaccatgaaatgactgctatcagtactgaccgggttattactgctgtgcaggatgcgctggcggatgtttatccggacacccgcaccccttga

SEQ ID NO: 285902 - DNA, 582 bp, Morganella morganii
atggcaaaagttaatgatgtgtatagtaaccggtttaatatcaggattgtatcatcacccgaccagtcagtgctcatgtctgtgcctgacccggtaaaaatctttgtaatggttaattataactggggaataggacatatcgggctggttattggtgaaggagaaaaagcaatattgcatgatccgtccggcgggtattcagaatgtccgtcacgtgaatgttataaagacagaaatgcaatgcgttacccgcgcagttccggggagttttttcactatccggaatttgactgggatgattatctttcttttcagttgtgggacgggctggatgtgatggtgattgagtttgttatccccggtgagcaggcggccagaataacggagatgatttataatcatgggatggcagacacttggatgtgtgctcaaacggtgctgactattttacgcgaaagtggaggtatttttagtaatattaaaaatgatattatatttcaggaagatccgtggggattcagagaaaagttacttgatattcactttcctaagagaggagggataattagtggcgcatattaa

SEQ ID NO: 285903 - DNA, 471 bp, Morganella morganii
gtggcgcatattaataacacgattattctttatttgtcactcttcattagtattgttttttattatctggaaatggtgcatgaatatttttttaaaatatatccacatacgctgaataaagttcctgtttttgaatgtaatgcatggatttcatttgtgtttttattttattttattctatcgattggagtgtcaattttccggggaggaactgtagttaacagaacggttcgtttttatgtgtatatcattattccatatataatttctcttattgcgtggtatttaactaattatcagacaagaaaaatacattaccggtttcctgaggatggaatagtacctgttactgattttcttatcatatcatacctgatgcacggtatattctttgtcccgctggtggcgtatacctgtgactttctgttgagctttctgttttgccggaacaaaaaaacaccaccggggtaa

SEQ ID NO: 285904 - DNA, 168 bp, Morganella morganii
atggtgttaaaaatgtttatgaattgtgaaacatgtcatcaaaaagggagctggcagagtcagaaaaaagcggtcaatcacaaattaattttatctgcggcagaagaaaaaacagtatttcgtctcatttccccgggaatgtactgcggatatgtcggaatgggataa

SEQ ID NO: 285905 - DNA, 720 bp, Morganella morganii
atggcagagaataagatctgtttttctgatgtgaaaatggcagggaatatggaaataatcaccgctgcggataaatccgtatatggttttaccggtgataatgagacagataacagcgaattattaaccgtactatttcagttgcgttatttttccaacagtattatttatcatcagcaacaaaaaaatgatattcacctgatattcaggaattgcacagaatacaccccggctgcccggactctgagcacggataactatattattccagccggtgatattaccgagcgtttccggccgtttgttcatgatcatccggtagtatttcttgatccaccggctgataatacgtcttccgccataaccggtgccgggttaaatactgtttttccgctgttgccgcaatccgggaatacatcagatccgggatttgcctcaatggtgatattaattcagcgtattatcgccggatacggtgaatttaccaccacggaaaaaccggaagacgttaacggtatcgtgtatatcactatgccggaacatcacctgaataccccgtggcatgaacattgtatttcactgctgaaagcgacatttccgcagaccgttttttatcttgcaacgcagtctccggtgatattgtcgcaactaaatgacggtgaagcataccgtttattgcgggacaacgacaatattatccgcacacagaaataccgctga

SEQ ID NO: 285906 - DNA, 222 bp, Morganella morganii
atgtctgacgaaatcgaccgcgccaatgaccacgccgcgcttgtgcttgaaagccagatagctgctgcccgtattactgctgcgggtgtgtcggcatttgaatgtgagggatgcggtaagccaattcctgagccacgccgccgcgctgtgatcggttgcaccatgtgcattgattgccaggcaattgatgaactgaaaaacaaacattaccggagcgtgtga

SEQ ID NO: 285907 - DNA, 1071 bp, Morganella morganii
atgagtaaagaaaataacattgacaatcttagtggttatgagaatgaaaacttacaaacaataaaaattgttaccaatgaatatgaacctttttatgctaggggttcttattttttgagtcaaataagtgagcagataaataaaattctcgaagagaacaaaataagtttgggcgtgccattagaatcgagagttaaaagaaaagattcaattatagaaaaaataaacagaaaaaacgtacagtttgagcatgttaatgaattaaaggattttcttggggtaagaataatacttttatttaaaagggatttggataaagctattgaatgtattaaggataattttaatgtaattagtgttgatgataaaaataataatattgaggcagaaagatttgggtatcaatctgtacattgtgtagcacaaatatctgacgaatggaattcaataccaacgctatctgacggcaagctgtttaaaattgaaattcaaattagaacattatcccagcatatatgggctgctgcttcccataaactacaatataaaattgaagaacaaataccaaaaccactacggcgaactattcatcgaatatcagctattttagaaatggttgatcttgaatttgatcgggttctttatgaaagagataattatataaatgacataggtgaatcaacaggaggttttaatattgaaaacgcagctcttgatattgaaacactaaaatatatttcaaaaaaatatctcccgcaagattatttacctagtgagaatgtgtattctgaattgctgctcgaattaaaaagcaatgggatagaaacgataaaggaattagtggagatagtaaatgaaaatttgagtaaagtaattagtgatgataaagaaagagctaaggaagctatcgaagaaaatttaaataccggcgatgtaatcgaaaatatatggtataaaggtcgattttttactgatgtgggtttaattagggggtgcactagaaatgcattttctaagcaaaacaaggaatataagccgcttttttttgtaaaaaaaaatactaatagataa

SEQ ID NO: 285908 - DNA, 603 bp, Morganella morganii
atgagtagccgcctgctgccgacaggttccagtctgctggagattgccgccgcccgggcgtgcgctgagatagagcgtgtaccggtaccgctaaaaatactgatcaatcctgatacctgtccgctgcctctgctgccgtatctggcgtgggcgtggtcggttgaccgctgggatgctgactggccggagcggacaaagcgggatgttatcaacgcgtcaatgttcattcataaacataaaggcaccatcggggcgctgcggcgtgtcgtggagccgcttggctatctgatccgcattactgagtggtggaaaaccggtgatcgtaacgggacattccgcctgacggtcggcgtatcggaaacgggcatcaccgaagaaacctattacgaacttgaacgcctgatttttgatgccaagcccgtcagccgtcacctgctggggctggcaattaaccttgatacctgcggggatgtttatatcgccgccggtgaattcagcggggaggaaattaccgtctatccctatcagcctgatgtgattgaaacaacgggcggtgaatataccgccggtgcaatacatattatcgatacagtgagggtttaa

SEQ ID NO: 285909 - DNA, 1083 bp, Morganella morganii
atgagtcaaaaatattacacagtgctgactgacatcggcgcaaataaactggcgaatgcgaccgctcttggcggaaagttaaacataacaacgatggctgttggtgatggcggcggttcacttccgatgccggaaccgggcaataaaaaactggtgcatgaaaatcgccggggggcgattaatcagttatctgttgatccggaaaaccctaaccatattattgcagagcaaattatcccggagcaggacggcggttggtgggtacgtgaaattgctatttttgatgaagatggtgacatgatagcgatcggaaattgcccggaaagctataagccaaagttacaggaaggcagcggacgtacacaaattatccgtatgatacttgttgtcagcagtgccgcagccgtaacactgaaaatcgatccatcagttatcctcgctactcagaaatatgttactgaaacaacggataagaaaattaaagagtcagaacaaaaagcggcagaaacatatcagccaaagggtaactatgccccggcaggtaattatgcggtcaggggggagtgttatacaaaaacggaatctgacggaaaatatcagcctaaaggcagctatgccccagcgggcaattatgctgtaaagggtgagtgttatacaaaagcggaatctgacggaaaatatcagcctaaaggcagctatgcccctgcaggtaactatgctgttaaaggcgagtgttatacaaaagcagaatctgacggaaaatatcagcccaaaggtgcagatttatcagaactggctatcggaattaatcaaaaatgggcgaatgtcagttcacaacgaagcccgggagtgaattacaccaacgggttaaaaaaaccactcatgataaatatttatgcagaaatgagcggaaacaacgcgccgtggattaaattgtatgttgccggtgctcttgtcgcccattcacatgtgcgttatgaccagaatttaaaagtcgcttttgtcactgctatcgtgccccccggtaacacatattcatatcaaaaagacggaacaactgtcgtcgtcatggagttgcgctaa

SEQ ID NO: 285910 - DNA, 384 bp, Morganella morganii
atgagcacagaaattctggaacaaaagttttttaaagacacagataataatgtgttttgtatcgaaatcatgccgataaatcaggattcatgggaatcagaaatacaagccggatgggccgcaatcagtgagggcgaggcaaatcagattgccaatccgccgccgacaaaagaacaactgattcttcaggcggaagaaaaaaagcagttcctgatttctgaagttcacaccgaaacagaaatactccgggcaaaactggcacttaaacgtatcaggccggatgaagaagcgatgttaatcgcctggctggattatctggatctgctggaagccgtggatacatccattgcgcctgatatcgactggccgcagaaaccacagtaa

SEQ ID NO: 285911 - DNA, 1026 bp, Morganella morganii
atggtcgattttatggataaacgatatcaggtttttgttagttccacatttacagacttacaagaagaacgtcaaaatgtgattcaggcattgatgagcatggattgtattccagcaggtatggaacttttccctgctgctgatgaagcacagtgggactttatcaaaaaaatcattgatgactgtgactattatttattaataattggtggtcgctatggttcggtttcagaggatggctttagttacaccgaaaaagaatttgattatgccgttgaaaaaggtctgaaaataatagctttggtacacggtgaaccaaataaacttccctttgaaaaatcagaaagtacaccagaatacagagagaaattgcttgcgttcagaaagaaggtgacaactgggcgattggttaaattttggactgacacatccgctttatcaggattggttttacagagcgtaataaatgcgataaaaatatatcccgccgttggatgggtcagagcaaatcaggtcgcaagtaatgaattactaacagaaattaatcaactcagaaaagaaaatgaaaaattaaaagatgagcttcaaaaacaaagcactgaaataattaatacaataaataacattgccagtcttgatgataagttcattcttcacggcacttatgattatgatttaattgaccctaaccatggctatattgaaacactaacaaaaaaatttaaatatgaaatgtcatggcgtgagattttcactataatttccgcgtatatattaacagaacaatatagcagtgatgtgaataatgagatagcaaagagaatagttacatcaatagcagaagagtcaacactcgaacaaataaatgattatgatttcgaaagcataactgtccagtttttggcttatgaattaattcaaataacctctgatagaaatggctcgtcaaaatggcatttatctgacaaaggtaaattattgatgctgcaattacgaacgcagaaaagtattagtaatgaatcttaa

SEQ ID NO: 285912 - DNA, 549 bp, Morganella morganii
ttgtttactttaaagaaatttatttgctaccatggtaccacattgagcgccatgtcgtctataataaataatggatttaaatctagtcaatcaaatgaagattggttagggcacggcgtatatttttttacagatggtatatcagaccctcttaaaaatgcgattgaatggtctaaaaacagacacgatggtacctgcgtaataaaagcaaaaattaaagtagatgattcggaaattttagatttaagaactaataacggattgaatatatataactcacatagagatagcatcattgacaattactataatgaattagccaagagacgtgacatcactataaaaaaaagaaaagatgcaagagtagatgattgtataattatgagctttttgcagaaaagtttaaaatataaagtaattatccataatgtttatataaagaatcatcaccaaagaaaacttgcactggaatcaaactatccaaatagtactgttttatgcacaaatgaactttccagtatagagattattgatgttttaaatatttaa

SEQ ID NO: 285913 - DNA, 351 bp, Morganella morganii
atggcacgtccaccacgtgttcatgataataccgtagtttatgattggctgaatgataatttagatgtgttatgttcggaaccactcccagcttatcttgatgatatccttacaggcgctgggcgcttatctgagagtatcaaagcgaacaccagacctaccagtccttatgtgctgctaaggcttttaaaatcacttccagagatcacaacagccactgtcagaacttctatcagccttcgccggatagcatttggagaaagtgaggtatcagtgagatatgcccaaactgtcacagcttgtctgatttctgccagtaaaagccttgtccattacttgaagttatcataa

SEQ ID NO: 285914 - DNA, 1452 bp, Morganella morganii
atggcacactcaagacatatcaaatcagcattgaaggctattcatgcggataaccctgaattgacttatgaagagatgagagggcatctgaaggatatagctgagtgggaactatctgtggggcgttcagaccttgcagacccagatatgagagatatttaccatgagcagtattttgagctgggtaacaatttggctgaagctattaccagtgaaccattgtctatagatcagcatcgttatcttaatgaggctttgacattattcagggcatgtatgaagcgtctggatgggaacagtaaaccgttgctgacattcatagatgaatttgatgctcaaaaggtgaagccggatgtttctcgatctgtatgtagtgaccagacagacacggagacgatggtctctgttagttccctcttcgaacagtacgaaaacgaaaaggttcagagctggaaacctgcaacagagagagaaaacaaagcggcacattcagtattggttgaaatattcaattacctgaaggttgaagatgccaataaagctacccgagcagatatgctgaaggtaagggatcttcttcaaaagatacctaagaaccgtaagcagcgttataatgatgcggcaattgatattttattatccagagatgatcaatctgatggactggatgttgtgaccatcaacaataaatatctcataaaactggctgctgtattcaaatgggcaaaacagaacgatttaatcgaaaagaatctgactgaaggactggaattaaaagtaccagcaaaaaaagcttctgaagaccggaatgcatttagtatagagcaagttgaacagttgctgtctgccgctaaaatatggtctgaaaaaagcaccggtaagccatttcattattttgttccggcgttggctgctataacgggggcaaggctgaatgaggttgcccaacttcaggtaaaagatatacagacaaccgatatcgggacgacctatatacacataaacgagaatggaataaaagggaagagtatcaaaaatgcattcagtaaccgctatgttcctctgatagatggtgcttacggattcgtactatctgagtttttgaaactggtcgaaaatcgaaaagaaactgtgggcatagatggtttggtctttgatggacttaggttgatgaaaaatggatatggtgaacaagtcagtaagtggtttaacaggactttgcgacctaaagttattaaggatgacaaagggctaactttccattcattcagacatacatttgccacgcaactgaaacagaatggtattgaactcgcatactcacaagcacttatggggcacagctcaggggctattacatacgatcgatacgctaaagatgttgaagtagaccgactggctgaagtgttgaaatcagtattttggagtgatactaaactgtcagaaagttaa

SEQ ID NO: 285915 - DNA, 420 bp, Morganella morganii
atgaaccagcacggtttcacattaatcgaggtgatggtggtggttgccattgtggcgatcctcagtgccattgcggttcccggctatcagaactatatccggaaggcggcactgattgatgtgctgcgcacggtgaccgcctttaaaaccggtgtggagctgtgcagttttgacagccccgcttttgccggatgcagcagcggacaaggcactatcccggctgattcgccgggccgctatatcaaatccgccaaagcggaaaacggtgttgtgactgtgctcgggaacagctcactggctgcgctgactgtcagcacaacaccggcaaaaaatccgcataacggtatcactgtctggactaccgtctgtgagaccaaagaagaggcactgaaaaaaatctgtcttgacgtcatcaagtaa

SEQ ID NO: 285916 - DNA, 1200 bp, Morganella morganii
atgcaattttaccggctgtatgactggtccggcctgacatctgccggcagcgtggtgaccggaacggttatttcgtcatcagagaataatgctgtcaatcagctgatttcgcagagcatcacacctgtttccctctgctgccgcaaacggctgacctgttcgcggaaagaaaagcagtatctgctgcattttacccggcaactgacaaccttactgacatcaggattaccgttactgaaagccctctcgctgctggccggcgaatgccgtcatctgctctgggaagaagtgatccgcgcgcttatcaggcaactgcaacaagggaaaaccctcacacagggaataacggcgtatcccggcttatttgattccttttactgtcagatgattaccgtcggggaggaaaccggtaaattaccggagtgtctgcacactatttcacagcatatccagagcaaccgtgatcaccgggccacattaatcaaatccgtgcgttatcccgccgcactattcattgtcagctcactgatggtcacattaatgtttctgtttgtaattcctgaattcgcaaaaatatatgcatcatttgatgcggaactcccggtactgacccggcaattgatccgaatttccggcattattgccggtgacacaatgccggcattgagtctgatgacaataattatatttatttatcatatatttcgccggaaataccccaatgttaaaaaaacagaatcagcctgtattctgcgtattccgtttatcggtaatattattatctgtcatcatgtctctcatatttttcagatgctggcaatgacacagcaatcgggtattacactcatttcaggtattaatacacttattatgacaaccacgcatccattatataaagcatcactcatcgcaatacgtgaagagttgcttaacggaaaatcattcagtcagtcaattaaaaaatccggaatattccctgcgctttgccatgaactggttgccaccggtgaagccagcgggcaattcgggtatatttttccttatattgcagaatggtttaaatctctcgccttaaaccaaattcaggcattttttaaaatactgcaaccactgctgtttattcttccggcaattctcattgctgttttattaattgcaatgtatttacctttattccggctcggtgaagttttagtctga

SEQ ID NO: 285917 - DNA, 930 bp, Morganella morganii
atgtctgattttgtcaattttaatgaactggttgacagcattgtcaccgaaaaagactacgtagcaaacagacctgtcgtagaaaaggaattgctgcattatgacattctttatgctctttctgccgcagggcttttaaagaacatcacatttcagggcggtacgtcgctcaggctttgctatggatccaacagatttagtgaagacctggactttgctggtggttgtgacttttgttcagcgcaagtgattgaaattaaaacgtgtattgagaagtatgttggtggacgttatggccttgaggttgtggttaaagagccaaaagagctgagaaaagaacccgattatgcggatgttaaagtcgataaatggcaaatatcggtgactaccaacccgggaaaaagcgacctgccaaaacagcggataaaagtggaaatagttaacatccctgcatacaccaacaccccgcgaatgcttgctaaaaactatgagcagcttccaagcggctattctgacctgattatccgggtggaagagcttgctgaggtcatggctgataaattggtttcatttccggctacaacctctcatatccggtacagagatatgtgggatttggtatggctgcaccagcaaggggctaaaccagacgctgaactggtcatgaaaaaggttaccgattataaaatcaatgataagtttgcggaatggctgcaggcaagaattgaatccttaccttcattggtggcaagtgaaaaattcaagggagagatgaggcgattcttacctgtgtctgtagcagacagaactctccttcaaccagattttcttgattttttacaaattactcttcatgaattgctaatcaccatccaaacagatatttatggaagcaaagacccgaaggcagtaaagaaatttgacatgtag

SEQ ID NO: 285918 - DNA, 534 bp, Morganella morganii
atggaattaatgacagcggttaatgtttttaacaaattcagtaagaaaggcaaaaatatcttcctcaccagagatttagaaatgcttttccctgatgagtctccgaaaacattgcagaaatccgttgaccggctgatcacaagtgatgtgctgcgccgggcttcaaaaggtgtatatacctattctcaaggttcattggggccttatcctttagaacgtctggccgaaaatattcgacgcggtcactacaactacatcagcctggaatctgctctgtctcagtacggtgtaatttcacagatccccatcgacagacttacggttatgtccacaggccggtccggagagtttgttacaccctggggcgttattgaggttacccatacagccaggaagccgcctgaaatcctcaatactacggttaaaggaagagggccattaagaattgcaacaaaggagactgccattaaggacctgatgaaagttggcaggaatacacacctcatccaacgtgaggaattaaacgatgtctga

SEQ ID NO: 285919 - DNA, 2274 bp, Morganella morganii
atgactaataataccgtatcgggcttttccgcctcattgacagatgaaattaatttcatctgtcatgatcgttacatgaaaattttactgtttattgtgccggtgtttttattaacgtttgtcagcgcgatgttcagttccggtgtgcctgagaaaataccggtagcgctggtggattacgaccattcatcattgagccgggaaataatcaggaatattgatgcatcgaagagtattgagctaacagaaataccggaaaatgtggctcaggcccaacgcctgatgaaaagcatgaaaatttatgcttttatagagatcccccgtggcgcatccggatcagctatccgtcaggatgataataaggtcatcattcgttataacggacagttcagatcgacaggtaatgctgcgtttatcgggttgcaggctgcggtgaatgatgcatttagctcactcaataacaggaaatcattgggtgccgggcataaaggtgcgggcagctcagtgccaaatatacaagtcgtcagtatcagcaatccgcaaaatagctatgaaagattcctgacgccaatcgcaataccggtgttactgagtatcgtcctgagcagcgctgtcatttgcgcgataggacgtttttttgaagaaggtaagctctgcgccggctggatgaagaaaagcagaatctgcctgtcaattcagattgtttcccgttgtttaccctatatcactatcatttttctgtggaacttgctatttaacgtctggcaaacagcggggcggggctggccgattttaggtaattcatggttattaatactggcgatatttatgctgtgtcttctcactgcctctgtcgctattatgtttatttcaataacgcgaaatatacttacggcattaagtatctcaacggtatataccagtgcggcattaacctactctgatgggacgctgtccattttgaatgccaatggctgggctaaattctggagtaattttcagccattcacgcattattaccgcatacaattagagcaggtcaatcttggcagtgatatcacaacaagcttgtatcagtttggtattctgtcactctatatcatcataccgttaacagtctcttttatgctgctggggaaacataagtataagcaacagccggcaacgtttcaggaaaatgtaaaatttgatggtattaaacaaagcgttatcagtactctcacatcaataaaaaaatctcagcctatattttcaacggcaattatgtcattgattctttatagtattttctatccaagtgcttataaggcacagattaacctcaagcttcccgttgcggtggtcgattttgatcaatcatcattgtcacgtaacctgatcgacaatctgcaaaccacccgtgagattgatgttacccgggtggacagttcgttgtctgaggcattaaatttattacgcaacagaaaagtttccgcagtgatcactattgataatgattttaaaaataatcttatcagagggggagacgcagggatcgatgttcacctgtcaggcggttatatggctgtagctgccgatttgagagcggcggtgattaatgcaataagcgctacgactgatgttaacagattaacacctaaaaccactgatcatattatttcccttccgctctataatcccacactgggatacgaatcttttattatgccgctggtgtttattatcatacttcagcaaacactgatttttgccggttctatgcttatcgcattacgcaatagcgtcggtttaaccaatattaacgtatcacagtttatcggaacatttctgggcttgtttatcgttggtttttccggcgcaatttttgtgtttggctgggtttattacttacaaggctatcccaatgaaggcaatatgtttttacagctttggctgattgttctgttttctgcggcagtaagctcaatgagtatgttgattggtagttttctggataacattaaccgtccgatgcagatcctgtcggctacgtcgatggttattttttatgcatcaggtgcctcatttcctacatttaatatgccgggctgggttgtgaaaacgatggaaatttttccatcaagtacaatgataagcgggtttactatgctgaactctcagggggctggtatttatgaactgatgcccgtcatcataaaaatatcgttgttagccattatattatttttacttgctatgtatcgtctggtttggcggaaatcaaaagccgcctga

SEQ ID NO: 285920 - DNA, 996 bp, Morganella morganii
atgacgataaagaataaaaaaataaagatagccatacttatcgttataataatggtgttatctgccggctttattttatctcattccgctgaacatgagatcttagaaggcattgttgatacagatgaaattaatatcaccagtaaagtgacggcaagagtggatagtctgcatgtcagggaaggggacagcatccgtaacgggcaggccttagtcagtttgtatgacaggcaaaccactgagaatgccctgcaaactaaagaagcattagctgcggcggtggccagtcaggaaaaggcatataacggagagcgttcagaatatattgagtcattaaaagctaactggataagtgctcaggcagatgaaaaaaacgtcaagttaaccacggatcgggtagtaaaactctatgagaagagtaaagctgtctctgcccaggaacgtgatgatgctattgccagatataaaattgccgggcagaaaacaaattctgcctatgagcaatatatgcaagccaaacggggtaacagagcggaggacattcgcattgctgatgcaaatgtaaatgcagccagggccgcgtttgagtctgctgactccctggtcagagagctgagtgttcattcaaaaaatgacggcgaaattgccaaacgttttgctaatcagggggagcttgtttctgccggtacacctatattcagtatgattgatttaaataatctttgggtaaccgtcaatttacgggaagatcgctttaacgcattaaaaataggtgatgtgattgaaggaaagatcccggcactgaaagataaaacggttaaatttcaggtgttttttattaaccccaaaggcaattttgccacatggagagcaactcgtcagtcaagcggttatgacgtcagaacatttgaagtacggttacatccggtgaataagacagaaggaatgcgcccgggtatgtctgttatttttgattggcctgccggtaatgactaa

SEQ ID NO: 285921 - DNA, 2145 bp, Morganella morganii
atgatgcaaaagacagtattggcaaatacaatctgcggcgtacttttagtgaattcaatgactgcttcggcggcgataacctatcaatatgaaaaggacgtgacgaataagaccgttattgataatcaggttggtattaagccggggtctggtaatgacgggagacagacgattggtcagggcggaaagtcagtcaatagctggatttttgatcgcggcagtgttgaggtgaatgatggcggtatcctggataaagccaaggtaggtgccccgagaacggcttctgaactaaacagtgaaagtcgttcagacatataccgtccggcaggccgtgatggtcaggttgatgtgtacagcggcggaaaagcgacagatacgcagatcattggtaagggaattgttaatgtccatgaagacggtattgtcagtaatacatctgtcagagatttgggtgttctgcgttttcatatcggcggtgaaagtcgcagcgcactgaatgttgaacgtagagcattcgtcattttggataataatccatattatggttcaggtaaaaacacatttatagagcagatgaatcttgccggtactctctatattcaggatatatctacagtaataacaaacgataactcatcattgagatgggaagggcgggatatagatgttgatcctgatagttattttcaggtttcagagatcaataaacttcatttggatcacggctcagtttaccttaaaccctctctggataagagaaatgcaacatttaatcagttagtggtaaaggatctcagcggagagggaacgttttcattccattctcagattgctgatgatgtcagtgataaattagtggtaactaataaagcaaccggaaaatttaaagtcaatgtttatgataccggaaaggacatagctgatccggatgagactgttgagctgattgaaattaataaaggtaatgcaagttttaaattagccggaaagaatggtgtggttgatctggggatttataaataccggctgattaaaggtataaagagtaacgggaaatccacctggcatttagcgactaaagcagaccatattccgtacccggatattgatcctgacggagaaactcagggcgaaccggatattgataaaaacgatgagtatattcaggaaattgatacggaaaccggaaaggatgttactgatgataccagtatacctgagctccgggatgtgctgtccaacagcgcactggccgggttatcaatggcatcagtaaatcgtcagatactgcgcagtgagaacatgtccggaccgtcacgacgctatatcacagatgatttatcagataagaaatacggagcctgggcaaattaccgctatgacaatacaaaattctgtgacagtaaaagccgtgcgttcagaaacagcctgaatattctggaaatcggttacgataaagtcaataaagcgcgttacggggatattgcattcggtttatttaccagcgcagggaaaacccgatcaacatttgattatacaccggggcagggcaatacggacagttttgctatcggtggctatacccactggcaatatcaggatgggtatatcgccggtatgctgaaaggctcgcattttaaaaatcgtgttaatactcaaagcagtggtggcggagcagttgatggctcatttaagcaaaatgcgctgaccgtcagtgcggaagccggaaagaaactgattattacaccggaaatcagcttaacgccttacgggcggatagattacagccgtttcagtgaggcaaaatatcagttatcgaacggaatggatattcatgagcataacagtgacagtgtgaacggggaattggggtcacgtctcagcatgaagacgaaaattaatggcatcagcgtcagtccttttgtgaatatcggtgtttcacatgagtttgtgaaaaataataaagtgacgctgaataaaaaagatttttccgccagaaatgaaaccactaccggtaaataccagttgggcgcaacgattgatttgacaccggatacccggataaccggcagcctgggttatcgtcatggtgataaaaatgaatcaccggtcagtgcttatatcggattgaaagtcagtttctga

SEQ ID NO: 285922 - DNA, 213 bp, Morganella morganii
atgataaaaaaacaagaattacccgtaattatttttaactttataatatctgttataagaatagttggcttatcttttatagcaatattattaacattaattatattcacaacctataccaaatccaccggtaaaatatgtcatttcaatcttaaaatgacaacaggaaacagtgcttcagaaatgtataccgaacctgacaacagtaaataa

SEQ ID NO: 285923 - DNA, 144 bp, Morganella morganii
atggataaaacactttttgaaaatctggtcagcagcatggaaaagatggtggcaatggaaaaaggacacgttgttccggcaccggaaaataaacacgaactcccggttccggtattaaagcaatctgcaaacatgccggattaa

SEQ ID NO: 285924 - DNA, 609 bp, Morganella morganii
atgaattcagttacaaatcagccagtaaaaatacccttcagagaattaattaaggatacatcagaaaagttcggaaacggcgggctcagtcgttttatctcaggtgtgcagaattcatcggagcagaaattctgctgcacaaaagagcaggctgaactactgggaaccaggaactttacggttctgaaggatgcgttcggacatcttgttgcgagactggatatgaccccgtttaaaaatatctcagatgaaatcaagggataccgggagaaccagtcaattctctcacgtttcttcaaaggccgtgttctggataaaattcagaaacagtgtgccaaaattattgaaatcaataaggattgcagccattcccctgtatcgctccatgacgcaacactgccggattccgaggtttatacgaccaaagagattatggggaaacatcaggatctgatactttttgtgttacagaagagtctggtggccggaaaggatggtgctccggtaaatatcgcccggccggacgtcttaactccggtgaaaataaagaccagcaacccggttgatctgccggcatctgagcagattgatgataaaaaaccggactaa

SEQ ID NO: 285925 - DNA, 1497 bp, Morganella morganii
atgaaaaaaagtatattagctttaattatctcacctttatttattcatgccgcgaatgcagcacgagccgatgttgtaccgcttccatctaacgatgtgattggtgaaccattatttacatttcctgtcaacagagctgttggtgatcgtgaggtcggaatttctgaattagaacaggttacagaacatataggaacgcggttcaccgaatccaatgagataattaaagatattagaaaagatagtgaggagaaatatgatattttagagaaaaaaacaacgcatacgcaccaggtggcaacaagtactcaaaaactggttaatacctttattgatgatgctgggaaaaaaatagtccctgagcacattagccgtatcttaccagacgcgattaaaagcgaattgtcaccacttgaagaacggactgagtctttagaaaataaaacacaggcaatggatgctcagctggatatcacagccagaaaagcggagcataactatacaattatcgatgcccttcctgagcacattaatcgtatcttaccggatgcaattaaaagcgaattgtcaccacttgaagaacggactgagtttttagaaaataaaacacaggcaatggatgctcagctggatattacagccagaaaagcagaacacaataatagtcttatcggtactattccggacttaataaaacaggaaattgagaaagagtccggaactcaccaaaattacgttgataagcggattattccgttggaaaacatagtttattcaaatgaatacgctattcgtcaggaacaggaacatgcggattcagcaaaagtcgtcactcaggcactacttggtgcaacagaagacctggaaactgacgttgacaaactgaaaaataaagtccgggcagtggaactgcaggccagttttgcaaaacattcggcgtataccagtgagaaagatattcgcgaaaacaagaaccaacttggcgtacagtcccgggatatcgcaaaaaacaaaaaattactcgaatccgctaaagtggtgacctccgctatcactgatgccacgttagcgctggaagcggatgtggcgaagatggatacccgcatcagcaacgcatcgaaaaaagccggtacggccacaaatattgctaatcaaaacacacggcatattgctgagcagaaagtgaaagttgagaaaaacacgctggatatcctgaaaaaccgtcaggatcttcgtgcgttagaaaatgatctgcgtgagaccaatgagcgtcttgataacggcctggcggccagtgcggcactgaatggcttattccagccgtacggtgtcggcaaactgaatatcactgcggcgatgggcggataccaatccactcaggcagtcgcagtgggaaccggttaccggttcaacgagaacatcgccgtgaagaccggtatggcatacaccggttcgaacgatgtgatgtacaacatggcggttaaccttgaatggtaa

SEQ ID NO: 285926 - DNA, 663 bp, Morganella morganii
ttgtttgccgttttcggtttcctgagattgcagtttggctgccaggcgctgtttttccgcatcctgagcctgccgttgtttttccagctctgccagtttctgcgagacttttgccagatcggcatttttatcctgcaacagggcgagatttttttccgcctgtgcattatcggctttcagtccggctacctgtttttccagcgcggctttttctgctgtcagtgcgtccagatcttttttcagtgcctcacgctgctggctgttttcatcggtcagcgcgaggatgttgtcactcagctgctgtttttccgcatcccgctgagccagctgtttttccagctctgccagtttctgcgtaacgtttgccatatcggcatttttatcctgcaacagggcgagatttttttccgcctgtgcattatcggctttcagtccggctacctgtttttcaagatcggctttttctgttgtcagtgcgtccagaacttttttcagtgcctcacgctgctggctgttttcaccggtcagcgcgaggatgttgtcactcagctgctgtttttccgcatcccgctgagccagctgtttttccagctctgccagtttctgcgtaatttttgccatatcggcatttttggtttccagcaacgcgacgtttttatctga

SEQ ID NO: 285927 - DNA, 1011 bp, Morganella morganii
gtgaaaataaccggtgagttcacgtatgcgggaaaggcagagaagcatgttgcttatcttgaggctgataatgaaaatacccggctgagagtgactgtaaacgggcatactcatgagtatgccttgtctgaaagccgcctttctcagccgctgggctcattacctgactcactctttttccctgacgggaattgttttaccgctccccggaatgttcctctgcacacggttgtcagcagtaaaaaagtgtccggcgcttttattcatgccgttgagaaaaacaaacttgcgctgattggttccgttaccggcatcgtctgtgtctttctgctttattttatggtttttatcccggccgcgtcatcggctatcacaaaaatcgttcctgatgatttcagtctttatctcgggaaatattcactggaattaattgacggggaatatttcactaaaagccggttgccggcagaaaaacagcaggaagtcactgaactgtttttatcggtgattccggataaattaaagcaggataagctgccgctgaaaatcgcattccgtcactcagaagacggggcgaatgcatttacgctgtctgatggcactattattgtgacggatgacctgattaacatgatcgatcatgacgatgagctggcggccatattactgcatgaaatggggcatcattatcaccgtcatgtcatgcgttctctggttgaatcgtcagtgctggccattacctttatgtggttcacgggcgatgtcaacgggattgaggacaccctggtgcattccggcggttcattattggcactcagttattcccgtaatatggaaacggatgcggatgcatttgccgcgcaagaaatgaaggcgcagcatcgttcactgaaaaggatgatatctgtttttaccaaattatcagattcggcagacgatgacgaaaattcatttctcagtacacatccgggctgggaaagccgtattaaggccattgaaaatcaggaataa

SEQ ID NO: 285928 - DNA, 1218 bp, Morganella morganii
atgcatgatgaaaaaatcgttttcagtgatatcgttgttgacaaagatgatgaaattcatgatgtgaaatttcacggaaaatccggagagtatttcaaaatatggatagttaatctgttcctgacagtccttactctcgggatatattctgcctgggcggcggtcagaaaacgccgttatttttacggtaatactgatatcggcgggtcacactttgattatcatgccgtaccgctgaatcttctgctgagccggattattgttattgcgtttatacttctttatgttttgtcaggtttaattcacccgatattacagcttggtattctgctgattttatttattttatcaccgtattttattttacgggcctggcgatttaataccctgatgtcttcattccggaatatccgtttcaattatcattgccgctttgctcaggggtactgggtaatactggttatgccatttttattaatcactatgctggttattgccgttattgcaggcggaacaagtgccacccttatgcggtgctccgggcccggcgggtgtgatgcgacagcaagtttcatacagggcattatccagatgattattattctggccggtatgtttctggtatttgccgtacaggccaaacgaatttatgatctgtttttcaatcagttattctatggaaaacagccctttgctattcagtcagaactcaaaaaatttcttcagttttatgtgattgcagtgctgatattactgccttttatctgcttaggcggaagcattatgtggcaaatgatgatgacggtagcaatggcaaattattatcagatgacggtttccccggtatcgtttgcggtgaatgtggtatccatgtatctgatttttctgtgcgggcttattgtgacttccgcttatctgcgtgttgcggttatccgctatgtctccgcgcatgtttctctgggtaacatgctgcgtttccggtcagacatttcgctttttccgtatcttatgctggtgttcaccaacagcctgatggttatttttacgctgggatttgcaacacctgtcgcgcaaatccgccatgcccgctatatggccgaaaatatgaaaattatcggtgatatgtcactggcaacggtcagcgcgcatgatgaaaataaggcgggtgcgattcaggatgaaatagtgaacgcctttgatatcggggtttctttgtga

SEQ ID NO: 285929 - DNA, 246 bp, Morganella morganii
atgaaagtcagcataaacgattttaatcaaaacatcatttcaatgataaaaaatccggatttatcagaaggtgaggatatccttatttatgatgataataatgagttagcgggtgtcattatccaacccaaactttatcagtttatcattaataagataaacgaaattgaagatgctgaagatagtgctgtcagttacagccatgattcagacaccatatcactggatgatctattaaaggaataa

SEQ ID NO: 285930 - DNA, 150 bp, Morganella morganii
atggataaccctgagtttacggatgaacgcaacgataacgaaattgataaaaaactggcagagcaggccgaaatggaaaggctgagttttaccagacaaagtatcaaaaattttaaaacgctggagcagctattagaggagaataaataa

SEQ ID NO: 285931 - DNA, 258 bp, Morganella morganii
atgtataacgttaaattctccccgaaagctgaaaaagaattaaaaaaactggataatgtataccggaagcggctgttaaataaattagttcttttaaaagagagtccgcgttcaggacctaatataaaatcaatgcagggaacaagtaaccgctatcgttaccggatgggagatatccgtgccatatatgatattattgatgatgaacttgttgttttaatagtaaaagttggctggcgcggcgatatttatgattaa

SEQ ID NO: 285932 - DNA, 447 bp, Morganella morganii
atggctcgtaaaataaaattaacgatggttgaaaaaggtgagttaggtcatatttatccacaaactgtctcttataatgttggtaagaaaaatttctttctggtggaagatgagcagggtaattatctgatcaaacctatttatgaaaacggtactctgggtgacagtatcgtcagtaaaaacttcggatgttactatgatattattcagtcagcttatgatgatgttactgcaacgacttatctttgctgtgttgacttagatggtaaaaccatgcaggtttatttaaccacaacgctcggactggtcagcatatttgaatttgactatgttgtcgatgatcgtaaaacatttaacttcttctttatcggcgggcatctttatttttatcagagtggtgaagatgcaaacggtaaatacacgataacctctattcgtataaattaa

SEQ ID NO: 285933 - DNA, 879 bp, Morganella morganii
gtgaaactgaaaatgcaggatttgaggctgtttaatctcgtgtttgagagcgatcctggttggatactggatttctctaaccgcaccttgtctgctttttttgatgaagaactgaacattgatattgatgatgaacgttatcaggaagaggggacgtcaaaagccaaacgagttagatgcttgctgaaacaggctgatcgtgagaccgctctgcgggttcttggcgctctctggcagtataaaacagaatccatgcctgaacaggctgaacaaagccgtaatgactattacgcactgatttcccgcttagaaaacgctgacaccgatgaagccaaaggcgtaaagcctgtccaggcatggcatggtgttgactggccttcacttatcgctgaaatgaacgagatgaaatctctgccgccacatccacgtggttttcggtttgaagcctggcttgctgaactgttcagtatctttaagcttgctccccgttcgtctttccgaaatacaggcgaacagattgacggaagtttccgactgaatgatgaattttacctgatggaggcaaagtggcatcagaaaagaacgtcggctgccgatctccatgtatttgaaggaaagctcagtaccaaggcaacctggacacgcggcgtttttatcagttggatggggtttacgcctgaaggcctgacggcttttggtaaagggaagcgcgttatctgtgtcagtggttatgatctttaccactcactgagtcatggaatccctttgcccgaccttctggatgctaaaaccaggcacgccgctgaaacgggagagccctatgctgagttcgaccgactatatgcactgaagaacaaacagtacggcacgctgaaataa

SEQ ID NO: 285934 - DNA, 243 bp, Morganella morganii
atggacgaaaagaaactcaaagcccttgcggctgaactggctaaaggccttaaaaccgaagccgacctcaatgctttttcccgcatgttgacaaagcttaccgtcgaaacggcacttaatacggagctgactgaccacctcgggcatgagaaaaatgcgcccaaaacaggctcaaacactcgcaatggctactcgtcaaaaacggtgttatgcgacattactaacaacaacggggagcagtaa

SEQ ID NO: 285935 - DNA, 1770 bp, Morganella morganii
atgacgctcttaagcaccgatccactcacccagctcgctttctccgttcacgaaaataaaggggtttttgctgttcttttaggttctgggttatcccgaacggcacaaatacccacgggctgggaaatcactctcgatctcatcaaacgcattgccgccgcgcaggacgttgaagaacaaacggactgggcgcaatggtaccgtgacaaaacaggtaacgaacccgactactcaaaactattagaagacctgacgatttcgcctgctgaacgccgctctattttgcacaactacattgagccgaatgaagaagaaaaagaagagggtaaaaaattacccacgccagcacatcaggccattgccaggcttgttcgctcaggccatattcgggtcatcctcacaaccaactttgaccgattaatggaaaatgcgctgcgggaacagggggttgaaccaaccgtgatttcctccgtggattctctttcaggcgcagaacccttgacacattctcaatgttatttgttcaagctgcatggcgactacaaagatgcaaggattctcaacaccgataatgaactggcaagctatcccgttgaatacaaccagttgcttgaccgaatcattgatgaacacggcctaatcatttgcggctggtctggtgagtgggatcatgctttgcgtacagcaatactgcgggcgcccaacaaaagatatcccatgttctgggcagcaaaaaatccgccgggcacaaacgcccaagatcttatctcccatcggcaggcaaaaattatggaaatcaccggtgccgatgatttcttcaacacacttcagcaacgagtaaccattcttgaacaaagccgaaaacaaaacccattaagcgtcgaactgttaaccaacagtacaaaaaaatatctggctaaagcagaatttcgcattcaacttgatgagctcttttcaggtgagtttgagcgtttattagaagcaatgaattcagacacactctcccctaacggccgatggagtcctgaagagtttagtcaacgggtatcaacttatgaatcgataacagagccattaggtcgtatggccggaatactgggtcgttggggagaggataaacataaagaattaatatttgatatcattaataacatcatcagccattccaaaaaccacaacggtgggctgagtgcatggataaatctgcgcacttacccggcagtgatgattatgacagcgtatgcgcttggcttaatccgttctcgccgatggggcacattacacgagctgtttttgaaaaaaatagtgatcccccatcacgaaccgtgcagcatcattacgcttttatttttatggtcgtgggaaggcggtggtgatatctggaagcaattggatgggctagacagaagaaaaacagcgttaagcgatcatcttttgacgattatggatgaatggaaatccagcttcatcggaacaaccgccaacttcgaactctcttacgaccgatatgaaacgttagcatcactggcatactttgaggaacaactgtcaacatatccggataaaacccaaattgacatacaatacttccgtatgcctgttggccgggttggttggaatagttcttcctaccgcatactcacccaggaattgaaagatacaaacatccttgatgatttgttaacgcatggttttgccaacaatagcgaagaagacctggctctgtttttacgatgtttcgaaagcatcgcaggacgcatgagctggtaa

SEQ ID NO: 285936 - DNA, 612 bp, Morganella morganii
atgattgataatatctgtctcgacagacggcacgcaccattcaacaccacttacctacagcgtattttacgcgttataaacaacgcgactgcagagcacgcacggacgatggcagttcgggtagacctgcgtcttcctgacaatatgctaattaaccgacagggcctgatatctcgcttcattgaatccctcgatgcgaagattgcagctcgctatagaagtaagttgaagcagggtaaacgaacatatccatgccaccttcgcaatgcctgggttcgggaggtgggtgagcttaatctgaaatcgcattaccacatggtgttgttcgtcaataacgatacgttcaatagtttggggagttacaaagaagacgggacgggcctggcgtctctgatacgagaggcctggctgagtgccttacagcttagtcaccgctcagagcactggacgttagcccatttccccagtaatccattgtattacttggacattaactcccccagttacacagcggtttatgatcagctgatgtttcggttaagttacttcgcgaaagagagaaccaaatcttacagccgtgaagagcgttcttttggttgtagtcagtattaa

SEQ ID NO: 285937 - DNA, 534 bp, Morganella morganii
atgaaaaacattccattgctcaaccattacaatgcctggcttaatgactttacccgcatcaatttgttacatggtttgtgtcagcaggaaatagagcactggcacaaacttgcgattacatcgtgccggtcatcggaaggtatggcatcggtaattgtcatcccacagtatctattacaggtcactcaaacatcccaggaggaagagtgtgctgttatcccccgactgaataaacgtactgactattctctgttacctggagtgttgctcagtgaatgttaccgccttgggaaaagcaggctggcggaacaattacagatgttattccggctgcatacgcaaccgggctttcgacaaacgctgacactactttgctggtgtgaactggttacagaccgggatttagatgaatggtattcgctgcacttaccgcttcctgacactctgaagcaatggatgtcagaaaaacaaaaatcttaccggggactgaaaacgctaactgaaaattatattcgtgccagcaggccaatgtga

SEQ ID NO: 285938 - DNA, 210 bp, Morganella morganii; identical to SEQ ID NO: 103483

SEQ ID NO: 285939 - DNA, 186 bp, Morganella morganii
atgaacgagaaaacggttattgaggaaagtcgggcatgtgaggaggaacgtatcgaaaaagaaaaaatcagactcagaaaggaacaggcagaaaagcgcacctggataaaaaacaagctaaagtggttgaataaagagccccgggcagcttttttccatttttttttaccttgctttatattttga

SEQ ID NO: 285940 - DNA, 825 bp, Morganella morganii
atggctacgcttggtgtaatcgcatcaacatttgattttagttctaaccagaacaaatctgagtcagataccccggagtcgccaaagagttccgtaaaatcagaagagaacagcttgcttctgtcgcattctgataagcaagaaaacatcgcaatagacttagaaaattttctcgggacatttaatgtttccacgttaaaaaaccaaccagccaatggcgtttcttttccagtttttgctaataaaatcaccggggtgcaagatattgccggatgtatcataaatacattatctgatttcgatacaaagaatattattaatttcttacgagaaaccagcaaggtgtggacaagggctcaggaggattttcagcaagctttctcgtggatggatattaaaaatgaagaacaatgtatttgggtgtggaataccatgaaaaataaaggtgtttcccctccgctaaatccacttaataattttcagcgctggtattttatctgtgcaacattcgacttatggaacgggtggacggatgaacaagttcaagaattaacgaaagatcataaaaaaataagccagcagcgccttgaattaatggattcaccttgtactcctcagaaacacaaagcagttttgatggatgaacttgaaaaagcctggaagatgaaactgggtcgcaaggcgattaaaaatcataatgcagaactcatacttccggccaaaataaaaaagaaacttaggaaactctccgttcattacaacatgtctgagtcagatatgatggcctcgcttattgaaagcgagtatgtacgaaacaatctatag

SEQ ID NO: 285941 - DNA, 864 bp, Morganella morganii
atgaatcaatttgaaggttcacaatcactgcagcaatcgctttccggcctgccgcaatgggcatcagagcatattctgcatcagataaaccagcttattcactatgagccggtgataggcattatgggcaaaacaggagcgggaaagtcttcgttgtgcaatgccctgtttgccagtgaggtttcacctgtcagcgatgtggctgcctgtactcgcgaagcactgcgctttcgactgcaggtgggggaacgcgtgatgagcatcgtggatctgcctggtgtcggggaaagtcagacccgtgatgcagagtatgccgcattgtaccggcgacagcttccccggcttgacttggtgctgtggttgattaaggccgatgaccgggcgctggcggtggatgagcatttttaccgtcaggtgattggcgagcagtaccggcataagatgctgtttgtcatcagtcaggccgacaagattgagccagccagtggcagcgagatattatctacggagcagaagcgcaatatcagccgcaaaatctgcctgttacatgaactgttccagccggtaaacccggtttgtgcggtgtcagtacgtctgcaatgggggcttcgggtaatggctgaaaggatgatctgttgcctgccacgcgaggccagcagtccggtagcggtacagctcagtgcgccgcttcgtaccgatgccgttaataaaaaagcctgtgacgattttggggaaacggtaggttcggtagtggacacaataagttccctgcccctgataccagccccgattcgggcaatcattcaggctgttcgcaataccgtggtgtcagtcgcccgtgccgtctggaatttcttcttctga

SEQ ID NO: 285942 - DNA, 696 bp, Morganella morganii
atgccactgacagagcgccgctacgacaggctggcggtcaggctgtcgctgattatcagccgtcttgtggcgggtgaaacgttagagatgcaaaaactggcaaccgagtttgatgtgtcggtccgtaccctgtaccgggattttcgcgaacgactgatgtatctggacctcgagtgtcatcagggatgctatcgcctgcggaccggtgcaggtccgcagggtgaactggatgtgctgacttttgcataccgggccgggctggccgatatctttccggggctggaccggcgtctggcgggcgcactgctggcatcggatggaaccccttgcctggtgtggcagtcaccacagccgataacggccaccagcccgctggtattttatcggctggtcagcgccatcaccggcagccagcgtgtattgttgctcgcggatggtgaacgttgtgacggactggctccgtaccgtctgatatttctcgacggctgctggtacctcaccggtgaacttaacgggcatataaccgtgcatcctctggcgaccatccatgcagtgacaatcctgaacaccacttttaccccgcgaaaacgtctcagcctgttaaccactcaggcaggctttatccgggcacttcctcacttcagctgtattcgtgaagttttgtcacaggctgccgataacgggggatcgggatga

SEQ ID NO: 285943 - DNA, 225 bp, Morganella morganii
atgacctggcattacgagataaatggcgttcgtcacgacaatgtgaccgaagacgacatcaccggcctgattgttcacggtgaactgactgccgccactctggtttggcgacagggaatgacggagtggcaaccggtctccgccaccccactagcttcggtgctacttcagagcgccatacaccagcatatgcccacagcccctgacgcatcaggggctttataa

SEQ ID NO: 285944 - DNA, 909 bp, Morganella morganii
atgaaaagaaaatctttctctgcaaatgtgaaatggagttggttggcattgtctgtggcactgatggccccgactgcagcccaggcaaccgccaaaacggcggtagaagccaagaactgtcagtcagaaaacaatacctgcccatatcctttcgacctgtacaaaaccgacccagcgtacaaaaagtcgtttgatgagaccatgaatcagaatggtttaccggcgatgctcgacgagatgaatggtccagcgggtccgatggaaccagtaaaaattgacggtaaagtctacctgaaaggttttatgtgtgaagacggtaactgtggtaaccacaatctgacattcttgtaccagcctgacctccataacttcgtgggcttctacagcaacggtaaagatgggcagtgggttaacaccccaagtgatggtgagttgaaagttttacgtgcattagtaaaaggaacatcggaaccatcacacactccagccgccactaccgtgaccaacgatacaccgccgccggataccatctggggatttattcggggtaacggcgacaccatgtggaagatgtgtgggggtaaacaaagcacctgtacaataattgccaacaccaaatactacgtggcgataatgaatcataagtctgccaacaattgtgccttcggtgatttatatattgccgagcgcagcgctcgtgtctggacacaggcggaaagtgtgacatgtagtcccaatgcctggatccgtaaagggtcgattaaagggggccaatatctgtctgtggatattggaataggagataccatcgtgaaacagtacccaattggttattggtcggaccaaaaagaattctctggcccaaaccgtccatcctgggaaaaagcaaaacaagcggctaagcagtag

SEQ ID NO: 285945 - DNA, 321 bp, Morganella morganii
atgagaagtcatgttacatggggcctgcagcgggatatcacgccacgcctgggagcccgtctggtgcaggagggcaaccgactgcattacctgactgaccgggccagcattaccggtcagttcagtgatgccgaatgtcttaagctggatgtggcatttccgcattttatcagccagatggaatccatgctgaccactagtgaaatgaatccccgccatgcccactgtgtcaccctgtaccacaacggtttcacctgcgaagccgatacccttggtagttgcggctacgtatacatcaccatttatcccactcaacgttaa

SEQ ID NO: 285946 - DNA, 1317 bp, Morganella morganii
atgtcaggataccggcctaatctattcggaaaagccatggcgattgatggtgacaaaaccacaacaggcgccacctgtatcgcctcgtcaagcatgataaaatacaaaggcacaccagcggtgattgtcggcgaccttaccaccacctgcccgcagtgcaaacagaccggcacgatagcaaccggagacagccggatgatgaataaccgcaaaccacaggccgttaacggctcaattgtgcagtgcggctgcccttatggttctaataccattattgcggcatcatacaaaaatgccggcacatttaatttttcgccattttcgccatcggaaacttcatcaggttacagtcagtataatgaccagcaatatgaccgatcttttcgggaatatgcggctccggtttctgacgaacaagacaaccgaatcagacttgacgcccaacgcctaattgattgcgccgctgaaatttgtgaaaaacacctgtgttaccctgaagtcaaagccgagttcaaacaggaaattcaatccgctgccgatgatattgttcagcaggtcgaatcaggacaaatgagctatgaacaaggtgcagaggaactgaaaaaagaagaaaaaagcttgatagatcaatccttggattggttaatcaacggattatctattcttggcggtttaggtataacaatagcgggattcgcactatgcacgaccgggggaggttgtctgattggtgctccgcttatggctcacggcctgaatggcatgtatgagggggctatgggtttctatgaagggcacagcaacgtacaggggcctctcagggaagggtataaggccacagcaaaacttcttggttttaatgaatcggtaggaaacctcgcttatgatcttgttgatatggggatatccatacgcgggaaattacaattggttccgaagttaacaaaacggtatggtgaaaaaagaaaaataaagccattcgtactttttcattacgggagaaaggatttagattacgcgtttaagcaagcgaataaatatttatttactgccgaaatagccagtgatattattaatttcattaaagtaaaagatgatataaaaaatgcatttattctagataaagcaacgggaacaattatgctaactgtagcagaacctgaaaaaataacaaatatagaatatgtcaaagagcattgcagtatggttattactatcatagggtctgataacgacccatcgtcatactatatttgtaaagataaaaatgggaatcgctatgatgtaagcgaagatggaaagttaatcagcgaataa

SEQ ID NO: 285947 - DNA, 441 bp, Morganella morganii
atggataagttctctccgcaaaaaagggttttacttgttttttttgatttaataataatattaatgactattattacattttatcttggtattgatggcctttctgtttatttttcatatccggatagctttgttttttctcacggagtagctcttttgttttcatttataataatagctattcctgttatattattatcattgcctcccatactgaaagggcggcaggcaagtattacttttcaaaagaaagtggcaaaagtaatgatattaggtttagttttgatggctacattgacatttatatttaatctttattatttgagtactatagatagcaaagggtatgttaaatgtaatggaaccccatcaggttggacacctatgatggcaactaaatatgtcactgataaaaaactctgtttagcgcctaagaaataa

SEQ ID NO: 285948 - DNA, 1446 bp, Morganella morganii
atgagcattaaccataatacagttggtgatcagctcatcggcagcgcggttaacgccattaatcagacccgcattgataacgaactgttaaaactatcacagcaggatcgtgcatttgagctggctggcgaacaaatgcaaaaggtgcgtgatttcatcgcgtcgccgggtaacatcctgggctcaatgagcaccaaacacggtgaaattgccgagcaggtcgaagttggcgtacgcaacgctcgccaggcaatagaagaaagggttcaggacgcctctgatcttagcgccacgtttgacggagtgggtcgaaccgctccggcggattatatgatagatggcgttgacgtacagtcaaagtttatcaacggagttaataataacctgaaccatgtccttcagcacatggaaacctatcccaatttcacccggggtgaatccttttatcatatccccaaagactcctggcaaacaattcaggatgttattgatgggaagccggctgaaggcttgagcgaaaaaacaatacaggctatcagagataaagttgcagaaattgaaagtacaacgggaagaccctttaatgatgtcgtgcgtcccggagtttctgattacaaagatgttcagtggggaaaaattgacgaaacgcttgataagcatgatcaggaattagcggaacagaacgaggcaaaaaaagcagaaattattgacgatcaccaaccatccctaagtgaaggcatgcgcgcaactgcaatgggagccgctttcggtggaacctttgctcttgtaacaggtatatacagcaaataccgtgacggtaaaaatatatttcgcggagagttcaacggacaggactggcaggatgtaggcttagatacattgaaaggtgccgctattggtggtgtatccgccggagcaatttataccctgaccaattacgcctctctgggagcaccgttcgccagcgcactggtcactgccgctaaaggtgtaggcaatctcgctttctcctatcagcgcggtgagattaatgctgatgaatttaccgatcttggccttattatctgcgcggaatcagccatcgttggcgcaatgtctgtcgcaggtcaggcaatcatccctatacccgttttaggggcattggttggttctatctcagggaagtttatggttaccgtagctaaaaatctggacagtaaagcacgccaattactggcgaaaaaaatggaacaatttacatgtcgcttaagtgagattgagcagaaagcgctcaaccgaattctgaatgagttcgcggcgctgggtgagctcaccgcagccgcatttaacgtggaaaacaatcgccggttgctggaagcaagcatcacacttgcccgggctcacgatgttgaagaggcgaaaataatcaaaaatgcggatgaccttgacacatttatgatggcgtag

SEQ ID NO: 285949 - DNA, 846 bp, Morganella morganii
atgttacgtggttcagaaagaaaagaagcattagccagtctcaaaagtacaactaactgttatgaggtacaggctaaaggcacccaggatgagatcactgccctctttctgttacgccagaaatgcagtaaggaccttattgcccgtggtgaaaattttgttaaccgactggcgaatacgcccaaagagtttgataaatcctggagcgaattgaaagcggaaatcgctgaatttgataacgtggtggaaaaactggaagaagaataccgcgcatcacatattggtaaaggaacggctgctgcggggattgccgtaggggcaggcgtcgccgcatttgcccctacggctgcgctggcagtagcaacaacttttggtacagcatccacgggtaccgctattgctacgttaagcggagctgccgcaacaaatgcagccctggcgtggctcggcggcggcgcactggctgcaggtggcggtggcatgtcagcaggaagcgcactactggctctggcgggtccaataggctgggggattggtgctgtaggcatcgctggcggaaccttactggcacgtcgcaaaaacggtaaaatcattgaggaagcacaacaggaagagcgccagatccgcgcaaaaaccagcgaacttcgggtgatagaacgtggtacacaagaactcaggatgctcacatccggtcactatcatggtactgaaggtatcattgatgtgctggaaaagactgcgcctcaggactattgccggtttaatactcatcagaaagatcaattaggggcattgattaaccatatcaatgcattatcaaaactgatcaacaagaaaatccagtaa

SEQ ID NO: 285950 - DNA, 909 bp, Morganella morganii
atgagcgggcatgaggttatggtacaaagaataaccgctattattgcggaactttaccagtgcggttttgtatcacgtaagaagatgatggacgaattcaacatcagtgaacgtactttgtatcgtgatcttaatcgtctgggcgacagaatcatccccgatggtgatggtatttacaggctggctcccgcttacgctaaacctcaggctctaaaagagcaacaaaatctcatcagcgtcctgggcatggcagaactattccctgcaaaaaaaatattctcccggcccgacctgacttcattgatcatcagatcgctgcccggagatccggaagcgaaacgcatgcttgagaataactatagtttgttcgataaagcgattcgtgaaaataacctttgtgaatttcattataaagggaaacatcgcaccgtcgcaccttataagcttattaatataaagagtgtctggtatctcggtgcggtagagaatgaaaaggttaaaggatttcagcttaccaaaattcattggctgacatttaaatcagagcacttcacaccacaaccccatatcatgcaatactttgctgaagaagatgatgtctggttttctttggataagcagattgtactgcttaaaattgcagccggcgtaagtcatttttttaaacgtcgaaatgtactgcctgcccaaaagttaattcgtcaggaacctaatggcgacttgatcgtgcaaaccaaaatggcacacgaaaaccagttatttccattactacgttattggttaccaaatatcactattatttccccggttggcctgcaacaacatttttatcttaagctcaaccaacagataatagaaatgaaatcccattgcagtgaaattatttttgacaacatacaacaggagtaa

SEQ ID NO: 285951 - DNA, 144 bp, Morganella morganii
atgtatttcaccctgttacactggcaacatccgctgtttacccgccggcaggcgctgcggctgcttattcaggtgcagtgcgccgttcatatgacgcgcagaaagagacgggaacgccggatcagaaaaaacgcatcgggataa

SEQ ID NO: 285952 - DNA, 2361 bp, Morganella morganii
atggtccctgtggcaacgtcttatgtgcaggccctgaagagtaaaactgtcattgcagccggcacagccatggggttattagggttaaccgcaggagtaaaagcgcggcgggaccgtttcagttcaccggaatcgataaaaaacgacgaaataaaatcagatttactgaaagcaactgacatgaatactcaaaaactgagtctgtttggaacacctaaaaaagtattcagaacatacagactcattagtgatgagtccggtcaatcaaaaaaaatacaaccccgaaaggcaatgaatttagatctgatcaggctgggttcagagatgtataaaacaaaagactatctgacattctctcttccctcacaacacacggttccggatgttcatcagattggcgttgttaaaaaaataaaaaaaggcataagtcatattacctttgattttagatcggataccggacactcgaaatgtattatcttcagcttaagaaaatataacgccgaagaggtttttaaattattaaagcacggaaaggatctcattgtatgggacaatggtagcgaatcgataagaaagaatttctttatggaccttactcaaaccagtaaatttgatatcaccgttaatcagggactgatgtcttttgttgatgtaaacattaacaatgataacatttatacggacatgactgacaatacattaagtgcattttttgcaggtattaactgcgaaaaaacaagtaagttttacagagaagttcatattaaagatctgacaacagaacacgttaaacctcatgttttattaactgactggtcgggtttcatatccgttgcggaaaaaaacgggataaaaatagaccgccgtataaatccatttactgaagaaagtatgacattttatggcagtaaagagcacttaaaaataatatctgaacgtgaaatattatttgaatcaatatacaaaggcagggtcaaacggtcagtaagtgctgatgcctcgctgacaacagctcttaatgctgtaagctttatccatttaaccagagtcttatctgatccgagggtagacagagaaacaaaagaaaatactatccttgattatgtgaaaattacatcagctgatgctttttctttcagtaccggactgattgaacatatggatccctttaaacttgtttccgggccttatgccgccggagtaaaagggatactgaaaacagcaggggcctccgttgaggtgatattcagtgcactgaacttcatcgaaggtgtggaggagacagatctggcaaaaattgcgtcagcctcactgggtatattgggtgctatctctggtgttgttctgtcagggtttaccgggtttgggttggccttgtttttaatgggaggcggattaattctggatgctatatccgatacaaaaaaaagaggcagacaaagagaagcattttttaaagataccatactcaatgtgaccagaaatcaactgtataattatgcatggatatcaaaaacgaatcagaaaggtgaacatgaaggcagttataatgaatttatactaaccgataacaatgctccaggtgaaaagcaaaagaatgcggctgatgaatatctattttatgaatcgctgagcggacatcagtatataacacctgagaaagccggcagttttgataatgttacctataacacatctccggaaagtgaaaatatgggttttatcggttttaaaacacatgaagaaaccaaggggaaacgggtatctcatattatttacacatcagatggcgctataaaagacacatcttatatcgctcataataatcagggtaaggacagtatccagggatatggcgattttctgaatggcgatgatactatttattccagaagtaccggagccaggattaatgctggtgatggacatgatattgtattcgtatcaggttcggaagacgtcattgatggtggttctggtagtaatacggcaattatagatggattaaagaggaaaatagttcttaatgtttttggtgatggtcatgcgtcagtcggtgataccgtgttaaaaaacttcggaagttacctactaaccggacgtggtcatgagattattgttaaccctaatggcttgtctgatactattccggtatttatttgctcagggggaggacatatcattctgcggaatccggtaagtaccaatggtgaagccgttgttctgcaaaaaggtaacaaactcaggctgccggccggaaaaggttttacatatgcatcaatacctaacagtatttcagtcggaggaaaaacaattgcattacaaaaagggtttgttgtatcggctctgtatgattga

SEQ ID NO: 285953 - DNA, 342 bp, Morganella morganii
atgtataaaaaattactgacgctccctctttttggtatttcattgttactctccggatgcagcgaagatatgcctccaaaatgcgatagtaaggaaacaaaaaatttattaaatcaggttgttgttaattacttcaatcagatgggtgtcagaaatgtaaccccatctattaccggtcatgagatgatagaaaaacatgaaaaagctaaagaatatacgtgtgaggccagagttgtagtcactcaggcaaatggcagaatgaactccgagatagttaactactccgtatttcttgacgaaaataaaaaaggacaattttttgtccaaatcaatgatgactaa

SEQ ID NO: 285954 - DNA, 336 bp, Morganella morganii
atgcccgttaataacaaacaaaattccgctgtcattaatcaggcagctggtgcggttattcgttcattgcgtaaagaaaaaaatttgtcaggctatgatttaggctgtttaaccggattaagccagcagcaaatttcccgctatgaacgtggcagcaaccatctgacactaaacctgctcattgcaatattgcttgctctcgatacgacaccggaggattttttataccagatgaacattcattgtggctttactgacagtaaaaatatgctgtcaattttcagaaagaaacgttcatcatttaatgatgatgatgaaactatattctacagctga

SEQ ID NO: 285955 - DNA, 324 bp, Morganella morganii
atgaaaaaaactattttagcctgctctctgggtttaatggctctggctctgacagcctgttccggcgaagaaaaatcagcatcatctgttccgggtgcaactgaaacctgtaacaaatactttgctgaagtcgatgatttaatgaagaaagcaaccgaaaaagccggtaataacgaatcggttaaagcgcagttagaaccgatgatcaagcagtatgaagatgcgaaaaaacaaatcgccgcaatgcctgctgaccagcaggatgccgcatgtaaagccggcagcgacgcaatggctcaggttaagcaggcaatgggtctctga

SEQ ID NO: 285956 - DNA, 1059 bp, Morganella morganii
atgctcccgccagtatccataaatacagatacttcagcacatatttctcatcataattatcaggcggccccattaacaaccgagcgtgtgatacaaaattcttgcctgacacagaaggatcaatgtagttctcgttccatgggacatctctcttggggggaatatgaacatcttgcatcacttcatgacagaattgactttataaataaagtcacatcttatattacagacaaaattccgttgcgggatacaccaataacattgatatcattaggttcaggtggcttactgacagaatcatttatagatgaacaacttaaaaactcaggctataaagaccttaactggagagtcatagacccagactaccaaaataatggatatgcacagtgccggaacgaatttaaacaacgagtcaataataacgtcatggcatttacaacggagcaggcatatttaaacgagtcacccggacattacgggttagctgaaaatgataaaaatcacggagccactgtcatcttatctattttccctccgacagtattacctgaaataagctgcgaccccgatagtatggttctcaaaggaaggtctgtcgaggacgttagcgaagcaaatgggatttatttgtttgttgtaccaccaaattataaagaaatgttagatcaaattccactcgtcttatctgaagggagccagcttattgttcttaactgtgcgctaaaatgtttaatcaataaacaaggaaattatgagattaacgttagtccatctgaaacaggtcgttttataaataatggaactaaaccctatttggattctctcagtaaaacgtccaatccgacacagaagaaaattgagttaagtcatattggcaacgcttttgataagtatattgaaaaactaaataatcgtgatcaacttggtatgaagttttttatttccgattatgatgtaagtatagcaaaattacaggattactttattgagagcaataataaaacattatttgcgtcttttgataagaatgaaacttcactcaagatgaatgaatag

SEQ ID NO: 285957 - DNA, 759 bp, Morganella morganii
atgaacagtgagaaaaataagcgcacctgtacgcgcagccgtgaagaaatgacaacactcctcgccgtggcccgcagtgaggcaccggcggattatcgtattgataatgttcggatcctggatctgattaacggcggggaatttccgggccctgtagtaataagcggaaatgccattgccggtgtcggtgcggtatataaggatgcgccggcgcatcaggtcattgacggtaaaaatgcagtggttgtccccgggtttattgacgcacacctgcatattgaatccagcatgatgacgccggtcacctttgagagtgccacactgccgctgggggtcacgacgatcgtgtgtgacccccatgaaatcgtgaacgtcatgggagaagaggggattgaatggtttctgcgctgcgcggaacaggcacagcagaaccagtttgttcaggtgagttcctgtgtacctgcactaccgggcagtgatgtgaacggcgcggatttcccgctggcagagatgctgaaatacaaggattatccgcatgtgccggggctggcggagatgatgaatttcccggcagtgattgccggtgaggcggaaacgctggataaactggatgcattccgcggtatgacactggatggtcactgtccgatggtcaccgggaaagacctcaacggctatattgccgggggattgaaaactgtcacgaatcacaccgttatgaggaaggactggaaaaactggcgctgggaatggcgctga

SEQ ID NO: 285958 - DNA, 1326 bp, Morganella morganii
gtgataaaaatttatattattatccggggagtcatacttcttttactggtatttgcactcccctcattagcaaggtgtacaagtaccggtgtatcacaaactgaagatggccgaactgcattgattccgttcggaaaaatcaatatatacgatacgtatttttatccggccggctcattattagcaagtgttattgttccgccaactaattacacatatggtggtgcaacagcctcttctgtattgtggcagtgcgatgccagtgatctctctgatatttatttcctggtagcgactaacggggatgaccgggttggcggctattatgatctgggccaggccgatggagtttcggatgtttatgcgacatactttgcttacgtgggcataaaacaaaccatgagcggtgttgtggtaacccgtaactggaaaaaagtgccggtcagcacttatgcgaccagtggtagtaaaatccaaatccgcctgcaggatatacctccgcttcaggctgagttataccgtataagtcagttaccgggtacaagcgccagaagctattattgcggaaacaataataatgacgggagcggtattgtttatggaaatacagccgggaagctatacagttgtactcagccgaatagttatattcagttagtggggccgggattgacacatgatgaagaagggcaggacagcagcactaactttaagttctggggcgttgataacggattcggttatggtatgagaaacgtgaacaggctttataataccccgacttgtgttgcccggagtgtaacaccacttgtattattaccgacaataacaatcagtgaattagatgcgggtcttgccagctctgctcagtttaacgtcagcgtagaatgcagtaatagtgtaacttccggtacggctaattcacagactgctttaggttttcaggtatcagcaggctcttataacgcagcaaaaacattgaatctggtaaatagcagcaatggtgtcagtatgcttctttctgataactatacgagctctgaaatggcaaaaggggttggtataacaatatcttatagtaactctcctctatctgcactgacattaatcggtcaacagggaacagatccgctgaactcagcgtatatgggcagcagtgcgggctggtacccggtactggataatgcaatacagtcaggcagttcccacagtggttacactaactataactacaatttcactgcaaacctaaaaaaaattaacggacagactgtaacagcaggaaaagtcagagcgactgcaacggtcctggtaaaaatacaatga

SEQ ID NO: 285959 - DNA, 711 bp, Morganella morganii
atgataatgaaactaatgtttcttttattttctctcagcatgattactatgaatgcttactgcggtattatgccttctcagtcgcgtattatttatcatgaagaagataaagagcaaagtctgatgctggctaatactaatgaatatccggttattgttcagacatggatagacagaggagaaggcaatccggaaacggtcaacattccttttatcagcattcctcctgtattcaggatggaaccttcggatataaaaggagtaaggattatctataataaagataaattgccggacaataaagaatctcttttctggtttaacatatacgaaataccacctgaaaaaaaagaattcaacccggaaaatagtgtactaataacaatgaacactcaaattaaattatttttcaggcctgaaaccataaataccataccagaagaagtcgtggaaaaaatcacttgcaaaaagataaataatacaaatatagagtgctacaacccatccttaattcacctttctgttattaatttaaaaatcatgacagatgataataagataaaggaagtatcagggaatgatttaatactgccaccgttatcgagcaaaaaattaacgattgacgctatgcatggcagtataaaaaaaatgatagtcatgtatgttaatgataatggggaaatattagagcaaaccctaagcaatcgctga

SEQ ID NO: 285960 - DNA, 840 bp, Morganella morganii
atgaggaaaacagttaccctgctggcgctctgcctgccgctgtccgcagcaatggcagacgacagcagttgcacggacgcccggcgtcagacaaacctgcaaaatgcctatatcatgaccggtctgcctctcggcggaccgataaaatccgtcacgaccacgcgaaataacaaacaagaatcttacggcagtaacgaaactaccatcacattatccccctgcggggccgtcacacagtatcagcagaaaatgtatcatctgaacagcccggatatttaccggcggtcacaaacccaaagtgacccggataatccgcttcacctgaccggtacatcagaaacccgtttccacgataagctgatgaaatcacagacagacataacccggacaacggatgataaaggacggatttccggttataccatgctgaacaagagcggggatgacggggatcaagaggataccgtagctgtccgtttcacctgggaaaacgaccgggttcacagcatgaatgaggtgaatacggatggggaaaaagcagaaagcagcctgtatcactatgattcacaaggccgcctgatccacattacccggggaacaagtgcctcagaaatccgctttacttacactgatcagccatggccgtcagtgattcaggttgagatctaccgcgacaaggaagtctttaatgtgctgacagcacgctgtgaacaatgggatcatcacggtaactgcctgctgcaaaaaaattatctcactgattattacggctattctgcgaatgacaatccggagccggtcttacagaccatccagcgttaccgctatgaatattactga

SEQ ID NO: 285961 - DNA, 363 bp, Morganella morganii
atggcaattaaaattatgatggaaaacccgaaaacaggtgaaattgtgaccggtttttacggttattcctggaccaccctgctgtttggcgcgtttccgagcttattccgcaaggattttatgacctttatcggggtctttgttgtcgcctgtattatcagctttctgacgatgggaatcggcggcctctttatttcaattgtctggtcgtttatgtataacaaatactatacaaccaacctgttacgcaaaggcttcaaatttgccggaacgccgacagaaaatgaaatggcagccagatcactgaaactgcgtctgaatgaagataactgcatcaccaaacaaggcccgattgtcggctga

SEQ ID NO: 285962 - DNA, 840 bp, Morganella morganii
atgaaattaacgtatatcacaccaaaacaaacacccgaaaagtcataccatacaacaacatcaccgctcatattcatgaccatactaaaggaaaaaataactcaggtagaaaataaaaacctggaatttagcagtaagtacataaatataaacacagacattaccagattaagtaatagcgtattaaaataccagagcgatatagaatcaaatgacctgaaattacatgggcattctgaaaaagaaaaaaataaagagccgagtgaaatattaaatgacagattaaaagagtggtgttctcaagaaaaaaatacgagcataccctctattatctaccgaaaaatagacaaggaagtacaagaaaaaggtataaaattatcaggaaaagtaaaagaagaaatactggatttaataaatgaagtatatatatccagccgtaaattagaaaaaaaatcctctgccatctctatgatgcatgctttaaaatcagattgcatattgaatggcaaaatagacacaatgaaaataaaaaaagaattgattaatgacataaaaaaagaagcaccagaagaattcaaatttctggtagagcactttcataaaaatgatgaaataaaacaagatgaaaaattgctgacacctgctgagcttgctgtttactatgacattccaatagtaagagaaataaccggaaagatgatatcagatgtatattacagcttaatagaacacatttacaatatattattaagcgatacaaaaacaggagagaggctggatttccgggctatagagaatgatataaaaaatgaaataaaaaatgaaataaaaagacaataa

SEQ ID NO: 285963 - DNA, 1065 bp, Morganella morganii
atgtgtattcagggagtacagcagcatcagatacctgcacacccgaacaatgatctgcgcagcaccactggtgccgtgagtcagtcatcgtatgtcagttcatccgggattaagtccgttttattgaatgcgtggaatacagttaaatctgccgtttccggcatgctgtcatcatttggtttgcatctcagcggagaacagggcagtgataaaccgggcagggaaatagtgatggatatatcttcgcgtcctctgccaccgaccccgttatcgggtatggatgctcagcttgaaagcaatatttatgagagcagtaatgggaatatctgtaattcggttgatgttgccaaatcagagtacccgggcaggaaaataatgataggtatgtcttgtcgtcctctgccactgaccccgttacagggtatggatgagcagttcgacaagaggatttatgccagcaataacaatgaagatacttattctgagattgaagattattattccgaaattgaagattattattccgaaattgaagattattattctgaaattgaaggtgattattctgaagttgaaagtagtaattctgaaactgaagatacttattctgaagttgatgaaaacgaatcatcagaggttgatgtccttgaaaataatatttatgaaggcccggacgtttaccggaagggcaacggtgaaaccgaaacagcagaagccgatgactctgcaaaacatacttatgaagacccggaagctgatgaccctgcaaaacatatttatgaagacccggatgtttaccgggatgcagacaatgtaattaactcagggaacatggtgctggtctgcgatgatacttatgctgagccacctgataacctgagtgcaggcggcagagcggaacaagaaggtatagattcgaaatatgaatcattgcatgaaaataactatgctgtgccgtataagcccggaaatatggtcagtataccggataatgaccggaagcaatcattaccggatgcacaattacaacagcgtataatgagagaaagactgaacatatcgtaa

SEQ ID NO: 285964 - DNA, 7563 bp, Morganella morganii
atgaatactatttaccgtattgtatggagcaaggttcttaatacctgggttgtcgccagtgaactggccaagggaaaacagaaaacagcatcaggccgctccctgtcaattgcacagcattccgcttcccgcctgagccgttactttaaactgcattttctggcgaccgcgattctgtccgcatttaccgtaattcctgcttatgcaatcagcccttctgagtgcgcggccagcagttcctgtgtcagcgtatcctcatttactgaattaagaaatgcgctgacaaccggtgataaaacaacaatattatttcttaacgatattaaactcaccggtaacattgatgttaaactgacagaaaataccaaacaaaacattgtgattgatggtggcggatataaacttgacaccggaacctcttcgtttaacttcaacaaccttaataatgctaactgggctaatgaaagcactttcacagtcagtaatttatcaggcttagtgagctcaacgtctattggtaattacatttttaaaaccgacgcgaatgcatcaacaaaaattaatattattctggatgatatcggttcggttactgacagtatgatcgccgttctgggcaatatgggcaatgctgtttcccagaataccagcagcgaactgaccttcggtaatataacatcccccgttgctctgaccttcggcaccaaccatcagcttgctcaggcaaacaaaattaatttcaccggtaaattaactatcaatgccacgacaggttcctacccggccgtcttctggtcgaatgcctctccggcggaaagtatcattcgttttaccgccgatgccgatgtcagtataaaaacaccaaacctgaccaatggtgcaggggcaagtaataagcattatcagtatctgatggacgatggtgcagcgttttccttaacatccgatcaaaatatttttggcagtgataataacggtcttgtgctgggttcctatgacccggttaatggttttggtaacggggtttcactccgtatcgcgcggttcaacggtactaattttactgccggtgacggcgtcagtaacagcggcggtatcagcaccggatacgataacggcccgacaggaaataaagatgtggtatttaacctggcgggcggctcactgattaatatcagcggtacaacaagcaacggtattctggcaacgaaaacaggtacaggaaacagcagtaatatctatcttgcctccggtggtgaactgattaccggaaccgggatcagcgccgcacatgccgggagcggcaatatcgtactggaaaacaaaaccggcggtaaaataacagcggtaaccggtataaaagcagttcacagcggaacaggttccgcatcactggaaaaccacggtgatattaccagtacagcgaacggcatcagcgtttcatcagccaatcagcagaccgtcaatattaataataccgggggtacgatcaatgccacatcggggaatgccgttgaatcgttgctgaaagcacaaatcaatatgctcggcggtgtcatcaataccagtggcagcgccactgcgtttaaactgaatgatggtactcaccagcttaccgatatcaccgttaatctgaacggcaccggtaatatgtttgccaaaacggcagcggcgcaggctgccctgaccggtgttaccctgaatgtcctcaacggtaccgggttatcagatatcagcggactgacatttaaagccggtcagaagggtaataacaccatcaatgtgaacggctccggtaccggtattgccctgacgaacaccgcgttatccgggctgaacagcgacgcactggatatcaacgtcaacgatgccggtaacgggattgttactaccggcggtggtgttgatctgagcaacagcaaactgaccgtcaatgtgaccagtccggagggaacggcgctgagtattgccgacggcagcagtaatatcaccaccatcggtcagaatattcagctgaatgccgccggtgcgacagcactgagctttaccggcaccgccgggcgtacactgatcaataacggcacgatcggcggagatgtgaaatttgccggaaacgccgcacagactatcaccaataacggcacactttccggttccctgaccaccggaaacggtaacgatatactgacgctgggtgcaggctcaaaaagtaccggcgcgatcaacctgggtaacggcaataaccaggtaaacattgataacggagcagatatccactccgtcacaaccggcagcggtgatgatattttcacactgaataatctgactcagggaagttcctatctgggtgatattgattcgggcagcggaaataacacgcttaactttaatcactccgccgacacgctgaaaaatgaaaccacactgcggggattcagcaatattaacctgactgacagtgatatcacgctggccgctgacagtaatatcagcggtggtacggtactgctggataaaaacagtcagcttcagttcggtaatacatttaacggtattctgaatgcctctctcggacaccttgctgccggtgacggtaatgcggtagtgagtaataacgcggcagtcacattaagcaaagccaatacgtttacaggaaactggctgattgctcagggcgggacgctgactgccggcaacagtaatcagcttgacggaagttcactgacggtggacggtacgctgaatctgagcggaatcagtgagctgaataatgcactgaccggcagcggtaaactggcggttgacggcggcggcaacaacttcagattcggagcccttaccggcaatgcgtataccggtcatgtacaactgaaaaatgccctgttttcgctttccggccagaatacccaatcactggcacacgcttctcttaccaacagcagcggaaccaccctgaccatcggaaacggggaacaggcggtcggtaatctggatctgaacggcggcaaaacgcaatttaccggggacggaaaaattgccacaggaacattaaatgtcagcagtaacggcattattcaggttgatccgttactgaataccgccggtaatctcctggatgccgacaccggaacaaacagtcagcttatcagcagtaacaataccctgacggcagaagagctggcacggctttccttacaggatctgtccggaaatgcgctgcagaacaatgtgacatcagccgttattcagaatggtgaaacggtggctgacggcgtgtataactatgccttatccggcgccggaacggggcttagtctgtcatcacaactggatagtcttactctgctgaccggcaaaatactgacactctccacacaaggggcggttaacagcgataaagccttaaccgcacgcctgagcggagccggtgccctggcaattgacgcaggtgcagaaacactcaccatcaataattccggtaataattataccggtaatacccttgtccgtacgggtaccctggcactgggcagtgataacgccctcggtcagacctcatcactgaatgtcaacgctaacgcggcagcaaatctggcgggtcatacccagagcaccggcgcgctggaaaacgccggactggtgacactcggtaatggcggcgtgctcaacagcggtgccatgagcaacagcggcactgtggatctcaccggcgggacactgaatctctccgccggcggcacctcatcggcgaccggcggcctgaccggtgacggcaccctcagtgtcaccggcggggatctgtctgtctccgccgccaacagcagtctggcaggcaccacgcagatcggcaaaaacgcctccgtcaccctgcgtgacaacggcaccctcggcacggcggcggtggctgtcaccggtaccctgaacctgctggcggataacctcaccctggtgaatgccctgagcggcgacggtcaggtcagcacacaggccgccgtcaccctcagcggtgataaccgcagcttcaccggcgaacatcacctgaacagcaacggcaaactgaccgtatcgcaggcacaaaacctcggcgcagacagtgccacggttcatctggatgccgccggtgccgcactggttctcagcaacctgagcggcagtattcacaatgcgctgtacggcgtcagccgcaccacggtgtctgtcaccggcggcagcaaggcggagatgaccgccgataacagcggcttcctcggtaactggcaggtcagcggtgacagcctgctgcgtgtggctgccggaaacaacctcggcaaagacagcagtgtgaatctggctgccaccggcgataccctgcaactggccggttatcagggcatttttgccaacaatgtcagcggcagcggactgctcagcctgaccgacagtgccgccgtcactctcgacagcacacagaaactcggggcggatctggctgtggggatcgcggataacagtgccctgaccctcagcgatctggccgggtttgaccatgccctgaccggcagcggtaccctgaacatcagccgtcataatgcgtcagatacctttgatttcgggagcaaaaccggctctgcgtttgccgggaatgtcagcctgaaaaacaccgggtttgttctggataacctgaatacagcagccctgacaaatgcaaccctgatcctttcagaagggaatatcacctccgtgtccgacggcgtgcagaaaatcggcggcctgaccatgaacggcggtgcattagcctttaatcatatcacggactacagcggtgaattccgctcagagggcacgattgaggcaggtactattgatgttaccggcggcggtgaaatccgggctaaattaccgggtaacgtgaccccgggactggaaggtatgtcgcttctggaactggatgaaggatcggtcattgtcagtctggcctccggacaggcgaaaggttcgggcagtgagctgacgctgaccgatgaaaatggtcagccactgagtcaggatgtctatgcgaatgtgtcaaataccggctcaacagtcacatcggcaaaaggcacatttaattacggactgacaaccggggcgaagtatgacggcctttatatcaactacggtctgaaagccctggaactgctggccaccggcgatgatgcactgaagctggaagccactgccgccaaaaacggtacgcagtccaacgggctttccgcactggtatccggcagcggagacctggtatttgcagcggttgatgacaacgcggtagcctctctgtcgaacggcaaaaacagctacaccggtgcgacccttgtccgtaaagggcatcttcgtgccgatgcggacggtgcgctgggacagacatccgaactggcactggcagacggaacatctgcggatatgaatcagacacgccagaccatcggcgcattaaatacagcggaaggcagtacactgctgctgaatgacggtcatctgacgattcagaacggcggaacagcagccggacaactcagcggtaaaggtgaactgaccctgaacggcggagaactgacgcttgctcaggcaaacacagcactcaatgccgttgtgaacattgccgcagccgcacaggctaatctgaacgcagtgaacggactgggaagcggcgatatccgcaatgacggtaaactggttctcagtaatacacagggaaatttcaccaataatctcagcggacagaccggccgggtggatttaaccaataacagtgccgtttatctgagtggtgataaccgtcagtacagcggcctgttctcgaccgccgcaggatcatcacttaccgcttcgcatgccgatcagctcggaaacagcagtgtgcagaatgacggggtattgcatctgaacacggataccacctgggcctttaccaatcaggtcagcggcagcggtgacattattaagaacggcaaaggtacgctgcaactgactgacagccatgtgtctgcgggtaacacactggtcgaaaacggattattacagttaggcggtgataagccggtcacatcagtcactgtcggcgatatggatggttatcgtaatccgatcgtcacggtggtaaataatgtcgtcagtctgaccagtaacgtttctgtcagcagtcagggcgccatcggcggttacggacgtgtcaacggcaatgtcagtaacgccgggcgcatcatcatgccacatgcactgaccggaaacagttttgctgatttcaccattaacggtaactacagtggtaaagacggcagcaggctgattttcgatacggtgctggccggtgataatgccgcgacagaccgcctggtgatcaccggtaatgcggacggcagcagtaaagtcactgttcataatatcggcggtcacggtggtgatacggctgacggtattaagattattgatattgccgggcagtccggcgcgaactttgagctggaaggccgggtggttgccggtgcttatgaatatcatctgtatcagggcagtacgtcagcaccgggtgacggcaactggtatttacgcactgaaaatccggatcgtccggaagccggaagctacaccgcaaacctggcggcggcaaatacgatatttgtcagcagtatggctgaccgcagcggcgaaaccctgtataccgacatcatgaccggagagaaaaaatcaacctccatgtggttacgtaccgcgggcagtcataatcgttcccgggataacagcggtacgctgaaaacacaggataaccgctttgtgacacagtttggcggtgatgtggcccggtggagcggtaatggcagtgatctgtggcgtaccggcctgatggccggttatgcccgcagccataactcgtcggtgacttccggcagcaacgcccgctcaaaagggaccagtgacggctataatatcggcctgtacggcacctggtttgcggacagtcagacccgcaccggcgcttacgcggatagctgggtacagtacagctggttccgtaacgaagtgaacggtgaaggactggataccgagaagtatgattccaaaggcttcaccgcctcgcttgaagggggttatatcctgaaagcgggcgaaagtcagaatcaccagttctgggttcagccaaaagcacaggctgtctggatgggcgtcaaagccgatgatcataccgaagcgtcgaatacccgtatctccggtaacggtgacggtaatattcagacccggctgggtgtcaaagcctttatgacatcatcaccgcaggaaggcggagagaacaatcaactgttcaaaccgtatgctgagctgacctgggttcataacagcaaagatttcggtacaacactgacccatgaaaccaccggcagttatacggtgaaacaagggggtgccgcgaatattgcagaagtgaaactgggtatggaaggtaacgcctctccgcaactgaatatgtgggggaacgtgacacagcaggtcggggataaaggttacagtgataccgccgttatgctcggtgtgaaatataatttctga

SEQ ID NO: 285965 - DNA, 843 bp, Morganella morganii
atgaaaaccgtcaccaccgcaggtctcctgcttgccgtactgttcactgccgcgccgcttcaggcgaaacaggcggcagtacaacataccgaagccagggcactgcgcggtaatattgccgcacagataacactggcggataactttcgcacacagcaggatattgagcaggccaaatactggtaccggaaagcagcggaacaaaataacccgtatgcccagaatgagctgggaaaactgctcctgctcaatgatcagtctgtgaagtcattacaggacgccaaaatctggtttgaaaaagccgcagtgcagaaatatgcgccgggacaggtaaatctggccaatgtgtaccttcatctggccgatttaaaccatcgtgacaacaaagagatagtgcaggcccattactggtttgaacaggccgccaggcagaatatggccgttgcccggtatcagctgggtatgatgtatttatatggagaaggggcggatcaggatatcagtaaagccagaacctggttcgagaaagcggcagctcaggatcagccggacgcgctttatcagctgggtgtaatgtattatcgcggaaaaggctgtgaacggagtgattgcgccattgcccggaatttttatgagcgcgcggcgcggcagtcacacggcccggctcagttttatctcgccatgatgtctcttcaggggcacggcacgcagcaggattacggcaaaggtgtggcgctgatgaaagccgcctgtgacaacggcgagccggaagcctgcccgtgggtaaaaaatctgacagaaaatgaggatacattccgtcagattttctccggaaaaccgtaa

SEQ ID NO: 285966 - DNA, 174 bp, Morganella morganii
atgagccagtacgaattagattattcattcagtgacgcatatcaaagtactctgaataacatttcaaatgaactccggaaagaagccgaaacaatcgcgtatatgcatatacgtaatcctgaagtgaggatgaaatttttaagggatataagtcagtacatttcaagaaattaa

SEQ ID NO: 285967 - DNA, 462 bp, Morganella morganii
atgaccattcttttaaaacaggttggttttgttggtggcggtatgcagattatcgccggttatggtgcttgtgcagccagcgttggcctgttatgtggttcattaggtgtaggattggtcgctcagggcaccaataatatgtacgaaaatggttattatcttttattcagggaaaacacaagcggatatctgagagatggttacagatatgtatcaaaaaatatgggctatagtaattatgaagcagatatgacttacaatattgtagacataacattatctgcagggagtttagctaacccagtgttaaagcctggtgcctttaaattatttgattactatagtattgattttattacctcttttcagaagatggggaagataggtatcggatcagaaatattttttgattcagtaacaatttattcagcgtatgatttaaaaaaagatgataaaaaatga

SEQ ID NO: 285968 - DNA, 954 bp, Morganella morganii
gtgaaaaaactcaccattaaagatattgcagctatctgtaatgtcggtaaatccactgtctcccgcgtgataaataacgagcagaacgtcaatgaagaaacccgccgtaaagtcctggcagtcattgaacagaataactttacgccatcaaaatcagcacgggcgatgagaggattaacgtgccggacatttggtattattgttacccggcttgattcctattctgagaatcaggcaattcgcgcgatgttgccggttttatataaaaataatattgaccctattattctggaaagtcagtttgaccctgcaaaggttgatgagcatctgtctatgcttgaaagacgaaaggtggatggcgttattttatttgcatttaccggtctggacagagagcaattatcctcctggcaaaaaaatatcgttgttattgcccgtccgtttgaagggtatacctgtgtctgtaatgatgattccggaaccgtaaatcatttgatgaattatcttcatcaggagaagaattttacagccatcagttatatcggtgttaatgaacacgatgaaacaaccgggctattacgttatcagtcttataagcattattgcgaaaaatataacatagtatcggatgcagcattaggtgaattaaattatgaaagcggttatcttctcgctgaacatatcgtattgaaacgcccccaggccatattatgtgcaactgaatcattggcatttggtgtcaaaaaatatcttcttcatcatcagattaatactatttttgttgcctgtatcggacgaaatgacttattaaccttcctctttccggatgtaaaaacatgtcgcctgggtattcgtgaaaccggtcagaaatctgtcaacttattgattgatatggttaatggcaatttttcacccaaaatacacttagtcccgtcaccttcttttacttattga

SEQ ID NO: 285969 - DNA, 1425 bp, Morganella morganii
atggagattaatgttcacagtgatgaactggatcagatcatcagatttaccggcggaaaggaaaatatcagtacagtatctcattgtctgacacgattacgctttgtgttaaataatcctgaactggcagatattgagtctattaagcaaatacccggggttaaggggtgttttaataacgcgggtcaattccaggttatcatcggcatgaatgtcggtgactactaccgcggcttaattgaaaaactcaatatatctgaatcagataaagaaaaaaccaaggttgctgccagaaaaaatatgaaattctgggagcggcttattgccaatctggccgaaatttttgttcctttgctgccggcattaatttgcggtggtttattactggggctccgcaatgttatcggtgaaatgccgatccgcgatgataaaccgctgacggcgtattatgactggttaaagccaatatatgatttcctgtggttaccgtgtgaagcaatattccatttcctgccggtggctatctgctggtcagcaaccaaaaaaatgggcggttctccgatcttgggtattgtgctgggcattacattagtatcacctcagttgatgaatgcttatggtatcggcagtcagacgccggatgtctgggatttcggcttatttgctatccagaaagtgggctatcaggctcaggtgataccgtctattctggccggtttattcctcggctggtttgaagtgaaattacgccgccgtatccctgaatatttaaccctggtggttgtaccgatcatcagcattctggtttcggtggtagtggctcacgccattctggggccgttcggacgtgctgtcggtaatcttatttcggatggtgtccgctatttaatgctgggtgattatgccttaatcggctcaatgatatttggttttttctactcgccactggtcattaccgggttgcatcacaccacgctggctattgatatgcagttgacgcaaagcatcggcggaacacctatctggcctatcattgcattatcaaatattgctcaggcctcagcggttgtcggcatcattattatgagccgcaaaaaggacgaacgcgaaataacgattccggcggcaatatctgcctatttaggtgtgactgaaccggcgatgtacggtgtaaacctgcgttaccgtttcccgatgctgtgcgccatgattggtgctgcattggcagggttaatttgtggttttgcgcatgtgttatccaatggtattggtgtcggcggtattccgggaattttgtctattcagcctgctttctggggtatttatcttgttgccatgatagtcgccattgttgttccgatcttattaacaatgatgatgtatcgttatcagcagcgcaaaggcaccctggtaacttccctgtaa

SEQ ID NO: 285970 - DNA, 2697 bp, Morganella morganii
atgtgctatttgactgtgtctgtaaaagaaagtggtgctgatattttttccggcagcgataaatatgactatgctttttgctggcgtgagatatcggttaaaacatgcctggatattttaaccgaaatcagccgtgattttcccggtattaaaggtggtgtcattacggggatgcgggtgccggattatcctgcattttgtgctgaacttgccgggaatgccattattgacctggagaaatcattttcggaaatcttcaatgtgccttttattgcacagcagggaacgatcgtattaacagaaagcgatctggcgcaggcactaaaacagaaatatgaacaactttgctggaatatcgattattccggatttacggcgggcaaagaagaatatgccgcagaatcattattaaccaccgcaaacggatatctcggggtgcgcggagcactgccggatatgcgggcaggtgatgcggtgtatccggcaacctatctggccggttgttataaccgtgcggagtcagatgtcgccgggaatacggtatcgaatgaagattttgtgaatgttcctgatgcccgttccgtccggataaaaatcggcgatggtgagtggttatcgccggaaaattgccgcaataaagtcttgtaccggaacctgtgtttaaaaaccggtattctgacgcagacctgggttgcagaagattcccgtaaacacctgattcagattaacagccggatgctggcggatatgtcctgtccggaacggtttgcggttgaatacagcttcactcccctgaatgttgatgcggagattaccgttgccacctgtattgacggcacgacccgtaattatggtgtggaacgttaccgcagcctgacatcagaccattaccgggtattgtcccgcggggcggaaggccgttatacacaattaaatgcacggacactgcaatcaggtatcggtatcggtgtgaccgcaaaaataagcggggatttttttactgacagcgatattcagataaaagagagccctgataaagtacagcagcttattacctgtcatgcgaaaaagggaaaaacataccgtcttgcaaaaagtattaacatccgtctttcatctgtttttccggataactgggctgatgcggataaaacaacgctggctgattttgctgttcaggcagaagcgtctgagcaggcatggaaaaacttatgggataaggccgatattgttattgacggcgatttaatgtctcagaagttattacgtttgcatatctgtcatctgctgtcatcgtgttcaccatacagtaacggaaaatataagctcgatgtgtcggtgacggcccggggattacacggagaggcttaccgggggcatattttctgggatgaaatatttatcctgcctttttatattatgcatttcccgcaaacggcccgccagttgctgatgtaccgttataaccggttaccgggagcgcggaaaattgcacaggacagcggttgtcagggcgcggtgtatccgtggcagtccggtctggacggcagtgagcagacacaatcggtgcatctgaatccgctgaacggtcactgggatccggattacagccatcttcagcgccatgtatctcttgccgttgcttataatatctggctgtactggaaaaataccggtgatgcggaattcatgcggctgtacggtatggaaatgctgacagatattgcccgcttctggctgagtaaagcggaatatgatgaggttaccgggcgttattctgtcagcggcgtgatggggccggatgaatttcatgagcatatcagcggcagcagcgccgccgggctcaaagacaatgcctataccaatatgatgatctcctggctgttttccgtcctggctgaactgtatccgcagtttcataccggcggggaagacaccgcgtttatccgggaaatccgtcatgccggtcagcatttatcgctggtcattgatgatgatgtcattgcacagtttgacgggtatttttccctgaaagagattgactgggaacactataagaataagtacggcaatatttaccggatggacagaatattgcgtgcggaaggtaaaagtgcggataattataaggtggccaaacaggccgataccctgatgatattcaataatttttcccgtgatgatgtcaccgggatattgaataacatgggctatcacttagggcgtgattacgcacagacgaaccttcattattatttaaaacggacctctcacggctccacattatccagagtggtgcatgcacaactggcctgtgataccgggttgcacgatttgtcccgggaattgtatcagcaggcgctgcgatcggattatggtgatattcagggcggaaccaccgctgaaggtattcacaccggggttatggccgcgacaatcaatacggcggtaatgtcctatgccggagtggatattcgtggtgatcgtttatctgtttcaccatcattaccggcggaatggaaacgtatccgttttaatttacagcatcgtggtgttcattattactttttaatctcaccggcatcggtatctgtcacggcggataaagaggcctatatcgatattgataatgaaacacatcagattacagcaggcacgccgttttcatatcattatgtaaaggaatacacatcatga

SEQ ID NO: 285971 - DNA, 660 bp, Morganella morganii
atgaaatcaggatttttattcgatctggacggtgtgattgttgatacggcaaagtatcattatattgcatggcgatatattgccaataaggcaggctttgatatcagtgaggaatttaatgaaaacctcaaaggcatcagccggatggaatcattagaaaaaatattagagtatggtcgtcagtcggatatgtacagtcatgaggaaaagagattactgtcggatgaaaaaaatgattattatgtgaaattactcgggaagttatccgaaaaggatattttacccggggttcatgattttattgtccgggcgaatatgcttaatataccgtgtgccgttgcatcggcatcccgtaatgcaccttttattttaaaaaaactcaatattgataattattttaaatcaattgtcgatcctgcattgttgagtaaaggtaaaccggatcctgaaatatttctgaaggcagcgtcatctgttaatgtccagccgcaggatgcaatcggttttgaggatgcgcagtcaggtattactgcgctgaacagggcgggtgttttttcagtcggcgtaaccgcagatcatgcattattacgtggtgctgatcttattatttcgtcgtttgaagaaatcacgcctgaatatgtattaaaaataaaacaataa

SEQ ID NO: 285972 - DNA, 1386 bp, Morganella morganii
atgaaattaacgcaattagcattgataacagggtttgctgtttctgtgttccctttttctgccggtgctgaaacatcattaagtgatattgaggcgcgtctgaacagtcttgaaaaaagagcggctgaagcagaagccagagctgtggcggcagagaaaaaagcagaacgtctggaaagtttaatggctcagaatacggcgccggccggcaataccgataagggaaatacatcgggtttcagtaatatcgtcagcgcagataacggtaaagggtcactgaaattatacggtgatgtggagttcaatatagatgctgccagccggaaagggcagattacctcaatgcatacacagaccgggcacggggccgatgatttcggtgataaagagcgctgggatattaacggacggatactgattggtcttgacgggcagcggaaactggataacggcaactatgccggctttagtgttcagccgttagcaaatatgaccggtaatatcgggctggatgatgccgtattctattttggtaaagaaaataaatggaaatataaaatcggccgctatgaagcctatgatatgttcccgctgaaccaggatacgtttgttgaacattcgggtaacagtgccaatgatctctatgctgacgggttcggctatatctatatgatgaaagaagggcgcgggcggagtaaccacggtggcggaatgaacctcagcagccaatatgataactggtattttgaggtgaatacgctggttgaggatggcagtcgtgtctttaaagatcaggaatatcatggacgtaaattacagaataaaaagaatgtgatttacgttcgtcctgtggtggcatggaattatgataatgtcacgattgcgggtgctgtggatgccaacgtcatcagtaatgcctacggttttgataatgctgacggcaaatttacggatcagtcgcgccgtaccggttatggcctgaccatgaaatgggataccctgaaggatgacccggagaacggggtggtggttaatctcagcacggcttatctggatgcgaagaatgaaaatgacttctcagccggaacgaatatcttatggcgcaagttccagctgggttatatctatgcacataatgatattaaatcctatcaggttgtgaatgcacttgatgacagtcagtatgatacgttaaatccgggccggtataatattcataccgtattcacgtcgtatgagttaccggatatattgggcatggataattttaaaacctatctcggtgcgtattattcccatattaacgggaaaggggatatgacgatggttgacagtaaagataacgaccgttacggggcgcgtgtccgttttaaatacttattctga

SEQ ID NO: 285973 - DNA, 354 bp, Morganella morganii
atgttagatccgaaaaatgtacagtcagtactgaaattcagtactgaatcaggaaacaactcggcttcagaattacagaaatcctttatggaaggggttgaaaatatgagtatgtccggttcggatgcctcgcgttcaatactgaagaacgttaatcaatcctgtgaccagatgatgaaggaaatgggaaaaatgttcgatggtcttcaggataatctggatgctcatcagaaaatgcagcaggccgagcgtccgaaagatttcgataccgccatgaaagatttgcggacaacgctttcctccggtttcccggaagagatgaaaagtatgtttgataaaatgccgaagatataa

SEQ ID NO: 285974 - DNA, 3474 bp, Morganella morganii
atgatcagacgatttatcatccttatcattgcattggttctcagctacatcatctggtgggtcgggccgatggttgccatcggcaacttttacccgctggcccgcgtgctggtacgccagattattatcgctgttattcttttctgggcattgtggccgtttgtggctttcctgttcagccgtctgttccggtttctgcggacaccgctgccgaagccgagaaagaagattatccagcttgaccgggtcactgcccgttttaccgatgctatccggacactgcagtttattgcgctggcgggcaaaaaaacccgcagcgaacggatgaaaatccatctcagccgtgaatacatcaacaacaagccatggtttgtggtgatgggtcccgccggatgcggcaaaacctccgtcatttataacagcggcgagcagttcctgctgtccgagcagtacgggttatcccgcacaaccgatatcggcccgacggttgactgtaactggtggctgacagagcgcgccgtgtatattgataccgccggagaatgggtacagatgcacggacagagtgacgatgccggtaatgcacggcagaaattgtacgctcttatccgcaagcaccgccgttatcccggtatcgacgggattattttgtgtgcggatatcggtacactgctgtatgccccgctgaccgagcggaaatcgctggctgacacattacgtatccgtattctggaaatggcggcactttttcagtccgatattccggtttacctgctgctgaataatattgaccacctgcccggcggtgaggcattcctgaatatcgccgatgacgatctgctcgccggcggtctggggatcaaactgcaatgcacagacgatcaccgcaataattttattcatgatgaaaatacctatcaccagcttcagatccgggtcagcaactatattctggaaaccctgcacaatgtgccggatgacggattacgccaccagcttctgttgtttattgaatcgctcggcgcgctgcaaaaaccgttgttttccttcctcgaacagatttttccggcttctgcgacaggctataccggctgtctgcgtcagttgtggatgggcagtactatcccgctgatcgcacgtgagagcctgtataacgcagacagcgacgggttgtttgatgaacgtcagtccggcggcatgtacttcccggcgctgatgcaggccatcaccgagcgcggtgtgctgcacagtgcccgctaccgcccgctgcgcaacaagctgatgtccgccgcccgttattccgcagtaacggcaggactgctggcaacggtgatgctgctctcctcccgctacttctgggagtcggattttatttcttatgccagcgcccgctttgaggaaaccaaacggattgtccgcgatatcccggtcaccagtcagtttaatgatgacctgattgccgcttatgaacagctcggctatatcaacacgcagtttctggaaagctctccgccgctgctgacaccgtatttcgagcataagctgctgagtaatgcgatggagcagacttaccggcgccatctgtacaagatcttctggcctgccgtggaaaattatatcgccaatgaactgaaacagagtgcgctcaacggcaataccgatgcatatgacacacttaaggtctatctgatgatggtttacccgtcatacagagagccggaggcgctggaaaactggtttatgatccgctgggataactacgcggtacaaggctataccgaaactgaccgccgcctgttccgctatcacctgcacgaattgttcagcgacacctcatccaccgccccggcggccaaaatgaatgcggaactggtgcgtatcgcccgcgttaatgccatgaaaaccccgatccatctgcgggtggttaaccgtatcaaagataaaccgctgcccgcaggtattcagaatatctcactggcagacgccgcaggccccagtgtatcgctgatgctgcgccgcaagagcaccaatacggtaaccgattccgccgtttccggtttctacaccaaagccggttataaggatgttttcctgccacagttacaggatgcagccacagatatgatcagcgaagaaaactgggtactcagtgacaacgccgaaaaacgtggtgatatcggtacacaggaggcgattcagacattatccaatgaagcgctgaaagcctacctgtctgaatatgccaatcagtgggacagttttctgaaagacatccgtgtccggccaatcagtgatcttgatgatgcggcgcaactcgcccgtcagtttaccgaaccgtcttcaccgctgactgcgctggtacagtttgccattgatcaaaccactctgagccgcgaaaaccagcaggatgccaccggatggtttgcccgtcaggaaaacaagctgactcagacccgccgctcgctgctggacggggtcagcaatgaccggtctgcgggcagcacgccggagaaaagtctggaggctcgttttgaggcgctgcaccgcctgcggcaggccgaaacgaccggagccaatgatccgctgttcacggtttttgaccaggtttacaacaaactggccaccctctccgcctcgctgcgcgccggtcagatcctgccgcaaaacagtgaaatcaaccggttacgtgatgatatgcttcgtcagccggagccggtacgcagtgtcatgatagatctgctttccacgggcgaacaacaaagcctgcaaaaaagtaaagagaatctcagccgtggtgcttcatccattgcctctgattcctgccggacaaccatcagcggccgttacccgtttaaccgcggcgcgagagaggaagtcggtatcggggatttcacccgcatgttcgcacgcggcggcgcaatccagagtttctttgattcaaatctggctgcctatgtgaataccggggcaaccccctggcagatccaccccggcagccgcggcgtggtatcagccaaaacggtggcgtcattcgaaaacgcggcccgcatccgggactccttctttgatccggccggtacaatgtcgatgtccatgattatccgaccgatctcattatcgccttcggttctggaagccgtactggatatagacggtcagataatccgctacagtcacggctatcaggagccggtcaaaattaactggccgggccccaaaggcggcatttatacacgtctgacattcaaaacacaggacggacaggtggaaacggtcagctttgacgggccgtgggcacttttccggatgtatgacgccggtaacccggtacaactgagcagcaacagccgccagctcactatggcaatgggtcaggtgaaagggttctttattgtcgagcttaattcaacaatgaaggattatccgttgtggtcacgggcattaaaacaattttcctgcccggggaatatctga

SEQ ID NO: 285975 - DNA, 1599 bp, Morganella morganii
atgaatgagtttgaacgccagatcaggagtgccatatctgcggcccgtacaggcatgaaacaggccgaacactcgttaaccaacccgatatggcaggccaaaagcaccgccgcatccatcggcggtatcattccggccggtatgcgggggatgggcagcacacaaccgcaggatgacgatctgccggaattcacggcggccaatgaagatcccccgcagtcatctgcgaacccggctcagagaaaacagaatccgcttccgccgatgcgccccgcacaacagcgggagcgtcagcagagcgcccgtaccaccggacaaaatacatcgctgttcggtctctggcataacccctatatttcagccgggatgccgctgctgttgcagattgagtggttccgtaatgagccgcagaccgattttgtctgcgcccgcctccagatcgtccggaaactggaatttttccgcaaagatctgcgcagacaaggattcccgccggaggagatcaaccacctctcttatcttatctgtacctataccgacggtatttttaacgacatggtaaaagaggagatgacgggactgagcctgctggtggaattccataaagatgcctggggcggcgaaaactgttttgagcatctgaaagaatacatcagcaatccgcaggataaccatgatgtactggagttctattatctgatcctgtccatgggatttgaaggtaaataccggatgctcgatcgcggggccgtattgctgatggatctgcgcaatcacctcagcgacctgctctatgcacaaaataccacgctgttcttatccgatgtccgtgcggaaaacgtcaaaccaccgaaacgccggtttatcaccgcactgcgtatcctcattaccgggcttatcctggccgttatcgcctacggtatttccgcctggtatctccatgaacaggcgcgccagatccgcaatgacattctggcatgggttccgccggagccgcgcaaaatcaatattatggaaacgctgccgaacccgctgacccaaatcttaagcgaaggctggctggaagtccgtaaagatccgcgcggctggctgctgatcttcacctctgacggtgcgttcctgaccggtaaatccgaactgacggaagacttcctcagcaaacgcaatatcgagcgtctgggggccgccctcgcgccgtggccgggtgatctggaagtcatcggccataccgatgccaccccgttccgcaaaacctccgccaataataacctgaagctgtcagaggcccgtgcggtggtggtcgccgatattctgcggaccaataccatgattaatcagactcacaaccgcgaaatcaccgcgacaggccgtggggaaagcgatccgatcgcggataacaccaccgatgaaggccgcaaacgtaaccgccgtgtcgatatcttatggaaaatcggtaaacgcgatgcggaacaggccatgcagggctatcaggacggcgatgttccggcggtactgaacgggaccccggcaccgtcagcgggtaatcataatgacaacacttcagcggaaccgcctgtgctcccggcatggatgaagtaa

SEQ ID NO: 285976 - DNA, 1356 bp, Morganella morganii
atgttgttaaaacagcgtgtagcctgggttgaagggatgctgatggaacctcagcattttcagcagcaggagcggtatttcgaacattttacggatatgcgtatccgcagcacagatgctcttgcctggggttttcgtcagatacatctcgacaccggattactcgatcagggaaaaatcgccctgacccgtgcccgcggtgtttttcctgacggcaccccgtttgatcccggcggtgacgacccgctgccgccgccgtttgatccgggtccggactgccagggacaaattatctgtctctccgtcctgatggatatgccggggaatacctttatcgacctgtcacaaagcaagagacagagccgcttcagtgtgattaatgccgatatccgtgaccgcaacgccggtctggcctccgaaggtacgccgcagatggcgacactccagctcggggatctctgtacacggctgaatgtccggagtgcgatcagcgatgcggaatccctgctgcccgtggcgcggatcaccgaaagaacccgtgacggccgcctgatactggatgataaattcctgccgccgatgctcgatttccgtgcctgcggctggctgaaaagtgccgtcaccgaactgctcggtctgatggtacagcggctggagagtgtttaccgcccggatgtgccgctgaccaccggcggactgactgaattactggaactcctgctgttacagacactgagtgagtaccatctgcgcctggctcacctgctggcacagcctcaggttcatccggagcggttgttttttaccctgctgggcctgctgggacgcctgagcattatcccgggtaaagaaaatacttcgctgcaccaggatttccactattcacacaatgagccgcagaacgcgtatttcagcctgtttgccgcgctgcgccgtgccctgtcactggtcattgaggcaccggctatcgccctgccgtttatcgagcgcggcgacaatatctatctgtaccagaatgatccgcagttacgtctggaaaaactggtctttatcgtcagtgcagagctgccgggcgataccatgagaagttatttccctgcccagaccaaactggcgccggtggaaaaaattgtccagcttatcgacctgcagttaccgggtgtgcgtatcaccccgatgtcatcaccgccgcgtcacatcccgtattacccgaacagtgtttattttgaggtggataacgcggacccgatgtacagagatatgctgtccggcagtgccgcagcactgagtattgtcggtgatttccccggattacgttttgaggcgtggggcttgcgtcaggggagagtaggatga

SEQ ID NO: 285977 - DNA, 474 bp, Morganella morganii
gtggtgccgggtattgtacttctcagcagttgcagcctgatctggccggacgcaccggaaccactgccggcggacagaaccgtcagcctgcggattgacgccgccgccggggtgaatactgacagcagaggtaattcattaccgatccgggtctgtgtatttgaaatcagcagggatgactggataccgccggggctctaccggaatgccccctgtgatgaggcggcaccggacccggtcatgatccgtcagatgcagcatattttaagccccggtgaatcccgccggtattcgtttgagatcccgcgggaaacggcacgctggctgctggtggccgcggagtttcagatccccggaaaaaataaaaacactgtactgattaatacggaagttaataaaaattcaaatgttgttgtcgtggtccgggaacgcagtctgacacagatgaagatacctgtttcagataagccctga

SEQ ID NO: 285978 - DNA, 309 bp, Morganella morganii
atgatcccgatcccgggacccaatatcgcaccgaacaccaccgggatacccaatgtcgccaactatttctgctgcggcggtaacgagcagaacctgatgagcatccgggcatcaaccatttccaccggcattattctcggtgccaccggagcacactcggcgcagatgacgccggttcagggatcaggcaaatactttattcagggcagccccgcgacccggctgggcgatatgagtatgacgaataactgtaacgctcccggcacccagattgccccgagccagacgaagtattttatcaatgcctga

SEQ ID NO: 285979 - DNA, 594 bp, Morganella morganii
atgtttgacacaatacatcatactgatacaccggttttatccggcagaccgcttttttccgcgccggaaaccccggtgatcgccgcaacacggcttattgccggcgataacggcggactgctgttgcagtcacatccgtattccgccgtgactgtcgcggcagggtgcctgattgtcccggaaaaaggcgatctggtctgtgccatggttcagggtgacagcgcctatgtgctgtcggttctggaacggcacgccgcctccgccccgctgacactcagtactcaggataccccgctgcatatccgcgcgccgtcactggcactggaaggaacggagagtatcaccatgaaaaccgcccgtttttccctggtatcacacacctcaaaatgggttgcacagacactgcgccagattgccggctctctgtttgtcagtgcggagaatgcgcacaaaaaggttgagaatcttgataccaccgaagccggtcacattgcccagcatgctgaaaaaagcatggtcctggacaatgaaatcggcgctatcacatcacgtgccgtccttcgtattgatggcggccaggtacatatggggtga

SEQ ID NO: 285980 - DNA, 1104 bp, Morganella morganii
atgaacgaaaccgcaaaacagattatggatttgcagccggtaaaactgatccgcgataagcatttcagtcagttacaactgaaagatgacaccttgtcacatctgcattttacagactgccgctttgagcatctcagcacggataatgtgcaggcgcatcagctctgttttctgcgctgtaaattcgccgccgtttcactgagtaaaagcctgttaaattcctgcacgtttattgagtgtgagatagacaccatcacgctggcagaatgcggtctgctcagtgtctcttttcagcagaccaccatacagtcgctgagtgcggacaagtgcctgtcggagcgctgcatgatatccggcggcaggctcagtgagagtacctggaaagaggtcagtctgagctactggtcggcgaatgactgtgagatcagtcactggcataccgaaggcggccttgtacaggacagcaattggttcggctgcaccctgacacaattccgctgtaccggtgcgcagattacccggctggtttccggtaacagcacactgaccgattgtcagtttaccggcaatgaatgcgacatcctggtctggcagaactgtcatctggtacgtgccgatctgcggaaactgaatctcacctccgccgggtttgccaaatcccggctggaacagtgccgtttcgacaacagtaatctgcattacgcccagtacaatgagggatcactgcacgactgcacactgaccggcacgcaactgacctgcgcccagtttacggatactgagttgtatgagtgtgacctgagcggcgcacaactgatttccgccgttctggtgcgcgcggtgctcacactctgcattctggatgacaccacattaacccgcaccgatatgcgtttttgtcagcttaaacaaacgccgctgcacagtgcggtgatacagaaagtccgcctgcacggtgcggaaaccgggctgaccgatcgcggacagaaatcggatgagcctctgctggcatccgttgatttatggtacgcccggcatcagcccggcgtgaaagatgacaccgggtccccccgtttacccccaggagccagccgttatgtttga

SEQ ID NO: 285981 - DNA, 2205 bp, Morganella morganii
atgatgcgtattattcgtcctcagcaacttgctgtactcagaaacagctaccagattggcagggagtgccggtcaggtatcagtgtgattgcgggcagttatttatccgcccctgatcactttgtcactgaagcacagatttggcaggcatggaagtctgcccccctttcctttcgtatgttagatactgctgagccgaaaccgcatgccgaatatatccttgccggccatgccggcaccgggcagacactgacggcgctggatgttgccgtccgggtcgggtcgctcagccgggcgtggcgtcttgagggagacccgtttacccgcgttgcaatggatcacaccgaagcgccgggcggcagcgactgcaaagaaaacccgctgggtaaaaatgtccgccgcggtacacgcccggtgctgagagaagcccgtgccgacggagccgcagacccttatattaacctggccgcaccgtcgccggtgccgccggatttttatgtccgccgcagacaccttgatgccgtggctcacgtgatgacagacaaacagtatatggaaagctggtttcccggtctgccgcctgccattgaccgccgttattttcagatggcgccgccgcagcagcagctttccgccgctcagtggccgcgcagcgtgccgtttgaactgcacggcttccggccggatgacgcggtaatttccggtacattcccggcggtgcgtgccagagcattggtgttcggtaaagacgcggcaaccgcagaagagatcacgctggagaaaaagaccctgtggctgctgccggatgatgatctttgcctgatggtctttaccggcagtattccgttgccgcatctgtttgccgcccctgcggtcacactgctggccgcgctggataatgatggtacggaacgaccgctgacacattatcaggatgtgtatcagcgccgcagccggacggataccgctaattttgaatttctccgcgaccgcgaactgatgccggaaaacagtcattttaatgtgatccgcgatatggcggaacacccggattctcagcgctacactgcccgtcctctgacaaaacaggataccgatacgttctatcaggatgtggaaaacgcgattgcgcttcatgaagagaaccagaagcaatacttcgccctgccgccggagcaggaaaccgccgtgccggtcagcgatacgctgcgccggaaaacagtgcagccggcaccggattgcgatgcggtaaccgaaaaccgggactttatctcgctctcatttgccaacacaacattgcagggtaaaacctttaaacactgccattttaatcagtgtgatttcagtgaatcacaactgacacagtgcagctttgagcactgccggtttacctcctgcctgtttgccggggcggtgataaccggttcacaactgaccggcggccgctttcagctcagtaatctgagcggaagtacatttaccggcaccggctgggaaaatctgacgctggatgactgcctgctggaaaaaacagtcttcacccgcagcacctggacgaaatgcctgattaatgacacacagataacccgctgcgaattcacggcgtgtgacatcagcggcgcaatgctgtcacatgccgggctgacgcattcagacttccggcaatgcacgctgacatccctgatagccgataagaccggggccgccggtgtgcgcttcaccgggtgcagtctgacaaaaagctccctgattggcggaaactggacagcgtgttcatttacggactccgttctggagagtgtgacatccggtcagtacagcgatttttccggcagcagctttaccggctgccgcctgaataaaaccggtttcagcaatgccgagttaaaccagtgccgctttaccggatgcgaactgatcgaaacctgtgccgacggcagcaatctgaccggtgccgtgttcagtcactgtgatatggccgggatgcgcctgaaagatacggtaatgatccacgcctcttttatcaaaagcagtctccagcaggccatgctctataacgccgatctccgtgacagtacgtttcgtcagtgcaatttcgccggagcaaacctggccatgatgtacggcaattccggcacccactttgatttatgtctgatggacggcgtccatctgttaccgcgccgcttccggctcagtgtctga

SEQ ID NO: 285982 - DNA, 2346 bp, Morganella morganii
atgcccctgattgaaattgataatgagaagctcaacgggatcgatgccttcccgctcagctttaccgcgcaggaacatctttcgcaggacccggtttaccgcctgacgtttcaggtaccggatcctgatctggatatcggggaactgctcggtgaaaaggcgcttatttctgttgaacaaccggatcagagccgccgcacgttcactgcccgggtggtggccggcggtgatgaggggcagcatcaggatcagtatgtttatcatctggaactgcgcagttggttatggtttctgatgcagaaccgcaactgccgtatcttccagcaccgcaatgtactcaccattattgaagagatatttacccgttacaatgtggcggattaccgcattgaaacggaaggcacgtatccggataaagagtattgcgtccagttcggtgaaagcgatttcagttttgtcagccgtctgatggaagatgccgggctctggtattacatcgaccacagtgacaaccgggacgtcatggtgatcaccgaccaccagcaattcaaaccgctgagtgacggttatgactcactgagtttcctgccggacagcgaagaacaccgggctatccgcgaaggtatccagcgcatccggcgtaaccgccggatacacgccagtgaagtggtattgcgcgatttcgattttctcaaaccacgtcactcccttcagacgcaggcggaagaaaaacgcccgcatttacagggcattccgctggaatggtatgactatgccgccggttatgatgatgtgcagcagggggaagcaatcgcccgcaaacgtctggaggctttccgctgtgaaaaccagattttacagggtgagagtaatgccaccggcctgaaaccgggccacacgtttgagctgaatcagcacccggattcaacccgtaaccggggatttaaagtgctcggctgtgattatacgtttatccaggacgggccggacagcagcagtaccggacgcagagtctcctgccggttccgtgcgctgaatgatgatgaggtttaccgtccgctctgccggacaccgcgtccgcagatcccgggaattcagagcgcaaccgtggtcggtgcgccggactctgaggttcataccgataaatatgcccgtatccgtgtgcatttccattgggatcgctacaaaaccaccgaagaggacagttcctgctggattcgggtgatacaggcctgggccggtaaaggctggggtgtgctggcgatgccccgtgtcggccaggaagtgctggtaacctatattgacggtgatctggacagaccgatggtaaccggtattgtctataacggcgagaatccgccgccgtatcagttaccggagcatatcaactattccggtctggtctcccgttctctgcgtcacggtatgccgcagcatgccagccagatcacctttgatgataaacgctacaatgagcgggtgatgatccacgccgaacgcgatatgcaatataccgttgagcgtaacgcctcctccaccaccggccaggatcgctatgaggtggtgaagcgcaccgcgacagactggtttaaaaatcatgtctcttataaagaggtcaatttctcattcaccggttttaatttcagtgccaccggtatcaatgtcggtctgaccggcctgagcatcagtatgaccggtgccagtatcggccttaccggtgtcagcacctcctttaccggggtgagcacatcgtttaccggggtgagcacgtcctttaccgggcaatccatatctttcaccggcagcagtgattcctcaaccggcatcagcaactcccggaccgggtgcagcaccagtatgaccggtaccagcagttccatgaccggcagttcacacagcctcaccggtttcagcaccagtatgaccggctgctccgcctccaaaaccggccaaagctacagtgccaccggatcgagtctttcccataccggtaccagtgtcagcaccaccggcagcagcacctccagcaccggtgtcagtgtcagtaccaccggcagcagtaccagtgtcaccggggtcagtgtcagcaccaccggcagcagcaccagtgtcaccggaaacagtgtctctgcggtcggctcttccgtttccgcgacaggaagcagcgtcggggtgaaaggcagcgatgtatcagccaccggcagttctgtcagtgtgaccggcagtgatatttcagcgaaaggctccggtatctccgtcaccggattctctttcagttataccggcgccagttattccgataccggcattgacctgaaaacggtcggcatgcagagcaaaaattaa

SEQ ID NO: 285983 - DNA, 975 bp, Morganella morganii
atggcagataaaacaccgctccgcatcaacggcctcagcgccagacaggatttcgccgaagttatgcgccgcattgaacgggtcagcccggcgctcgcggcaaacggcgtggtacgcggaaacactcccgcacggctgcggataatccagacggccgataccggcttcgccccgcgcgaagtggcggatatccgccagtccgccgatccggtcaccagcgccgctgaaattaccgtctggtgccgccatttcgggatgttcgccccgtatggtccgctgccgattcacattaccgagcatgcccgtaccgaattgctggcgcgccgcagtcatgctttccaggatttctcagcgctgatcagtcatcgcctggcgctgttttcctaccgcgcacagacacaactgcatgtcgcggccggccatgacaaaaacaacaaaaatgcctttcagcaacggatgaatcagatcaccgggatttcaccgcaactctctgccggtgaccatattcaccggctccggcaggcatttcccggctgctacctgcccggacggagcatcctgaaaaacttacagtcactgctgacacactattttgccgtgccggttaccgttcaggcgcggcggggaatgtggattgatgatccgcagaatatcgccagccagagaatgggacgtctcggcaaaacccgcgccggaaaacggttttttgatgttgaacacagcctgtatgtgcagataggcccggtgggcagtcagcactatcacctgttccagcgcggcagtgaacgtctgaacgttctggtggctatctgcaacgattttgtctcacaccgccgggtactggacgtgaagctgcttatccggacttcccctgatatggccggtcacaccggcagcggaaaactgggccgcagcggctggctgaaaccggacgggacaatccggattcagtccctgtataccaccgcagcctga

SEQ ID NO: 285984 - DNA, 1848 bp, Morganella morganii
atgctgagtgaccgttttctgacattatacaacgaggaattgcgtttcctgcgggaggaggggctgctgtttgccaaagccaatccccaggtggcacagcatctcggcatgatgccggacggcgtgcttgatcctttcgttgaacgcctgctggaaggcaccgcgtttctcagcgcccgcgtgcatgagcggctcaataatgaacagccggaagtggctattcagatgataaaccgcctcgcaccttactggttcaccccgctgccctccatcgccaccatcgcagtggaaccggacctgacgtccccgcagtggcattcggatgtcactctgccccgcggcagtaaactgacacttcacgatacctcgccgggattccgcaatgccacttttaccaccggccgtgatctgaatatccagccgcttgtgatcgcgcatgccgaatgcgccaccaccccgtcagcacaactgccgcagtccgttctgcaatgcatgcaggacggcagagcgcacatctcgctgacgatgaacacacagggcgttgtttcattatctgaactgaatttctcgccgatgacactgacgtttgcgggcgatgtcgtacacgccaaccacctgctgaccgctatccagagtgatacgctgagggtgatcctgtggtgccgggaggataataaaacgccgcacatgcatctgctgaacccgggacagatccgccaggccggattacaggcagaagatgcattattaccggctgtcagcggggaattgcccggcagccgcctgctgcgggaatattttgccgccccgtcccgctttttcagtattgaactgcacggcctgatgccgtttttacaggcgggcgataagtgcacggaattcaacatgatttttgtgctggataaaacaccggtcaagttaaccggtaatgtcagcaaggacgatttccgtctgttttccaccccggtgattaatttatcgcgccgccgatgcagcccggtgctggtcaatggcgagcataccgaatatccggttatcgtcgataaactcaaccccggtctttatgaaatccatcatctgttacaggtggacggcctgctggcagataaaggctatgtgccgttttccccgctgcacggctatgcacgctttgacgaaccgccggtttccgccggttacagcctgcgccgtgtccgccgggtgacagaagacaaatatgacagcgcaccggctatgccgaaagacagcctgtttatctcactctccgccggtcccgataatttttcgccggacagtgtccgttccctgagcattgaagcactggtgtgtgatcgccatctggatcctgcccgcctgcaacagccggtgttccggccggataccgccctgccggcaggcccggtggaaatcctgcgcacgccgtcccgtccgcagggcgtaccgtgcagcacacaggcgtggaaagtactccagttgctctctgtcaatccgctgcgctacgccctgccggattttccggataacagccagctgctcagagaatggctttccctgttctgtccgccggatgacagccgtcagcagcgcaggatagacagtctgcggcacgccgttatttcacaccgttttgaatgcaacccgctgcccggaccgctcgcctggagccgcggggctgaaatcagcatcgatttgcggggtaatcatcacagtgaccgcggtgcgtggctgtttgcccgcatccttcaccatgcgctcgcggagtattgcgaactggggcagacactgcgtatgcagcttaacgttgatggtgaaccggttgcacaatgggagccgattgatggcagataa

SEQ ID NO: 285985 - DNA, 444 bp, Morganella morganii
atgaaatcatcagcgccaatgttatttgataaattaagtctgaacagacgaagaatacatttaccgcaatggcgtgatgttttattacgcgatattgagttgttattaaatgatgctgcacacagcgcctcattagcattagataaaaaaacatactgtatgaattccgttattaattacggactgccgacactcagtgcgaaagtgcctgtcaatactgatccgatagtgctggcaaaaaaaatacagcaaatcattgccacatttgaaccgagactggatccgcgctcaatccgggtcacaccgtttgtgaataaaaatgaaacctggaccctggcactgcttttcgacatttatgccaaaaccaatttaccggatgacgatctgtccgtgaatttacgtatcgccctggattattcatacggcagtgtccgtgtcatctga

SEQ ID NO: 285986 - DNA, 519 bp, Morganella morganii
atgacagcattagtcgattattttttaaaaattgaaggtgttgaaggcgaatctccggatcagcaatatggcggctggatccagcttcaggcctggcaatggtcagaagagaacgccggacgctggggtttcggcagtggcggcggctccgggaaagtggaaatgaaagactttgaattccgcatggtcagtaacaaagcatcaccaaaactgtttctgatgtgtgcgaccggggaacatattccgcaggcaaaactggtgtgccgtaaatccggcaacggtcagcaggattttatgaccgtcacattcagtaactgcctggtctcaacctttaaaactgtcggtaatatgccgcttgatccgcaaactaaagtggatgcggatacggtactgccgaccgatgttatcagtctgaactttgcccgcatcgaagtggaatataaagaacagaaaaatgatggttctatgggtgccgttattaaagcaggctatgacctgaaggcaaacgcccgtatttaa

SEQ ID NO: 285987 - DNA, 1515 bp, Morganella morganii
gtgagcgaacaattaacccaaagtacgaacgctgcggataaggcggtattaaccgcccctgctgaacagagtgagttagatatcctgttacagcgttcattcagacccagcaccacggaagcctctgtcgccgtccgcagtgccatcaataccctggcggaatatgccaatttcggcaaagtaaaagtcagccgggatgtggtgctgaccattgaatccatggtcgcggaaattgacgataaattatccgcccagatgaaccggatactgcacaacaaagagtatcagaaactggaatcctcctggcggggactcagctatcttgttgataatacggatgtcagtgaaaccctgaaaatccgtgtattaaatatcagcaaagatgaactgtccaaaacactccgccgctaccggggatccgcctgggatcagagcccgatcttcaaagcggtctatgaacaggaatacggccagtttggtggtgagccgttcggttgcatgataggtgactttgaatttgatcacagtaataaaagtgtctccctgctgacggaaatttccaaaattgccgcagcggcacactgcccgtttattacctccgccgcaccgtccatcatgcagatgaataactggcaggaactggggaacccgcgtgatatcggcaagattttcaccacaccggaatatgcgacatggcggcgtctgcgtgacagcaacgactcccgctatctggtgatgaccatgccgcgttttctctcccgtctgccgtatggcgagaaaaccaacccgattgaggatttcgcctttgaagaagtcgtgaatccgtatgatgtcaatgacttcagctggacaaacgcggcctatgcaatgggtgtgaatatcaaccgggcgtttgcggagtatggctggtgctcacgtatccgcgggattgaatccggcgggtcggtggaagaattaccggcttatgcattcccgtcagacgaaggcggttatgagctgacctgtccgactgaaattgcgatttccgatcgccgtgaaaatgaattatccaatgccggatttttacccctggtctaccgcaaacattctgactttgcggcctttatcggctcctgcacactgcacaaagcggtcatttatgaagatccggacgccacggcgaatgcgaaattatccgcccgtctgccgtatatttttgccacctgccggtttgcgcattacctcaaatgtattgtgcgcgacaaaatcggttctttccgttcacgggatgatatgcaggtctggctgaatgactggctgatgaaatatgttgacggtgacccgactatttccacggaagccacaaaagcaaaacgtccgttagccgctgctgaagttcatgtggaagatgtcgaagatgatccgggtttttataaagcacatttttatttacgcccgcattatcaattggaaggtatgactgtgtcattacgcctggtctctaaattaccttcaagtaaagaaaataataaataa

SEQ ID NO: 285988 - DNA, 558 bp, Morganella morganii
atggccaaagatatcagctctcagaaatttatcggcagaaataatgcaccccgtgtgcagattgaatatgacgtcgagatttacggctcgcaaaagaaagttgaacttccgtttgtcaccggcgttatgaccgatttatcaggacatcgcgccgttcctctgccatcagtggaagagcgtcagttcctcacttttgatcaggataattttgattcccggatgcgggcaatccgcccccgtcttgccttctatgttgaaaacatgctcagtgaaaatccggaagagctgctggatattgaactggaatttgagtcgatggaagacttcgagccgggcgcgattgccgcacgggtcccgcagatgcagaaactgctggaagcacgggcacatctgacggatctgatcacctatatggacggaaaatccagtgcagaggacgtgatccggcaattactcgaacagcccgatttcttagtccgcctggcgaatgatgcgaaagccactgttgccgctgccggaccggatatgactgacgcgaacggggagaacgacgagtga

SEQ ID NO: 285989 - DNA, 984 bp, Morganella morganii
atgaatacaagtgatcacgatatttacggtgtggaattcgacccgattttcagcgaggttgaggctattttgactcagtctgaagaatcagccaatccgttatccggagaagatgaacttccgcagattaactggatcaccatctcagaaaaaaccagtgaattattatatcagtataaagatctgcgtgtcctgctgtggtcattacgggcaaatctgtatattgacggaatttcatcattattcagcggaataaaaaccctgaatgaactgattgaaaataacagtgaattactctatccgaaatcagaggatggtgatatccgcagcggtcatgctgccgcactgggatggttatccgcatcgcaatgcatttcagaactgaagctgaccaaaatcaccgctgatcatcattataccctgaatgatatcgcctccatcgacagcggcgaaatacgggacaattatgccacatcactgagtgctctattaacatcactcaccaacagtgatgatatcaatatcagtaatatttccggacatttttcatcggttatacagtcacttgataaaatcgaagagtatgccaaccactatactgacggttatattctcgactgcagcgcgttaaaacaatttctgacacgctgtatcagcacccttaatcagctggcctcattttcggatactgatacccattcagaaccacaggagtcactctctgacggcagtaatccggaaacaccggtaacggcatcattaagcggaccggtcagaatgactgatattaccttacgctcccgtcaggaagtcttaattatgctggactgcatacttgattattttcagcgttatgaacccagccacccggttccgatatttatccagcgatccaaacaaatgattggaatggatttcgcctcaatcgttgaaaaactccttccggagtcagtcagcacattacaacaatttaccggaaagtaa

SEQ ID NO: 285990 - DNA, 711 bp, Morganella morganii
atgggtatcaaagggtgtatcgacatcgcatgggagtttttgcgccgaattcccgagtatgaggaagactggaaattacactgcaacacatccgggacagatcactgtcacaacccgcaaagacaaacggcatccgatataaatgcggaaaaaaaatgggggttgttaaggtatgtcgatcctgagtgtacagcagataatgttttctgggcggaagggctcagcaaacgctcattcagggtattgctgagccacgaaggaaatttatcgatagagaatatcttaaagaaagagaacattgattacagaacgatcattttaaaaaatggaatatactgtattaaagtatttaataattatagttattttcagttttttgttaatcccggaagtgatactgaaaatatttttaacagatatatttatatatcgcttgagttaaacggaaaaaagcaaaacaccgacatcattaatgatgttcttaataataaatcgaaatgttcatcactgtctgaggataaccaattcttactaagaattatggatagtctgaataaaggctactcccagcgggagattgcatcacatttgttcgggcaggagatggttgataatgaatggactcaggatagctggcttcgttcaaatattcgctatcgcataaaaaaggtgaatgacattattagtcagggttatctcaattatatctga

SEQ ID NO: 285991 - DNA, 414 bp, Morganella morganii
atgtctatgaatttatcgggtttaattagctccgccattcgttatattggccggggtgatgctttacccgtaaacacacaacttgataatcattcagcaattacgctctacctggaaaatgcgaaatgtattcatgcaatgacaattgatgacacacctgtgatatggagtgttatttgtgaatataagagagtcgatacccggagtataagtgagtcgttattatcagtgatgaacaattactcgccattttttcacttcggtcagccggcgttagtgaatattgatggtaatattgaattacgggcaacattctcattactggctttaaaaaatgaggagacaatggcagcagcaataaatgattatgcgttagtcatggaaaacatctttaaaatatataatatcaattaa

SEQ ID NO: 285992 - DNA, 1914 bp, Morganella morganii
gtgtttaccgaaacgaaagatgctgacggcaatgtcgtgtcatccattgactttgaacgccttaaggccgagttgggcacgttctcagatatctatgagggacgacgcgagcgttatggaatggaatggccgggtaaacgcgattgtatgaaaatgattcaggagccaagccgtgcaaccttaaagccctgtccggacgagtcttcagactgggataccaccaaaaacctatttattgaaggtgacaaccttgaagtactgaagctgttgcaaaagagctattacggcaaggtgaaaatgatctatatcgacccgccgtacaataccggcaacgagtttatctatccggataattatcaggaaaccttagatacctatcttgcttatgcaggtctgttagatgatgaaggaaaaacgttcactactaataccacttccgaaggtcgatttcacagcaaatggctgaatatgatgttcccaagaatctatttagctaaaaacttgctaaaagatgacggagttatatttgtctcaattgacgacaacgaagttgaaaacaccagaagattattggatgagatatttggcgaagaaaactttgttgcacaattcacttggtctggtggacgaaagaacgattcaaaactggtttcggtatctcatgaatatgtagtttgttatgtaaaatctacagcctgcctatctgaaaataaaattacctggcgacagaagaagaagggattggaggatatctacaaagcggcagacaaagcagtaaaagcagcaaatagcgattttgaagaagccacacgattgttaaaagcatggttcaaagaactgccaaactctgcgccggcaaaacagcataaacactactcggtaattgataagaacggagtgtacttccctgctgatatttcctggcccggtggcggcgggcccaaatatgaggttctgcatcctattaccggtaaacccgtgaaaattccttcgagagggtggatgttttctgatcctgaaaaaatgaatgacatgatcaaaaatggacgcgtacatttcgggccaaatgaatctgcagttccgtgtatcaagtcctatcttaaagacaaggaagaccaggtaccttacagtgttttctatcaggatggccgggcagcgacaaaacggctaagaacactaatgggtgatgacgtttttgaccaccctaaagatgaattagtattaaaagaattatttgaatttgtcatgagagacggtggtattgctgttgacttttttgcaggttcagggagtaccgcccatgctttaatggatttgcagaatgatgatggtgtgaacagaaatttcatcttagtacagttaccagagaaatgtgatgaaaagtccggggcattcaaattaggttacaaaaaaatatccgatatatgtctggatcgaattaaaaaagcatccgacatatataaggcgaaaggggcaaattttgataccggatttaaagtattaaaacttaccacatcatgctttaaagattggcaagccaatgcagacagcagcattgaacagatccaggcacagttggaactgagcgtaaacaacatcgttgccggtaaagggcagcacgaaattctttttgaaattttacttaaagcaggttttgaaccgaccgaatcaattgagtctatcaacctgaatggcaaaaccgtattttcagttgcaaatcgcgctttactaatctgccttgaagatcaacttaccgcagaactaactgatgctgttatcgcattggagcctatgcaatttatctgtctggataaaggcttccggggcaatgatcagctaaaagccaatacagctcaggcgtttagagcccgctcgcaagatagcgaagccgaaatggtcttcaaagtggtttaa

SEQ ID NO: 285993 - DNA, 3018 bp, Morganella morganii
atgtctaatcaatcaacagggctcaagcttaaatttaatgccacgctcgattaccaaaaagatgcagttcaggctgcggttgatttgttcgaagaacaacctctcgcacaggatgcgtttactgtttctgtagggcaacaatcgggtggtagtcaactctcactcgatggcgatggatttagtggtattgctgctgtctcaaaccaattagtgctcacacaggagcacctgctccgaaacctgcgtaaagtgcaggaaaccaataatattgttctcgctgatgaattgctcagcacctcgtttgacttagagcaggaagatgaaaaaggcacctataagcttaaaaagcatgtgccgcatttttcggtagagatggaaaccggcacgggtaaaacttacgtttacctgcgcaccttatttgaactcaataaaacctatgggtttaccaagttcatcatcgtagtgccgggtgtgccgattcgcgaaggggtgctgaaaagcattcagattatgcgggagcactttcgaaagctttacgaccatgttccgttcgaccattttgtctatgactcttctaagctggggcaagtacgccagtttggttcgagcaacaaaatccagatcatggtgatcaatattcaggcttttgagaaagagcaaaatattatcaaccgtgagcaagacaagctgagtggcaacaaacccatcgactttattcgtgcggctaatccgatagtcattatcgacgaacctcagtcggttgagggcgacaccagaaaagaccaaaccaagcgttctgaagccctgcacaacctgaatccgctttgtaccttgcgttattccgcaacgcacaagaacccttacaacttgctgtatagcctggggccgatagaagcctatgatcttaagttggtgaaacgtattgaagtcgccagcatggttgaagagcaaagcttcaacaatacattcgtcgctttaaaagaagtggataacaaaaacggcattaaggctaagctgcaaattaatgtgcaggataaaaccggaccaaagaaaaagcaggttaccgttaagcaaggtgccgatttatacacttcgtcgaaagaacgacaggaatatcaacatgggtggattgtcgccaacattagttgtgagccggggatcgaacatgttgaattcgcaaatggtcaagtattgcgattgggtgagcaactcggtggcttaaacggcgagctgatgcgagcgcagatttatgaaaccgcagagcagcatctcaggaaagaacttgccgttaaaggcaaagggatcaaagttctttctctgttttttatcgataaagtatccaactaccgcgaatacaatgacgacggcaccaccagtttaggcaagctggggcgttggtttgaagaagcttacaacgaactaacacagaaacccgtgtatcgtgggctgttgaatttccctgtggcagaagttcacaacggctacttctcgcaagacaaaaaaggcattgcgaaggacaccacgggtaagactaaagacgatgaagatacctattcattgatcatgcgcgataaggaacgcttgctgtctcttgacgagcctctgcgttttatcttctcccacaccgcattgcgggaaggttgggataaccccaatgtgttccagatttgtacgttaaacgaaaccaaaagcactgatagaaaacgtcaggaaattggccggggcttgcgtttgcctgtcaaccaaaacggcgaacgtgttcatgatgcttcggtgaacagactaaccgtgatagctaacgaatcatatgatgacttcgctaagcaattgcagactgagtatgaggaagactacggcataggttttggtaaattggggatcaatgcctttgctaagttggctaatcctgacgctcgtcaatatgtgaatattggacaagaagcgtcagaagtgatttttagctcgttacaaaaaaatggctatctggatgcagaaggcagggtgacggataaattcgatcctaaaaatcctcacttcattcttgaccttccaccggaatgggcacacatgcgaccacaggtcacggatgagataaataaatacgtgttcaggaatagaattgttaatgcgcgggacaaacgcacgctgacacttcgtaaaaacgttacgctagacccggcattcagagagctctgggagcgcatcagccagcgaacccgattccgcgtgacctttgataccgatgagctggttaaagcggcagctaaagccattgcggaaatgccgcccattcaccgctcacggataacaactgaagtctatcggttagataccaacaaggccgggatcgaaggggagcaaatttctggcggcgtgcgagaaataagccagtcaccggatttgcccgatctattggcttatctgcaaaacagtactgagctgacccgccacactttagcagagatactcaaaaacggtggcaggttaaaggactttcctgagaatccgcaagtgtttattaaccaagttacccagtgtattcaggatgttttgcatcacgtgacagtgcggggtatcgagtatgaaaaggtcggtggtagtgtttatgaaatgcacaacatcgaacaagaggccgaacgcgggataacccgctacttgaataatctgtacgaagtgcaaaaccaagataagacactatttgatttcgttgagtacgattcagaagttgaacgtgagtttgccaaagcttgtgataatgacgagcggatcaagttttactgcaaactacccgccagctttaagatagatacccccgttggcccctataaccctgactgggcattagtgacagagggtgaagaaaaactgtatctggtacgagaaaccaaaagtacacgtaaccgcaaagaactacgtgagtccgagcaagataaaattgcctgcggcgagaagcattttgctgcaatcggcgtgaattacgatgtggtcacgaatttagcagaagcattgcatggctaa

SEQ ID NO: 285994 - DNA, 585 bp, Morganella morganii
gtgaaaaaaatcgtattacttatcgggatattgctcggcattgcgggttcctctttttatttcctggtaaaacctcaggccgatgatccttatttttttctgtcacctaaaattacagaaggggatcctgtaagcatgccgattgagctatacaaacagggtgcaacggtcgattttcttttttgggtaacccccatgccggaaccaacgttactatatatatttccggctaattatccctccatttatgcctggcttgatatagagcgggcacaatatggtaaagatgattttaacaacgattacttgtttgaaaaggaagggcttgtagaagttcaacccaatacaccgcttctgaaaatggcgttatataaaattaattctgatttgactgaaatactggttgctgaggaaacacagttatataacaatgtacaattgtacagaaattttctgctgctgagtattccgaaccgggattacgggcaatatcgcctgagagtgactgtattgggtgactggccggagttaaacaaagatgggtttaagtattttataaccataaaaacgtccttcatcaaatga

SEQ ID NO: 285995 - DNA, 423 bp, Morganella morganii
atgcatcagaaaataacagactcccgcttacaccaaatagccccggagttgggatcacggcccggcttcgaagggctggcttttgacgaaggttgccttacttttacgtttggggagaccgttgtcctggttgaagaggtacgtgagggtttcgtactgaccggatttgtggattcgcttccggatgaaacctcagaacggctgcttgcggcttgcctgatatccaacctcaacgcagttaagtcagatttccccgtaatctccgttgaggaaacgacaagatcgctgatattacaacggtggtctcatgccgggactgcagaggaactcatcgctgcaatggaacagttctccgggcagatcaggcgggtacgtgattccgtatgccggttcagtgaaaaaattgacacgaaaaggctgtga

SEQ ID NO: 285996 - DNA, 2142 bp, Morganella morganii
atgactgctttcctctcgtctattcctgccagcccttcagtccggctgagcacaacatcatcaaagcagctgaatgaatcaggtgttattgcaacgccctattccatcggcggaaagatcctctcgtatctgacggggatcccgatcttccggcattacgcgttttccaggcacgaattacatcacaacaaggcagccaacgccgcgttcatcaatgcaatccgtgacggacttggcgaatacgaggctgagtctgcgcgtctcctgcttggacttcactgtcaaccggggcgggtcatcgatggcttaacagcccgtacaatacttacctgcattggcgcaaaccagcaacaattagccctcagaaagcaggcaattgagcccatcatgccagatccggtggtgcaacggaccactcttgaagtaatcagtcatcgcgaggttgaagctcacaatgggttatctgatgatcccccctccgtcgccgggctttgttgtttgctcaccagaaacgtgtcagatacagatgtcctgctcatgcgaacgaccatgacgggaagcgctctctatctggaaaaaaaggacaaagtcacagcaacgccggcgttactcaagcgcgcaaccgacgcaactgactatatcaatacgtgcccggctttcaaaccttatctcaaagagctctgcgggaattcccgtgtgacggcagctgatctgcggagaatgtcaacatccgcattcgaaaacgagttaaaaagtaaatatcgtgcactagggccatcaatggcgtcacgggacgaaatttgccggacaccgacagaagtgaccatacattggatcagcatgttgcaggaagcaatgaccacaacaacagacgaatccgccaggagcttaataacgggtttgctcaaagggcagcaaacccggtggatggaacataacctgacgattaaagctacaacaaatgcattgcaacgtgacagcgatgtactacgcagtaacgggctttctgaactggccgatgttgctgcctgcagacccgggagcgatgcagcttctaaatcgaaaagcctgcttggtcaactaccggcttccgtgcaggataccccgctgacccgcttgcacgataacatttatggacgagtgtttgagtctcgctggatcgcgaacctggtagataatccaccggaagatattttgtcggacatgcaaaaaataggaggcggtgtagcagacctggtggcggatttacccctgcgtatccggcagaaggtcatccgttatctgcaaaagcaggtagcgaataatgcccgcttctggtttggaaaagtagatagtatcgatacgcttgcccggtcaacatggccgcgttccgatatgcttctccaaaaacttttgcggagcaacgtagcaaacggacagcagtgtatcgctataccttatctttcagttaacgtattcgctgcgttaaggaagtcaggtatcaagagggactggatatgcaaaacgaataaaaattattcgacacatataaaaaaaaataacggtcgtatcacagtgaataatcataacagtgtcatacctgtacctacggcaggtattacactccgtcatcaaccagcagccgtcagtaaagtgtggatgacgacgactaaccggccctccttgcagactcgtccgcgaaccgtcaatattcccatgccggtacaacaagccctattacatggtatcccttatgcgaacggtgtttccggttcaacaaatattatgctgggcatcattgcgcacttgcgggacgagggcaaacacatcgatccgcaatcagcattgcttggtatcaccatgtttctgaattacgatggaggtcactcaattcatgaggttctctgggtcgccaaccagtgtgagcccaggctgaatctgcaattgcgtgcatctccgcgaaagagaaaaaaggacgaatcaaaattcatctcgaattatgaaagcttccaaagcctatatgccgcgacggaatgcaggaaggcagtagctgattcgttatccaaagcatggacggaaaccatcgaatatttccggaataatagctattttacggaatccatcagcaagggggaactgaaaacgttcagtgaggatacataa

SEQ ID NO: 285997 - DNA, 576 bp, Morganella morganii
atgaaaaagcacatcattattaccgcagtattggccagcctgttttcagcatccgttcttgctcatggatatgtcaccaaacctgccagccgggccacaaattgcaagttagagaaaaatcgtcctcaattgtgcgcatctgcacgatgggaaccacagagtattgaagcgctttcagggtttcccggcggagaatccccgcctgatggtcatcttgccagcggaaatattgaacgctttattccgctggatatgatcggtaatatttgggttaaggaaaaagtaaaaccagggaaaatggattttgaatggacgcttaccgcacgacactcaaccagaaactggcgatactatataacaaaaccggactggaaccaggaagtaccactaaacagagaagcgtttgagtctgaaccattctgttattttgaagaccatggcagtgttccgccaacaatcgtaactcatcagtgtgaagtgccggaacgaaagggctatcaaatcatttatgccgtatgggaaatagccgatacccctaacagtttttaccaggttattgacgccgattttaactaa

SEQ ID NO: 285998 - DNA, 243 bp, Morganella morganii
atgcaaatgttaactctggaggaatgggcgggagaacggtacagaagccgtccgcctaaattggggacattgcagcgttatgcccgtggcggcctgtttttacctccggcacagaaagagggtggtatttggcgcgtgagagaagatgccgaacttgtcggcaatttaacatcaccggttaccagtggaagtgataaccccaaactgttgaggattttaaacgatggctgccagaccacgtaa

SEQ ID NO: 285999 - DNA, 2403 bp, Morganella morganii
atgcaattaagaatatcttatttttttattctgatactgcttccgttttttttctccggaaagaccccggcggcaccgtattttaatccggcggcattgagtctgaacggggataacacggtgttggatcccgcgcagtttcagtatctgcgtgaacggcagtttcaggaagaagggcgctattttgtgacagtcagggttaatcagcggagggtaagcagcggctggctggaatttcattatcacccgcaacacaaaaagttgctgccgcaagtcacccgaaagcaatggctgacctggggactacggcctgatgcatcgccggcatttgctgaaacggaaaacacggcaccggttgaggatattgccgggctggtcagcggggttgtgctgaattttgatgcagcacaacagattctggatattacgatcccgcagcggttttttctgacagatgaacaacaggctgcggatgcttcattatgggaacccgggattaccgcgtttatactcaactatgattaccgcttttcccggcaaaacagccggttcagtgatcacaccggacataccctgttactgcaaagtggttttaatgccggattctggcggcttcgccatcacagcagagcagaataccgtgatgaaaaaatgacatggcaatcagaacggctgtggatgtaccgcgctatcgcgcctctgcgcagtgagttgcagctgggggaattgttcagcggtgatgtgttgtttgacagccgcgcattcagggggatccggctggcttcacaaggggatatgtatccgctgaatcagcaggggtatgcgccggttatccgcggtatcgccgggcagagtgcggaactgaccatcaggcagcagggcatggttattcaccgtgaaacactacccgccggtgaatttgtgattgatgatctgaacagcacttttcagggctcggtgctggatatcacccttgaggaagcagacggtactgtgcagcattttatgcagtacggtaccgccgttcctgtcatgcagcgggaagggcggctcagatatacgctggatgccggaaagcttaatcggtacggaaacagcaaaaaaccgttgtttgtacagggcacggcagcgtatggcatcaattctgttctgacattatacggcggcggttatgcggcacagcatgccctgagcagcggggtgggcgcgggtgtcaatatgggggcggcaggcggggcttccgccgatgttctgatgcgccacacaacagcacaacactatccgcgttaccggttaaattatcagaaattttttccgctgaccggcacactgctgcataccggtgccagtcatgaacagcgctcccggcaatggcagacccggctgacacagccgttacccggggataacggtgtggtatcggcaggttatcactatcactgtaccggacatgaggggtacggcggcaggagactgatcagccgtgataccggctatttcagccgggccggccggatacattacggcgttaatgcgcagtaccgcaccggaggccattaccggaaagccgataaacgggtctctctttcgttgtcagtaccgctggattttgccggtcagcaggcgcgcagtcattttcactaccaccagcgggccggacaatcctctctgcagacatctgtcagcggatcactgggtgaagagcagcgcctcggatacgcaatcacgcaccgctatcagcagcaaaacacggtacatgaccggggagcggaactacgctggcgacatgatctggctgatatccgcggcagaattaaccacagcgatgataaaaacatgctgagcggggatattcagggcgggctgattatacatgaaaacggcatcacgctgtcacgcccactgggggaaaccagcggactggctgataccggcggtaccgggggagtccgcatggcatcacggacagccgcgcggacagacagcgccgggttcagtgtgattccgcaactgagtcattatcaccggaatgttgtccgtatcgacccggaaaccctgccggataatgccgatgcggatgatccggtcgtgcaggtgatcccgtctaaaggtgcggtggtacctgtccgttttgcggtgaacagcggtttccgtgccatttttgcattgagaacccggcagggtgtcgtgccgttcgccgcccgtgtcaaaatcagaaaagcagacggcagcagcgtcagcggtattaccggtgaagacggggacgtgtatctcagcggattaccggcacaggggcgtttgcaggcggtctggggaaagggggcgcaggaacagtgcgaagcggatttttcaatcctgccggaacagcagggattgctcactttcccgctgatgtgtcagtaa

SEQ ID NO: 286000 - DNA, 561 bp, Morganella morganii
atgatcgcggttcctgttgataataccgataaaaaaacagcttacttaattcagggctggattgaaaaagcagatggcattacaaagagtaaggatttcattcttaccccggttctctttcagctggatgcaggaaaaaaaggtatcctgcgtgttatacttaaacaagcgctctttccggaagacagagaaacattgctttggctgaatatccgggggatcccggaaacaggtgaacacagaaaaaataaacttcaggttgttatcaattcaaaatttaaatttttttatcgtccgacaggattaactgagcctgattataatgacctgaggtatgaaaaaaaaggaaataaaatcaacatagttaataatacccctttccatattactgtcagacatcttaccgttaatgataaagaatatactgtttcggacatgattattccatttgaatcattaactgtgccgctaacagcgattcattccaatgacacgatcacagccagctatatttctgattttggtggaattatttccagagcggtgacgtttaaaaaataa

SEQ ID NO: 286001 - DNA, 576 bp, Morganella morganii
atgtcttgttttaaaagtaaattgttaatttcttctctgtttttattatcagttaattcacttgctgcggatggtgatgacccctttattgcgcctgaagcaaaagagccgacagaaattaatggcaatattgtatttaaaggtaaaatcacagattcaagctgtgatatcactcaaaaggatattgaggtagatcttggcagtcattctgccgcattgctgaaaaataaagatgacatgacgccggcagagcagtttaatattgccataacaaattgttcattatccatgacatccttaaaaattaatatggccggctctgcacataaagataatgccacactgtttgcactggatgccggtgataaaagtgccggtaatgtcggcattgtgattaccgacattgccggtaccggtaatcatttaatgaaccctgcaggcggcgatcgcaacattacattgcaacatgattcacgggactacacgctgacctacagcgcagcgtatcaggctaccggactggcaacaccgggcgcgggtaatgctactattaattacaccgtttcttaccagtaa

SEQ ID NO: 286002 - DNA, 132 bp, Morganella morganii
atgacaaaagataaaaaaaaaaccgtgaatattcaattcacggtttctgctgttcaggttatgcgattacttgatatctttgatatcgcccattgccttgagttctctggagatttcgcggcgctcttttga

SEQ ID NO: 286003 - DNA, 2151 bp, Morganella morganii
atgtcaggataccggccgaatatattcggcaaagccatggcgattgatggtgacaaaaccacaacaggcgccacctgtatcgcctcgtcgagcatgataaaatacaaaggcacacccgcggtgattgtcggcgatctcaccaccccctgcccgcagtgcaaacagaccggcacgatagcaaccggagacagccggatgatgaataaccgcaaaccacaggctgttgacggttcaatcgtgcagtgcggctgcccttacggcaccaataccgtgattgcggcgacctcaccggcagaatctcaggggttcggctccgttgtctcacaggggatttccgccgtcacctccggcatgtccgccgcaatgcggaacgtcgcatcatggcaggaacacatccccccgcaatatatcaataacgcctcacaggataatgagaggatattacacatcgccttcttttttgacggtgtggggcgcaacgctgaacaggatgcgccacagggacggctgagtaatatcgcccggttgtttagatcttatcctgaaaatgaagataaaactgatattgccgcatacaaaaaacattacatacctggaataggcacaccgtttgacgaaactgccgccgaaaaaattcagagttttatagataataccctcggtgccttcggcgatgaaatgaaaagcaaacccggggatatcggcaaagatgcctttcagtcctcggtgaacggggtcagcggaaaagatatcctgacacagacgaaaaatacgctgctgaccccgaaaggcgtgatcggagagctgaaaagttccgccgtgagcagcctgaaaaaagcgggcatcgaagccacccccttgctgcgtgattcggaatttattgcttacaccgaattaaccggcgcggatacccgcctcaacagtgcaaaaatgcgctttgtgcagtcatgtgaggacgttgtggaagacggaggcgttccggtggcctcgatttctgtttcagttttcggatttgacctggggggggcactggcccgtgagtttctggatatcctgctcggggatatctgcgaaaataacactgacagcgaaccgacttaccacaatattccggttaagattgcgtttgccgggttatttgactgctcgcgggattcgccgctgagcagcgataacgggctggattatgcagcggctgccgtcgcgtggctgcccggtccgctcgcaaaagttgtgggcgcggtggggtcaggcttcggacgccactatcttgagcatatgtccccgttaccggaggttgtcagccactccctgcatctggttgccgcccatgaacggcggcggtggaagtgtgtttaccgtaccggccggaacaccgatgaacatcaggaaatcctgatgcccgggtgcagtgaggacatcggcggcggcctgaaacccggagagcagaaacccagtgccgaactctcccgtgtctcactgcgaaaaatgtatgaagcagcaagacaggctgacgttcctttccctgagctggaaaaactctatgaaaaggacgtattagtctggtcatactttagtatgaatgacagagtgaatgataaaccagtcaaagaatgggctgagaattatcagatgaaagtcggcatggaaaaactcagctacaacgccatgaaccggcaccttgacgggtactttgagtggctgggaaaacagttctatgaatacaaaagtgaactccgcaagcttgaaaaacaggaatcagacatactgacatccgcaggttcgcttcaggggctgggttatacacgagaggccaaacagagccgggctgatatcctcggggctatatcgctcctgaaaaaacactggggctggctgtcagaggtatcaatagccgcagatgttttgttaactcagcaatatcatcttccgccgcagatatacaaggataatctcattatcccagcggaaaaccgcgcgaggaaatttaaacagtacggaaccgcaggatacgacggaaaaccgatgccgtccgcacagtgtcctgacacaccggaaatttatgcgtggtttttgcatgatgtccagcggtcagagggcattaacaacggatatttcgccatacggtggatggagccacgcaattcataa

SEQ ID NO: 286004 - DNA, 543 bp, Morganella morganii
atggactggtcatcacaattccgccgctttgataacgcttttaaccgtttttacgcccgtaaagcctggatggtatggctgattttactctcccctggcctgggcagtgtcgccatggcagcgttcggaccgccttccggtggagtgacgctgatcattcacagtaaactggatcggcctatcctgggattcagtgtcaacggcgtggccggcggtaatgcctgggcacatgacccggacaataaatttacaagcgaaagtggaggcgcaacaacctgctgcggacgcattaccggaaagaccgccgaggtaatctggacgctcagtgtcaccggtcctcagtatgagtcaggaatgcgccccgagcagcggcgggtggtgatcccgatgccggagagaaagcggggcgagaacgacctgcacgtccattttttaccgggcgacaaagtcgtcctcggatggagtgataacgcattttcaccctattccccccgcagccctcactaccgtccgttgccggacacagaggaagcagcacaatga

SEQ ID NO: 286005 - DNA, 387 bp, Morganella morganii
atgagtaccgaaattcttgagcaaaaattctttaaagacccggataataatgtgttctgtatagaaattatgccgataaatcagaattcatggaagtcggaaatacaggccggatggattgcaatcagtgagaacgaggcaaatcagattgccaatccaccgccgacaaaagaacaactgattcttcaggcggaagaaaaaaaacagttcctgattgctgaagttcatactgaaactgaaatgccccgcgcaaaattagcgcttggtcgtatcagtgaaggtgaaaagatacggttaaacgcctggctggattatctggacgaactggaggcagtagacgtattcaccgccccggatattatctggccggtgaagccggaggtgtag

SEQ ID NO: 286006 - DNA, 921 bp, Morganella morganii
atgaaaaaaatcggtgacatcaccgccaccgccgaccagaacggcgaatttaccaacgggaacgtagctgccggtgtcccgccgacgctgctggaatctggctggtttaactcggtacagcgggagataattaacgtcctggtggccgccggtgttccgcagaacaaagacaaagacgaccaactgtcggaggcgataaaaaatcttgccaaagccgccgcaccggatgtcagtgacgcaacgaccgataaaaaaggcattgtgcagcttgatagtacaatcagtgattcagacacgaaagtgccgccgtcgaaactgatcaaagccgcactggcagataaaccatcgacagcgtccatgacgctggagctgaacaagaaagtcaacaaatcggatgtatccgatcagctcgggaatgataaaagcaaagtaccgtcgctggatttattgactaccgaactcggtaaaaaagcgccagcgggtaactatgcggtaaaaggcgagagttacctcaagactgaatcggatggacggtatcagccgaaaggaagctatcaggcagctggttacagctattcaaaaacagaatctgacggcagatatcagccgaaaggtgctgagtcatcggaactggttatagggataaatcaaaaatggacgaacgtcagttcacaacgaagcccgggggtgaattacaccaacggactaaaaaagccgctcatgataaacatttattccgaaatgagcgggaataacgcgccgtggattaaattgtatgttgccggggcacttgttgcccattcacacgtgcgttatgaccagaatttaaaagcagcttttgttactgctattgtaccgccgggcaccacatattcatatcaaaaagacggaacgactgtcgtcgtcatggagttacgctaa

SEQ ID NO: 286007 - DNA, 594 bp, Morganella morganii
atgaattacaccgcggacgattacactcaggcgatgatcggactggcaccgcagggtatggcatgggactggcggtcgggatcagatatgcatgctgttctccgcgctctggcacgtagttatgaagcttcggatattgatgctgttcagctgctcgaaggcgcgtttcccaggacagccacaacgttattactggagtgggaaaaaacactcggtctgccggatgattgtgcgatcggggagatggataccatcccgaaacgacaatctgcggttctttcaaaattgctgcgcaccggcgggatgtcgaaagactattacacaggactggccgtcgaaatgggctttaatatcacgataacagaattccgccaggcgcgggccgggctgaccggctgcggggcggctatcaacggcgaagactggccgtttgtctggcgcgtcaacgcaggggaaacccagcttaattatgccgtcgtcggccggagctactgcggtgatccgctgcgttcctggggtgaccgttattttgagtgccatttcagccagatttcaccgtcgcataccattctgcaggtcgtttacaacctgtaa

SEQ ID NO: 286008 - DNA, 1140 bp, Morganella morganii
atgccgtttaagcgtaaaacactgacggaactgcgggagcagaaccggaatttcctgcgcaatgaactgaaaacccccggtgcgctgctgcgctattccaatatgcgggtactggcggatatggatgccggtatggcgcacctgcattatgcctacctggattatattgcaaagcaggcaaccccgtttaccgcaacagatgaacatctggcaggatggggggcaatgaaacgggtgtaccgcaaacccccgaacaaatccacctgtgagaaggtgcagtttgacggcgttccgggaagcatcattccggccgggacggtgatgacgcggggtgacggataccggtaccagtctgtaactgaaactcatatcaacgcggacgggaaaggctttgcgtctgttgaagctattctgcccggcattgacgataacatttatggcggcggtgctgcgggcaactcgccggcaggcacaaaactgacacttgagatcgccatctccggcgtttcttcggattgcgttgcggttgagccgatcaccggcggcagtgatattgagaacgaagagctttttcgccagcgtgttctgcacgcataccaaaagccccctcagggcggaagcgatactgactatgaaggctgggcaaaagaagtgcccggaattacccgcgcctgggtgaagcgccgcctgctgggggccgggtcggtcggtatttacatcatgtgtgacgacaacggcaatggcggatttccgcaggggactgacggaccggccactaaagaagactatgccgttcatgccaccggcgatcagttacgtgtggcagatcatatctgggatgtgcagacggtcacggcggtggtatgggtatgttccccaatcgcgaaaaagatagattttgaaattgaagggctgagccgggcaacctccggattgcatcagaagatagctaaagctgttgatgatgtatttttccgggacagtgacccgaccggtggcgcaaaaatctatctttccgatctgcagtatgcgattgctgatatcccgggcactaccggttttgtcctgagaaaaccggctgaaaatatagttctgggcaccggtgaactggcgcagcgcggggaggtgtcatacacatga

SEQ ID NO: 286009 - DNA, 411 bp, Morganella morganii
atggcgaataaaaaaaatacgccggagaaaccacaggagccgggcggtctgccgcccgagctgatggttcccggtcaggttaatccggaattacagaaaagtgattccggcaataagccgggtgatcaaaccacagcgaaacaggataccgtgactgattccggtggcgggaataccggagataagcaaggttcagacccggaacagggggctgacaacgtttatgtggtgactaaaggccgctgtgtgcagcatgacggcgagctgtaccgtgaaaaccagcaaatcacgctggatgattcggatgctgtccgcctgattgatctgggtgtggtgatgacgctggaggcagtgcggaaaatgctggcgaaagccaacccgcccggcactgtaaccattaatgggcgttga

SEQ ID NO: 286010 - DNA, 294 bp, Morganella morganii
gtgaaagacattaatcttattgtaggtcagaatatccgcactttaaggtgccgtaacggtatgaccacaagaaacttagcagaccggctgggaatatcctcgcaacagatatcaaggtatgagcgaggaataaataaaatagatgccagcactgtatttaagataataaatatatttgatgttccttatgagagtttatttccagagccagaggtagaagattttactcagaaaaaagattccctgatgtatatggatccggggatattccataatgagtatcagttttattaa

SEQ ID NO: 286011 - DNA, 378 bp, Morganella morganii
atgaccggtctgggaaaagtgcggacgggtatcggtatcatactggttatcagcctgctgcttaccctgcatctgtacggtggcctgaaagacaactatcaggcgctgaaagacaagcacgttgcattaacggctgtaaataacatcaccctgtctactgtcaccatcaatcaccgtatctcactcgacaacatcaaagccaaacaggttgaggacacagagcatgtcaatgttaagactgttatcaaaacagtatttaaggatagtgaatgcgctgttactcctgttcccgctgatgctgtcagtgagctgcggaagtacgcagacggaatacgttcccgcgccggtggtgccaatttcgccacaactgaccgctga

SEQ ID NO: 286012 - DNA, 315 bp, Morganella morganii
atgaaaatgaaagaagatccgagcgtttgggagctgatacagaatctgtatgacacctacagagaacagggtattagtgctgcacttgccgggggtatggctgctctccgtagtatgtacaacggcggagggtggaaaaaaacctctattgacgggctgatgtgcgcggcatttggctggtttgtgaaagacctgctgttattttttggtctgaaccaagatttgtcatatttagccagtgtttacatcggttacatcggctcagatgcggtaatacgtgtaattaaaaacagaaccggagtgaagcatgactga

SEQ ID NO: 286013 - DNA, 471 bp, Morganella morganii
atgaaaaaattaacagtatccataggcagtctgggtagcgcggctgccggtgattatgtgagctttaatatctggcagggcaaacgactgctgctcagtgatcagatcacgggtaaacattccggcacattccatcgtgagtatgatgtggattatatccccggtgaaccactgcgcatcaaaagcaacgcaccggctggctgttctgtcggggtgaatgtggactcatccaatgatgtcgtaacaatgaccggcgttttctctggaaaaataataatgtctaaacagaacggtgatgtagcttgcgttatggggcctttggtcacaaaacataaaacaatagagcagcgtgtagccgatctggaaaaacagcttgctgagacttcgcaagctgctaatgacaaaattggaatcatcaaaacacatctggacagtgtatggatgatggtttctaagtcacctatcgcttag

SEQ ID NO: 286014 - DNA, 321 bp, Morganella morganii
atgactgagagcggacagaaactcgtaatatatgccatggtatttattaacaataccctgaccatttcaaccgaagacagggaagatttctggcttgaaatatcccccgctatcggatggatactgtttcaaaaactacgtaatgaagctgagttttcagctaccggagcactgtttgcagccactgaattgcgtcaggcacatgacttaatcccttacccaagagttcaagcacgatgtgttttgtggcgtcagcgggaagctcttttaagcgctgcaaatagcctttcctttcttctggatcgggaacattccgggtaa

SEQ ID NO: 286015 - DNA, 492 bp, Morganella morganii
atggctgacttcaacagagagttacaattggatatattgaaatgcttggtagatagctatccagatccatttaattcaaattacggatcttctttaattgttaactcttcaaatgaagatctaataaaaaatatttcttacctcaatgaagaggaattaattactggtggaatagattacgctttaagtggccctatattgacattaggtacagcaagagctaccaaaaacgctataaatttgcttagcgaagatggaagcatctcagcatcacttaaggttgttactgtcaaattccacgatgatacacttgccgcactccgtgaatttattacccggaatgttcccgatccagaagaaaggaaaggctatttgcagcgcttaaaagagcttcccgctgacgccacaaaacacatcgtgcttgaactcttgggtaagggattaagtcatgtgcctgacgcaattcagtggctgcaaacagtgctccggtag

SEQ ID NO: 286016 - DNA, 1644 bp, Morganella morganii
gtgattggaaagctaaaaatatccgtctccttagtttttgttttaattttgctccttttattacagataatatccggggtattgttcttaaattatgcaaataatcaaaaaaatcaggccacacagctggattatgaaacgaaaaaagtcatctccctcgatgatacatgggtctcattaataagatcaaggtttgaaatcaacagagcgcaaaaatacattgcttatgcaaatcaaaaagatttagggaatgaattattagtattgtcagaaaaaaaacttgagcaatcaaaaaaatcattcaacgaatataaatctattgattcaaaaataaagaatacgaatgacgatgatttaaccgttacatttaacaactattacaatgcacaatcagatttaataaaattcctgcgcaatgacatgagtgctgagtttgctgaacaaccaactcaggatattgaagatgcttttgaaaaacaatacaatgaatataatgcaaaatatttaaattactacactgaatttaaccaaaattcaggtaccagctatgataatatactattcaccgtcatatctattctaatcactgtgttaattattatttcttgtgtttggtttggcattcgtaaaatcattattacaccattaaacagaatagtatcggatattcaatctattgctaaaggtgatctgagcaaaaccattgatatcacgggctgtgatgaggtgaataaactggcggatacactgcgtcatatgcagcatgaactggccggaacagtcggtgatgtccgtgatggtgccaatgctatttacagcggcgccagtgagatcgctgccggtaataacgatctctcttcacggactgaacaacaggctgcgtctctagaagaaacggctgccagcatggaagaactgaccgcgactgtacgccagaatgccgataatgcccgtcaggccagtcatctggcattaaccgcctctgagaccgcagagcgcggcgggaaagtggtggatgatgttgtggataccatgcgcggtatcggcgacagctcgaagaaaattgccgatattatcagtgtgatcgacggtatcgccttccagactaacatcctggcactgaatgctgccgtggaagccgcccgtgccggtgagcagggccgcggatttgcggttgttgccggtgaggtgcgtaatctggctcagcgcagtgcgcaggcggcccgggaaatcaaaaccctgatcgaggattcggtcggcagagtcgataccggtgcggtactggttgagcgtgccggtgagacgatgaatgagattgtcagcgccgtcacccgcgtcaccgatattatgagtgagatagcctccgcctcggatgaacaaagccgcgggattgaccagattggcgtggcggtgacagaaatggacagagtcacccagcagaatgcggcgttagttgagcaatctgccgcagcagctgcgtcacttgaagagcaggcaagcagactgactcaggccgtatctgtatttcatatacagggcagagaactgaaggccggcacgaaaaccagcattatggtgccattacagcgtcccgcgcttaaaaaatcagcagataatgccgatgatgactgggaaaccttttaa

SEQ ID NO: 286017 - DNA, 1632 bp, Morganella morganii
atgcttagccgtttaaaaataacaactacgctgactgcaaccctgcttatattctgtgtattacaactattaacaagtggtttgtattttaatactgtagaaagaggcgcttcatctttccatcaggtactcagtctgaatgagcgcaatgttctgctatccaatgtctggtcgaatttttcacaagccagattaaacctcaacagggcacttatttccggacgaagtgaaaatgaaatagattcactcttaaacagcgccattaaaaacctggaagacgttgaaggtgactggaaaaaatttaattccacgccaaacttacatggtcagataagaacaagtctggaagacagctataacacctaccatacaaccattaccgaacttatacagttaatacgacatcgtgatttaaatacggcaatattacaggacactcaaaccagtcaggatgcttatctgacgcattacgatacatacagccataaaaataacgatattattgcacaaatcatcaaagaagatgataaagccgaccgtcagtcaatatggatactgattatcgtgctctgtataaccctgcttattgtgattggtatatggtcaggccttaagcgcatactgattacaccgctgaataacgtgcttgacaacatccggcatattgccgggggagacctgaccagaaccattgatattcgcggctgtgatgaggtgaataaactggctgagactctgcgctatatgcagggtgaactggcagggacagtcagtaatgtccgtgacggcgttaatgcaatttacaacggcgccagtgaaattgcggccgggaataacgatctgtcttcacggaccgaacaacaggctgcgtctcttgaagaaaccgccgccagtatggaagagctgaccgcgaccgtgcgccagaatgctgataatgcccgtcaggccagtcatctggcattaaccgcctctgagaccgcagagcgcggcgggaaagtggtggatgatgttgtggataccatgcgcggtatcggcgacagctcgaagaaaattgccgatatcatcagtgtgatcgacggtatcgctttccagaccaatattctggcgctgaatgcggccgtggaagccgcccgtgccggtgaacaggggcgcggatttgcggttgtcgccggtgaggtgcgtaacctggcccagcgcagtgcgcaggctgcccgggaaattaaaaccctgatcgaggattcggtcggcagagtcgataccggtgcggtactggttgagcgtgccggtgagacgatgaatgaaattgtcagcgccgtcacccgcgtcaccgatattatgagtgaaattgcttctgcttcggatgaacaaagccgcgggattgaccagattggtgtggcggtaacagaaatggacagagtcacccagcagaatgccgcgctagtcgagcaatcggccgcagcagccgcatcactggaagatcaggcgggcaaactgactcaggccgtatcagtatttcatatacaggccggaaaagtgacggctgccgccaaaaccggcactatcataccgctgcactcccctgcccctaaaaagccaacagataatcccgatgacgactgggaaaccttttaa

SEQ ID NO: 286018 - DNA, 1059 bp, Morganella morganii
atgcgtaaaaaactaaagcagtggtttaaaaataagcgcaaacaaccgtctcagcaaaaaataacagatgtagtatcaaatactatcagcacggaaatatcagccagtgatatagcggagaaatcctatgataagttgttgtgtcagcatttaatttccggtatcagtgcagtagaaattattcgtgattcattacttaattccagccagcgtttgatgaaggaactggtcactgtcgatgagcttaatcagaaaaatgaaagcgtcagacgggagatgaatcagctctctgaattagtgcatcgcattgagcaacacaccagtgaaaatatcacctatgttgatgagctcatttctgtacttggcggtataaatagtaatattgatgaaataaatagtctttcaaggcaaacaaacctgctggcaataaattcagctattgaatcggctcatgtcggcgcaagaggtgccggattttcagtaattgcaaaagaaattaaacaattgtcgtcaggcattcaatttcaggcaaagaatattacggcattaacactggatatcaatcagcatgcaaaaagcatcagtaccagtgcggagaaaaattatcagtctattaatgatattcgttatgcgacagaacaggcctgtataatgttacagcagaccattgaactttctgctcatatgcaggaaattattcgtttcattgctacccagcaatttcttaatacagtcaaattagatcatgtgatctggaagattaaagtgtatgaattaatttttaaccgcgatgaaacctctgaagttaacagtcataccgattgtcgtttagggaaatggttttatggtgaggaagggcataaattctcacatctcagttgtttttctgagcttgaggtacctcatgaaaaagtacaccgttccggccgggaagcattactggcattcagatcaggcgatgatgaacggatgaatatcagtttaaataatatggagcaagccagtacattagtgattaaacggcttgatgagttgttattacagatacagccacactaa

SEQ ID NO: 286019 - DNA, 765 bp, Morganella morganii
atgcagatttcagaaaatatcggtaatgtcaatgtatcatctttaggttatataccagagaatgttgttgtaaaagaaaaatcggcactgccggttaatcagattaatcaaagaatggttcagtcagttgctgatagtcaatattttcagcaggaaacgatggccggtaaaacagcggaagagatcatcagaccattttcacagcatattttgcctgtactgttaaatgactatgatagtaaacgtatgaatattatcattgaattatgcaatgttctgttgcttgatgcgattaatcagcaggagcgacggaatacgttagaaaagcaggctgtgcagcaggcagtactcttaaaagatctgaaatataaagaagccgattatcaggtagccgccgcagttgccggagctgttgtatcagtggcagttgctgttgccggcggcagtatggcaatcagtgggattaatccggctaatccgggaatattatcggcgaaaagccttgccgggcaggcaatatccggtttgtcacaatctctcgggcagcttgcttcccagccgattgcggcaatgggaacccggtcgcagggggatgcggaagtcgttcgtgttttgaaagatgctctgctcaataacatgtctgtacatagtaaagtggcagatgatcagaaagcgttccagaaaaaattactggagatgctgatcagtgaatctgagaaccgcaaaagtacaacacagaatctgattaataatatgaagatctga

SEQ ID NO: 286020 - DNA, 1137 bp, Morganella morganii
atgtctgatcataccggtgactgtaaagaaaaaacaaatttaattaaaacgttactggatgatattatcagtctgccaaaagtgaaagataaactgtggataatagatcctggtgaattgattttactaaaatcagaattaaatacattacacagtatggctgaaacgctggcttcagtaaaagaatgcctgtctgcagcacaatcactggtcaatatgaataataaaaataccgttgagtataatcattcccttacggttttgatggggaaactggctgatttacgtgatcaaatggctcaaaagaagctggaaaatgaccgggagttagcccgggtacaacagttggcattacagaccaaaacagataaagatgccgctgatattgcagaaaaaataaaaaaagcagaacgcctgcaggccttgtttaaatggctggggccattgctgattgcgattatggcggtattgacagcattaaccggcggattactggcaaaagcactggcagcggttatcgttataatgaccatcatcactgaagttgtaaaagcagccggtggcccggatattatggcaaaaatcatggagccggcgatgaaactgatagaagcggttcagaaatttattaaagatattgctatggctattggtaaagcgcagggaaaatcaccggaagagctgaagaagctggaaaaaaccatggaaattgtcgctatggtgctggctgttgtggccgtggcagcattatttatggcagcggcgtcagcggttggctcaattgcgggaaaagctataggtcattttgcatcagaagcaatgcagatggcaataaagagtgccttcgctcagatacaaaccatgttgattaatatgatgatgatatcaacgattatcaatagcgccagttctgttacgaatgcattattgcaggccgatgctgcacggctgcgggcagatatggaacttgattcagagttactgaacagaattacagagatgatgaatcttatcatggagactttctctgagtcacacaaagaactcatcgcgttaaatgaaaaaatcagtaagcacggcaatgaatcttttcaacggatgaaatcaataatacagcaagggcaactagctgtttaa

SEQ ID NO: 286021 - DNA, 621 bp, Morganella morganii
atgattcatgctgaacagcgggggattatgatgagactactgccaaagcgccatttttacgctatcgccgccattgcgctgattgtcatgctgatcctgtttttctggcccgccgcacagaaaccaccagtgaccgttccgcctcagaatatcacgctgacgccaccggctgatccgctgggtgatctgatcgctgagcagaccggcacaccgccggagacatcatccggtatcccggatttgccgctgccggataatctcccgcccggggcgctgaataccgaaccagccccgcaaccggtgaccacaacgcctgctgctgaaccgccgccttccgcccctgctgcaccggacagacagctcgtggcacaacagtttacggtgaaaaaaggtcagacgattgcacaggtattccgcagcaaaggtttaccggtggatgatttattccggatgaccgccgctgaaggcccgcaaaaaccactgaatcaggtagaagcaggagataaaatccgggtgatttacgggaaaggaaaaaccatttcagagctgaagattgataaggctaacgggcagtccgccacctttaaactacagaaagacggcagttaccgccgctcttaa

SEQ ID NO: 286022 - DNA, 267 bp, Morganella morganii
atggattccggtaaatctgactggcaccctgctgatattattgcttcgctgaaaaaacgggggacaagtatggctgccttgtcgcgcaattcgggactcagctcctcaacacttgccaacgcgattgtccgcccgtggccgaaaggtgaatggctcatcgcagactttctcgccattcatccgtcagagatttggcccagtcgttattttgattctatcacaggtgaattattagataggaaaagaagaatgaaggtaactaagtaa

SEQ ID NO: 286023 - DNA, 927 bp, Morganella morganii
atgccaacagcccgtgtattatcgacccagcccgcttacaatcgtgaatttgatgattactgtaataaactgaaaacgctttctgagcgtgcggcatcctatcttttatatgaccaggaagtgaaaataatttaccgggagaatatccgcaaggcgatagcgtatctgcgggaagaattttaccgcaagcggagttcggctgaggatcattatgcttatatgcaaggccgggataatgcgtttaatggtcttatttatttatatgatagtgaggaagctgattaccaacgaggcaggcgtaatgattggtctgtttatgaaagcaccaagcagtttgaagagcagggggtgcttttttatggaaaagaaggacttcatattctaggtgggtgtgttcagactattggtggatacctgacctttaaaacagggaaactaataaggtcaaataaattaaagggaattggcgccttagctatcactactggaataagtaatgcctttgagcatagtttcatcattcaatatgaaataactaaaggtaagtctggggggtataataagaattatattgagaatgcaatggcggatatttcagaatatgctggatatggaagaagaagtggcgaactgacttataaaactgtggattttagtgtcagtttatttctttcatttggcgccttagttaagttaaaaaaccccaataggctattaaaccttcccgtctcaacccgaaatggtgttatttatccaacgcgaatggagcgttggtttggtgataaaggtggtttttttctttggcatgcgctgcgctctgattttacacataaaataaaacaaatgccaaagcctttatttttctataatgcagtcatgagtggtaatagattaaggctattacttactgaagaaacggatgattaa

SEQ ID NO: 286024 - DNA, 315 bp, Morganella morganii
atgataaataaaaaagaaaagatgaaattaaaaaaacaaaaaaacacaccgctgtacggaaatataaagctaagtgtagaaactaatatacaaactactttaatcgccattgctttttcaatgttttttattttcagcgaaatcgtaacggcgacaccgataaataaaatatcctactcgttgctatcaattatgtttgtttatttatttgggtcatggtattcatttagagatgtaagattagccacaaaactaacgatcatttacataaaaataaaaataaaaaaattaatcatccgtttcttcagtaagtaa

SEQ ID NO: 286025 - DNA, 243 bp, Morganella morganii
atgacgcatcaggtactcatgaagatcagggggtatggccagggattaatcaccaaaaacatttcaaactcaaaaaataatgccgctttgattaactcagttagcttatcccgtcaaaatgacaaaagtggtaaacaaggtttacgcgtcactgtcgataaagatattgaccacatatcaggattaattgctgatgcctttgataaagaagaaaaggaaaaccctgtgaaatcattcagatga

SEQ ID NO: 286026 - DNA, 1626 bp, Morganella morganii
atgatcctttcatctaatagatgtaaattaaataatgaaggaccatttactcatcagcaacttcagtggttaaatgaaaaaaccattcctgaacgtctatttttaaaatctgcttctgaatttgatgataaatggctctatccagtgcaagaacgctgggagtatcgtttttcaggtaataatgttgttatagattttagtaaaggaaatcattttaaaggactaagtattagtcaaattaagttgatcaaaatcatcctcatttattactctagtgagcattcagcttcaatattgtacgatgtctcccgtgatttatcttttatctttaaagaaatgacattatttagtcatgacttttttgttgattaccttaataaaacccggttaaacacagaaataaaaagtcgcttttttaatagtttatatgcatgccgaaaactagattctgtaggctttttttcatcaacggatggagatgacgatattgaagataagctcttattcgttcctcgaccaactagagatagttttaatatttatagtgatatagataacgttttaccgccatcggtcatatctatgattgaaaatggattaacggaatacgcatccagatttgtgccggcacttcattcagtggaagaaaagcaaaagcatttagacaaaattaaacaatctctccatcctgatgaactccaagactgcatcattctagggctttgctttattactggtgctcgccctgttcaactctcaaagctcgctgttggtgatattttcattgatgctgaatcaaacagcatcacgcgttttgctctacttttgccttatgccaagaaaaacaaagtcaccgttgaacgtattgcgattgctctaccagatgagctaggaaaattaattttcctttatattactctggctgggttaactcaaggcgagccgttattacctcagaataagaatgcagaacagataataaattgctcactagcccgtcaattactccgcttttcttccattgaaatgcaacaggcggtgaactcgggctttgctgaggcaccaatctatacatcttcctcatttcggcataatctcggtcactccatggcgatggctggcgctagtgcagaagaaatcgcttatatgcttggacatacttctacagtggtagctgggcactatatttcatccactcctaacttggctgaaatcagagaacacgcattaggcacaaatccggtatttcagagcatgattgcgttaatgatgactggaaaccttattaccagtaaaaagtggaaagggcgaaaaatcgctggtaacgtcggtagtaaatttcatcaccacattggtggatgtaattatactgccccgctctgtcccttttcccaagttagagcctgctacggatgcctttacttcatgccatttattgatggtaagcaccatgaagtttttgatgctttcaatgatgaactcattgacctgctgaagctttctttagacaccaatgaaagccatcatccattaatacctgaactaacgcgtcgcaagcagcatgtcatgatggttatcactcgaattaagttatttcatcaaagacagggagtcatacatgaatga

SEQ ID NO: 286027 - DNA, 1482 bp, Morganella morganii
atgccctatttacttaaacatcttcggcaaggctctcaacattcgttagttcttgtagacaacacgacaactttaccagtgctgtttggttcaatttactcaactcgtaagttatctttactcaggttcagaacacagaaaaaggaattactttccctaaaatacttctatgttttttggttgaaaaaaacgggtaaaacattcgattattcactgtatgaatcacattatgatattgcactatttattcctgaattaaacacattcttccattatttgcttagcaagcaacatctagatgctcaaaaacacctagagttaatatcattcattggtcaagtcactcatcaggctcacaacaactacacaggacatgtacgagctgttgcaaaatttttattttatttaaaccaacgctatatgaattcacgttatcaaaaactattagcatatgatctgaataaaatccgtgattggaatactcaaacattaaaatctgctattcgagaattcagtaaaataccggctcaatcaacactgaaaaatggtcaatataaaagtatcactaaagagcagatgattcagttgaataacatgctattaccctcctcgcctgatttttttgatgataaatctagtaaatattttaatgctgtagataatctcttcaatcctttcaattctctttttcttcaatacagaacgtttttaattcaccgcttaatgtttaattatggacttcgcgtgggggaaatcttgctgctaacaacggattccctcggtacttctcaaccagatagccacggcaaaactcattatttactttcagttcaaaatttacccgatggttttgacgatcctcgcagcctaccgattacattgaagaatgaatactcgtcaagaatcattgagcttgataaagatgattatcattatcttattatatttgttacttccttacgtttacctcttttttcttctatatcccaaaaagattatccaccaatagaccatggttttttgtttataaccaatcgagggcaatgccaacctctaacctatgattctatccgtaagatttatcagaaaatcgataataaattcatttcactttatcccaactatcgaaaaggcccgtcttatctacagatgatcggtttaactcctcatgttggccgccatacttgggcttttaccacacttgaatttatttatcacaagctcatgaatgaggagctatttctcaaaaaggaatatggtatttctagcagaatgaaaagtttattagatgcagcagtcgagcaacttcgtatattaggtggttggtctgtaaccagtaaaatgccttacaaatatgcacgacggtttgtttctcgaatagctaatgaaagtaatttgaagagaacaaaaatagacaatcaccacaaaaaaatattagaaccatataacaataatgagggcgattatgatcctttcatctaa

SEQ ID NO: 286028 - DNA, 441 bp, Morganella morganii
atgctgtttatttatccagtatcagtgattatagtaacaaacgggcatatcatcgcccgttttcttttgccctttttctgtgcctttatcgtcttagttacaacatacagtttgtttttatccacgtactctgcaggaagcaataaagtctgtttgtgttcagcagcgaaaattggcgggatgcgggggaggagacaaaaaagccggtcagtgaccggctcctgttatcagatatcagatatcagattttcagcgcaccagataccagagtgcgggaactgctgctatcagcagggcagcaataatgctccattcgataaaatgcagtgtggtttttatctcacggtttttcagggcatacaaaaataccagaatacccggtgcatacagcacaacggacagcatcagattgataatgccggatgcataaatcagccataa

SEQ ID NO: 286029 - DNA, 321 bp, Morganella morganii
atgtctatgttaaaccgtttagttttaattgcaggtattgcattatcttttgtcgcacacagtgagtcattacagggccagcaaggcggtgtcattcatttctacgggtcactgacagaagcaccctgcacttaccgggtatccggtaacagtgtgaataccgaatgctaccgcgccggtgatacgaccaaatttaatggcagtattcaggcaggtaataaacttaacggcacattaataccggataatattggtgaagtaaacatcacccctgtttcatctgattcagaaaaacatattgttactgtaagctatcgctga

SEQ ID NO: 286030 - DNA, 270 bp, Morganella morganii
atggatgaccacctggtaattctgttacaacgcttgcaaaccactgcgcctgaatcacaggtcatgttcacccgtgatgaactgaatatacttatccgggcactctctgcatacacagcaaccccggcggcctcactgattgtcaccctccgggactccggcgccgtcagccgtgctgttaactacggctggaatgaggaagaaaagcaacagacggaacagcaaggcgggcaatatatcccgctgttccgtcatgatctcagcgactga

SEQ ID NO: 286031 - DNA, 423 bp, Morganella morganii
atgcacaaatttataattattcctttgatatttctgctgagtgcatgctggcatggaaatgatcccagaccaagaatggttaatggcagtgtgagcgctaatgcaggtaaactatgtgtcaaagcgccggatgcatctgatgatgaatatattttgtatgtaagaatatttgattataaagaacagaaagacattgcctctctcgatttcagtgcaaaccctgttaagttagatgaaaaaacgtgtttgccatcacctgatattcagtatcaggcagacgataaatatgcgtacagagcttctacagttttacagaaaaaacaggcaaagaaaattaatccccccagacggacaattgtggcgacgttttttattaaagacgttgatggtgataaacaagccgttgatgtcttaaacagataa

SEQ ID NO: 286032 - DNA, 123 bp, Morganella morganii
atgttatttttttcattacataaaaataacaacagaatgataatttttaacgcaataatcccatccgaaggccatattccgacagagtgtgactggtgttataaaacagattacctgtcatag

SEQ ID NO: 286033 - DNA, 648 bp, Morganella morganii
atgaccaagaggatgcttcagagcgtgaccgctttgctgatactgacaccgctgtggagcccggcacaaccggttcccgcactttccggtgatatgtcagcacggctggacacctgccgtaaagagtcgtcaccgctggtgcggctggactgctatgacaacatcggcagggacaacgccgtgccgcagacggccccggcggcgaaaggcgagatccggcgccgggcggcagacaatgaagagaaacggacagaacataccgtgaccttcatcaccacccagccccgtgaaggtacctggcctgtggtcatgaccgcaccggcgattggcacacaaccgccccgcccgatcctgatgctcagttgcatcgataacattacacggatgcagctgatcatgaacgccccggtgacagtacatgctgtccgtttatccaccccggaaacctcattcagcagtgactggtttatccgcgagagcggttatgtgctggaatccagccggggtctggccgggatcggtgaaatcaaacgcattatgaccggcgactcactgaccatcacgccggaaaacggggaaccggtgacttttgatctgtctcagctgacagaaagtatcaaacctttacgcgcggcctgccgctggtga

SEQ ID NO: 286034 - DNA, 1455 bp, Morganella morganii
atgatagcaacacgttttaactggtctgaacaactgctcgccccgcttgatcccgggcagataagcagtatggtcagtgacagcaacccggactgggaatatatcgacggtgaaatgattaaattcggctccctgacgcatgcctctctggatattgaggccattcagtcacggatcctcactctgctgtctgccaccacaaaagatctccgcctggtggtacacctgctgcgcaccctgcagcatgccggaaatgcagaggaaatcacgctgggcgcgcaactcttttccctgttctgccgtcagttctggcacgactgttatcctgacaatatcagactgaaagtccgtctgacacaacaggttttacagcgttttgagctggcacaggataattttacccgtcaggccaccgctgcacagcgggataatgtcctcggggattttgccggactggcgcagttctggagtgaaaaccaccaggtactgtcacaaaaactggatgatctgagccggggttaccgccgcattgagaacagcacaccggacactgtcacggcctctgcccgtccggcggcagataccaccacaaccacagcgcctgcagatcctgcaccgcgtagtctgcctgccgcagaaaccggaacggatggcggttttccggtcgctgaccttgacagcggaaatgaccgcacccgcaaatcggccctgctgaatgccgcggatgccctttgccgcagcgccccggaaaatgccatcggctatcagctgcgccgttatgctgtctggcacactattcagtccgtaccgtccgccgatgccaccggaaaaaccccgctggcagccgttgctgccgatcgggttaccgcctaccgcaaacagctgacacaggctgatccggtattactggctgatattgaacagagtctcagcctcgcaccttactggctggacggtcattatctggccgcgcaggccgcgcagcagctgggactggataccgttgcacaggctattcgccgctgtgtatcggagtttgtcgcccgtctgccgcagctgaccaccctgagtttctccgataaaaccccgtacgccggggcagacaccctggcctggctgaccgcagcggattccgccggaacaaccggggtcagcagcgccggggcagacacggatgagatcacccgctgctatcaggaaagcggtcttgatgcagcgctgcaaaagattgacaccgccataaaccgggctgaacagctgcgtgaccgcgtctgcctgcaacttctggcagcatcactgtttgagcagtcaggcatgacgggacttgctcaggctcagtatcagcaactgcatgacatcgtatcacgcagcacagtaacgcagtgggagcccgctttactgcaacagcttaccggaaaacttccggagtccgatttcagaaggaataacgtttaa

SEQ ID NO: 286035 - DNA, 1338 bp, Morganella morganii
atggacggcattgttatccggacaggcacttccccgctggatttaccggcattcgcggaaatccgggaagaaataaataaactcagtcacccgtcccagccggaagtcagctggtcgcgggtggaggccaaatccctggaactgttcagacaaaacggcgtggatttgcagacggcggtttactacacccttgcccgtctgcaccgcggcggtctggcggggctgacggaaggttgtgagctgattgccatgatgatggttcatgactgggatgcggtatggccgccgcaaatcaatcaccgtattgagattcttaactggtttatcacacgggccatggcaaccgtacgccgtctcgccttccgccgtgatgacctgcgcctgctctaccgggcagagcgggcgttacagctgatcaccggacggctgtcacaggcaccgtccggcaaaatgccgatcacggataatctgcagttttacttccgtaatgccgccaaagagcttgagcaactctcaccggcggcaggcggtgaaatgccgccggtaaccgtcgctccgctgatctatatcgcggaagagagcccggcaggctccggaagccatgcggcatctgacggcaatgccggtcacagcaccgtccgttttgtgcagatggtgccggaaccgccgccaccccgcaaaacctttccgtttgccggatttgcggcgggtctggtcaccggactgattctgatcgccgtgttgttcttcactgtctacaaaccggtgaaagatgaactggacagcgtcgccgcacagcccggcagtgcgccggttctgtggtttgctaacccgcagctggcgacttacggacaggttctggccgatgcggaacaacaatctccggttgccccgctgctgctgaccgaaaagatgaccgacattgcccgtcagcgctggccgaacgacccggatcaggcgtatgccacccgccgctggcaggacactctgcagatgcggattgctgatgcggaacccacggacagctggtatctcaccaatgaacggttacaggcactgtccaacaccattgttgaacgggaaaaaaaacgcggcagttttaccctgtcgtatctgaaaacggaaatctacaacatccggcaggctcattcaaaaacagttccggcagaagaatatctgcgggccttgtctgacgatatccgcaacggccggccggtttcagccgcacagctgcaccggattaaccagcagcttaacggcctgattgcgctttatgcggatttacaaaaacaggcggaacaggcgggtctgaaacccggcagcggcaaacaggaataa

SEQ ID NO: 286036 - DNA, 516 bp, Morganella morganii
atgaaagatatcaatgcattaaggtcaattacaaatcagggaacaggtcagtttgtattgatcagtctattaacagcgggtatttatccggtaatgtgggcctggaagaatgcagatgcatttaattcagaactgaaagaaaaaacatttgaaagtaagatgtttatttatcttgcaattgtcatggggctatctttacatatggatgtgctgagtatgatgaataatgcatatcatgaccgatatactgccgggccggatgacatatatactatattaagtaatgtgttttccatttctgtcactgttttctgggttgtctggtcgttcaaaatgaagcgtgcgctggaaaattatgcagaaagagagttcggcatcacattatatcttaacagaactctgacatttctctttcaatacttctatatcaactattgcatgaatgcgttagaagaagatcttgcccggaataatcacgtcaatcacagtgctgataatgatgacgataaaagttaa

SEQ ID NO: 286037 - DNA, 657 bp, Morganella morganii
atgacatcgatagacagagtacaacacagtttagtctgtgttgttttttttgcgggttggttcttaattcagtttgcgatactggcgttccccggagcgaccaccagcaacggcgtctttgcagcctggccggtatttatgatcttatttgtcctgccttattctctgttttcccgggcattttaccagaaacgaaccggactaatgcctttcggtacaatacgattgtcaaatctctggttaccgataatcgcgatgatgatattatctgttgcaacccagtttttcggcgaaaatgaaacgtggatgctgcggatatttaccctgtcccctttgcaccagtttatgatggtcgcagctattattttcgctgcaccggtgattgaagagattattttcagaggctttctgctgaatacaggaataggatatggcccgaatggtaaacacatagccattcttatcacctcgctcttatttgcattagtacactctcagtatcattcccccgtcacattcattatgatttttgtgatgtccgttattttttgtctggtcagaattaagacgaattcccttatagcaccgattgtcttacatgctctgtataatggcatacacatgctgctgttttttcttttgacagatgccagctaa

SEQ ID NO: 286038 - DNA, 216 bp, Morganella morganii
atggcatttattatttttggcgcaggtgtctattgtcttttcttctctgtgattgcgttgagtgaattagtcagtaacagaaaaaacggtaacgttgatacgaccagggcaatgatagcacagacgtttccctggtcgtgcaggacagctgacggtaaacaaggtaaacagataatgcgggagactgaaacggaggggcaaaaaaaagccccgtaa

SEQ ID NO: 286039 - DNA, 2112 bp, Morganella morganii
atggaacaaataaccagagtccttgaaaaaataaatcagggacgtaacgaccagcctctcaccctagccgattttatgccgctttcccttgccgaaatccgtaatacggatcagctttcgcgggatgacgcacggttactgtaccgtgcagcgcaaaaagaaaaacaaaacaacctgctctataccgcacaggcgctgacccgcgccaacccgctgctgcgcaacgaaatgggcagagcccgctatcacggtgcaacgccttatggctatgatgatattattgtgccgcgcgccgatgagtttgccgccccgggggctgtctcttccatgttttccccggccggttatctgacagaactgtaccgtgaagcccgggaactgcatccaaaagacagtgaccataatctggataagcgccgtccggacctggcaaaactggtgctctctcaggacaatctggataacgaaatctctgctctgtcactggcgaatgcgcaactggaaacggcgctgatgacaaaagccgctcagacagacaaaagcacatactatgaaaccatggcaaagtcccgcaacagtggcgtaacgccgtataacctgccgtttgagggaatacataacgccctggcacaacggaattttgttctgccggataatattctcagcactcctgcgaagtttgccatactgacggtatacaatgccggtatctcaccaacgttgtatgccatactgacagaagacacagagtcattaaccggcgccgctctgaaaaactctctgaaaaataacttcccgaagattaagattagaaagcttatgactccggatgcgctggccaattattatgagcttccggcagatgacattcaggcccttattgccgccgaaataacaggccggttatcaacaccgaatatgtataacaaggataataaactggtaataccggcaataagcaccggtggaaaaataacattcagtgaactggtcaaaatacaggatgataaaaaacaggcagactatattgatttaattccgcagggtggtaatcagtttttagttaattttagtgtaacggaaaccctgaaagacgcgacacattttagtataggctgtaatgaatcgtttaatgatctggcagataaaaaggggtttgttcctctggccggggagcactacagtatccccgtcacactggatgctgcgcttttaaacgcagaaactaaaatcagaatcaccagaaaaaaaccggaacccgccagcgacgggaacgattacacctcagccaccttcaccatccgtcccgatgcaaaaccgggtacatggctcctcagactcaataaaacactgcgtctggcaaaagtcagcggtatgaccccgcacgaaacacaacattccttaatccacgtaagaaatgattcagtcgaatacgaattacaccgcttcaccgaaacgctgctttaccgtaaacgttatggcattgatactgaaaccgcattaatgctgtgtaacgctggtatcagcaaaattcgctatgacgggcagctcagccattttgatcgcctgtttaataatccgccgctgaatggtgtaacttacacgttaggtggtgacgatattccgatggaaccggatgccgaagacccgcgtcgtgaagtcctgaaacgcgctttccgggtagataataccggtttgtggcaactctttgttatcacaaatcgtaaaaacaaatccaaaactatcgaaaacacgaccgaaaaacttcgtggcctgttatttgttcgtctgctggcggatgtgcataacctgacagtaacacaactggataccctgctgcagatttccccttacagttcaatggacgtttacaatttagagggaaaaatacgccagagaatcctctcttttctgtcccggatcacccaatggctgaatacacaaaacattacggttgaacagctgatgctgctgctgagtaaagcatctccggcggcaccgaccaaagagatgcaggtcctgctggatctcctgcgtaacggtggtattgacaaaaccgataaagaaacgctgtatagcaccatggcaccggtgattactgcggctatgtaa

SEQ ID NO: 286040 - DNA, 492 bp, Morganella morganii
ttggtcattcgcacctttacactcagtcatgccgaacttcagacattgtcacaaggtgcaccggccggcaccattaccgaactgtataacatctgtgatttccataacctgattaaccgctgcggtgaacaggccggtacggtactggatgcactgcaaagcgggacactgacagttaacattctggcacaggcactgaatcggccagaagatgtgattactcaggcactgacacaggccggacaaaaaccggaactgaccacatggacacagctggccacattgccgccacggctggatttggcagataccctgcatatcaccccgaaagatatcaccactctgctgacagtgtctgagaatgtgaaagcgtcttatgcagacctctccgtactggcaggattgttacaggccggtctgaacgaacaacagaccagacaattgcaaaatcagtctgaaccgcgccgcagtgaagccctcagcggggagtaa

SEQ ID NO: 286041 - DNA, 4626 bp, Morganella morganii
atgaacaatccggtggcaagccgtgatgatatctggcgtaatctgctggtggacggaaaaatcagtgctgacatcaccaccaccctgctggcggatgccatcgccggtattcagctctatattaaccgcaccattgccggtgatgagccggatgcagacagtgacactcttgagcgtcagttctttaaagactgggatgcctgtaataaacgctacagtacctgggcgggtgtgtctcagttagtctattaccctgaaaacttcgttgacccgaccctccgtatcggtcagaccgcgatgatgaacaccatgctggagcagctttcacaaagtgagctcaacaaagataccctggaaaacggcttccgccagtacctgaccgcctttgagcaggtcgctaacctgaaagtggtcagcggttatcatgatgccgttaatattgaacagggcaacacctggtttatcggtaccagccagactgagccgaaaaaatattactggcgtaaagccgatcacagtaaatgccagaacggccgctttgccgccaatgcctggagtgactggaaagaaattacctgtgcggtggatccgtacggggatatggtgcgtccggtaatttttcattcacgtctttatctgttatggattgaaaaacaagtacagaaagataacaccagtaaagatacggcatcttttaccctgaagctgacacatattaaatatgacggcagttgggcttcgccgttcagttatcatgtgactgaagacttcataaccggcggagaaaaaaatagtctgtactgtgccgccaaccaagacgataactcactgcttattgcctgctataaaaaattaaaagaggataacaaagtaccggccggcaccttcgggttgaatattcttccggatatgacccatgaaaaagaaacaaatacacaagaaatattagagaaagtttcctatcaattagatacagaaactaccgtcagggtaaatacccttctgaatcataaattcacttacaaatttaccccggtatcacaagacggaaattcagcactgaatctcaccctatcccctggtgactatttaatcaggaatgacaataataaaaaaacactgatattgaatcctgatatttatattaccatcgaccccgaggaaatatttgattatattcccaaacctgtgcgggtaaaatatattagcacagttataattactggcgctacaatttataaaccggaatcaatggaaataaagcctatcgataataaaatgtccggctccattgacaagcttgccgtagtgggtatcaggccaaaagatacgatgagtgtgattgcgctttccatctgtaatcttaagccggtagttaatgacattactctgacaagtaacacaacaaaacagagtttcactctgggtataaacgaaagtccagggccatgttttacatataattgtaatcttcaggacgcattagcgacgaatagtgaagaatatgctattcaaactgatgtaccaaatgcgggtacactcctcctgggcgccatgaaagctcaggccaaacctatccatgcaaataatatcgaaattacgtttaaactcaaggagaaggaattaaaaaaaataaacggtcatgacgccgggatcacccctccggagtacccgctttattcagaaaaaagactggaattcccgtttggggaacagaaaatagatcttcccgacaacacagatgttaataacctggaggtcatagtaactgttagtttcaaaaatacagacattcttacagcaactgccacttataagttagttataaagaatgctgttttagattccaaacccatatctctgtacaccacgccggagggcgctcaatatatggaatgggatggctaccgtacccggttaaacacgctgttcacccgccagttaattgagcgtgccaataacggcattgacgcaatattatcccctgaaacccagtatctgcctgaaccgaaaccgggacagggcacctatgtcacactgacactgaacccgtataaacaggatattcatggcactgaccgggcatttacgatttattacagcaatgttgccacggacggcggcaaattttctgtttacagcggctcactcagtattaccgatacaacagacgtaaaattatttattccgctgattaaaaacgctgcgggtccgtctgctgatacgcagcaggatactttatatctcaatgcaaaataccagaaagaaacaacaaaaccgatctgtctgtaccgcaccgatgccgataatcctgaaggctggacattggataaaaacgttaacaagggcaccttccccggcctggcagaaaacggggtctccggtttattacagtccggtgaaccgatggatttcagcggtgccaatgccctctatttctgggaattgttctattataccccgatgatggtagcaacgcgtctgttgcaggagcaaaactttaccgacgctaaccgctggttaagctatatctggcgccctgctgaaaatggagccggtgactggcgcgtgcgtccgctgaaagaagatacctcctggaatgccgacccgctggattcagttgatcccgatgcggtcgcccaaaatgacccgatgcattacaaagtcagcaccctgatgaaactgctggatctgctgattgcccgtggtgacaacgcttaccgcatcccggaacgcgataccctcaatgaagcaaaaatgtggtatatgcaggctctggggctgctcggggataaacctgtcagcattatcagcaatggctgggaaaatccgtcactcagtcatgcggcagataaaacgcaggcaaaacagttccatgacgaaatcagccgtatccgcagcggcggcctgctgccggatgtccgcactgccaataccctgaccggattgttccggccgcagcaaaacgaaaaactgctcggctactggcaaaccctggaaatgcgcctgtttaatctgcgcaataatctctccattgatggtcagccattatctttgccaatctttgccgcaccggcagacccggccgcactgctcagtgccgccgccgcagcctccggcggcagcaaagccttaccgtccgctgacgccattccggccatgcgcttcccgcaggcgctggaaagtgcccgctcgctgaccgtgcaactgatgcagttcggttccaccctccgggagctgattgagcgccgggatgcggaagcgatgagtgaactgctgcaaaaccaggccggtgaactgatgctctcttccctgcggatacaggaacaggctctcaccgaactggatgccgagaagaaagcactggaacagagccgggccggggcgcaatcccgttttgacagctaccgcacgctgtatgatgaaaatgtcagtgcagaagaaaagcggaccatggatctgtatttatcgtcttcggtactgagtacatccattgacgcactgaatatggctgccgccgctgccgatatggcaccgaatatcttcggtgttgccacagggggcagccgctggggcggtatcccgaaagccattggtgcaggtatcggcctggcggcgtctgccaccaaaacgactgccgataacatcagccagtctgaagcatggcaccgccgccgtcaggaatgggaaatccagaaaaataatgccgaatctgaagtaaaacagattgatgcacaactggaagccctcgctgtccgccgtaccgcaacagaaatgcagtacaaacatctggaactccagcaggtgcagactcaggcacaactggagttaatgcagcgtcaattcagcaataaagcactttatagctggctgcacggccgtctggcatccatctattaccgcttctacgacctgacagcagcccgctgcatgatggcggaaaaagcttacgaatggcaaaccaatgatactgcaacccgctatatcaagcctggcgcatggcagagcaataatgccgggctgatggccggggaatctttgctgctgaacctggcagagatggaacaggcatggctgaaatggaatatccgctcactggaggtcacccgaactgtttctctggcagaagtgtaccgtactgacaatgtcattctggcagtgaaaattgctgaactcctgaaaggcagcggcagcgggaatacaccagcatcaaccgggctttcaatgacggaggataaacaactgcatgccgcattcaacctgaaagcactgaacattgcgcaagactatcctgccagcctgggcaatacacgccgtatcaaacagatcagtgtaaccttaccggcgctgattggtccgtatcaggatatgcgtgctatattcagttacggcggcagttcgttgccggccggctgcagagccattgcactatcccacggtattaatgatgacggccagttccggcttgatttcaatgacggtcactggctgccgtttgaaggtattccggtggatgataataacagcctgaccctgagtttcccggacgcaatcggtgagaagcagaaaccactgctgctcagcctgaccgatatcatcatccatatccgttacaccatttgttaa

SEQ ID NO: 286042 - DNA, 1647 bp, Morganella morganii
atgttcagccgtttgaaaatcacaacaattttgattacaacattacttatattttgtgcattgcagctattaacgagtggtttatttcttaataccatgcaaaataacacaatatcctttaaacaattacacaacctgagctcacgtgacaatctgcaatccagtgtctggtcagagttattaaataccagggtctcactcaatcgggcactcattgatatcgttaccaatgataataaattaaacgaatcgtcaacgcagttattaaatgatgcgattaaaaatctgaaacaagctgaacattactgggcactcttcgattcactgccaagtcactcaggtacaaaaatccaagaactggaagatgcctataatcaatatcacacaacactgacccaacttatacaattgatacgcaatggtgatttcgccgctgcaatatcacagaatacacaagccagtcaggatatttatcaaaaacagtacactatttataaccagtcaaataaccattttattgaaggcgtggtaaaagaagatagcgaatccgatgcgcggtcaaaatggatactggccaccatgctctgtatcattctgcttattgtaattggtatctgggcaagtattaagcgcacactgattacaccgctgaataacgtgcttgacaatatccggcatattgccggaggagacctgaccagaaccattaatatgaccggttgtgatgaagtcaataaactggctgatacactgcgctatatgcagggtgaactggcaggaacagtcagtaatgtccgtgacggggtcaatgcaatttacaacggtgccagtgaaattgcggccggtaataatgacctctcttcacggaccgaacaacaggcggcgtctcttgaagaaaccgcggccagtatggaagaactgaccgcgactgttcgccagaatgctgataatgcccgtcaggccagtcatctggcattaaccgcctctgagaccgcagagcgcggcggaaaagtggtggatgatgttgtggataccatgcgcggcatcggcgatagctcgaagaaaattgccgatatcatcagtgtgatcgacggtatcgccttccagaccaatattctggcgctgaatgccgccgtggaagccgcccgtgccggtgaacagggacgcgggtttgcggttgttgccggtgaggtgcgtaacctagcccagcgcagtgcgcaggctgcccgggaaatcaaaaccctgatcgaagattcggtcggcagagtcgataccggtgcggtactggttgagcgtgccggtgagacgatgaatgaaattgtcagcgctgtcacccgcgttaccgatattatgagtgagattgcttctgcttcggatgagcaaagccgcgggattgaccagattggtgtggcggtgacagaaatggacaaagtcacccagcagaatgccgcgttagtcgagcaatcggcagcggcagccgcatcactggaagatcaggcaagcaaactgactcaggccgtgtctgtatttcatatacaggccggaaaagtgacggccgacacgaaaaccggcactatcgcgccgctgcaatcccctgcccttaaaaaaccaacagataattccgatgataactgggaaaccttttaa

SEQ ID NO: 286043 - DNA, 741 bp, Morganella morganii
ttgaaaacattaacgacagatgaacttgctcaagaattggctggtggtgattcttatattcgtacaaaaggtaatatagtaaaagggttagctattaagacaagtttaaatcctgaagcaccagaaataatagtagttggtaaagggccacggatcatagaaaatgcaatgttattcatcagacaacaacagtatgtccctgtttatgttaaacaagctgtgaattcctggaagtatttaggtgaatttaaagcagataaatatgtacaagatattgatgtgattgagaagcatagaaaacatagactggcaagtaaggttgatgggatcttgtttttatctccacgtgaacaatttgatattaaaatttcatctcctgaatttccggattcggaaaccagacgtaaaatagagttagcagcaattaattttgttacaacttattatcaggagcttggttacacagttaccgatcatcagaaaaataattatggttatgatttatttattgaaaacaaaaaagaaatgttaaaaattgaagttaaaggtacttcatctgaagaacagtgtttttttctttcaagaaatgaacgaaataaatctgtcgatccgttatggcgtttagcgattgttacaaatgcattaatcaatccggaattatcagtgttaaccactgatgaaatggaaaatatgtttaattttgatacgctatgttggaagtgtacaacaaagcaggtatga

SEQ ID NO: 286044 - DNA, 945 bp, Morganella morganii
atgacattgaataataaacatcactggctgatgccggtattactgatagtgtcagcacaggcgatggcggattgcgctaacactgagtccgggcttaaaacggcggaatcccatctgcaggcgcgtattgaaggtaaaatcagcgccggtacattactggcgacggatgtattgcaggtcgatggtatttctgcctgtaataacagcgcttatgaggaattacggctggtaacaacccggatggacagtgattcaccaccggcatttttccggatgattaacggcgtacctgcatattaccttaataaagattatgcctattctgtccgtctggacggcgtgcagccctatacgtcacagggagggactttttcagtcgaaaaccggaacggatttgtgtacattccccgcgcattaatttctgtctatgccgcaacagataatccggaaccgctgaggttagcgtcagcacaggccggactcataaagaacgaccggcatgaaacgatcgcaagacttaaattatcggctaatattgataccgttgaaacatgtgtcattaataccccgcagatagtctatgacttcaataatctggaactgtcagattttccggctgaaacaggcagaacagctatccgcgctgataatacaatttcagtcagttgcagcaatgataaaacaaccaaacgtgcttcgattgtattaagtgaggcaacacgctttgcactggcagacagggcgattattgcctcaacgaacccggctgtcgggtttgcactttattataatgatgaacaaattacggcggggaacaaggtgtatctcggcaatatgcaaaaacagttaaacgcttctgttacggcatatatctataaactgaaaagccggattgagcccggacaattctccggaacagcggaatatattatccgttttgactga

SEQ ID NO: 286045 - DNA, 2364 bp, Morganella morganii
gtggatatctatctgaatgacaagtatgtcaatacgcaggaaattctgttctacagcgacaaaaatacccataaactgcggccttgctttacagataccgaattagcggactacggcataaagccggaatattattcgttaccggatcaatccggggattgtgttgacctgagtggtattccgggagcggacgctgaatttaaagggaatatgaaccgattatatctcagtatgccgcaggtggcttttgatcagaaagcgctggatgcccgccaggagttactgtgggatgacggtattcccgctgttttcactgattatagtttctccggtctgcatctgaccaatagtaacaataataatacagacgactccttttatctgaatttgcgttccggtgtgaatctcggcagttggcgttaccgtaacagcagtacatggaacaaaagggcgggtgatcaccaaaagtgggaaagtcagctcaactatattgagcgtccgctgcgatcaattaaaagtaattttttggttggtgataacttttcggattctgacgtttttgacagcgtttcatttcgcggaataaaactgtggtctgatgatcagatgtatccgcaatatgccggtatctatgcgccggttatcagtggcgtggcaaccacagattccacgattgaggtataccagaacggttatgttatttaccggactaatgtcccggcaggaccttatgagttaagcgatgttattccgctgaacagcggcgaaaatttatacgttgtccgcaaaggtattgacggcagcgaattccgttctgttgttcctttttcttcacttaatttcatgcagcgcaagagccggtataaatacagtattacggctgcacagtacagaatgaataattacgggctttcagaggggaccggtaataaaacaaaatttgttcaggcagatgccttctacggattaaccggcaataccactattttcggtggtgttcaggtggcctcccgctatcaggcctatgacgccggtatcggtatgaatattccggtcgtgggtgcgatagcaacggatattatgtttacccgggcacaaccggacgcgattgacagtatggaaggccgggtatttcgtgtccgctactcaaagtcactggaagataccggcacgagtatcagttttgccggatatcgctatatgagtggtgattatctcaccatgaccgatatgtttgattattacagcggacgggcggatacatcggcatatctgatgcgcaaaggacaatcagaattatccgtgacccagagtttaccggatgaatttggtaccctgaatgcatcggtctcccgccagacgtacaacacatattataataatcaggaaaaaagtgttgattcttacaatattggttatagcaatgtattcaacagggtgagcctgagtgtcaattacgcctattataaaaactcgctcaacagaaaaaactaccggactgatatttttgaaacggagcgtcataatgaccacgttgtgtctgttaatatcagtattccactggaggggcgttttaaagatcagtggataacctatggtgcctcctataataaagacggtgattttaataattacgtcggggtcggcggtatactcccggatgacaaaaacttttcgtggaacgttcagcagggatacggtaacaagggcaacggaaattacggcagtgtgtacggtaaatataaagggcgttatggtgatgtcaatgccggttattcctataagaaagacaaccgtcagatatcttatggcctgaacggttcccttgtgatgagtggttacggggctacattatcacggccgctgggtgataccaacggattggtatatacaccgggggcagaaggtatccatattcttaacaatcccggtgtgacgacagacggcgccggtctggcgattgtgccgaatctcattccttatcgtaataacagcatccggatcgataatcttacactaccggaaaatgccgaagtggaaacgacgataaaagaaatatacccgacccgcggtgccgttgttctgcttgattataaaacggctctcggaacaaaaatactggttaccctgcggggcgaagacggtcagctcattccgtttggtgcttatgtgaaaaatgacaatgataatgatcgcgcttatgtcagtaactatggacgattatatctcaccggcgcaaaagataatgatgatatcggcgtgacctggggagataaaaatcagtataactgccgcttttcttataatgtcagcgggaaacaaaaagtaaacggattttatattttcgatgcggtttgccgctga

SEQ ID NO: 286046 - DNA, 2715 bp, Morganella morganii
atgccaatatcagcattgcagcacagagtttcagccggagcttatcagaataagcttcacgataatatcaagggaagcggcacgacacaggttcaaagccagcactcagaccgttctgtcattccggatgaaatacaccatttaggaagaaatattaacagagcagtcaattctcacgaagaactgggcagaccatcttaccaggctacatctccgcgacagggcatagccgccccgttgctgatgctgttgagccaggtaagacttgatgagatccatgttccatcaacaacgaatatctccgcattcacctcagagagaagcgtgtctcctccggttttcccggatacagcgtattcagataacagccgtaatggcttcagtaccatgttgagtccggttaccaatgctctgtatgaaacaggtcagtttatagcccggcatgatccactgagatttccgggagcagatgctgcagctttgcctggtgaaggagtaagctcaataacggccacagacatagctaaggatataaaggaaagtcgttacttatctggtgatattggtaaaaaaataacagaaatagttagtactatagagcgtcaagaagatttatttgcaataaaaaatattataaataaacttaatagtattgccactgaagcagaaaataaatatccgctacatactactgagaaaaatattgattattttatttatctcatcggaaattcagatggcattatatctgattttgaaataaaacatcatcaaaacagcgtttgcaatcaacttaaaatacagttagataattatattaaaaccgcagttgatataactggtaaagaagatgcattaaaacttaaagaatattttggaaaaatttattcaccgaagtttactccggacagcaaaggagaaggctatcagccagtagaatatcaggtagcaggtactctggtgagaagtgtttactggttccaaaacaatgagggacattcagcagtatacggattaagatatgaagcccataaagctatgcttacatatataatcgctgaaaaagggcttggtgacctaaacaagttgcctgataactggtacaaaggcgatggggccttgcgattatttagtatactttacagggatctggagaataatttaaaaaacaaaggggaggcttatcttatcaggtctgcccggcaattttactcatcacttcgtggttcatacagtggaaatagcactctcggaatcaaaggattagagaaaaaaacattatcttcgtactctgacaaagataaattacttgcactaaggtattacttcaataaaccggtagacatagagtatcatcaggaaaccaatgaacagaggtttcttcaaattgttgactttacttttatattacaatcaatctcagcactaatgcggcccaaaacctcctctggagggaattacaggcatcatcataactggcaacgaactgttacttctactatatatggtaaacagccgggggggaaagtaagaaatgttagactcaaaattaacaaagaaaataatgagttaactatcacctcaactaaatctgtgggtataagaaaacaaggacgaataaatcgtaagaacagagctattctatcaaatcactataaaataagtcgtgtgaaatttaaaccaaataatggaaaactcagtaataaatctcagtccaccgtatccagggcggttcgtaataaaataatgccgaatatgcatacaaaaaatattgatcctaaaaaactttccgctccgaatgatatgggtttgatgcggcatgaagatggtagaagatatattaaaatagacaaattctacgtagaagtaaaaaaacgaaaaggctattttttcatcggaaaaaatggtgaagaggtaatatatatcgagtataaaaataataaatttcatttagaatcccacgggaaacatcttaatcgtacaaaataccaagggcttagcgggggaatgaaaagctctgagaaaatgatagctgacagattaaacattggtaaagtgaaagccagagagatactatcaaaatatgaatttcctgaaagatgtcagctttacacggaaaaaatctttgccatgtcagtcagggatacaggaatgctccccgagtgggctaaaagctttaaaaaaatagaagctaatgattatgtttcaccttacagagaaagtaacgttatggataatgggctgcgcgggtttaatggcaaaagtaattatttttatagagtagataaaaacccaccagaaacagtattaaaaaatgggtttgaaacatcaacagattatactgcaataccaaagatgctaccagagaatatggatggtgttattgttgctgaaacccttgaaggagcccggagatatcaaaccatcgtcaaagattcatatatctacaaaattgatgggaaaagcgttggaggtgtatcattaaaagataatttgtatacgaatgaaaaaggattgaatggttttttgagagaaccattatctaaaaaacgcaccaccctggcgtctattgaggtggatacaaatggtgctatttatcttgatgaagttcatttaagaaaggaaaccattagaccagacgcaataagcattgtgcatcctgacgaaattaagggggatttagcgccggggccatggaaatattatgtatcataa

SEQ ID NO: 286047 - DNA, 180 bp, Morganella morganii
atgaagaaaaaaatgatctgtgcggtatccgccgtgatgctgctgaccctgtccggctgcggactgaaaggcccgctttacttcccgccggaagagcctgccgccgcgaaaagcgctcctgccgcagagcagtctgctgtgccggctgacaacgctgagaccggcaaaacgcaaaaatga

SEQ ID NO: 286048 - DNA, 924 bp, Morganella morganii
atggaaattaaaaatattttaacggatagtgtcaaatcgcttggtatcatgtcatatattgataactcagaaaaaatgttagaggaattcagttggttgtataaaagctggatttacagtggttgttatcattcctctgatttacttatagtacatcacccggcagtggaacaatttttacctaaagaacctggtgttattcttattccgtgccagccacacgctacagcagggacaccttttgaaggctatcattattttaattcaattggctgcctttcaggtgaacatattgatgatattgcagctcagtatccctggctcctgagaacagatgcagatatcttcctcacccccaaactggccgattttcgccccaattttcctgtgcacggacggggaagatatcacatcgatgatgatttcaaagaaaaaatgctggatttctgccaacgacacggcgttaaacactttggtcatttcggctgcggcagttctctgatgtcttcctctgaactcatgattccttttttacgccgccaaatatactggtgccggcaattaatggatgagtttggtaaagacccaaaaaactggggagagtggcccggctggtttcgtggagtgacgaccatgtatgctgcagaaatagccgcaaatgaagattactggaacatgctgtataacgggtatgagcgcattctggatatttcatgcagtgataattatccgattgattcaatgacttttcatattcatgcggtgcatagctctaactacttttctaaatttaaactgcgtgacggagcgtatcagtcaatagatcctgacacactggatcgcagcattatcccgcaatattgccactggctggcggtagcatcagttgaacaggtaaaacaggaagcgaattatccctggtaa

SEQ ID NO: 286049 - DNA, 462 bp, Morganella morganii
atgcttaaatccgtaccgaagcctgtcaatacgacggtgtcaccactgcctggtgtaagtggtgatattatcagtacagcagagaccgaatgggttgattccggtatccgcgatcagaaaaatgaattcagtctttttttcacccgggaaaatccgaaaatggacagcgcactgaatatcaccttttcatttatgattcagactacgggtgataagaaaattgagatgtcggataacggaaaacctaacggtatgtttttcaaccgtgtggtggatacctggtcactcgactgtctgaacttctccggtcaccagctttccaaagtctatctgatgaatgatcgcattatatacagccggaaactggatacccgtaatatgaatataggtgagcttgaaaaactgtctgtgttcccgaatacagacgtttataacgctgcaaaacattactgcgggcggtaa

SEQ ID NO: 286050 - DNA, 648 bp, Morganella morganii
atggctaaaatttactggaattttgttgataaagttgtctatattaatcttaaagaaagaacagaccgccgggaaagtattgagtttcagttaagtagtctgggtgtgccacctgaaaaaatcatacgttttgatgcagtcaaaaatgatgatggtgcattgggatgtacgctttctcatattggtgtcatgacaatggcggaggaaaataaatggaacaatgttcttgttctggaagatgatatgatttttaatgatgataatgaatccctggaaaggataaattattttttcagcagtctgatgagcacatcctgggatgcgggcttattatcaggaagttacttcaaaataagtcaggaacataattgtttttatcgcctttatttttcatatttagcgaatagttatatcgtcaatcagcactattacagtacgctgcgaagtagttttttgaggtcagaagaaaaactgagaagtggtgtacacagagatctgtgttgcctggattttttctggaataccttgatggaaaaagacaattggtatgctatttatccatgtgcaggttatcagtcagtgtgtatgagtgatatcgaacatgcagtaacagacagaagacattattttatgcgaaaaatggattaa

SEQ ID NO: 286051 - DNA, 1641 bp, Morganella morganii
atgaaaaattttgccgctgtaaaaaaatggctgattattttattcagtctccttgtccttacccaggccgggctggctgtttatgataaagcacatctgtttatctggctgagcgggttatgtatttcgctttttatcattgctgttatttctgctgtccgtatcagggaacattcagacgtggttgtgcaggatgacggtgaaacggatcgcctgacagcaccggaaattgtctttattctcgggccttatgccagaacctggttcagccggcaggatgaggatgacactctccggtttgataaccggattatctggatgctgataaacaaaccggatgatattcataaacaggttgcggcaatccgtcagaaacaccgtcattaccagatcagtgccatcttcccgatattaccggacggcaatgattccgatatccttttgctgaataaattacagggctggaaaaattcgttttcccgaaaccagtttgaacaggaaataccctgcaccttaattatttattcacgcctgagcaaccagcggcttgctcatgacccggataacgctatctgggtcggaaaatttaatctttatgatacaacatcccggccgttccgtgatgaaataacggcgctgcgcaaagaactgaatacggtttacctgcaatctcacgcgattgcctcacaacaccgtaatgcactggcactgtccacactgaactggctggacgaagccggtctgatgacagaaatagaatccctgttttcggagagcgtgctcagttttaccaatctgatgttttctgattacggaaacggcccgacccgccacggtgcctggtcccgctggatccagaaaaaatttacgttgctgccgcggatatcgtcatatctcacgcttccgccattaccggttaataccggtgaaccaccaccgcagataagaaaacaatcggctgaaatgacaccggttccttatcagaaagtacgttactcattactgcttattccggtactgattgccggtgcaatcacaggcagtctgctctggtcactggattttaatattcagcgtaatgccatcgttaatcgtctggtcgctgaatttgatgcaaccgcacccaatgcattacagcagcgttttactattattcagcagatgaaaagtctgtctgatgctatttcacatcatgataagccctatttctttatcatcgaactgacaccatccgatatatttatcagtaaactggataaatcaattacagagttttcccgtagcccgctctatgtggcacatgataaaaatattgtttttgatatcggcagctctcagttaaaggaagaaaatacagaatatctgatgccggtattaacatttattaaacaaaatccggatataacaattttgattgaaggttataccgacaataccggcagtgataaaaccaatattaacttatcgctgaaccgtgccgaacaggtaaggcactggttacagaaatccaccggatttccggatagccactttgttaccagaggcttaggtgcccaaaatccgattgcagataatgattctcaggatggcagagaacaaaaccgccgtgttgaaatcaaaatttatcaggaaaatcagtaa

SEQ ID NO: 286052 - DNA, 633 bp, Morganella morganii
atggtaaacagtcaggatgtctttaataaaataatgtgtattgatgcacttattgatttggaggccattattccttccttatcagaattgcagctgaatttatccactgccgttcagcagttccgggactgtctggaactggaagatccttattttgaacattctgaacatttctgccggctgctctgcatttatctggataaaatcatcctgaaatacacagacagtcagcaactctcctgggcaccttatttactggaaaattatttctacgggtttgatcgtgagccttttgatattacagaacagctgacattcttttcatcggtaaaacgtaatgccatttttttacctgcgtatcagatgacgctgcggctgtccggattaccggaatacaaaaccatactgaaaccggtgattccgctgtttgaaaaacggctgccgctgccgcctgtggctgatcccgtcacaccaccggcaccggaaatactcaaacccgcggaatatccggcaccggtgagttaccggacagtcaatatgccgcttattttttccgcagagatcctttgcctgatatcgattctgatttttatctggctctatattcgtgacacactggataccctgatttaa

SEQ ID NO: 286053 - DNA, 1347 bp, Morganella morganii
atgaataataagattttcatcggcatagccagttacagggacagtgagcttattccgacattaataaatatggtcgggaattctgctcatcctgaaaaattatttatctctgtatgctggcaggaagaaacccgcgatttttctgtttttactgatattggtgcaaaagtaacagaagccactgatgataatcctgatgttattcgtatggattatcatggtgctatattaaatatccattttgtacacttttatcaggctaaaggtgcctgttgggccagatactgttgtgaacagtactatactgatgaaagctattttcttcagatagattcacattgccggttcattaaaaactgggattcagaattaattgattactataattctttaaaagatgaatttaaaaaacccgttatatccggctatccaccaggttatattcctgcaacagaggacactgaggaagttcttaatcatggcattgcacgaatggtatttaaccatttcaatgatggtgatattccgtcttttattcctgttgcactgcttgatggtaaacaacatacccggggatgtttcttagccggaggttttctttttaccattggacagtttgttactgatgttcccaatgacccccaggttttttttctgggagaagaaatatctatgtccgcgagagcatttactcacggttatgatgttgtctatccgaataagatatttttatatcatttttacggtcgtaaagggtgtgacaaaatctggggagaccatacccaggataaaaaagaaaaaaaaatggttgaaaaaagttggtttgaacgggataaaatatcaaaaaaccgggttcgtcaggtattaggaatcctgcattctgatgatattgacctcgggaaatatgacttaggcacagagcggacactggaagagtatgaatacttaaccggaatactattcagtgaacagctgattgccaaagaactgctgagcaataccaaacctacgtattttgaacatattcctgaatcacgggacatatggatatcgcagctatacagtgattattaccggacgattgaaattaaaaaatccgaattaacggttaatgatgataatgttgattactggtcattaggtgtattcagtgaagataatcagcttattgccatgcagcgtctgacaaccgaagaattcgcgaaacaggaatccggtgataacaaaaatatctatcagtttgaaataaaactgaaagataaaacgcatcttatccctaaaaaactcaggctggctcctttctttgttgactgtggctggggagaaacggtggaaaaagtatggtaa

SEQ ID NO: 286054 - DNA, 1023 bp, Morganella morganii
atgaaaataaaattactggcggcgctggccgctctgggaatgtccggtaatgcactggcctattttgattgtacaattgccgaaccaccgaatcatcaggcagaagttcttgttaccgaaagcaaaaccatcagattgcttgccggccaggctgccagtgactcaaccccgctcgaaaaactgattgctcctgcaatgagcactgccgagataagaatcgtctgccagaatacagactttgttcatggcagccgtccgttgtacatggcagggctggaagagtaccccggcaagtccgggttttacaaaacaaacgtagagggtattggtgttcgttttatggcaacaccagccagcggcagcaatggtgatgtattgccaagatccgagtatatttggggaagcaagcccggaacaaacccctttgtggcaatcttaagtccttcaacctttacagtaagcttttataaattgggcaaagttgaccttagtaagggtggtaaatatccgagtatcgttcctctgatgactgcgcgtgatgttggggcatcacagatagaagatgtaccttatgttaaatatcgtatgaatgatgtcagtattgtcggcgttcctgtctgcaaagtcgacagacctgcggttgttgattttaataccgttgatgcaacagcagtacgtaatggtgtcagcagaaattttgattttggtattacttgtgatacagactatggcgactataatgtcaccgctaccatcgatgcttcagaaagaacatctgataacaaatttattaaaataaaagattcaaaaggtgataataactcattaattatcgaaatcagtgactcaaatgataataaaatcactgttgacggaaatacaccaatagatatcagtaatgttaccagtggagaaaaagcaacatttaaatggaaagctttgctgaaaaaacaaagtggggcgccttatccggcacaggggccatttaatgcaatcgctactgttacactcaatatacattaa

SEQ ID NO: 286055 - DNA, 558 bp, Morganella morganii
atgaacaaaatgaagttagcattattagttgctggttctttagttgccggcgcaagcacctctgcattagctgcaccgggcgatacccagggtactgtgacttttaacggtaaactgattacagaaacctgtgaaattatgggtgataaagatcaggttgttaacctggatgcagtttctatcactacgctgaatgcaagcggtaaagaaggtggttttaaaaacttcaatattcaggttgattgcccggctaccaaaaatgaatttacagatgtcggtatccattttgagcctgtcggacaaacaacgtcctgggactctgcaacaggtaacctgaataacaacgcacaagccaatgctgctactaatgtgcagatcaaaatctacaataccaacgatggtgcttcgaatcatgccaaaattggtgaagtgagtaagtggattaccgctacaacaggtactaatacatttacttatgcaggtggttactatgctactgatgcaactacggcgggtgaagtgactgctaaagttgagtacactctggtttatcagtaa

SEQ ID NO: 286056 - DNA, 771 bp, Morganella morganii
ttggctaaattactaaagattttactggtcactgctctcttttccggttttactggtctggctcatagtgcagttgttatagaagggacccgtattatatttgatggcggaaaaaaagagcaggtcgtcagaattaataatagggatcaggtaaagccggcacttattcaggtatgggccgatgatggtgttgatgttcataatattaacaatcctaacctgccatttgttattacacctccgatagtaaggattgaaccggggaaagggcagagtatccgggttatttataatggaaaaacgcttcctcaggataaagaatcagttttttactttaatgttttagaaattccgcctgaaagtgaagaaagtaaaaatatctcacagcgcttagatattgcattcaaaaccagaattaaacttttttaccggccagaggctttacgtaaagagtcatcttccacttatctggataaattgaaatggagtgtgattaatcttccgggtaaaggaacagcgttaaaagcagagaatccatctccgtattatatttcagttgccggaataaagacaaaaattaacggaaaagaaactgaattacgaggtgatatgcttgctcccggggcttcagctatatattctcaaaatgagaatgcacagatcctgaatgggagcataacggatttcacgtacgctattttgaatgattatggtgcgcaagtcgtaacaaaagttactaaatcaggttctgattttgccatcgtaaaatag

SEQ ID NO: 286057 - DNA, 2565 bp, Morganella morganii
atgctctgttctttcttatttcctgccgtatcatttggtaatactaccttattggcagatgaaaatagttctgatgataaaatagaatacaatgccggttttattcaggggctgaatgttgatgtctctgactatagctatggtaatcctgtcccggaaggaacctatacagttgatgttatccttaatgataataacagaggaaagcgcagcattttttttaaaaatataacgaataataagcgggcagatgcgtgttttactccggagcagatagcgtcactgggtattatccctgataacaaacagggagatgtaccggataacagcaaagaggatatggcggatgacggaacctgtcatccgatttctttttatgtcagctatgccaagtcttattataatacggcggacctggcgctgaatattacggttccgcaggccagtctgtcacagcagtattcagattatattgacccatcccgctgggatgaaggcgttactgcactgtttctcgattataatcttaacagctatctgtccgataataagattgggaatagtaaaagcacgtactacaataccaatgttaactggatggccggttttaactatgagggatggcgtttcagaaaccgtagtaactcggtatggtcaaaaaataatagcttcagcaataaaaatattcagctctatgccgaaactgatattaccccctggaaaagccgtttaacactgggagaatcgttcaccagtggccgtatttttgactcttatggtatcaggggggcaattctcggctcaaatacacgaatgcagccggattctcttaataactttacacctattattaccggtattgcggacagcaatgcccgggtgttaatccgtcagaataattacactatttatgaaacaaccgtaacaccggggccgtttgaaattaaaaactatggtgcaatgggaactaacggaaccttgcaaatggttattattgaagctgacggtcgcgaaaaagttcaggatattgtgttctctgcaccaccaatgatgctgcatccgggcaccatacagtattccatctctgccggggaattgcgtgatgattcgtccggggattctcctgtggttgttgaaggtgagtttcttcaggggatcaataactttttaacctggtataccggcttccagttatcagaaaactataaagccgttgctatcggtaatgcgctgaatacacctctcggcggtatttcagtcgatatgactcatgcccgcagtgacctgaaagatacatcccagtcaggtgaatccttccgtatcagctacagccgcttgtttgaacaaacggataccaaccttattgtttccagttatcgttattcaaatgatggctatctgaacttccgtgacgcgacaatgatcagagatcggggggaaaattatgatgacaaaaagcgggatgataaaggtaatttaattaatacttacctcggtgtcagagccaaaaaccaatactccattaacatgaatcagcgcttatggggtaacagttcagtttctgtaatgggcaactattatgattactggacagcacggtcgccgtcatcacagtggtctgtttcctatcagcaaagcctgcaatatttttcctacagtctggcttatcagcgtgccaagacagggatagacaactatgacaatacttacatggttaacatcaatattccgctttatcgcgggataaactatcagccgttattcagcagtctgtctctgatggctacccgtaacgctgatgggaataccacatttcagacaaccgcatccggcagtcagggagagcagagtgagctgagctataatcttggcgcaatagctaactcacattctgaggccagggatagtctgaatgcgtcagccaactaccggacatctctcggtaactatggcgtcactgcatctatggataacaaatcgaaccgccaggcatctgtttcagcgaacggcagtattgtggcacacgccggtggtgtcacactgggcccgtctgtgggagattccgcgtttgccattattgaggcagaaggagcggaaggtaccagggttctgaacggtaccggcagtaaggtggacggcaggggatacgctatcgttccttacctgaattcataccgggaaaaccaggtggggcttgatgccagtaatgcggggccgaatgttgatctgatcggtgaccaggtggtggtggttccgcgtgatggctcggcgattgcggtgaagattaaaaccaatgtcggtaagccggttgtcctgattgtcaaagacaaaaacggtaactttctgccaatcggtaccagcatttatgacggcagcggggcatatcagaccattgtcggccaggccgggatggcctatctgcggggatgggatggcagcagcggtgcattgtctgttaaatcaggtacggtaggggagtgtgtgattaatccggaaccgggtattgcacagaaaatatctgcggcaggggacactgtggttcaggtggaggttaaatgtatttaa

SEQ ID NO: 286058 - DNA, 588 bp, Morganella morganii
atgtatttaatcaatatattcaggaaatgcggaatatccttactccgcagaataatatctttatttatccttttaggaatatttacatacgcacatgcagaggttgtatgtgataattgtgatatgactgttgagttcaaaggggtatatgaagagaaaacatgtgctatttcaattaatggtgcatcaaataatgaaacagttttattaccgacgctgtcttaccggacgctctatgagcctcagagagaagcgggttctacattatttacggttgcattaaataattgccccacagaggttgaagtcgatcttttctttaaaagctttaataatttaagcccggtgacagaaaatctgaaaaacaattctggtggcggatttgcaaaaaatgttgaactcagaatccgggatgccaatgcaaatcacattgccattgataatcctgcttccgggcagcgttatgatatacccaatgtaaattcgtcggtgtctaagaattattacgtatcttattttgcgggtacggaccctgtttcaccgggtaatgtggaagcaaaaacaatacttgaagtagtctataaataa

SEQ ID NO: 286059 - DNA, 714 bp, Morganella morganii
atgtcagatctaatggatttatgcaatgcagacagcaatgaaaattatccaaaatggggagtgattgatgccgcatggtggcaaacatttggaggggacgattacctcaataaatataaagacagctaccttatttatcacaaatcgagtataaaaaaaatagcatcacaatataaaatacctgctgacttattaggaagtgtagcccgaatagaagctggcggaaaacctgatggagtaaaacaatatgttgttcttccgatcaggcaacttgattattcaggccctgattggattgacaaacatctcacaatgacaaacccgcctgaaaatacatctattggtatagttgcaatacaaataagaataataagtgaaatgtttggtaagaatccggagaaactaagcatcaatgatgtcaactacatatccaattgcttacaaaaggatatttttaacctgaatgttgttgcaaagcatcttcacgacctgattgtttatgattttcctgatattgatacaacaaatttaactgatgaacaattcatcattgccggatcaagatacaacagagggaaagaacgtaatttacataatttcaaacaatcaattaatgcagacacaagcgattacagctcaagagtgtatacttcatatggaagaacgatgctgagaaacagaaataaagtaaaagcattacttgaaattaaataa

SEQ ID NO: 286060 - DNA, 267 bp, Morganella morganii
atgaaattactactgatagcctatacttttatttcattattaataataaaaatatttacatcttcagattatgaatcgttattaagtgatggtatttacagcgtctgtgaactaccaaaagataatgattcaatatcctattttttgccgatcctgtgtttcgtgccatttttatttctcaagagaaataaactattttacctgtcactttcatttattctgatttattacatatggagaatctggctcagatttttattttgttag

SEQ ID NO: 286061 - DNA, 669 bp, Morganella morganii
gtggagttaaatggaatagtgcagcaaagattgggtgaaaaatctgtaaatcagattacagagaaggaccgtggtgcttttcaaatgatagcagataagtgtatcgcggttactaacagcgatgagacaatcttcgcggggtgcagagaacagaaagagtataatatcatgactgcgtgcggtgcattactggcgcaaacactggtgaagcgggagtattatactgaaggtctcacaggagactgtgtaaaaaaacttaatataacatcgactgttgagatttctgacagacgtgaacaaggtgtgcccggcagctacgctatcagcagatggtctgatctggaaggattggagtactccgctcaggaactgtatgacatgctgagcagtgagctgtatgaacagaaagtctcaccggaaatgctggaaaaaatacggactgtgatggagatggctgaaaaaggttcagacagtaaatctctccggggaactgaatttgcagagatagttgaagactatggggataagataaaaaacgccgtgatttctgaaatattaatagctcatgatattaatgaggctgagcacgggccggtgttagaagggacagatattattcagctggaattaatgaaagatatttcattttattcactgaataattactga

SEQ ID NO: 286062 - DNA, 582 bp, Morganella morganii
atgggaaaaattttatttatactcggtttactcattggcggaagtggtgtttttttgtaccactgggttaagcccgatacttatgacccctacttttttttatcaccaaagatagccgaagggcaccctatcaatgtgccaataaaactgtataaaaaaggagatactgttaattttactttctggaaaacacccttccctgaatttaaattactttatttatttcctgttagcccaccatcatcacgtatagttttaaatataaatgaagacagaaataagaagtttggttttgattcatctgaaatattcaatggtaaagggccaataaaagaccgtggaaactacccgatatttaaagtcaaattatataaaataaactctgatatgacagagcacctggtattagataaaatacataaaaacaatagcgcccgtagaataaatgcattttctatagcacccgtcccggaagaatatggtcagtatagattagaggtcacggttttaggcgactggcctgaattggaaatagatggaatggattatttcatcacagtagagacctattttattaaataa

SEQ ID NO: 286063 - DNA, 867 bp, Morganella morganii
gtgaagccagaaaataaaaccgaagaattacttgaattcgctgcaaatcagcgttatacaaaaagagagaacagaaaaagactgattgagcactgtgcttatccaagtaaaagaaacctctctactgtggggccttgtcaaacctgtctgccgccagatgcaagaccggaatttgttgagcatatcctgagttctctggatgccaggtatacggtaaccatttacactgcatatccgggcacgccattgaataatgatgatggttcacccggatttgaagacgaacaaagaaaaacatcggctgcgggtcatatgtggctgcaaataaaaaaaataaatgaggatggcattgaaacgggtaatatctcttatggatttgcacctatcgaacatggaatagaaggcccgggccacgtgattaaagaagataccattcactacgaaaacccatattacaacagaaccatagaaataaccaaacgacaatatgacaacatctatgaatttggtttcgaagcggaacgtaaaaaatccgataaatattttgaccttaagtataatggcgcaacaaacagttgtattaacttcacatggaaagcattgggtcatgcaggaataaagccgaccctggcgtggaatgacttaagcatatacaatgtaggacataaattagcaggtaaatttgaaggtgacctaaaagtcataaataacattccgcatgtgaaatcaatcccggcaccgtttccggacagcgaattaaataccgaaaaatacaatgaaataccatccagaacctttatggaatggattgtatctcaaaatgaaaacactcaacatgacgacaatatcgagttagcaaaaagatag

SEQ ID NO: 286064 - DNA, 624 bp, Morganella morganii
atgaaaaaaaaattagtcataatcggtgctggtggattttcgaaatcaataatagatagtatagataaccagttaattgacttggtcggctttattgatacatataaacaaggttaccatcaaggatttcctataatcggaaatagcatagccgatataaaagaaccgcataattatatctattttgtaggtattggcgatcccgatatacgacatgaatttatgtcactattaacaaaaaataaccttaagactatcaatattattgatccaactgctatagtatctaaatattcagttctaggtaactgtatttatattggaaagatgtgcataattaatagtgattctatattagaagatggtgttgttatcaatactcgctcactaattgaacacggcaataaaataggatattgctctaatatttcaacaaatgttgtactaaatggagatgttaccgtaggtgaaaggacatttgttggtagctgcacagtagtaaacggccaattaaatataggaagccaaactattattggttccggctcagttgtcatccgaaatatccaagataaagtagtagttgcaggttcaccaacacgtttaataagagaattaaaatga

SEQ ID NO: 286065 - DNA, 570 bp, Morganella morganii
atgattatttataccgtcggggtgcacggtatcactgatgaaaccggaaatttaaccggatatgcggaggccattaattcacttgataccggtgaatatgacgacaatttgaaaggcggcttttcactgatgtatgcagtgttcagagggtggcaggaaaaataccactcaccgaccgatgagcagcgcgtcacgatgtggcgctggattgttgcagcctgctttatctctgagatgcagcagaaaaacggcacagtggaagtagaaaaccatctgggtggtacagatactgcggctatttatgcaaatgaaacatccgccatgtctgtttaccccggcccgctgcgtcttgcgctggccgttaacattgaacaactgacaaaggaaaaatacggggaagaagccgggcgcatgctggcacttaacatatacatggattttgtggacacaccaaaaggtcgtggtatttgcctttctgaccgtggtcgggagggactaaccattctgcataacgactatctgaatgaactgaacaccaacggcattccgccggttccgacatttcactga

SEQ ID NO: 286066 - DNA, 594 bp, Morganella morganii
atgttatttaaatcaaatatgctgtgggttgctttaaccatgaccgccgaggtcagccctaaacgtccgcagttgaaagatacaatacacattacttcatggcatgtggagtcaacgaacggtgccgcctgcgtccgtatggaacacgggataccggttaatgaagatatcgatacaacggtgcgtttctttgacgacattcctgatgcggctgaattcagtgaactacggttcgatggtgatcaccgtgtaatccactatgacgaaaataaaactgaaattgcctgtcaccgcattgagctggtcgattgtcgttaccctgatatcgacaaagtcattcccgtgacaacaaccgacaggctgccgtgtatcgggccagaacacctagctctcccgtatatccttttcggcgactacgcgattgtaatcagactccacccatccggagaagaaacggcggtgcgtgtggaatttgatgcctatgttaatgaggagttcggcaatccgttattgctgattatgccacgctatccgaattcatttgagattgcggaagcagcagcactgaccaaacgcacggaggcattacagtga

SEQ ID NO: 286067 - DNA, 222 bp, Morganella morganii
gtgaaaatcgaatttatctcaaacggcagcatagccagggtggtgatccgctccttcatcaccgaacaccggaaactgaatcgcctgatcgatgttgccttatttcatgagccggtcaacgaatcaaccactggcctatttttccgcgtgacgaccctgtacggcaaacagaaccatgtccgccgggcacataagattatctgccgggaggtgtcacgatga

SEQ ID NO: 286068 - DNA, 255 bp, Morganella morganii
atgagccagcaggcaaaggattacgaagtgagtgtgtacgatcatccgctgattaaagcgatccaccacgtggatgacgggcgtgattacagccagcagcttattcacgatatgcggcaaaactattacatcagagcggggatataccttccccgcccaccagcgccgcaggtcgttgcgccaaagttaatcccggtaatgacgggtaaaaaacggaataagaaagtcaggaaggtgagccatgaaaacaactga

SEQ ID NO: 286069 - DNA, 318 bp, Morganella morganii
atgaaaacaactgatctgcacctggtgcaaattatcacggccgccggtcatgacccgtctgatattacagatgctatctgggctgccggttaccggaaagcagactttaccactgagcagattatcgaaatggcagttagtcagaccgctgataccgtgctgaacggcttccctgctgacacactgccgaaaatgttggatgacctcagccagtaccacctgagcggtattatctttgaggtgaaatgggaaggtgcgcctgcagcaatggcaaatgcagtattgatgaacgggtataaaaaggagtgcgacaaatga

SEQ ID NO: 286070 - DNA, 189 bp, Morganella morganii
atgagcgattactggagcacggcaaaggttgccgattatctgggagtaaaagaaaaaacggtgatccggtggattggttcgggaaaacagaaaaaagaaggtttcccgaaaccaaaacataaaaccagatcacatcagttcagccctgacgaaattaaggcatgggctgctggtaggcaacgcggataa

SEQ ID NO: 286071 - DNA, 1155 bp, Morganella morganii
atgctgacaaaatcggacagggatggcttgtctgtcagggttacgccattgggcaaagttgtatttcaatttcggtatcggtgggacaataaaggtgaacgtatcgacataggtacttatcctgctaccggcctcaaagaagcccgtgacagcgcggtgttttatcgtggtgaaattgagcagcaccgtaatcccaaggttgtaaagcgcgtcaaaaagcaggaggccatcacatcctgtacggtggagatggtgatccgcgagtggtgggaaaaggcagtaaaaaaatcacaggtcagggctgatgagttgctgaggtcttttgagatttatgttttccctaaaatcgggatgttgccccataatgacacccatctgcacgtatggttatctctcctcgaggatgtaagcaaaaacaaaccgacgatagcggcccgcattcttcgttacgctaagacggcccatcgttgggggatcaggcggggtatcataactgcaaatccgctaagtgatttgtcaccggtggatcttggtgttaagaacaagcagggcgaccgtgtgttgtcggatgatgaaatatcgcagcttttcaggctgattgatgataaaaaatacaatccgagaaaccgtcttattatcaaattagccttgctgtttggttgccggattggtgagttactgaaagcaaaaataactgattttgactttgattctggtgtttggaccgtaccgcctgaaaaccataaaaccggaaacagaagtaataagccacttatccgaccaatcattgagccagcaaaagctatgatattcgacgctatatcaatgagtggcggtatttatctttttacgacatctgacggaagccagatgatagaaggtagtcagggttcgataatgcaaattctgaataagaagatggctgctcattatgatgactataaaacctggtctattcatgatttgcgcaaaacgatgagaaccggagtgtccgaactgactatgcctcatgttgctgaaattatgctggggcacaaattaccgggagtatggcaggtgtacgataagcacacctaccttgatgaacaacgcgaggcttatgagaagtggtgggataaggttatccgcgttgcctaccagcagcccatgccttaa

SEQ ID NO: 286072 - DNA, 657 bp, Morganella morganii
atgaataattctgatgaaatatccgggcaatactgcagctttaagtcccctctcaatgagggcgaattttttgccatacaggccggattcgtcatgccggaaggtgtgaagccagtgattgatggctctgccggattgtgcatcggttacctgtatggtatgggtgacatctaccatgtatatgatattaatgggtattctcagggtgtatgcacacttgcgccggaatcagcattatctgaaccactggatttactgctggtcagcggtatagtggctgaaccggacggacgaatatcgttgctgatgcgttatggtacaatccggtctgtcagcagcggcagtacattacgggatatgccggttatacaggcactgaaaagcaaaattattcagcacaatacaaaaaaattcagatattcgccactggcggtccgtgctatggcagagcgtcatcgttatgtgccggcttatattctggacagggcagttaaaaagggacagcgggttaaattaaccccggcggtctgcggaggcgatttattaacctgtttgctgaaaataagaaaatacagtcataacgggcagtatcaggatataatgctgagtgttattgttgatggcgacaggaaaataataaaagaatttaactattga

SEQ ID NO: 286073 - DNA, 225 bp, Morganella morganii
atgcacggagacagtaaacttcttattattgaaccggttatctacccggttgaaaaaacagattcccgttatgcgatggatatcctttgcctggctgctttccctgaagcgggtgaacgaaccattcctgagtttgaaatattgctggcaaaaaccggactgaaaatcaataaactgatcccgacaggttgctatgtttctatcctggaagtggttgcggcctga

SEQ ID NO: 286074 - DNA, 1038 bp, Morganella morganii
atgtcttatactgaaccggatttgatgagttccgcagaagagcaatccgtcatccgtatcctgaacgccaccctcgggctggcactgcccggctgtttgcgggttgcggcagagctgaatattgccgaccatctggctggcggcccgctctctgtcaccacactggcagagcgtaccggctcagatccggataatctgcgccgcattctgcggatgctggcactgaacggtattttcaccggcacggatgatgatggttaccagctctctccggatgcggaatttctccgcaacgaccacccctgctcacagcgggatgcggttctgacactgacagacaatacttactggtcaaccatcggtcagctgaatgagtccgttcgcggcgaactgaacttcaaaaaacggttcggaaaaaccttctatgaatatcaggccaccaaacccaatcgtgatgacagctataattttccgtccgggatgtctgccctgtcagaaatggaaaactattttgtcacccgcgcttatgacttcccgtcatcgtgccatattgccgatatcggcggcggcgaaggctcactgctgctgcggattttgcgcagtgacccgacactgaccgccaccctgtttgacagcccgcatgtggtgtcggacaaatacctgtctcagctgggtgacgattcccgctggtcgctcgacggcggtgatttttttaaatccgtgccgcaggcggatatgtatctgctgaaaaaagttatttttaaccaggatgataccaacgccctcgccgtactgaaaaactgccgcaacgccatgaaaccggacagcaaactgctgatcatcgaatctattgtgcatccggaaaccaacccggcggcgcactacggcatgggcattctctgtatggcgatcctgcccggcggcggtgaacggacaataccggaatttgaggcactgctggctgaagcaggactgaaaataaaccgcctcatcccgacagagtgctatatctctgtacttgaagtggttgcggcctga

SEQ ID NO: 286075 - DNA, 1395 bp, Morganella morganii
atggaaataacctccgatcagaagcggacaatctgtgccatgctggctgaacaggccggataccctgtccgcagcgcagaaatcacggccttgtgtgatgatgaaaccatccgcgccgccctgctcgtcctcggcagcctgattgacgtaaaataccgtgaagtctccgccgcactggcggcggccagcgctgaacatgaacgcaacaacccgcagatgatgatgggcagtacgctcgctgacagcacactttctgcgccggcggatatgccagcctcacagccggacacagctcagaccgtattcccgcctgctgctgaaccggaccccctcattgttcctcctgcacctgaagagccggttatcacggataacaccacgggtgcagaagaacaggcttctgcagaaattgaccgtttatccacaatatttggtcagcattcttttcttccggatgatcccgcagcgactgacaacagcatcacagaatctgccccggtatatgctgaaccggtgataataaaccagctttcaccactttctgatgacgaatccgcagagttcacctttgtatacaacgaacctgaggcagcagcatccgttacgccggcagccgcagacaatactgaactgaccgcctctgtattcagtgataaatccctgtttccggaacctgctgccctcagtgatccgctgaaagacggcaactggctgtttgacgacctggataccgatgacactgataccccggtaatcggagaactcccggaaccggcagaaattggatcaggcgatgacattgttgccgccccgctgaccacagacacacctgccggatcaacccgtgatactctgcaggatagcagctggtcattcagtgcagattcaatccccgctccgttacaggcggaatctgcagaacagaagccctgggggctgacggcgctgtttgctgcggggaaagaggacattccgtcacaggcaacagcggcccccgtccgggaatctgcaggagaagaggctgttacacaaaacacttcccatgaaaataagactcctgcaacaatgccgtcaccttccggacaaccggcaatccgtgtcagcattgcccgcgcccggttgcttgaaccattcagttcaccggtcaccgcaacactggatgacggacgggcggtcaccatcctcggtatttatttccagcgcaatatcggtctgagttttaacgacaaaaccggtaatctgcacggtaccccgacagaatacggtgagtttccggtgcgggtgatatgggaactggcaccgaaaaagcgtttttcctccgacatacatttttccgttgatcccggctcacacatttccacgccggcaccggccggctttccaccggaacagtaa

SEQ ID NO: 286076 - DNA, 558 bp, Morganella morganii
atgcgattttatcagacaatcaggatcctgcccgatgcactgatatcggctgtatttctccgccagcaaatctggcggcaacttcatctgatactggcagagaataaaaccggtgaaaacgacagtgcagtggctgttgcgtttccggattattgccgggagcggcaaacagcaggaaatcgtctgcgtctgctggccgggaattattctgctctgaagtcgctggcaattgctgtgcggttgtctcctttttatccgtacatccggttaagccctattttacccgtgccggaaaaaacgcagccggtcagctatgtccgtcagcatgtcaaagggttgcgccgttttcaggctgcgggggccgggcggttatttattccggaaacactgccgtttatctggactcaatctttgtcaggcggcagacatcacaggccatttcctttttttatccggaaacttgcgccgggaacggctgcagaggggcggtttacctgttacggactgagtcagaaaaaatcagaaaatgagggaattgcaacagtacctcacttttga

SEQ ID NO: 286077 - DNA, 1017 bp, Morganella morganii
atgaccgggtacagaaatataccgtcggttttatccttttcgaaaaaactgatcccttctgacggtattttttacggcgcatcacagcgtccggatttaccggttactccgttgaatatacaggtaagaacggtccggggaacatcttcgttccgccggaaaaaccgggaaacagatgaaaaaacgtccggacaaaaaatttatgatcctaatattcagtatatggattactgcatgctgggagctgaacagaatgtgctcatattccggttttcactgaaaatcaccggcgggctgaaatatccggctgcctgcaataatgaaacctttcggcagcgctatcaggcagtaatgacggattatctggaaagaaaacagtgccgggagcttgcaaggcgctatgcacataatattgccggtggtcgttttttatggcggaaccgggttggcgcagagcagatcgatgtgattgtggataatctcagtgcgaaaaaaaaccagcagtgggtatttgatgcacggaaatacaacctgcgtcattttgatcagacggataatatcgtcagtgatctcgggaaacatattgccgccgcactgagcggtgatgatggtgcattattgctggctattaccgccagaatgataaccggaaagggacaggaggtttatccgagctgtgaatttgtggtcaacaaaagaaagcgcggaaaaagccggatactttgcaatgttgatggtattgcggggatgcattcacaaaaaatcggtaatgctttgcgctcggtggatacctggtatccggctttttctgaaccatccgcaggagcgagagcgatcgctgccgatccctttggcgcagtcacccatctgggggcggtattccggccaccggggtcagggcaggatttttacacgctctttgaaaaatgggtcagcggggaaaaactcactgagcatgaagaaagttatgtcgtggcagtgttaattcgtggcggtgttttcggcagcggagggtaa

SEQ ID NO: 286078 - DNA, 822 bp, Morganella morganii
gtggccattaattatctgctgctgagaaatatccttatccggaatgccaatgcgctatccggtgcattgatagttggttttccggctgtcacagcctggcttggatttgttcatgcgcttgagcgaaaagtgaaaaaatgcggattttcgtcagtcaggtttaattatgccggtattatttgtcaccactgccatttacaactgtatgcagagccaggtgaaatggtgtattccgtactgaacagccggaaacctccggataaaaaaggcagaaatccatcactgactgaggaagcgtattgtcacctcaatgtgtcactgtttatttgtggtgaaaatataaaagataaaaatgaggaagttatcactgcaataccggaggcaataaacatgctgaagattgccgggggggatattaccgattcaggcagactggagacaggtatctttccggataataaacagaggtggtgtgaattacagcagcgtattgcaccggggtacgtattactggagcggcgggatgtcatgataaatgccatgaacagcggaatggatgcaatggcggcattactgaaatataccgctgttcccggtacggggctgatcccggtcgtcaccggatatcaggggctttctccgccgggaacagtggaaaatgccaggtcagaaggcatacctcaccgttttgcggaaagtgttatcacattaggggaattccggccggtggataaattacgccatccttcggatatgttgtggggttatcactacttacctgacgaggatctttatttgtgtcagcagggaaatcaccattaa

SEQ ID NO: 286079 - DNA, 726 bp, Morganella morganii
atgccggatccggaaattattgtattttttacaaaacttcagatgtcaaaaaaaataacggatttttcccgtcagcaatggctgacagatgcggcaggtcgcgcgaaacaactgtcgctgacaacacatccttttgcttttacacatcctggagcccgcaaaaatcgtgatggcaaagtgagagcggtgctggcggaggtcaaaaagaaaaatgatggctttctgcggtccggtaatgtggttgttccgccggatgctgaaggtaatgcggctgcactggaaatatatacattcctgatgctgaaaatgcaggatggaaaaacattactggcacatttgtgtgaagaaagtgaactggcaaagacaattctcagcggaaaagattaccgggagctgcgtgccggttttttgcagatattttccgcgagcggaatacctgcaacacacgcaaaaataaaacaggtcttttttcctgtaccggataaaaaatgcaaagcgggttatcatttactgtcagtactgacgccgtccggattattatctgaactgtaccgccggtttggtatacccggtgtattctcaggtccgtctgttgttattcatatcggcgggtctaaaccgcaaaatatctctgcgcttaatatgcgtaacaaaggaaaagcctgtttgttgttatcagtccctccgggaaaggtcagtgccggaggacattaccgtggccattaa

SEQ ID NO: 286080 - DNA, 885 bp, Morganella morganii
atgatgacacagtcagtactgtactttttgcaaacggaaggaaataagattatccggctggatctgcaggatttttcgcagacagtgattatgggaccggtacccggaatgctcgacggtattgtggcagatacggaaaaccgggttatttactggacaaacatgggagacgcgccatttacgaaaaaagacggtgctgtcggacgttgcgggttgcggggggaaaatccgcagttactgataccgccgggtatatttatgaccggaaaacaactgtttttacatcattcccggcaggagttgtactggtgtgatcgtgaaggtggtgctgtgatgcgttgtacaaccaaaggcgaaaacatacagacaattgtcagcagacgttctgcgggcagcactgtcgcggatattgctgaccagtgtgtcggtattgccgttgatacattcaataatgatctgtactggactcaaaaaggggcatcaaaaggcggacaaggccgaattttccggttgagtctggataaattcagtgacggcaacgaaatgaatgaagcagatatgtcggtgttgttatccgggttaccggaacctatcgatctgagccttgatttacagaacggcagattatattggacagaccgcggggctccgccggatggtaacagcctgaatgtggcggattttaacgaatcggggctgcataatcaccgggttatcgcccgggggttccgggaagcaatcggtctggcgatgaacacagatgatgatctcgcgtatgtcgctgatctttccggctgcatttataaagtgaatttgtcagatggacggaaaaaagttatttatcagcagggagccattaccggaattgcgctggcccgggaatag

SEQ ID NO: 286081 - DNA, 1200 bp, Morganella morganii
gtgtctgaatttcaagattggctggcaaataaatcaaccgataactattttctatacatcaaacgtctatccgctaacgataccggggctaccggagggcatcaggcagggctttatatcccttcaggtattgttactgagcttttcccttccatcaatcataccagagaacaaaatccttccgtcttgcttcgtgcctgttatttttcacattcatgtgctgatactgaagcccgtgcgatttattacaataatcatttttttggtaaaacaaggaatgaaaaacgtattacgcgttgggggccaaaaagtccgcttcaggacccggaaaatacgggtgcgctggcaattctggcttttaagcacacgcccggtaatgacagcaatagtgtagatatatggatttgcaacaccccggatgaagaggatattatcgaagctaccctcggtgaaattattcccggcacactgttattcggtcccggtaaagaaatacttggaggattagctcttcaacccaaagtaacaaagaaaaattataaaattccgggcgcatggaaaactgaattcccgtcaggaactgaaataatacaatacgccgccggatatttttcagctcattgttcagatcccgatgaacaattacttgatcggaggcgtatagaatatgatatttttctcttggttgaagaaatgcatgtactcgacataatccgtaaaggtttcggatccgttgatgaatttatagcaatggctaattcagtcagtaacagacgaaagtcaagagctggccggtcgctggagctccatcttgaacaactttttcttgagtacggtttaactcattttgcaactcaatgtataactgaaggaaataaaaaacctgattttatatttccttctgccgacgcgtatcacgatgtaacatttcccgacaataatctccatatgcttgcagtaaaaacaacatgcaaagatcgatggcggcaagttttaaatgaagcagacagaataaaaagcattcaccttttcactctccaggaaggagtatcaccagcacagttcagagagatgaaacaggctggtataaccttggtcgttccttctgctttacataaaaagtaccccgatgcgattcgttcagaattaatgtctttaggtgactttattgccaagctcactgggatctatactaattag

SEQ ID NO: 286082 - DNA, 1425 bp, Morganella morganii
atgtcagaatttgaattactcgctcaggatcttctccaaaaatccggagaagaagaaaaacgccagcagaaaaaagatacaaaactcattactaaagttctggagatttatgatcagaagtatgttgctgagttgctaagaaaagttggtcaaaatgagtggagcagagaaaccctcaatcgttggatcaacggaaagtgtgctccaaaattattaacttctgcggaagaaattttgcttaaaaagatgcttccggaaccaccggaacaccatccaaattatacttttcggtttatcgatttatttgccggcattggtggtattcgtaaaggatttgagtcgattggtggccaatgtgtatttaccagcgaatggaatgaatacgctgtacgtacttataaggctaactggtttaatgatgaactggagcataagtttaacctcgatattcgcaaaattacactgagtgatgatacttcagtatctgacgttgaagcttataagcatatagataaagaaattcctgaccacgatgtgttgttggcaggttttccttgccagccttttagtctggcaggcgtcagtaaaaaaaattccatgggacgtgctcatggttttgaatgtgaagctcaggggacattattctttgatgttgccaggattattaaatcaaagaaaccaagtatttttgtattagagaacgtcaagaatctaaaaagccatgataaaggaaaaaccttcaaaatcatcatggatacactcgatgaattaggctatgaagtcgcggatgccggagtttccggttcggcggatcctaaaattattgatggtaagcatttccttcctcaacacagggaacgaattgtattagttggattccggcgtgatctgaagcttcatgaaggatttacgctgagggatatcagtcgcttttatcctgaaaatagaccaacatttggtgagttacttgaacagaccgttgatagcaaatatattttaacacccaagctatgggaatatctttataattacgccaaaaagcatgcagctaaaggtaatggtttcggttttgggcttgttgatcctaataatgccaccagtattgcccgtactttatcagcccgctatcacaaagatggctcagaaatattaattgatagaggttgggataaaactaagggagaggttgattttagcgatgaggaaaatcaaacgaatagaccaagacgattaacgccacgagaatgtgcacggttaatgggatttgaaaaagtaggtgaaaaaccgttcagaatacctgtttctgatacccaatcctatcgtcagttcggtaactcggttattgttccggtattcgaagcggttgctaaattacttgaaccctatattattaagtcagtttcaatcagatctaaaaataactaa

SEQ ID NO: 286083 - DNA, 993 bp, Morganella morganii
gtgctgacgtcattacgaccgtataccctttccgttttcctgtttttatttaccggctttctggcagtctcaccgttatttgcctcttcatttgaactgcgggatgaaaccctggctgaagcacatcagcggtttaaaacaaacattaccgaacaaagttttgataataccgatgctccctggcaggcaccttccgatatattcaatcttatcacttaccctgcaaaagcagggaatatgttcgcttatttaacatcgccaccggcaaaagaaaatacccggctgcctgcggtaatatggcttaacggcggctatggcggcattggtggtgatgactatttctggcagccgaaaccggttaataatgaccagactgccgcaacgtttcgtgatcctgagatagtactgatgatcccgagttttcgcggtgaaaataccaatccgggtcgttatgagatgttcttcggtgaaatagaagatattgaatcagcgaggcagtatttaacaacactcccttatgtcgatccggatcgtatttatattgccggtcacagcacaggcggtacaaaagcattactcgccagtgaatacagcgataagttcagagccgttttttcattaggtggtattccggatctgaagctgcgtactgcacacagtatgtctgttgctattccattcgacacaagtaacgaggaagaatttaatgtgcggtcggtatatcgctatattaaatccatcaaacgcccgaccttctactttgaaggcggtgactatatgtggcaagaatttgccgatatgcaaagggacgcaaagcagaatcgtattccgttgtatatttatcatataaaaaatggtgatcactttgatattattgttcctgtcagccagttaattaaaaagaaaatactcagcgatactgataccagtaaagaaacaaatatccggtttacgaaaaaagatattgaatggatcaatcagcagatccgctga

SEQ ID NO: 286084 - DNA, 342 bp, Morganella morganii
atgatcagcacgattcacggaatgaatgacctgttatgtaccgccgtaacgctgaaagcaccggcagaacggccggtctgccgcatacaggacgatgaacagacagagatacaacagaaaggatggcagggagagagccgcagcccgcagctcagaacacagcaaggcccggtcctttatcagaccattgaggcgatgaaagaggcggaagatgatatcaatattcaggatattgaatttttaggctgtgcgccgttgcgaccgatggtacgtgataatcaggccgactcacggcgtgaacgcactgccccgctgaagtctgttttttcagtcaccgcctga

SEQ ID NO: 286085 - DNA, 438 bp, Morganella morganii
atgagaaaaaatgatcttcagatgctcctgtcattcagtttaattaatttaatggcaggctattctttatcatcagttgccatgaatatctatttcccggcggataccaccgtcatttatactgatatttcggctatctttactacaaaagccattattgccgctggctttttctgtatcagtctgatttcatttttaattatttttatccgcaggagagagatcaccgctctgtctgctatattaatgactgttattaatgtcattacctttatgctggtcacattctgctacggtaaaatttacttcggcaatatttttccggccggaataacggatgtcccattttcagtctttaattattatccgttactgctgttaacagtactgatttccccggttatccagttcatcatactgaaactgataacacgctga

SEQ ID NO: 286086 - DNA, 234 bp, Morganella morganii
atgcccaatgcccgcttctggcacaaagcagtccatcagattagattcacgtcacaattgtaccaaaccaaatttgaactaacacaactgactgaagaaattgcagtcgtatacactggctttattctgatttatccgtttcgtgacgaattaactgtttactatcaggcattatcagtatctgttgtgttttcttactgtttttctcgttcgacgctatgggtcacttcatga

SEQ ID NO: 286087 - DNA, 831 bp, Morganella morganii
atggcacgtctaacgctaaaaactaatgtaattagagcgctcttcgctagatctggaaatcaatgtgcctttccaggttgtactcagccattgattaataaaaagaacgaattcatagcacaaatttgtcatattgaagctgccttgcaaggtggggagcgatttaatccagatgggaatgatgagtacagaagaagctatgaaaacctaatgattttgtgctatccacaccatattgaaactaatgacgttgaagagtatccagtagaaaggctatcacagattaaaagagaacatgagcagctatttctcaagtctgatttcaaaattgatgagtcggaacttacaaagctctcatatgaaatggaaaaatattggtctgatatagatcgtcttaacaagcttgaccacatatttgcagactgcggattagctatggatgtaaatggcgataatagcttttttgatgtgattattagtgcgtatgatgcagttaatggtatcgaatccctttttaagtcatttcataaaagtgatgaacagcttaaatcggactttgaagcactcctaactaaaaaatgtatatctcctgagttgttcagcgacatcccatattatgagaatccttttgaaaacaggaattgggaatcacacaacctcggtgttccaaactggcttcagcggctcagaatagaccttgttcatattgaggttaaatttctagaagagtatttaaaaactcatagcgatgacctccatgctaaagccaaattcgaaaaggtgaagggggagctgaaagcatatgcagggactgcaatgcatgttgactaa

SEQ ID NO: 286088 - DNA, 150 bp, Morganella morganii
atgcagggactgcaatgcatgttgactaaaacgtatagcaaaaccaatcatagtgatctcttccctttcttcagtaccggtactgaagaaagggaagagatcaaaacttgcaataacatcgtttacagctgcaatttttacttacgataa

SEQ ID NO: 286089 - DNA, 339 bp, Morganella morganii
atgaaaatatattcccggtttttgatagccttattttttatcccgttactttgttttgcggaaacaccgtcgcaaaatattgagttgttgaatataaaagcgatacagggagaaacaaatgcccagtttttactggggacactgtatctcaccggacgttatggtgtgaaaaaagatattgagaagggaaagtattatttgcgtattgcggccggaaagggcgattccgatgcaaaacgctttttagcgcttcagtattacaatgaaaaagactattttgcatttcttactctgttttatgaatattgcagggatattattgaacaaagttctgaatga

SEQ ID NO: 286090 - DNA, 480 bp, Morganella morganii
atggcattattcagacaagacgataaaaaagataaagtaaataaatcagaatctgtgaagtcggaacaggcaaaagcagaaccggtaaaaaatgagccggtgggtaagagtattactatcgtgggaacaggttgtgaaataaccggtgatatgaccccgggaggtaatatcgaaatatacggaaaagtaaaagggaatatcaatgccggcgcatttaaagtttccgttatggaaaaaggggttattgaaggtgatgtgactgcggaacatgttgccgttaatggcatgatgatgggaacctgtaatgccaaaaatacggaaatccttcaaaagggtgaactgaatggtatttgccggactgaagtattttccattattaccggcgggcgttttaccggccagtctgagccttataaaagccataaagtcacccctgaagccattgttgccggtaaagaaaagacaataaatcaaaaatga

SEQ ID NO: 286091 - DNA, 186 bp, Morganella morganii
atgatttttgatgatatgaaaactgacttggcagatattatgaagaaatttgtaaaacggaaatgtcatattaaatatcactatgatgcagataatgttattttttatatcgatgaagagaatggtatgcgtatccagatcaatataaattgtatcagtgatatgccggtataccagcaggcatga

SEQ ID NO: 286092 - DNA, 651 bp, Morganella morganii
atgagaaagccgaaagaaatagcatccgatatattagatattattaatcaaaaagatatgggaggctttgagttgttcttttattctgccggtaagggtcttctggacgttggtactgaccttggttatatgacatatgattttttagatacagaaaacagatggcgaaatgaaggtataagaataaggcaggctgaattatttaagcgcggtatatcgtctgaagaaataaaaacattgataacatatattgttaaaatatttgtatctaaaataaaaaacaaaagcctgacagatatctttgcaaaaataacagggcgacagacaggtaaatatgttgcaactgcttttatttatggtgaagtagcccgtgtactcgcccggcgttttatccctcgtctccttatcaggcttggtatggttggtgttgtttcccttgccggtacaacatccacatcactatatgtttcagaggatctctcatatcgctatccatcaatttactctggtctgaaaaacctcggtgatttagatttactctattttcttgtacgtgattacatggatccatttttagaagccatagagataaacatgaaaaataaaaatgactgggatactcttattgctgagttaataaacggaatctga

SEQ ID NO: 286093 - DNA, 207 bp, Morganella morganii
atggataaatttaaatcagaagttacaggtttactactattgctgatatcgtggatttttttattgggcataagtagttacattatattcatagctgaatggccgggtaaatacatggcatggggtctcggaataatttctgtaacaattggtttatacctgatgtatctttccgacaaaatcagggataaacaccgtcgggattaa

SEQ ID NO: 286094 - DNA, 696 bp, Morganella morganii
gtgtttacgaaagtgcgcattattttcggaatttttgctgttatcgggctgctgttgctgatgggcggcagttacttatacctttccggttattcgcaggaaaaaaacggaatcgtaaccagcggagaaatcatcgatctgtcggtgcaccggtcagataacggcatctcatactgcccggtggtgaaatacacagacggacaggaagcatatgtcatggagtcctcctattgcagcagcggttaccgcaatgcatcgggtgacaatattgaggttatttatccgcccggcatcccggctgacgcggttatccgttccttcggcggcctgtacggtggcgccgtgatccttctcgggatgggggtgatatttgcactggtcggcacgctgccgctgattatcatgtatctgcgggggaaatctgctcagcgcctgctgcgcgagggcatgccggttaaagccggaatcaccggcacagacatgaacacgacgatcagtatcaacggccgcagcccgtaccggattgtggcacaggtgtacaacagtgccgaaaacaccgtaaaacagtattacagccgaaatattgagtttgatcctgcgccgtttattcatcaggaatttgtcacggtttatgtggacacgaaaaatcctgataactatttcatggatatctcgttcctgccggcagtaaagtga

SEQ ID NO: 286095 - DNA, 684 bp, Morganella morganii
atgagtaatcacaaattatttagtaaacccgttgttttatgtgtcgttatgcttgtttttttattttattctgatgaatatgtgataatatttagcagttatatttttgagtcatttgatatatcacttcgatttatagttgactttattaaattagcagtagttcttgctatcttgtttttttataataaaacaaatatccctgtgcttattggtactataaaaataaaaacagttactgaattgacatttatcatcgtgccagtggtatttgttttatttttgattgaaaaattaacgggtattgagtttgaggctggaaggtattattcgggcatagatgaaacaatgtctgtatctaaagtgcttttttatttttctgtttttgttattcagccaatcattcaggggattgttttttgtggcgtgttatttaatgagttaataaaatattcaagaaaaattttgttctctgtttcaaccctgtttttcattgtttacaatgcttatgatatcagatttggcgtttgtttatccggagttgtactatttgtttctttatcaataatattattactggccagaatgaaaagcggaggtgtacttctgcctgttattttacacgctctatttaatattttttattttaatattcagacttatcattatggatatgatggttaa

SEQ ID NO: 286096 - DNA, 159 bp, Morganella morganii
atgctcagccgctggacggatataaaagaaaacaaaccgggaaataaaagcgtcctgacctatccggacggagaggaagaaagagaaagcgaaatctacccggactataagaaattactgaaaatccgggaagcgcgccgggcggcggcacagcgttaa

SEQ ID NO: 286097 - DNA, 297 bp, Morganella morganii
atgattgatatttatttttcaaaaaaaaacggaaccgtggtatttgatgatttcaatatatctgaaaatacttctttaagtgaacaattagatgaattaaaagaagatatgctacagatttcttttccaaatggttatattttagatgtcggttggaggccttcattcgaaataaatggacagtttaagttattacttataaaagattacagttgggaatttccagtttacgctgattcattacctagtgtttctgaattaaaaaaatcgattgaaatagcactgtcaaaaatataa

SEQ ID NO: 286098 - DNA, 465 bp, Morganella morganii
atgataactaaagatatattggggatctattgggatagcattttaggcgaggttgatggacaaacattctatgtttttttcaatgaaaacaatataacaaaacctatatttcctttggaaatctggcctcatggaacagaaattaaagagcaaaaaatatatggaaaaaactgggacatatggattattgatgtaaaatattccagcatccctgaaaattggaaaaaaaccacaaaagaaacattgttatacttaataaagaataatgcttcaattggctggtgtggtttagatggctatttttccgatccacctggattatttaacccacaagaaatgtctggtggtgtatatgctgcattaacattagataataaatttatatgccatactgatttttatgatgaatataaacctttacttgatgaagagttaataatgttaaagaaatactgcatgatttag

SEQ ID NO: 286099 - DNA, 267 bp, Morganella morganii
atgagttcggggggcaggggctggcatacaggcggtgatattgagccggtcgatgtgccgacgaataccggtaatcacaacccttatattccgggacggacggacagcccgggcgggtttcaggcacatgatgataacggcccggtcattctgaccaaaccggccccggaggatgtggattttaatgattacgatcaagcaataataattatgcagagactgcattttcaaatcctggacgagtccagcatgccgccagacatttga

SEQ ID NO: 286100 - DNA, 453 bp, Morganella morganii
atgataaatatatcaacatatttaaaaataaaaaacaactttataaacatagaagatttctatgggaaaatagatgatgagttttatattgatggctcaattgaactatcaatagataacgtcgaattaatagacaaaagtatgtgggattatattgaccaattatggtgctatttgatagatggtctaaattcattatcaaaaaatgaaagttttaaaacaaacttcccagaccaacctatagaggtaaagtttgaaattataaaaaacaatgccttaattactgttggagacaaaaaaatctttgtcgataggaatttttttataaccagtatggcggcacatgcgaaaaaatttctttctaaattaattacattagatggagttaattctgacccttatattccatatctggatgatttagaaacattaattaacaaacactctaattaa

SEQ ID NO: 286101 - DNA, 1776 bp, Morganella morganii
atgagtgaaatgagagactgtcttaactgtgaaaattaccgctactggctggaaattcagttaacagatgatgcaggtcagccccttgatgatctgcctttcacactgaaagaacggggcacagaccgggttatatccggcgtgacagatggtcggggttatttccgggctgaaggattatcggcacgtccgctgacgctggtaatcgatgcacagagtctggcagagcggctgacggccgataatccggggcggcctttacaatatccggaaacgtctctcatgagctggtgccggacacaggggtatatcctcagtgaggataacgatgcgggggcattcagcagggaattaccggagcatgtttatgatatgtccccgtcacaaattgcccggttgcgtgattatgccacccgtcatgacgggtatctcctgatctggccatacgatcaccgccgggtcattgccatccggcgtatcacagaaaaagtgtttgccaaatccgttctgcgcggagccggaaacacggatgccggcatcgtcccggaaatgctggataacttcggcaggcacagccatgcacggaaagtcccgcagaatgaaccggctcaggccggattcccgctggcgttcctcgtggagatgatagtcagtgcgatagtcgggggggccgtttacagccagacggcgcagacgacccgccgtgacgacggggacgatttttactccggcagtcaggcccggagtgaaaaatcacagcgtcctttcatgctgacgctgctgaacaatgcactgccgatcggcgtgctgatggcgaattactatcatggcgattcactgacctatgaggatctggccgaaaaagcccgcgtccggggcacggcgacgacccgggtccggattaggtatcaggaaaatacagaaaccggtcgtccggatgtaatgtcttttgcgacagaaggcgataacgatcaggtgcgggtgcgaatgggagaaaaagccccggaatttgaagcaaacgaaatccggggaagcagtcaggcataccgttcagacggtctgtcaaccccgcaatcactggcgacgatttataaatttacgctggatgatggtaatattctttatcttggtgtagatacagataataagtttgttgaactgacttcctcaacccatccggatgagttcgggggcaggggctggcataccggcggtgatattgagccggtcgatgtgccgacgaataccggtaatgacaacccctatattccgggacggacggacagctccggcgggtttcaggcgcatgaggacaacggtccggtcattttgaccacaccggccccggaagatgtggattttaatgactacatcctgatcacaccggttgctgatataccagcgatttatgtgtatttgagtgaggacatagctaaacctcatgaggtagttaatgaattaaatgacttcaaaagtaaagatttccatattggtaaccagacgtttaaactagacaaatctggaatgaagcatatattggaacgacatcatcctgatttttgggatggttcaattaaatctactcaaagttttttcaataaagacatgtctgtaagtgaattaaccgatgctatagatcgcgtaatgcaacaaaatagagatattttattggaaaaagggtctttgcgaatgtatcaaatcgaaggggaatataatggagacatgtatactctaggtttaaaaaatggaagaattggtcaattttaccctaaataa

SEQ ID NO: 286102 - DNA, 807 bp, Morganella morganii
atgaataaacttaactggacacaatggctgacagaaaacgatcctgctccggtgtatatgatgctgaacgcacagataaaaccagcaccgactgatgttttgtatgccaacgactggattgaggatgcattccggatctatgacaacacaacgctggcacacataaccgaccaggggccctggctgatcctgctgaaacccttctcatatccggctctcggaagattaatggataacggtatctttaatgacccatcatggggatgggcataccgcagtaatatgtcgctgcaggataatctggatcactggcgccggcggcagattgtcatgctgaaaggtaagaccgtcatactccgccttgcggacagcaggattgcatccattctgctcccggaaatgaagaaagatgactggcgaatgttgatgacgcccgtgaaacagatcttaatcaatacgccggaactgaaaacattttcctctcctgctgttgatgccgatttgcctgtgccggaaatacaacgtctgtcgtttgaactgaaaccacatcttatcagggcatggcagacatcatcactggctctgatgttttatgctgacaatattgcctgtgagttatgggaaaataaaccggaagcagccctgatactggacacaccggaaggaatgctcatgcagcgcgtgacgtcatggctgacgcagcagttaactctgctgacagatatcaattaccttacctgtgatgattttatccgtcatgcgaagcatcaggaatggatacccgccgcagacggagcaaccctatga

SEQ ID NO: 286103 - DNA, 1998 bp, Morganella morganii
atgatcccgtccgtttctgaattgttgccggggcagtccggcctggtatttacctgcaaaatcggccggttgccggaacagacctttcaggtcaccgagttttcactcagtgaatccctgtcctcactgttttcgctgaccctcagcgccgtcagcctgctgccgtcgatcacctttgaggatcatctcggctctgccgcgtcactgacggtcacccgtgacggcgtcaaagtgcgtaccgtgcagggactgctggcctctgcggaacagggcaacaccgacggcaacaaaacctggtatcactttctgatccgtccggaaatgtggatcatgacccttaaccaggacagccgtatcttccggcagcaatcggtgccggaagtcctcgccaccctgctggatgaggcacacgtcaaaaatgacctgaaattctacgacggtgaactgcacgggaagcgcgattacatcacccagaagcgggaatctgcgtatgatttctggtgccgtctggcggcagaggaagggattaatttctggtttgaggaaggcccggtactcttttacagtgacagtcatctcggcatgactgccggtattcacctgacttacaacccgcaggcggatacagacaccggtgacagcacggcattctcctggcgctacgccgaaaagctgtgcagtgatattcagatccggaaagattacaacccgcagaatccctcctacccccttgaacatcagctgaccggggatatacaccggcagcacggtacctttgaaagttacggtcgttttcagcaggatgagccgggcggctactttacgatgctgcgctatgaacagtcccagaatgaacgccagaccggcagtgcgggcaccaactgttttgccctgaggccggggaaaatcttcaccctgaaaaaccacccgtcaggggtgatgaatcagtcgtggcaggtgattacggttaatcatcgtggtacccagccgctggcggataacagcggcggtgaagggacaaccttcagtaataccgtgcagttcattcccggctcccgcgaatggcggccgccgtaccgtttccgcccgcaggcggacggtgacgagctggcaacggtggtcgggccggaaggagaggaaatctacaccaacgatcagggtgaggtgaaagtctattttcactgggatcgctacggcagaccggatcacagcgcttcctgctgggtacgggttgcccatggctggaacggggacggtttcggctttatgtcggtaccgcgtatcgggcaggaagtcattatttcatatcttaacggggatattgatcgtccggtcatcaccggctgcacctataacgggcgtaaccgcccgccgctgaacctgccgaaagagaaaacccgcaccacgttccgcaccaaaacccataaaggggacgggtttaatgaactgcgctttgatgatttggccggtcaggaagaggtgtatattcatgctcagaaagacatgaatgtgcatgtcgaaaatgacgcaacctggcatatacaaaatgacctgaaacagcggatcgatcataacagttataccgaactggccggtgatgagcatgtcattattgacggatcacaaaaacatcagatagccggggatacctcgcagcatatcaaaggtgaacaacatacccgggcagacagaaacctggtgacatccagcggacagcagacacatcacgtcagtgacggaaaaatcatcattgaggccggaacagaaatcacccttaaagtcggcgacagctttatccgtattactccgggggcaattttttcgtccggctgcctgaatatcggtgacagcggccccggagacggagttcccgtcaggctgatgttaccggaaggcgtaccacctgcgccggagccgtatccagtgaaaaaatactgcgcagctgccgcacgggaagaaggaagttgggtgatcaaatccgggaacgaaaatgaataa

SEQ ID NO: 286104 - DNA, 1374 bp, Morganella morganii
atgacttatcgttaccgtatcgccctgatttttttgctgggcttctttattgattgcatcaatatctttatgtcggccatcacattgcctgctattgcggaggccatgcaggtgtcatccctgtcggtgacctgggtggcaaacagctatattctcggactgacactgattatcccgctcagtccccggctggcggcccgtttcgggatccgcgaactgatgacggcttccatgctgctgtttgccgcagcggctgtgctggcaggcagtgctgaatcctttacttcactgattttctggcgctttttacagggcgtggcaggcggattactgatccccgccgggcagtcactgacttttcagtattttcagggacgtgagcgaagcaaaatatccaccattattatgatgatcgcgctgattgcccccgcgctttccccgatggccggggggatcattgttgatctggccggatggcggcctgtcttttatgtcaatgcgccggtggcactctttacagcattgctggcctggtgctggatccgtgaaccgaaaaccgctgccggagatgcgccggatctcaaagggctgctgctggtcagcctgacgctggcatccctgctgattgccctctcgctatacggggaatatcacaatatcaccggcgcactggcgctcggcgggctgatgctgtgcagtgccgggctttattaccgccattaccggcagaccccgcaggcgattattgatttatcgctgctgaaaaatacccggctgtggctgtcggtggcggtgtattacgcagtaccgggcgtattcaccggggcgaacatcctcgctatcttctatctgaccacggttcccggtctgagtactgccgtcaccggtgcgtttatgctgctgtatgcggcgggggcgatggtggcgatgctgatcagcggcgctgtgtataaccggaccggtgccgggcgtctgtttattatcagtctgctgctgcacagcggcggtatcgcgctgtttgccctgacagacagccacacgccgttgtatttcatcggtctgatttacctgctgaccggcaccggcggcggtatcgctgccaactgcgcacaaactactgcattgtatgattttcacggcgcacaactgaacaaagccagtgtgatctggaatattaaccgtcaggtggtgttcagtattggtgccgccgtcatgatgacgctgtatcagaccctgaatacggttgttccggggcaggcatttgccctgacatttctggggggcgcgctggccgggttaatcccgctgattttcctgatccgcccgcagtttcgtacttcattaaaacccgcagaggagattatccgtgagtaa

SEQ ID NO: 286105 - DNA, 153 bp, Morganella morganii
atgcgcagcgtagtcattttcggctattttgatctgccacaatttaaacaaactaccgaaataatgctagtgcaatatattgatttacgtcaattttcccattacgtgttaattaaaatcgcagatatggtcattgcgttattttattgttaa

SEQ ID NO: 286106 - DNA, 255 bp, Morganella morganii
atggatcgtatctcaaaaccggcggtgttatcgcagatgtcgcacagaaagcacgataccggcagtaaaataaagcagatactggtggtacttattcgtccgcttcagtatctgtgtctgattttatccggttgctgcctgctggatatttgttttgatttgccggggcaggatgtcagacaccaggttcgtgcggtcgtggcctggtggcaggagagtgatactgacaaccggatactgagctttcgtcagtaa

SEQ ID NO: 286107 - DNA, 708 bp, Morganella morganii
atggatatccatcttaccagcagattccggtatcattgcgccataaccgaaaatgatatttctgcatgtataacagccaaccatgagaaagaggtgaccagcctgcggggaaaaatcgcagactggttccttggcacacaaaaagaggctgcgaagctcgctctgtttcgtctgggtcgtgcggacacagcggcacaacaactggccttatttgctgaactgaagcagtacgtatcagctgcatggcagaatttactaacctggcaattcgatgacaatcatggttcctgtttcaaaataggggatagtgaaatcaggtgtcacgatacgactcaggaaatcgtcccggaaaaccgcagtactgttaatcccggcgatgtatgccatctgcttttgtcgatgaagtatgccgggaatgatattgtctctgagtttcatcatttctctgtcggatctgagcctgacagaacggctgattcagtactcagcagcgaaaacgagtttctgaagcaaaatcccgcgttgctcggagcactaaaactgattggtttaaaccaagatgatagtcaggatgattttccgcgggctgtttatcagcatgtcaaaaaatgggtctatcaaataacaagagatgacgataaatctgcccgggctgccgggaatgcacggaatttgtcgattctggcccgtcttaaatccgaagcctga

SEQ ID NO: 286108 - DNA, 561 bp, Morganella morganii
atgtattcatctgcttcaaactctatttctgtagacgctatcccggtttcacggcaggaaaatcattgcccggaaatttccgggaaaattgatcttctgaaggaaaaattaaatgcaatagaaccgaacaaaacaactcatgaaatcagatatttcacagatttcattgaaaaaaatgaaaccaaaatgagggatatcccggcaatcagtgacaaattgttgactgcactaagcgtgatgaattcgataaaggataatatcgcaatgggtgaggataataaggcgaatttaatccagcttaataacttgacacgtgaaatggaggacatattaaattcagatgaatgtaaaagcaggtatgagcgcgttgcagccgaaggtctgaatacattaaaaaatgaagcaggaaaaggtctgaatacattaaaaaatgaagtagcaaaaggtctgaatacattaaaaaatgaagtagcaaaaggtctgaatacagcaaaaaatgaagtagggaaaggttcaaataaagcagaaaaggaaataaaaagaatatttaagaggttctga

SEQ ID NO: 286109 - DNA, 1416 bp, Morganella morganii
  misc_feature (1209)..(1218): n is a, c, g, or t
atgagagccgcattggttgagcactttcgcaataccgcgcaaatcatgattgccactgaagccgcagcagaaggtattaacttacagttctgctcattgctggtgaactacgatatgccgtggaatccccagcgaattgaacagcgtattggccgttgtcaccggtatggacaaaaacatgatgtggtggtgattaatttcctcaacaaagccaatgcagccgatcaacgtgtttatgaactactcgatgagaaatttaatttgtttagcggtgtattcggcgctagcgacgatgtactgggagccattgagtccgggatagatttcgagcaacgcattgttgaaatttatcaaacatgtcgagagccagagcaaattgctttccagtttgaagaactacgtaaagaactggacgagcaaattaaccaagcgatggatgatacaagacaaaaattactggaaaattttgatgctgaagtccacgacaaactcaaagtcaaccttcaggagagcaaggcttatctcgataagtacagcaaatggctctgggaaataactcgctttgtccttgcagagtatgcagattttagcccggcagagcaaagtaaaaaatatcgatttgaattaacccaacttccaaatggcgcgaatccagcgattccccttggaatttatgagattggcaaagatattgaagaggcccacgtctatcgattaggtcactctcttgccaggctggtagttcaacaactcactgaagtaaatagcccggcggcgtctttgcaattcgacctaacaaatcatccacagcaagtaaacgccttacaagcaatggttggacagactggcatactgtctttacacaagctggctattactggcgcagataccgaagagcatttggtctttgtcggcgtcaccgatgaaggtgaaatgctgaatgcagatcaaatgcgcaggttgtttagtctcaatgcagttaatttagggccagcaaatattgccgatatttctgaacaatacgaagcacaaaaacaacagattctaggggatgttgaaggtcgttatgctgcttatttcgaacaagagatggaaaaactcgaccattgggctgacgataagcgcaagggtttgaagttcaacctaaaagacctggacatacagataaaagatttgaagcgacaaatcaggggttcaaaaaatttaccnnnnnnnnnnaatttaccagaaaagctggcgtttcagcgcaaagcgcaaaagctggaaaaacagcgggacgaagcgtggcgagagtacgatgagcaagctcgtgaggttgaacagaaaaaagatagtctgctcgatattatcgagcagaagctgcaaatgaacacaactgaacaacatgtgttcagtataagatggagcttgatctaa

SEQ ID NO: 286110 - DNA, 1365 bp, Morganella morganii
  misc_feature (1349)..(1358): n is a, c, g, or t
atgccgataactgagtaccatgcaaaatattttgctcacgaactgagtaagcgaggttcacccacttctatagagaagctggcaggcacattgatggatgcaagggtcgatctcaaccctcatcaggtagaggcagcgctatttgcttttaaatcaccgttgtccaatggtgcgattttggctgatgaggtaggtctggggaagaccattgaggccggtcttgttctgtcgcaaaagtgggcagaagacaagaagcgcatgttaattgtcgtacccgctagcttgcgcaagcaatggagccaggaactggcagaaaagttctttcttccatcacaaattttggaagcaaaatcattcaatgcagccatcaaagctggcaacttaaacccgttcgaagcaaacgaaattctgatttgttcttacccttttgcagccagacatgcagaaaagctcatgttggtgcgctgggacctggtagttctcgatgaagcccaccgcctgcgcaatgtctacaaggcacagaataagactgcgcgggccttgcgcactgcattgaccaatgtgcccaaagtattattgacagccaccccgctacaaaatagtttgatggagctttatggtctcgtaagcttcatcgatgagtatgcttttggtgatgaaaaatccttccgcagccaatattcccggatgacttctccggaacaattcggtgagctgaaaggtcgattacagccattttgtcaccgcactttgcgtcgccaggtgatggaatatgtcaagtacacaaaccggcaacccatcacgcaagaattctggcccagtgacgacgagcaagccctgtatgatatggtctcagattatttacagcgcccttccctttttgcactgccaaacgctcagcgaaaactgatgacgctagtgctgcgcaagctgctcgcatcttcgacctttgcaattgcaggggcactggattcgttagcgaataagttacaacgccaattgaaagacaatgagcaattggtcaatcgactcgaagggctggaagcagactttgaaacgctggaagaatatgaagatgagctagagatagaagaggaacaacagcctctctctgccggcgacattgctgcgattgaagaagaaatcgcagatctgaccgcatttcgtgagctagccgtttctatatccgagaacgcaaaaggaatggcattaattgagggcctaaaagctgggtttgataaagcaaccgacctcggtgccggtcaaaaagccattatttttacagagtctcgccgcacacaagattacttagttcgattgctcagcgaaaacggatacgccgataagcnnnnnnnnnnccgataa

SEQ ID NO: 286111 - DNA, 159 bp, Morganella morganii
atgggcaatttgcatgacaaaactgttaaaaaactgatcaaggaaaaatcattcgtccgacattccgatggcgatggactgtatgtaatgactcccaaacgcggggatgcctaccggatgctgcgctacaccacaccagcaagtgtagcagtcaactaa

SEQ ID NO: 286112 - DNA, 1251 bp, Morganella morganii
atggtgatgaacagaacattaccgattatcattggtatgctgatgactttctcgatggtaattgcttctttcgtggataccttgtcacgggacgcttattttatactgagttatttatccgttatcgtgacattctggctggtctttttcaaaaaaatgacgcttttccgtgatcgtgcagcattgcttgttgcggcgtcatttctgctgttcggactctcacgggttgcctggtcatttctgatgaatgatgacgggatgagtgtttataaaaaccattctcctactgcgtcgagaattatactcggagcatttattttttgtgtatgcatcttattaaagcgtgaactgcgaacgtttttcagaaatgtatatgtttcaggtattatcaaggtattaccactttatattttattgtatgcactctatgatatttttgttttgcataaaaacagggtggagttagatacaaaccgggcaacagtagcagcatactttatcagtgcaatattttttgtcagccttcattattgtattcaggtaaaaaataaattaaatgtcacattgttttttactaatctgattatttccaatgcaattattattctgacacaaactcgtgcggcgatagctatctaccttctgctttctgttctttatacgatcattattttccgcaagagcctgaatataaaaacagtgagcattattgctgtgcttttgctgatttttgcaggctcatcatatgagttcttatataaatcccggataaatgaagcaatcactgaaacccagggttatgatgtgtcaaaaccggggggatcactgggtgatcgctataccatgtggtatgcagggctgtctgcttttaagcatgccccgatgggacaatcgtttcaggcccgtaatgactttatttcagaaaaaatagccgccggtacaatcagtgattcaatcactgtctacctgacggtgcatttgcacagtgaactgattgacgtgttgtcattgcagggggttatcggtggtgtactgctggtgctgatttatctctctctgttctatgccgggatccggaataagaacctgttgctgataatgatgacattgtgtctggccggttatggcctgacagatgtcttgttcttcagccgtgagagtattactgtttatctcctgtgtattgcagtggcgctggtcaccggcgggagagaagacgccgcacaaccgctgctgccggttaatcgctga

SEQ ID NO: 286113 - DNA, 1557 bp, Morganella morganii
atgaaaaaaatcagtttgttattaaccgcgcttctggtcgttgttctgttttatatcgatgataaccacggtgtggcacacagtataaaaacggtgttgtttaccgtgatgtttctgctgacctgcggctggctgacccgccacccggccgggcggattattgccggtatactggtgctgtttttctgtatggttcagggaatgcggttttttttatggcaggtttatcagtccggattcagtgaaacactggcggaaaccctgatggcaaccaccccggcagaagccggggcaatgacactgatgtactggccgtatctggtggtatttttcgcaggaacggtgatgttttacctgttttgccgatatatcgggcgcagtttttccgcacggacactgcgtaatacggttgtggttttcctggcgtatctggtgatcagcagttcactttattattttaacggtaaataccgctcggatgattttgtctggggggaatctctgaccaaacactcaccgttttatcccctcggcacttttttccgtgtgcatcatatgcagttgctgatcaatgaagtcagaacccggcagccggtgttccgctatgacatggtcaatgatgaaattgaaaactatgtgctggtgattggtgaatcggcccgccgtcatgatctcagcctgtatggcagggcagaggacaccaccccgctggcggttgtgcagcagaaaaatatgctggtatttaccaatgcggtctctccggcaccggtcactattttatctgtaccggcatcgatcgcgaatgtacagccggggcaaaccggtaacttcgcggattatgcggataatatactgacactggcgcagtccgccggcctgaaaacgtactggtacagcaatcagggagtcggcggaatgggatacgggctgattgcggccatttcattccgggcagaggtaacacgccggaatgagattatcattgatgaccggacactgctgccggatctggcggccgcactcgcacaacccgggcgtaaactgattattctgcatctctacggcagtcacccgccggcctgtgagcggacagaagacaaaatactgttgccgttctccggcggacgggaagaaaactgttacctgaattccgtctattatacggatgccctgctgggtgatattaccgcgcagctggcggacagccgctcatcgatgctttatttttcagatcacggtatggtcaggaaacacctcagcggtgatactgaatatgttcacggcattgcggatccggtcagggactcctatgacatcccgatgtatatctggtacagcgaaaaactggccgggcagtatccgcgcgggcggaaaatagaatccctctattccggcagtgcggattactggctgatcagcgactggctggggttacgtcagcatgatgagcggcgctgtgtttccccgctgtctgattgttatcagccgccggaggatgtccaggtcatggacggcaataaagaactgcacagttaccgcagtctgaatcagcgctga

SEQ ID NO: 286114 - DNA, 948 bp, Morganella morganii
atgaacacgaccaccgttttccggttaccgttattatttgtactggcttatatgcttatcctgggtggttcgctgatattggtttcttatccgtctgtcagtgccggctcgcctgatttaacattagcggcgtatttgtcgcgggtattttcttttcagctgatccagctgaccggtattttcaccctgacatcactccttttttatcataaccggataaccgaactgaaccggaaaacagtgctggcagttatcggcctgacaatatttctgtatacggtaaacagtatgctcggtgctcttaaggcggagtggctccgtaatctggcggcgcaaatcattgcagatggctccggattttccgatgttattctgatgataaaaacggtcgatatttttctgtacctgatttcttttgtattactcggtatcgccacccgtctgacggcggcttattatcttaaagtcagttatccggccgttattccggacggaaaatcaccggatatttacgccgtgttgttcagtaccgggatagtgtacttattgtggatggcggcatcatttctgacagcggtgatagcaaaacatttcccgggcggaatagcggaaccggtttctgataatgtgtacatcacggcggcaggtctgctggtgttgtgcggtattatttttctttttgtccggcacctgtttccgccggacggcggaatactgaaaataagacctctggtgctctctgttctgctcagcaccgtattcagtcttctggctatggccgccgtaacggcggggacgctttttatcgtattaatcagcggtagtttccggcacttcggggaaaccgggttatggatgatggcggcggtctgtgtcgtgctgactctgtggatcagccgcgcggttatcggcatgatgttccgccgccttcagatcagtactgactga

SEQ ID NO: 286115 - DNA, 462 bp, Morganella morganii
  misc_feature (443)..(452): n is a, c, g, or t
atgaaaaataccatatcgataataatgcccgcctataattccgaaactaccatagaagaatctattaatagtgtattacatcaaacatataaaaactgggagttgatcatagtaaatgattgctctattgacaacactgaaaaaataattgactcatatataaataaagattccagaataaaaaaaataaaaacacttgagaacagtggtgtttccaaagctagaaatttagctatttctaattgtattggtaattatatcgcctttttagatagtgatgatttatggttgccaaccaagctagaatgccagctagcataccttaataatggatataacattgtctgctctaattatattaattttcatgataataacaaccacattagaaaatcaactaattttccttctgttataaattattcaatgatgctgaagtctannnnnnnnnnaatttcatag

SEQ ID NO: 286116 - DNA, 624 bp, Morganella morganii
gtgagcgataaatacaagctacttattaattttctacttgataatgaaagtgtgaccgtttgttcggtggcgaatcatcttaatattgaatatggtgatgctcagaaattaattgatgaatgtgtagggaaaagactgcttacagacaggataaataccaatggtaaagatgaatattatgttgttttggaaaatataatcgaaagtgaaaataataaaaataaagaaaatatatcacagacaaacaataaaaaagattatggagagttgctggttggagctacagcactaatagctgggattgcatttttgtgtctgttcctgtactcatgtacaggaagaagcaaaaccgacgaacctgctcgcgatttttgtactgatgatgattatgcatatatatcagctaaaagttttatacgtaaaaacctgaaatctccggatagtgctaaattttctcacctgttagaaacgcaggtcactaaatatgaaggatgtgtttttgagttcaccgggcaagtggatgctcagaatagcttcggggctactttaagagaaaagtacaaaataaaaataaaatacgacagaacaaaagacacctattatttaattgatatggaaatgtga

SEQ ID NO: 286117 - DNA, 306 bp, Morganella morganii
atgccattaccgacaattgaagatctgcgcctgcaatgccgtattgatacggaagaagaggatccgcttctgctcggctatcttgctgcggcaaaagaaaaagcagaaaactatctgaaccggagattgtatgaggacgaagttcctgacagtgatccggacggaatggacatcacaccggttatccggctgacactcatgctggtggtcggtttctggtatgacacccgggaactgaagaaattaccacagggtttttatgatctgctctgtgactatcgtttttcacccatgagggaaaaataa

SEQ ID NO: 286118 - DNA, 1836 bp, Morganella morganii
atgaaattttatgatacgtatcatctttataaaaatgcaatttccgggtattctgccggtatgaagaaagataaagttatgcttgtatctcatattcgtgtggtttctgatgaactttatgcaacagataaatcaaacaccaagcgcatagaatatcttaaggtagagttgtatcatttaacaaaactactccataacagaattgatattgaattcagaccattgcttgtaacgtctgttttaaaaaatggatattattatccaccttttgaagaaatatctgccgggataatacttgaaaaggtagttcgtgatatacaatctattccggatagctataaagttatttatggtcctgcataccaggcaagaaaatcgcttttagcttacgcgctatatatttgcgggataagttcaaaggcatcttttgataattcaacatttaatgaaagagataataatggaaatcgggtaatgagtgatcaggatacgtatgaatatctgattaataaaatgactggtttcgtatcaaccccgggaagtaatatactgcaggaagtcgcacaacattacttctattctgttagtgtgacgctgggatatttacctaatccggatatattcctgaatgtacgtgatggtgaggaaaaaaaactgaaggatttcactctgagggataaggccgattctctgaaatattatttaagacaggatatagatattgcaaaaataagagttcgtcagcaactggattattttttatctattgcatctcttattgctatgttttcaaatataataaatgatgtggagtcaatgtataccagccgaagaaacctgattctacccggtatggattcaaataatgataaaggtaataatcgaattgagaggccaaataaggctgattataacccgcagtatcaatctgatatgagtagtgaatacgctagccgtaaaaataaagccataggaaaaataatcgccttagacaaattaaacaaaatagatgtggttgaggaatcgtgtggtccattaaaagtatggactcaagaaaataaaagggctgacacactggtattgagtggacatggatggtatctgacacacgataataaccttaattttggtttaatacctaaagataaagacattatttttctcggtccgaataaggacaaactacttgaagcagaagaacaatttggccgctccgccaccgaatcattatttgcatcgggtcaatacccggaaatatatacccgcataacatcaaagggtatacaagtattgaaaaaaacaatgggagaggcttcgttagatgaagtgaaaaactataggattaaatattacgaaaaaacaccggatgaggaatatattgctgcagtaaaagataacagaattaattttaaagataatttaatggtggatttttcatcagttagtgaatttgaagaagaaaaaaaattaagcgacatagtgaaattaatgaaaccgggtaaatctatagcgcattacaaaagtattgttttttacgcatgtcgtgaatataagggctcgggaacgctgagatcagcagtatcaacatcaggactgggtggtggctataagataaaatttacagaaacacctttatctatgcagggaaaaccggaaagaaaagaaagagataccttagcaaacgcggtatcatctgatgatttgagttttgacggtctggtgattattgataaatatacggtaactatcggggaatgggctaacgatgaggaacctgtgcttaattataccgcagatatagcaagagtcgcaccttacaaaaacagaacgcggtaa

SEQ ID NO: 286119 - DNA, 636 bp, Morganella morganii
atgcacgatcataaaatcctgcttatcgacgaccatgaactgattgtgaatgggatcattaatctgctctccccctatccccgctttcaggtggtcgcccacattgatgatggtctggaggcttacaatgcctgccgtatccatgaaccggatattgtggtacttgatttgggcttgcccggcattaacgggctggatcttatcccgcagctgcttcgccggttaccccacacggcaattctggcctataccgcccatatggaagaaacgatggcaatacgcacgctaagtgcgggtgcgatgggttatgtgatgaaaaacagcagccgccaggtactgttagcagcattacaaagcgttgccgtaaaaaaatactatatcgaccccgcgctgaaccgggaagccattgagaccgcgcttcgcaccaaaaatgattgcacggaaatactcacgccgcgcgaacggcaaattctcaaactcattgccgatagttttaccaaccggcttatcgctgagcggctgtgcatcagcgttaaaacagtggaaacgcatcggttaaatattatgcgaaaactcgacgttcataaaatcaccgagttacttatctgcgcacgacgactgggtttgattgaataa

SEQ ID NO: 286120 - DNA, 2751 bp, Morganella morganii
atgaaaaatcagcattccatggtgggaagattaacattcctgatatctattggtttactaatcatttggttgattactatatccattactacctatatttcactaaataacgacagacagcgggttattgaaaatttatcccatatatcgcgcctgcgaatggcgttaagcaactatcgatttcagggtgcggaaagagatgcgctggcgctcgcccagctctaccgtcactatgtaccggcagatacacctcttaccgcaaaaagcgagtgtcgttatttccctttcaatgccggtaccggtacgccgcaggataagcaggctaaggatatgagtttcattcagatttatggtactgcaggccagacatactatcttgatagttttattcttgaccggggctatggtatttatcttctgcctccgctccatcattcgcccgattatcttattcacagacaaaatgagctgtggcaatttccgcgccgcgcaacgcatcataatctgttctggggtaaaccggaatatatccccggcgccggctggagcgtttctgtcgcggcggcaggctctcatgacattctggtgggtttagcggttaaacttgatgatctgccctcctatgaccataacgtttccggcgggagcatcaatctctggcttgataaacacaatcagattctgcccttctcggctcttacagaaaacaacagcgaaattctgcaaaaacagttgctgaatgtctctctccacgacggatggcagcagatcccgggctatctggtgcttcgcagcgaactaaaaggtcccggctggcaacagcttatcctgtacccgacaagcgggatgctaaaacacacgcttaacatcgtggcggaacagttgccttttgccctgacgactctgctgctgctggcgatgatgctgttctggctgcttcaccgctatctggcccgcccgttgcgggacttcgtcagcatcattgagaaaaccgggcccggcaaactttccgcccggctgccggaaaaccgtcatgacgagctgggaagcattgcccgcacctataacctgctgcttgatgccctgcacaaacaatacgacagcctggaaaatacggttgccgaacgcacccgtgaactgacgatagccaaacagctggccgaacaggccaataagcgcaaaagcagccatctgacgacgataagccatgagctgaggacaccgctgagcgggattctgggcgctctcgaacttctgcagttaaccccgatgagtgaaaaacagtcacagctatccacgacggcgagccaatgtacgctttcgttactcagcatcatcaacaatctgctcgacttcacacgcattgaatcgggacagctatcactgcatatcgaagacaccccgatactcccgctgctggatcaggcgatgcataccatccagggaccggggcaaagcaaaggattaaccctgaaaacatttgtcggtcaccgggtgccgctggtattcggggcggacaagatccgcctgcggcagattctggttaatctgctgggaaacgccctcaaatttaccgataaaggtgccatttacctcagcgttaaacgcatcggtgattttctgattttcgccgtgagcgacagcggacaaggtataacacctgccgatcaaaaagcagtattcgagccttttttccagagtaagggtaaggggcacagtcaggggacggggcttggcctgacaatttcatccaccctcgcaaaaatgatgggaggatggcttgaaatacgcagtacaccgaaatttggtacctgcatatctctgctgcttccgctcggcaaatatcagcctcccgaacccctggcgggtaacattgccgcaccgctggttctgcatcgccagctctgcgcctgggggctgacgtgtgaaatagccagacaagaaaatgtatttagtgccgatgatctttgtttccttcccggaaagctgcgtgaaaccgttgtccgcgcactttccggtgtggtgagtgaggataccgctccgcttccggtacagccctggagattacatattttgctggttgatgacgccgctatcaaccgggatatttttggcatgatgctggcttcactcggtcagcaatttaccctggcagagagcggcgaagaagcactggcattaggccggcagcagcgatttgacctggtgttaatggacatacgtatgccggagacggacggaatggaatgcactcagcgctggcgtcaggacgcgctgaatcacgatcctcactgcatgattattgcactctcggcgaataccacgccggaggaaataagccgcagcaaagaggccggaatgcagcattatctgaccaaacccgtatatatcaaccaactggccaatgcgatttccattgcggcggaataccagcttgagcgcgatatcactcttcaggagcaggattacagctcagggcatgcactgcttcccatggacgatgacgcgatgcgccgcaaaatacgccactcactgcatttattactttgtgaactggagcacaacctgggctccctgcccaaaacaagcacgttgctgcataccctgaaaggttgcctcggtcaggcgggattaacgcctctggtttgcagcatcattgatatggaaaatcgcgtacagcatggcctgactttagctaaggaggaaattaccgaatttcgccacattctgaattcagcactggatgcataa

SEQ ID NO: 286121 - DNA, 375 bp, Morganella morganii
atgttcgagaaattaaaaaaaatccctgtagtcgagcaattacgcattgcacctgatagcgcaatcatactgatgatattagagggcagaatggcgcgcggatatttgtgttcgcggtctttggttttgtcagtttttattgacaatactgacaaccttcttcctgaaaccgtgaagcatatcactctgttacttgcggcctgcccggaaactcatgattatgcattgcagttaatacccgatagcgggtggctgagctgttattatgacaaaaatatatcagctgaaaaaatggccaccgacattgaaaagcatctggcgctgacacgatatttggcaaacgtaatcgtcggtcagaaaaatagtaagatgtga

SEQ ID NO: 286122 - DNA, 1485 bp, Morganella morganii
atgaaaataaaaagaagagtggtatttccggcgctgtttttttgtttatgtactcacgcgcaaaccttctcccgtaagagcgacaatttttcgctgcgtacccgggaaatgtcactggtatcgctgttgcaaaatttagcggagaacgccggtacacccgtggtcatcgacccggcaattacagaaacattcagtggcacaatcccgcctgcttctcctgataaaattctgaaaaaattagccatacaatatagcttagtaacctggtttgatggttatacgctgtttgtttacccctcatcacgtgtggcgcatagcgtcattccccttcggacactgccggccggtaactttatccgttatctgcgtaaacgggacgtgccggaaaaaagcagctgtgaagcgcgtaccatccccggtgttaatgctgttgatatcagcggggttcccgcctgtaccgcgcgtattactcagctggcgtcaatgctggatggagagatgacccgccgccgggatgataccgtcagtcttgtggtgttcccgctcaaatatgccacggcggtggatgaccagtaccagtaccgcgatcaaaatgtcgtcgtccccgggatagtcagtgtactgcgtgatatgagtcgtggcagtgcaccggccgccgccggcagttcagccgcaacacagggattaccgatgttttctgccgatccgcggcaaaacgccgtcattgtacgggatcgtgcggtcaatatggcgggttaccgcaaactcatcagtgagctggataaacgaccacagatgatagaaatctcggtcacgattattgatgttgatgccggcgatatcagtcagctcggtattgactggagtgcggcgctttctctgggcggcggctctgtcaccgttaacggccctgacagtaacaccggcgggggattttccactgtcatcagcaacacgccgggctttatggtgcggctgtcggcactcgagaaaaattctcatgcctatattttgtcgcagccgtccgtggtgacgcttaataacatccaggcggtactggataaaaacatcaccttttacaccaaattgcagggcgacaaagtcgcaaaactcgaatctatcacgacaggatcgctcctcagggtaaccccgcggctggtggaagaacagggcaggcagaatattatgctgagccttaatatccaggatggtcagcaaaacccgcccctgagtcaggatgaaccgttaccggaagtacaaaactctgagatagcctctcaggcgacactgcgtccggggcagagtctgctgcttgggggatttaaacaggataaacagactcagacgcagaataaaattccgttacttggcgatataccgattatcggacatttgttcagcagcgaacataatgagacccacagtgttatccgtctgtttcttatcaaagccacggtagccaatagtgataacagccatggataa

SEQ ID NO: 286123 - DNA, 1191 bp, Morganella morganii
atggataacgagtggaaaatccgtttactcggcggggtgctgcacggacgtgaagtctgtctggccggcgggtctctttcggtcggcgagcgcggttgtgatctttgtattccgttgcacggcggtgacaggctggaattcaccgcaacaccggcaggactgatgatcaatacagagggcgcgccggtgcggattaatggtcgtcggcatcaggccggtaagccattacccggggagggtgtggtacaggctttggggctgacgatggcgttcggtcagcatcatgccgatttagcgcgctacccgcttcgtcgcacacgatcagctctgttatgcgggatggcgctcgcgtgtctgatattgacggggacttccgcgttgatcctgatgaataacgggaatctgccgccaccgcagccggtgacttcccgggtgacagaactgttgcggcaaaccggattgacacagatcacggtaacccgggaaaagaacggcacactccggctctccggctactgtgagaagagcgagcgtctgcaaagcgtgcgtctgacgctgggcgaatggggggtgatgtaccgggatcatgtggtgtgcaccgatcagcttatcagacaggtccgggatgtcctgacccgggcggggtatgacgaggcagaaatcaccagcagcgcaccgggagagatcagcattaacgccggtatcatgatgggaaagcgctgggcgggtattcagcagcagctgatggtgatccccggtctgaaacatctgcatatcgaaaaccgtcatgaaactcaaatcagcgcgttgattgacagcctgttacagcaggggctggcggaaaaagtcagcgtaacctcagtgggtcaggctttcgtcatcagcggcatactgaatagggatgagcggcaatcgttgaacgctattctgatgcaattgcgtcagcaattccccgggatcgtgctgagttaccagaatgtggcatcgtccggcgagggcagccagcgtctcccttcgccggttgtcgctgttatccgtggtcagcaggggctctacctgctgctgaaaaatggtgagcgcctgaggacgggaagccggctgccacaggacggggaagtcgccgctctgacagacgaggcagtaacgctcagatttcctgacggactgattaactattcttttggtttttga

SEQ ID NO: 286124 - DNA, 249 bp, Morganella morganii
atgtcaacgctgacttatttagaagatagtgtgcgcgattctgttaaccgggcgcaggacagattaaacatattgcaggcagcaaaaatacggctgcagcagtcgatgaatgaaccggttacccgggaacaacatcagcagttcaccttattgctggaggcagtcattcaggctgaagatatcatcagggtgatcgtatatcgctatcacaatcaaccggtaaaaccagatgatgaaaacgaatattga

SEQ ID NO: 286125 - DNA, 309 bp, Morganella morganii
atgaaaacgaatattgatgctgaactaaaaagaatggagcgggaatattcccggctgagccggttctattcagacttcaggaggctgaaactggctgcggatgaactcagggaccgggctgcaactgaccctgcggccgcgaaaaagcttaacgacctgcaggctctgatacctcagggggctgaagaggtgggacgccgggctgagcgggatattcaggtgttgaacgcagccctgaagcaactgcaatcgcgacttaaacatattgttaataaccaaaccaatagtactgctgaggtgaaaatatga

SEQ ID NO: 286126 - DNA, 600 bp, Morganella morganii
atgagcggaaacctgtcagtaaatcatcgtattaattttaacaccccgggcttcacaaccccggatattacattgggtaccggcaataataataccgttgcggataacccggatagtaataatcctttcgcctacggcttttcggtgctcgataatttgcaattggctttacagaaaattgctaattcgttttttgccagaataaataccagtactaatcgcgcgcgtaatacacaggatatggctaaccgaatggatgaagttattgctgacgctgcaaaaggtgatgacaaaacccgtaaaccggtacccgatgaggtcattaaatatatgcaagataacggcattctcgtcgatggtatgacgattaacgattacatggctcagcatcaggatgcagatggcctcgataagggggggctgcaggcggtcaaagcggctcttgataacagtgcgaaccgcgatactgacctgatgacccagggacaactcaccatccagaaaatgacccaggagatcaatgcggctatcacccagatgaccggattactcagcaaatggggtgacttactcagcatgattgcgcagaagatgtactga

SEQ ID NO: 286127 - DNA, 510 bp, Morganella morganii
atgatgaaaacggacgcccgggagccagacatcgtgctgcggttttttcagcagggcggcgcgttgcggatgctttttgctgaggatatcagtgctgatttggatgttttgcatcgttatgcgcggcaattggcaagcgcaggggagtacggtgcggcggcccggatctataagattctgaccatctgcgatgcgtggtcttttgaatactggtttgaactgggcgcctgttgccgggcgggggctgcctggagtgatgccatctatgcttacgggcgtgccgcaaaaataagagtatcagaggcgaaggtaccctgtgccgcaggggagtgctatctcgcctgcggtaatctgccgatggcggccaaagcctttcgggccgcattgctggtatgtggtgcagagcatcagggaggtaatcatgaaaacagggaagtggcggatatacgccggcgcgcgcgcgccggcctgagcaaaacaggagaagataatgaaccggatgcaaattaa

SEQ ID NO: 286128 - DNA, 1467 bp, Morganella morganii
atgaaccggatgcaaattaacgataccccgatcaccggcaatgcgtctttccatctgcctctcaccgcccgggttcagccagcccggatagccagcggggcattaggcgaacacttctgtgctccggcgcaatttgctgacgaagatgagggcgtaaaacgccggggatatgtcagccggcaggaggcagataaggcgttacgcaagcttatgggcattcagtctgaaggtgacagtacacgatgtgctgcggtgcgcgatgtgctggaaatggatcccatgatgttatctctgatgatgacgcagttagtgctgaaagcttgcggaaacagtgccgatgccctgtgcaggcagctcgaacatgtgagtgaggttcaggctgtactgcgtgataaacaggttgcggaataccaggatcaaatcaataaagcggttgaacaggccgcccaggtacgtaaagccgggatcgtcagtgcggtctttgactggataatcagcggcgcggaggtcgtgaccggcgtactgaagatgattgaaggtattttaacggctgatccgctggcaattgccggtggtgcggcgtatttctcggccggaatagccggcatggttaaagcgggcgcagagactgcgctgctgctcggggctgataagtcggtttgcaatgacatcatcgaggctgcagggatagggcaaatggtctgtgaaggtgtggcgctgacgctggatattattcagatcggccgtggtatcagagccgcccgcgctatcaccaaagccactgaagaggttctggatgcgggcgcaggtaaagcgctcaccggggctgtttccaaaggcgcagagagtgagctgaagacactggcagagaaagccgggcaggaagtcagccggatgatgagtaaagacgccggtatggtgcttgagtgcgggatggctgaggtgagtgagatagcggcagaaactgccgctcatgagctgaaggctgaatcggacatggtacgcagcatcagtaaaagttttacccgcaaaggtgtcgggaagctggtggaaactgctatcgaaggcgccggtaagaatttgctgaaaaaaagtgaagaggtggtggcgaaaaaacttcgcgatgccattttaaaaaatctgcgccgcagcatggtgaaaatggttatcagtgattgtacccataaagccctgcttttcacacagggggtggccagaggcgcgaatcaaatttcagtatctgctgtggccttcgccagtgcaaaactgcaaagagatattgatcacctgatgatgcagcagggctatatcgattttatgcagaactggacagaagaccgcaagaaaacacagcaaaaggggctcgaacaaacgtatcagaatagcataaatacgctgagaatttgctcagaaattatcgataacagtggcacggtgctggcaaatattgccgggcaacgggcctga

SEQ ID NO: 286129 - DNA, 642 bp, Morganella morganii
atgtgcaaagtcgtttttcctgaaatttataatgtcaatttagacgttgagaagattggtaaccccataaacccgctgttatctgttaatggcagcgttaacgctcagggcagctgcaaaggaacgtccgatataaccgactttttggctggcatcaatgaaatgcttatcacgatgctgatgctgataaataaactgcgcgacgcgctgcagctcattaaccaaaagaaacaggccctgggctgggggcttgaagtcaacgctctgcagcaaaatgttaaagccattgaaagtagcttttgtgccgctgtgtgcggggcggttagcggcattattggcggcgtgctgacggtctctggcgcagctgtgggcgtctctcgcggcgaggtctggacgatgacaggtagcgctgtggggcagatggtcaacaatgctggtgccttggcttccgcaagtaaaacccgcgaagcggatcaggagaaagccattggagggctgcagaatcagggcgcgcagtcatatgccaaaacacaggatgactcgttggtgaagggcaatgaaatcaacaaacactggatagattttaacagcaatatggtggagcaggggggccagctgcggcacacgctttcccgctactaa

SEQ ID NO: 286130 - DNA, 432 bp, Morganella morganii
atggatgaaatagcgcgattgctgcgtaaagagggactgattccgtgcgctgccggtctgcccggctgcggattgctgctcggggagcaggtggagtggtatccctaccgtctcgtttatcgcgccgataaagatacgttgatcctgtgcagtcttcatcgcgtaccggacagtcagcctcagccttcatccctgatggcgctccggaggatcctccggagtctgtttcagcaggtctcgtggctgcgtgccgtcagaatgctggtgataaccgcggtatgggatcgccggctggcgatacagcgccataaactggtgcggttgttgtacaggctgggggcggtcagggtactccacaacggcgagcgctggctggaaataaccgccggtacattgcgtaaccatggaaagcaacgttcatcccgctattga

SEQ ID NO: 286131 - DNA, 435 bp, Morganella morganii
atgaaaccgacatctcttgaacagacgctgtgggacgacccggttatcaaaaaagcgctggagctttccccggatgaggtttatgccggcggttatgccgcctggcaacagcaggattatgaccgtgcgctggtggatttttcctggctggtgatgattcagccctggagctggcgggcgcatattgcgcttgccggcgtgctgatgatgcaaaaggaatatgtgcaggcgatgaattactacggctacgcactgatgctggacgcctgccatcccgaaccggtgtatcagatagccgtatgtctgaaagcgatgggtgaattgtctgaagccagagtcgcgctgcaggcagcgctgacgatgagctacgaagacccttcttacagtaccgtgcgcgccaatgcagaacagatgctgagtcagcttctggcatag

SEQ ID NO: 286132 - DNA, 804 bp, Morganella morganii
atgtcaagagtaaccaattattcccgtctgccttcactgacaaaggtttacagtaaggatgccgggggcagagataccggtattacccctccggagttgcttccgccgggtacgatgccgccggtttccgctatgtcgctgagtgaggaaaacctgctgaagaaacaggcttataacgcgtattttattcagcatctgttgcgttttgccatgtccggttccgccttcctggtatcgttagccgcgtcggtaatttccggaggcgccgggatcccttttaccgtcgtgaccggtactgccatgattattgcagcaggggatgcctgttgtgcgctatataacctgattcaggtgagaaatgaccgcgaaccgctgaaaacaggaaatgattctattgtgctggcgacaaagacgctgatgacgtccttcggtatgagtgactcatatgcggaagccacaggtgatatcgcttctttcacacttcgcgttggcatctcagtctcctctctctttttaccctttgcgcatctgccggaaagcacgggctttacgctctcctgtatttcgtcggctatctcggcgtggctcatcatcctgagtggcgggactaacacatacaccgcacggattgagcggatgctggataatcttgcggtatcagtcactccggtgaccgccaccggagacggtgatgataccgggaaattcagtcaggaagagatcctgaggaggattaagccgctggttgccgcctatgaacgtatcctggtggagctgaacgcccccgcaggcagtcctgcatga

SEQ ID NO: 286133 - DNA, 753 bp, Morganella morganii
atgatagatgcagatatcgggcgcaccggccatgaagtggtggtcagtgcagagatgcaacaaataataaaggagatggttgcagggctgtcggttccggttttgcccgcccccctgcatgctgcagatcataaggagacgaaagatacctgcaggcaggggcagaagaggatgctcgccagactgactgaacgggcggcaggcataatccccgcagagctttttagctggcagagtgttgtactgggaggacagcttttttgctgtggtacggcgattgcgctggcggtatccggcggtggcgcggtaccgctgctgctgttcgccgggattggtctgtccatcgccattgctgatatcgcctgtctgatttatcagcgcaaacatgccttgccgatggggcacgacagtatcgctaacgcggtgtatttcattgctcaccgtttttatgatgtgaataagagcaaaaatatcggcgaaagcgtgtcgtttggggcacgcgcgctgctcacggcggcggtcatgggtcagtcgtttatgatgacgtctgccggcctgagctacccgcattttcgtctgatggacaatgccacccggggcacactggtatttttgcgctacggggcagcaggctgtcctgtaaggggacagcgggcgagcgtccccttttttcgcttactgaatcgtttgtttccgccagcggacaatcctgcagaatctgctgttactttcaggccatcacctgataggtaa

SEQ ID NO: 286134 - DNA, 216 bp, Morganella morganii
atgaatgttgagcaacttgttgacaacttatcgcgtctggcacatcaggccgggcaggcgattgaggacaaaatgaacggacaggacatttctaatccggaagccatgctcaaagcccagtttgccgtacagcagtactccacttttattaactatgagagtgcgatgctcaaaaccatcaaagatatgctcagtggcattatcgccaaaatatga

SEQ ID NO: 286135 - DNA, 252 bp, Morganella morganii
atgatgctgacagagaaggagaggcgactggtggtagaggcagcctttgccgggataaaccatggtctgcaacgacaagtccggggcattctgccggcgctgccgttgctggttgaggataccagcctgcaggcgctgtgccgcgcagtgctgctggccggtctgaatgaatccgaccaggcgcaccgggcgcttgcagacgttgcccctccggaggctgaaactgtaaaaacctggcttaaaaaagcttaa

SEQ ID NO: 286136 - DNA, 276 bp, Morganella morganii
atgagtgtgattaacagtgtaaccgcagtgaacgccgccacgatgagcgctgcaccaccggcaactgccgtgtctgcgccggataacgggcagattgccgccttcaataatttactgtttgccggtacgccgcagggggatacgggcagtctgacaccctctcagatgcttgtgcaacaggccacaatactcggggcgaccgtgggcgtggatctgggcgctaaggtggcgggtgcggtttcccagtcggttaataaactggccaatatgacatga

SEQ ID NO: 286137 - DNA, 720 bp, Morganella morganii
atgaagtatccgcgtctggctgtggtcatcggattggtgttgctgttggcgggttgccgcgtggagctctacagcgaactgcacgaggaggatgcgaatcagatgctggcgatcctcatgcagcaccatatcgatgccgataagcagcccggaaccgggggcgttacgctgcgggtggaacaatcgcagtttatcaatgccgttgaactgctgcgcctgaatggtttcccccggcgcagctacgtttccgctgaaaccatgtttcccccgaatcagctggtggtatcacccgctgaggagcagcaaaaaattgttttcctcaacgagcagagaattgagcggatgctgagtcagatggacggcgtcatccacgccggtgtgaccattgcgtatgacagtgcaaacgataacaggtccgccggatcggcttccgtggcggtatttatcaagtattcaccccagattaaccttgaaatgttccgggtgcagataagcaacctggttgaaaaatcgatccccggtgtgcagaaagaaaatatcagcattctgatgcagccggccgaatttcgtatgcaaagtgcggataacgcaccggcagaaactccgtggaggacaatcgcatggataaaccggcaccgatggatcctggtaccttcgtttctggtggcagtgctgctgttggtttccctgatgctgatagtctggcgcaaaaaaatatag

SEQ ID NO: 286138 - DNA, 390 bp, Morganella morganii
atgctcagcccccggcagcagcggatggttcagtttgcaccccgccttcaggcctttgcactggctgcggggttgctggtgctgaactgcaacgactattttctgctgccggactaccggcggaagttattgcatttgcttgatgacgggcttatccggcaactgttcggactttgcaggggcagcaaccgtgctctgttttcaccggcacaattggcggaagttgcattgcagctggggactgccgtactcagccgcgccgggcggggcgatcccgtactgcatgcgctgctgattacgcttgcaccctgcgaacgtgcgttatgggtgccggtaccggcaccggcgatgaattttctggagcgaacgttatgtaccgggttccgctga

SEQ ID NO: 286139 - DNA, 675 bp, Morganella morganii
atgtaccgggttccgctgattgaactgaccgtaccactgccggcaggacggattatcccggcaggagagctgacggagttactgcaacaggccgctggtgtgcgccatgcggatcttgaggcaaaaggaataatcaatgctgcccggcgtaaagcagagaggatcctgcaggaagcgaagaaaaactgccgcgaaacggaagcctcccggcgtcgtgagttccgcgcatggcaacgcgatacgctcaggcgtctggaagcccgctggctgcgaaagcacgtcatccgcctggtgcgtgatgaagccctggaacaggcattggtcagcgcggtatcggacaggatccatcactgtattgaacaggtattgagtgcatggttcgggcagcagcccgcagataaaacgctgtgcgcccggctcgctttacaggcagaacagatggcgggtgaaggggttttaaccctgcggtgccatcctgatcttcagcagagtataaaggaggcgttcggctcacgctttgtgctgctcgcggcacctgagcttcccccggatagcgtggttttggcatcgtcacagctgtcggtgacattttcgcccgaaggacattttcagcaattgctgcagtggctgcgtccgtctggtgctgatacaggggatgaaaatgaaagcctctga

SEQ ID NO: 286140 - DNA, 978 bp, Morganella morganii
atgaaagcctctgagatagctgcgctgcagaaccatgacgccggcccccgggaaccgggggggatgaaagacgcgccatcgccgatggcgcaggcgctcattgagcttgaagaaacgttagggtgtgcgctgacagaaacgctccaggatatgggcatgtcgctgagcggacagctcaaagattttcagcgggcagaatgcagggacaggcagaaacaacgactggacgctttgttacggatggtacagcggatgcaggagcaggcaggcggtatacctgctcagctgacacaatattccgattcgttccccggtcagcagctgttaggtattgcggcgttactgctcgctgaaaaagcagacagaaaaaaacgtaaagcactcagcgacaaacttgctgaactgatgagtcagcagggctgggagatatcactgtttggcatgctggagctggggcaggtgagtaaaggtacgctggcgcaaatcaatcgtttattccagcaggcaatggatgaagaggttgcctcactggctgcatggtttcagcgcattatggactggccggatcgccggcggcgggtgaaagtgttgctgcgcatgatggtgtttgagctttctgcctgcgttgccggctctcagcagcaacggctggcggcggtactggtacgcttacgccgcgtattgttgtttttagggcttgaacaggagtgtctgcgaatcgaatctgtgtgcgggatgactccgggaacgctgcttccgttgattgttgaaatgacgaatgaaagctggttatttgatgaatggctcgcgccgcgtctggcgcagtgtactgcgtctgtgcgtttatacaaccggcttttgcaacatctggatgggttgttctcgctgatgcccgacccctgttttaacgatgaggatcagcgtgaacaaattctcggcgtactgcgcagtatgaagggagatggggttatcacctga

SEQ ID NO: 286141 - DNA, 369 bp, Morganella morganii
atggagttagacagggtgacagagcttaatattttgctgtttatacagttagccggactcccggtgcggcaggccgccgccggcatgtactggcagggtgagaaatttcaaacctggattagctggcaaaatgaccggatccacatcagccagtgtatgccgctggccccctttgatgacaacctgctgccgctggctctccggcgctggcagcccgctgattttgccggtatcccgcagcgtatttttcagctgcgcggcgggctggcgatgagttgttgtcctgcagccgatagcacggcggaactgtggctgcgggtacatcgccgtcagcaggcttttctggagtcgctatgcaaatctcaatga

SEQ ID NO: 286142 - DNA, 2061 bp, Morganella morganii
atgcaaatctcaatgataaaaagcaggggtatacagggcctgcaaaaagtgcttgccgtttgcgccgggcgtcaggacatcattctggcagtggtgatgctgattgctatcgtcatgatgatcctgccgttgccggtattcatggtggatatactgatcgccgttaatatcgctttttcgattattttgctgctgattgccatctatattaatgatccgctggagctgtcggttttcccttctttgctgctgattaccacgttgtaccgtctgtcattgaccatcagcacctcacggctggttttgctgcagcatgatgcaggcaatattgtggatgcgttcggtcactttgtggtgggggggaacctgacagtagggctggttatttttacgataattaccattattcagtttatcgttattactaaagggaccgagcgcgtggctgaagtcagtgcccgcttctcgcttgacgggatgcccggaaagcagatgagtattgacggcgatatgcgggccggggtgattgatgctgttcaggcacagcagttacgtcagcaggttcagcaggagagccgctttcttggcgctatggatggtgccatgaagtttgttaaaggcgatgcaatcgccggtattattgtgattctggtcaatattatcggcggcatcattatcgcggtagtacagtacggtatgccgctgggtgatgccgtacaaacatacagcgtgttgtctgttggggacgggctgtgcggacagattccttcgctgcttatctcgctgagcgccggtatcattgttacccgtgttcccggggagaagaaacagaaccttgccagtgaattaaccactcagcttggcaggcagccgcaggcactgatgcttacggcggctatcctgactttattcgctctgatccccggttttccctttctggacttttttgttccggcgatgttcaccgcactgccgttctttttattccggcatcgtgccgggcattcacaacacgatgtatcgccgggaggggagatgagcgaagaccggatgcagccgggagccaggccgttaacgctgtgcgtgatgccatcgcttatcagcgatacgctggcccgggatattgatgccttacgccggatgcttttcgaagagtacggtgtgccgttgccggaaatcacgatcatgacggagcacggggacggggtgcgggggatgtcggtactgctttaccaggagccggttttttcattatccattcccgggaacgcgtgtctgctgccggagccggataactatccgggctgcgaagtacagcaattgcctgacggaatgggaagtatcggctggctggatccggcggctgagaaaaaagcgcaggccatggggctcacggttgccgggggaaatcaacgcatcacagcattactgcgtcaggtattgctgcgtcacatggccgagtttatcggcgtgcaggaggcgcgctatctgatggatgctatggagaaacgctattcggagctggttaaagagcttcagcggcaactgccgataagcaagattacggaaacactccaaaggttagtggcggaaggtatctcgatccgcgatttacgtgcagtttttggcgccctgattgaatgggcgccgcgtgaaaaagatgtactgatgctgaccgaatatgtgcgcatggcgctgcgccggcatattttgcacagactgcaaccggatggcggggcactgcgtgtactgcgggtgggagaggggatcgaaaacctgatacgtgagtctgtccgtcagacctcagtggggacctatgcggcgctgagccccggacagagtgcgcgtattctgagtttaattcaggaggcactggatgagcacggtgatctgaacattgtcatctccgttgatgcgcgccgctttctgcgcaaaataacggaaacgagactatttcatgttcccgtgctctcctggcaggagttgggggaaaactgtacggtgcaggttgtgcatagtatcgactttatgcaacaggagtttgccgatgacgaagattaa

SEQ ID NO: 286143 - DNA, 1323 bp, Morganella morganii
atgacgaagattaacgcagaaatgctgaccgccctcgaaaaatcactgacaccgctgcgggatgtaccacaaggttatctcaggaccggccggttactgcacgttggtgcaacgctgatcaaagcttacctgccgggtgtttttatgggggaggtgtgttgtctgctgccggaaggcgggctggcggaagtcgtgggtatcgacggttcaacagtgcagctttcaccctttgccagtacggctggtctgcattacgggcagcaggtgcgttccctgggacggcggcatcgtgttccggtcggggaggatctcctggggcgggtactggacggtatgggattgcctcttgatgatggccctgctccgcagggtccctggcgggattacgatgcgccgccgccgtcggcactgctgcgccggatgattgataaaccgatgtttaccgggatccgtgccattgacggtcttctgacgtgtggtgaaggacagcgtgtggggatttttgccgcagcgggggtagggaaaagcacgctgatgtcgatgctgtgccgcagccctgacagcgacattaacgtattggtgctcatcggtgaacgtggccgggaagtccgtgagttcattgagaaaacgctggaggaagagacccggcggcgctgcgtgatagtggtttcaacatctgaccggcccgcgcttgagcgtatgagggcgttgtcggtggcgaccacgatcgccgaagcgtttcgcgatcgcggtaagagagtcatgttgtttgccgattcgttaacccgctttgcccgcgccgcccgtgaaatagcgctcgccggtggtgaggttgcggtttccggcagttatccgccgggcgtttttgcggcattaccgaggctgctcgaacgggcgggcagaagcactcttggcagtatcactgcattttacaccgtactggtggaaagtgacgatatgaacgaaccgctggcagatgaagtgaggtcgttactcgatggtcatatcgtcctttcccgccgcctggcggaagcggctcactttcctgctattgacatattagccagcataagccggctgatgacgatggtggccggcggtgaacatcagatgctggcgaacgcaatccggacgttgttatcgacgtatcgtgatgtggagcttctggtgcgggtcggtgaatttgtgcggggagaagacgatctggccgaccttgcggtagaccgttatgccgctatctgtcacttccttcaacaacagagtaatgaaccatgcgatcgcgacgaactgctggcacaaatgcgttatctgacagacacctga

SEQ ID NO: 286144 - DNA, 372 bp, Morganella morganii
atgctgaattgtttactcaggataaaagatcgccgcgaggagcggctgcggcggcaaatgaaggaactggatcagcagcgacagcaaacggagctgctggattttcagtatcagagcggtcgtcacgatctgatgcaaaagctcaatcaactgcttctctggtccggtacattgtctgcgggtgaactgatggaacagaaacaggttatgcatgatttatttcatgaggaatacgatctggcgcagcagcagcagcagcttgcggacgagcaaaaacggttgcgggagaaactctgcaggttgcagcagatgctggtgagcgtgatgaaaaaaaaagaaaaactgaggagtctgctgagcaatgaacgttaa

SEQ ID NO: 286145 - DNA, 366 bp, Morganella morganii
atgaacgttaaccggacagaaggttgtctctggcataacctgttgcctgaacaggagaaacgacaatcaacgaaaaccaccggatttattcagctgatggctcaggtggcggaaatgcctgacggcagcgcgggaaaagcggtgctcaggcagaaaaaacaacgctaccggctggcgggcggctctgcggcggggcttatttgcgaaattgaaatgcgggaaggtatcaccctgctgaaagttctggtgccccggcgtgacttatactgcaggctgaaggactttttcacccggctgaatgccgggctgctggcggccgggcacaacgttacgctggaggtagagtatgatgcagatctctgctga

SEQ ID NO: 286146 - DNA, 1005 bp, Morganella morganii
atgatgcagatctctgctgaagaaagcagccttgccgggatagtacaaacagaagggatggcgtttggcgcactgcatgttgcggctcagtgctggaccggcagcccggcggggcgattgttttcagtcacagcagacgatatcccgtgcggcatctggttagctgaaagtgactggcagcagtggtgtgaaggaactctcggtaccgcgtcagatcaggaggccgacccctgtctgctggcaggtattgcggaatgggggttgtcgccgctgttgcaggcaagcggtgcgacattacacgacctgccgggaacgcccggacattgcagcatgctcagtcagtatattgcggtcgtgtttgcctggcagattgacggctatacgttccgctgtgtgctgtttggctggcccgctacctggttccggacccttgctgagcagataagcccctgtgtccggccggtacgtttattaccaccggtggcgtttgcctgttatgccgggtggtgtcaggtatcggtacaggagatgaagggcatcggccccgggaccgggttgcggatgaatccttttggccatctgcgggagggggagttggttgtactgccggtaacgggaagtgcggtacgtatccggatagaggagggaggagaagtgaaaacagaagcgctgatcaatgatatggaaagcctgttagcggaggactgcgatcgtgcggatactgccccgccgttatcgtatcaccttgattccctgccgcaaaagctgctggtagaggcaggacaaattgacatcgatcttggccggttgcggacgctgcgtgaaggcgatcttattgcgaccggtgccaggctctcacccgatgtgacgttaaggctgaatggctgcgtgatcggtcagggagaactgatagcctgcggggacagttttctggtgcgaattacccgatggtttgtgcatccgtctgatgatgtgaatacgaatgaggatacggttaacacctga

SEQ ID NO: 286147 - DNA, 648 bp, Morganella morganii
atgccgttacctgactctccatggcagctgatagcactgcttttttttctttcgctgctgccgcttgccattgtaatgggaacctcatttctgaaactggcagtggtgttttctattttacgcaatgcgctgggtattcagcaggtgccgcccaatatggcactttatggtctggcgctggtgctctcgctctttatcatggccccgacagtcctggaggtaaaagccgggtggcatcctgagaaggaagacgcgaccgtaccctggttacagggctgggacagccgggcgcttgatccttaccgccggttcctgcaaaaaaacgccgatgaaaaagagatgcattattttcgtcatctgatagcaggaacctggccggaagaggcacggcgccgtattaaaccggattcacttctgatcctgctgcctgcctttaccgtcagccagttgtcgcaggcgtttcgtattggtctgcttatctacctcccgtttctggccatcgatctgctggtatccaacattctgttggcgatgggaatgatgatggtgtctccgatgactatctctctgccgttcaagttgttaatttttctgttagccggcggctgggatttgatcctttctcagctggtacagagtttcagatga

SEQ ID NO: 286148 - DNA, 267 bp, Morganella morganii
atgacagatgccggcataacccacctcgtcacagagctgctgtggctggtgctcatgacgtcattaccggtggtgctggtcgcggcagtggtcggtgtgacggtgagtctcctccaggcactgacccagattcaggatcaaacgctgcagtttatgataaagctgctcgccgtggtgttagtcattatggcgacttatcattggataggcggacagcttctcgcctatacccgtcaggtgtttttgcagataggagtacacgggtga

SEQ ID NO: 286149 - DNA, 771 bp, Morganella morganii
atgatctctctcagtgacggactggttaccttaacgctgatgttaatgagaccgcttggactgacaatgctttttccgctgctgcagaccggtaatctcggctcggcgctgattcgcaatggtgtgcttctggcgctgatgctgccggtactgcccgttttttatacccagccggttacttaccggggatgggactggctgagtgagatcccgggagagctgatcatcggtctgatgctgggattcttcgcagcaattcctttctgggctgtggatatggcaggatttctgattgacacgctgcgcggtgctaccatggcaaccgtgttcaacccggcgctgtcggtacaaacatccatttttggtctgttgttcagccagttcctgtgtgtacttttctttattaccggtggattcagtcagcttctgactgcgttgtatgactcataccactatttacctcccggcaggacactgcgtttcaacggaccatttttacactttctgctggcgcagtggagtgtgttgtaccagctgtgcctgaatttttctctgccggccgtgttctgcatggtgctggcggatttggcgctcggattgatcaaccgatcggcacagcagcttaacgtattctttttatccatgccggtgaaaagtgtgctggcgctcctgctattgctgctctcattgtcatacgccttccgccactatgcactggagagtgaatccctttaccggcatgtgagtcagtggttagccggtcatgagtga

SEQ ID NO: 286150 - DNA, 1050 bp, Morganella morganii
atgagtgaaaaaaccgagaagcctaccgcaaaaaagaagcgtgacagccgtctgaagggacaggttatcaaaagtccggaaataatttccggcattcagttgctgacgatactggctttttttcatttttttgccgatgaggttatacagcggattgccggtctgatattgctggcttcacgactcatcaatcagccttttgactatgccttcggacagctgatacaggcattactgcattcaggaggtgttttttttgcgctgttcggcggcatgctggcggcggcaaccatagcgggtttggtttcacaggtcggttttctgcttgccacaaaggcgataggtttcaaaagcgataaaattaatccggtgaataattttaaacaaattttttccgtacacagtctgatggaattgtttaaatcctgtctgaaagttattttgctatgttccgttttcatctttcttttccactcttttttgccgacatttcaggcgctgccatattgtgatgcaggctgtgccatcccgcttttcactgttatgatccgctggatatggtatgcattgctgatgttttacatggtattgggcgttattgattatgcttttcaggcacacaacgtgatgaaaaaacagcgaatgagtaaggaggatatcaaacaggaggctaaaaatacggaaggcgacccgcaggtgaaaaaacggctgcgtgaagtacaacatgaaatacaaagcggcagtttagcgcagaatattaagcgatccgccgttgttatccgcaatcccacgcacattgctgtttgtctgggttatgaccctgcagagacaccgatcccaacggttcttgaaaaaggaacagatgcgcgggctgaacatattgttgcttttgccaccagacagtctgttcctgtggtggagaatattgcgctggcgcggcagctgtttttcagtgttaacacgggtgatgtgatccctgaatcgctgttcgaacccgttgccgcgttgctgcgcatggtactggaactcgattatgatgcggatgggtga

SEQ ID NO: 286151 - DNA, 1005 bp, Morganella morganii
atggaaattacgccgtctgcttttaagcctgtatctgatttcattgaatccagcagacgtgaacagatgtctcctgctgcccggttaatcgatttaattttctcgtttacaaggcttcgccccacttcctcacaacattcagaatcccttgccaaagaactggcagcccccctgtaccgggcaatgacggatggcagtgaggagatcatcgttctgacggacggaatagtcctgtcggtctgtcccgctaaaaagacagcggtattgcgttctccgcacagaaccgatgtctgcattccttatcatattctcattacagcctgcctgaattcacatcctctgactattcaggctgatgcgtttatttcccctgatctcatctcttatcaaaaagcatcaccagaggaggaaaccgaacaattcctgaaagatcaccggcgggggctcaacaacagaacaacagtagactactgcgctgaacacagcgggaaaccttatcatctgaccggagacagtttgtctctcctcgcggatgctttagctgatcgcaaagaaaaacagggcgcgtactttactgaaagtaacgcagattcattatcttttcagtatatggatgaggaatattgtcttgataagaccgatatttatcatatcgcatcggtctgcaatcagggattcatctctgcgctgaccaataatgtcgttataggtatccgcaacgccgggggaaccgttcatgtgaccgataatattaccgcgctgagtattcttgatgcagcaggcgtatctgatgtgttaacagcgcaattaatgtcccgcacctcgttgccccgggagtccccggtaagccatacgctgagaggggacgatatcacttcagtatggtctgatgttagcctccccgtctatgatccattcacggacgaatgggaatacatgacatgtgatgtgacactatctcacttcagagacgggcaggcccggataagtgtgaacgttaattag

SEQ ID NO: 286152 - DNA, 1461 bp, Morganella morganii
atgaaaagaatccggatccccgcaagcataaagcccctctgtctgattgttcccctgctgttatcggcatgccactctgccccgctcagacaggtatcaaataaagtgacaacggccggtcatgtaccggcagactatattgatccaaccaaatcactgttcccgctgggcaattacccgcaatccgccgataaatggttcccccccggcccggatatgcacgttcctgtcatggctgccgcggcacagcagcgccacttttctgacctgaaatcccgctattttggtatgggtgcgggcgaaaagtcgccctggaatccatcttatatcgcatcagttctgcgcaaaggagcggatgttagtcgtgatgccaacatcaggatgtacctgggtgagcgaagtgtttcccggggcggaaacttcagagtccaccccgccgcctggaaacaacagataagagataacatgacgaccagcattacccgggtttataccccgtcggcaagggggattgccgtcagggaaacgctggtcagggttcttccgacaaacgacccggcttatggtgacccccgtcaggccggacaaggctacccttttgacaatttacagatgtcctctgtccgtcccggcacccctgtatacgtactggcagccagccgcgacagccgctggaaatacgtattatcccccactgtgaccgggtgggtacacagcgaagatattgcagaggcggatcagcggtttgtcactgaatggctgactctggctactgacaacctgggggcgtttattaaagaaccggtttctgttcatggaggaggacaatattattttactgcacgtcccggaacccttctgccattcaggaatgggcagcccggcttttttgacgttattgtgccggtgcgtaaaagtgatggccgcgcacaaattcaccgggtcagcgtgaaggaaggtgagtttgttgccatgccatggaaaatgatccccgctaatatggctgtactgatgaagtcgatgagcggcagaccctacggatggggaaattataatttttataatgactgctctgccgaaatgcgcagcctcataatgccttttggtatatttcttcccagaaactctgcggcacagatacagtcggccacacgaattgttgacctcagccgggagaataccgccacccgtcttcgttatctcacggagcatggcaaaccctttaccacgcttgtctatattcccggacatatcatgctgtacatcggtaacacggtcattaacggacagacagtaccgatgacataccagaatatatggggactgcgaccggcaaatgccgacagccggcgtattattggcggtgccgtttttttacccctgcttgccgcttatccggaaagcccggacctggaatcactggctggtaagtcacagtttaaactgggttttattgaatag

SEQ ID NO: 286153 - DNA, 831 bp, Morganella morganii
atgaaagtaaaagtatggatggtgccattgatgttggcgtatatgatgatggcctgtgccgcacccggtacagaaaaatatcagaccatcatggacagtgttacagcgggaaaagtcagccggattattcacactgatgttttaccgttttccggtgaagatcacggggaagtgataagccgggtgtcatccgcctttctcgatacgccttaccaggctaatacacttatcggcggacctgacacgcccgaatcgcttgtcgcagattctaacggtgtggactgttttacgcttatagattacaccgaagccctgagccgcagccatgaccaggcatcatttctgcgcaatcttgcggcggttcgttacaccggggggaatgtcagctatctcagccgccggcacttcttctccgactggtccgccacaaagccgtacaacgcccgggacgtcacaccggatatcagccctgactatgccgttgcagacaaacaacttaaccgcaaacaggatggcagtgagtacatcccgggtctgggcattcatccccgtaaaataaagtatattccgggaaaagccatcagtcagcaggtgctggataatctgaaaaccggggattatgtcggcgtctactctgaacagggcggactggacgtttcgcatgtggggatcgttatccgtcacgatggcaaggtatggttcagaaatgcctcctcgctggccgaaaacaaaaaagtggtggactctccgttcgcggaatacatacgcgcgaaaccgggcatcgttgttttgcgggctgagtcgtccgccatgacaggagatgcgcaatga

SEQ ID NO: 286154 - DNA, 381 bp, Morganella morganii
atggatatccagcgaagctcatctgaatgtggtatttttaacctggcgctggcaaaaaaactctataccgagagaaatgaactattaagaatacataaagataatatcaacggtatattacataatggtaaattatttttaccccacaatgagctggatccatatcttccggtgactttttacaaacatactcagggtaaaagacgtcttgatgcatacttaaatactaacccgcaggcggttgatactgttattaacaaaaaaaatgaaactatccttagcaggtttgataacaataaatctgttataaacggaaaagaattattcgtctcagtgcataaaaagagagtgactgaatataaagcacttctcaaaccataa

SEQ ID NO: 286155 - DNA, 363 bp, Morganella morganii
atgattggatcaatattaccaataaattcccccgggaatttatcaaataaagatacacattatttaatcagtaaagaagaacttaaaaatattataatacagctggaaactgatatagcggataattcatggtaccataaagattattcagcgatagacatggatatcatgccagcattggtaacacaggcaaataataaacaccctgaaatgaatcttaactttgttaaatcgccatgggatattttttcagaaataaaaaaagcaacagaatgtgagatcgaacatttccgactcatcgtcaatatgggtaaagatggaatacattctggtgtcattgattgcaaaaaaacaaatgggtaa

SEQ ID NO: 286156 - DNA, 465 bp, Morganella morganii
atggaatattacacagaaaaacaaatagcttttttggcagaaaaattaggtgttgatattattcctgatattcaacagcagtttttactgattatcgacggccatcatttcattatacggttactggaggaaaaatggtattttcatgcaagaatttgttattccagtgatataacaggctcagattctcactatagaaaaatgctggcaataaatatgaacgaacatcggtttgggttcggtgcattgtgcctttctgaagaagaagataatgatgatataattatgtatgtattgagaaaagcgtgtgataacaacgaggatagtttgtataatatgctcgatatgtttgttaatcgtgctgatgctattcgtaaaatgattctcgcgagctcttcaccaaatcagcactgggcgcttatcggtgcagaaccataccaattcaatgtatacaccaaaggataa

SEQ ID NO: 286157 - DNA, 672 bp, Morganella morganii
atgccaggaccatcacacaagtttgcagatatagtctccggtaaaaatagttccggatcgaatacagacggacaacaatatgaaatagataagattaacattgatgatatagccgatgataatttcacagcagaagactttaaacagataattaaagaggcagtcctgcttaaagctcgattattgcattcaggtcagcaggataaatatcgttatcaggtgtatgcagatatttttcgtaaggttaataggatgccgccacaagtacatatcaatgcaaccgcatcggaaaatatagtaccaccacaactgccttcattaccgcaagtacatgccaccgcgccgaaaaatatggcaccgcctccgttgccgcaagtacatactgatgccacaccaccaccaccaccaccaccaccaccaccaccaaatatcgacaccgccgcatcggaaaataaacaatttccaccaataaatccaacagcattaccgagtgaacgagttgaacttaggaagaaaactgagaataataaacaacctgaaatagatttcaagactgccatggaagcagctatagataaacatcgaaaggccaaaggatacagcattaatgatgaagatgttaatgttaatgttaatcgtgctaataatgatgaatttcatgattgtaattga

SEQ ID NO: 286158 - DNA, 342 bp, Morganella morganii
atgaatgagagagaaatcagtctctttatcggtcagcaaattatgagaaaacggaaatcatccggtctttccggcaaagcactggccgaattattaggattaagtcagcagcagatatcccgttatgagcagggtgttactaatataagagccagcacgctgttacagctctcttttttatttgatgtcgatgtcaaaagcttctttattgattgtatcgaaacaaataatcgactaaatacactgaattataaagaaaaaaagagtcaggaaactgactgtgacatgatcacgattgatatgaagaacagaggaaggggtaaaacccgcagtaaaagataa

SEQ ID NO: 286159 - DNA, 579 bp, Morganella morganii
atggacatccggtttcttaaatcggtattctgtaaatcaggtagcaggcagatgactcattcagtacagacactggtttttctgcgccacggcgaaaaaccggacaatgacagtggtcagttaaccggcaagggattacaccgtgcgctggcgctggccgatcttctgatcacccgttacggaagggcggatgcgctgtatgctgccgcgccgaaacaaagcaagctcggcaattcgctgcgctcccttcagaccataaccccggtggcaatccgcttatctctgccggtgcatctggaatttcacgccaaagaaaccaaagcgcttcgggatgcattactggataaagcccatcaccgccatacggtctttgtggtttgggagcatgataatttgatcaaggtcgtgagggatattctgaaacagaccggcggggattacgccggtataccggcctggccgcgtgatgattttgacagcctgtgggtgctgacgattatcagaaagaacggggaaatcaatattgcatttacccgtgagacacagggactgaacaatctgaacgattattattcctga

SEQ ID NO: 286160 - DNA, 441 bp, Morganella morganii
atgaataagtttatttttccggccgtattatgtgccgccacactggtcacactgcctgcgaatgcaggtaaactgccggataacccttatttatcgacagcggcagtcagtagtgtgctcagtgccgccagctctgtgataataagtgctgtcattttatcgccggttattttgcctgcacaactgagtgtggagtctgtggaaaacaataaaaaagaaaaagtgaccactatcaccggcaaaaccgataaaaatgaagatgtcgtgctgctggtcgccactgaaaagctggagaaaataccggtgagcccgggggataaactggcaatggaaccggcggaaaaaggccccggtgcgtacctgaaaaaggacgggaaaattatcactcatatggtgaatcaggatgatcgtgaattaacccatcaggagaagatgccataa

SEQ ID NO: 286161 - DNA, 1011 bp, Morganella morganii
atgattacagaggcttattctcattatcagcttaacgcagagcaatttaataatttgtttactgacaacgtggatattaacacgcttgatgtaatgggtaaatcagcagcagatggcaactttgcttgtattgatatattgagtaaccttgcattgcgtcctgatgatgcaggaaaacgggctgagagtctcctttttgatttattcagcgggaaaatcaagggtaagacaggaatagacgaagaaattcaacaggccagtttaaaattatacaacgtggcggttgatacgaaaggtaaaaacaatgaagatatgaacaaattttattcaccatccaaactactttatatagcgggttccgctatggaaaatataacacaacaacaagagatatccgctattttcagagaaaggaatatatcccagtcaccccatgagcagcttgataatgttgatttgtggaataagggccgcatgctgacgacagatgagataaacacagccatgaaaggattagattcaaattttcctgtaggccttattgaacctgtcaataaatcaaatatgttatctgaacaaattgccgacaaaataccgtgtgatcacggccttgataagatggagattttcccggtaaatacgggagggcactggatattgtttattttatataataatgaaactgataataatccaaaatgcgttatctttaattctttatgtgcgttaagtgatgaggcaaaaaatcatcttatcgattcggcaaaaatagcaggggtaatcgaaaataataccgaatttattaatggcgatatgcaggaaaatatgccaaacggatgcgggatatttgtcgttaaggtggctgagttactctcagcgactccggagagaaaaccgggaaatattattaatgattttgttgatgatttttcaagattatcagcagaagatcaaggcttatttaacatacagaatcgccgtcaaatggatgaacgggtttattgtaaataa

SEQ ID NO: 286162 - DNA, 219 bp, Morganella morganii
atgcaggatgatgcgacatgcttcagtgaacggccgttacctgcctgccctgcattgtgtcacccgtcaaaaagtgtgaaaaaaacggaggcgttttattgtatcagctctgataaaccgttacccgataaggaacccagtatgtttttggatgtcactgttccggtgagttgtgaggcgacacttcctgtatttgcagtaccggacaccacaccataa

SEQ ID NO: 286163 - DNA, 1644 bp, Morganella morganii
atgtttaaaagattaaaggtatcaaacggattactctttgttttgtttctgttttttttattgcaattaataaccggtgcttttctgtttaactacgcacagtccaataaaaaaacagtcattacgaacagcaatgaatctgctaaattagttgagggtaatgagtcgtgggatatgctgatatccgcacgtacatcggtgtatgctgcgcttgtgcttttatcctataataaggatgcagaagcattagagtttatttccaaagctgatacttcactggaaaaagcaaaggaacactttgagttatttaaatcgtatccgacaaatcttcaggatgacggtaatttcaaaaaaattgaagaagcatttgatgtatatcgctcagggttattaaccgctacccgaaatttaagtgagagaaaattaacggaagttgttaaccagccaatacctgattatcaggctgaacttgcgaaatattacaacgaatatcaggatgattataataattattataacagcagcattcaaaaagcctctgatgaatataatgataccctatgggggctccttgctatttttatcagcctgataatcattatttcagttgtatggcttggtatccggcgtatgctgattttacctctgaaccatattgtcggcggaattcagcatattgctgaaggtgatctgagcaggccgattaatgtgagaggcggggatgaaattatgatattggcggaaacattacgccatatgcagattgaacttgcccgtaccgttggtgatgtccgtgatggtgccaatgcgatttacagcggtgccagtgagatcgctgccggtaataacgacctctcttcgcggactgaacaacaggctgcatctcttgaggaaactgctgccagcatggaagaactgactgcgaccgtacgtcagaatgctgataacgcccgtcaggccagtcagctggcgttaaccgcctccgaaaccgcagagcgcggcggaaaagtggtggatgatgttgtggataccatgcgcggcatcggcgacagctcgaagaaaatcgccgatatcatcagtgtgattgacggtatcgccttccagactaacattctggcactgaatgccgccgtagaagctgcccgtgccggtgagcaggggcgcggatttgccgttgtcgccggtgaggtgcgtaacctggctcagcgcagtgcgcaggccgcccgggaaattaaaaccctgatcgaagattcagtcggcagagtcgatgccggggctgtactggttgagcgcgccggtgaaacgatggatgaaattgtcagcgctgtcacccgggtcaccgatattatgagtgagatagcctctgcctcggatgaacagagccgcgggattgaccaggtgggagtggcagtgacggaaatggacagggtcacccagcagaatgcggcattagttgagcaatcagccgcagcggctgcatcacttgaagagcaggccagcaggctgactcaggcggtgtctgtatttcatatacagggcagagaactgaaggccggcacgaaaaccagcattatggtgccattacaacgccctgcgcttaaaaaatccgctgataatgccgatgatgactgggaaacattttag

SEQ ID NO: 286164 - DNA, 417 bp, Morganella morganii
atgaaaatagacaggaccaccggaaagccggatattcagcccggcggggatcatgagaaagccaaacgattgcatgactggcttatcagtaattttaatagaaaggaagatatttatcgcggactcgagttagtgggaacagatggatataataccggtaataatataaaagaaaaaataacgttattaattaccgttgaaaatacattaacaaaaaacccggaatattctgatgcgaaaatacgtaaatcagtaagccaggttggcggtgacattgttaactatcatgccttttaccaacaatatcttcttagaatggtaaatcaaaaacagctggggttagcaccggatgtactttccgctgattttgaccataataataacaaagatgactggcttactgtatttagcggataa

SEQ ID NO: 286165 - DNA, 618 bp, Morganella morganii
atgtgccgttcactgcctgatcctctgctgttacatgttaaacacggcgtactgattaaacgccgccacgtctctgcgctttgccgtctcagtaacctgacccggcaggcaaaccatcatgctgtccgcctgataaaacaggctgaagacaaggcagaacaacatcgccaaacaggctttgatgccggttttcaacaggggctgactcaggcactgcctgaaatggtacgggtgataaatgaatataaatcagtgatccatcaaaatctcgccggcgcgatttccggcctggaaacggagttatctgcatttttcgatgacaccggaatacgttttacgctgattcaccaattagttgagcagttttccgcagagagtgaatgtgaattaattctgccggctgaacttaaaaagggaatgactgagtatccggacttcactgtgccggtatcttttcatttcagccgtaacatcatattacgtaccgggaaaaaattactttatctgacaccggacacgtttgcccgtgaaaaagccacacaaataaatagcggtattgttccggatagcccggcgggtatctccggcggctatttatcattatacaaaaaaggataa

SEQ ID NO: 286166 - DNA, 564 bp, Morganella morganii
atgaataaccggtttgatatacaaggcaccgtcgcccgggtgatgtaccagcctgcggattatctgcacagcagccgcttatttgccgggttgccgccggcagcgcaatctgcgtcataccgcagaatgtataatgcggccattattgatcactaccggctgccgtgtgagcaggattttgatctcttttctccgctgacaatcccgctgctgcgccactggtaccggcttcccgtactttgtcactatctggatatgttcatccgccatgtttatggcctgccggatgataccgtgccggatttatcacaacaggcatttttatctctgaccccggcactgccgcttccggcatggccgcaagcacagacacagccggagatccccgcccttctgcccggtctgattgccatgacacaattgttatccgctttttcccctgcgctggcggcccgctttccgctgatgacggatgcctctttatccccggcagacatacggctgccgcatctgcccgattcccttttaccgctggtattacattatgtgccgttcactgcctga

SEQ ID NO: 286167 - DNA, 1062 bp, Morganella morganii
atgataaaattatacgacataataacaatgggagattcatccggaaaagaaatcacattgccttccggtaaatatcatattaacaataccgatagtgttggatccggtgacacactgatccccttgtccctcccggtaccggattcatcattacagcgtatcgaggccgaattgcatgaagagtattatagtgtttcctgtactactcacagcaatgaaactatcacgacagacatcggctataacgcattattttcttatcagggaataccttttttcgctgtaaaagaacagcaggatatctggcataaaagcattctgtctgtgacccaaaagaccgggacacaccgcagcaggttctccggatacacccgtttttatgctgtactgatagtatcgatcctgctgacagcagggttgatactcctgcagaaccaaagcggaacagacacaaaaaaacatacgataagttacgaaaatattatacgcaaacatataaatcacaatgaatatattataaaagaaaataatatccttgttttttcacccaccagaagcggcattgccggactgaaaaaagaactgccggattatactatttttgaggttaacaaaacagacgcaaagattgataaaaatgatattatcatcatgcctgattttaataagagaaaagaaatcgtttatatatatcaagaaaataaaataattacggctaaaactctcaatatccctgatgagttaagagatgacattactatcagggcattatcattcagtgatattgttaaattaataaatgaccggttcgatcaacactcaatccggtattctgtaaaaaaatcaggaaataccatttggatttatgccgataaaaggagagacaaggaaacagagactattattaagaatatcaataccacgatattctcagcccccggaaatacactggtacagtacagagaaagtatgccccgcaacatttatcccggcgtatatggcacagtaaattatattcacctgtctgataaccacacaaaatttacctctgataatgaataa

SEQ ID NO: 286168 - DNA, 1626 bp, Morganella morganii
atgcggttaaaaaatagcgccgggggactgtttggtcttattctttgtctgctttctctgccgctcatggcggagcaaacactgttatacgaaaaaaaaccgccgcgtcaggagcagtatgtggcgaaagaaacacggctggatcatttttttgatgcgctggccggaaagctggatgtcatgatgatttcgtcggacgcggtgaaaaagaagaagatttccggcacctttgatttatccgacccgcaggccgcactgtcacagatgctgaaaacgatggcactggtgtcataccgggaaaaccgcaccctctatatttacagcagcaatgagattgaatcatcgatgctgacgctgaatgccatcacccgccatgaactgacggtttttctgaaacaaaccgggttatttgacgcgcaatatccgctgacatccgatcgtcagcagcggattttatatgtcactgcgcccccgcgctatctgacgcttatccgttctgcggtggatgcacttgaggctcagtacagtgtgcaggaacagggaatttcaccggaggatgagcatattcagttggttaagctggaaaacagttttgtgcaggaccgcgaaatcacgtcgcggggaaaaagtctggtattgccgggggtggcgtcagcattgcgggagttactggactcagggccagcggcaaaaaccggactggtgccgcaggatgcagaacagggcgatattcagccggctgaaaccgtctggctgggcggtgagcgggtgaggattgtgccgttgcagggggaaaacagcctgttgttaaaagggagccgcaatgccctgcacttaatcaatcaactgataaagcaactggatgttgccaaaccgcagatcgaattatcattgtggattattgatgtatcaaaaaacgaagctgaccaactggggatcaactggcaggccgattacggtaccggaaaaatgaaggtgtcatttaatctcagtgagcttaaccaattcaccgggttttcctttttcagcaaaatcagggcattgtctgcgaaagggcaggccaatatggtctcccggccgattattctgacccaggataacacccccgcagtttttgataataacaccacgttttacagtaagttacagggggaacgcacatcatccctggaaagcatcacttatggtacaaaagtgagtgtgacgccgcggatcgccaatcagcggaaatccgtggagatgattatcgagcttgaagatggcgcacagaaaaaggacgctgacggaacaggcggagaagacgcactgccggtgattaaccgcaccaatatcagcacgatagccagggttgctcagggcaatacactgctgattggcgggtacacgcgggaaaacagccatcgccataacgataaaattccgctgctgggcgatatcccgctggcaggccggttgtttcagtttgaatcagtgaagacagaaaaaatggtccggctttttctgttacagccccgtattctgcaacaggattttttcagcgacacagaaattaccggtcatattccgtttaatcatgagaataaacaaggtattaagatgatgcagacactgaagcagggctattga

SEQ ID NO: 286169 - DNA, 843 bp, Morganella morganii
atggtaaatattgaatgttattacagtgagcctgaatccggttttggtggggagaggatgagtaaacaggtgaccgatttattatcagtgatgataaaaagaaaagaaaaaaggtggtgtgacaacgatattccggtaatcagttcatccattcaatattataatgataaatattatgatggtaatgtattatatcttcttccaaagataaaaagcagtgattatcctttccgtgaaaggcatgatgctattttgaccttgatgtcatcaacaggaacgataaaaaatacaacccggcaaaatactattcccgaatatattttatgtgaaaatccggcagatgaacgccctgatacgcatcctgagaatgtggcctctaaaagcatggcagcagaaaggatagcggcggaaaatacccctgaatcagcaagcactccggaggcagaatacacgcccggcacagaatacaccccggagacagaaaacgtgccaacagcagatatgacgccgatattgccggaatgtccggttttccggctctccgaagccatgccggagaaaaagagtctcacattgcggtattatgagcaggaaaagggttcgcaggaaaaagccgctcaggttatcggttataccgggaaaaatcaggctgttccggaaagcaacagacctgattattattgttcttatcatttcagacagaaatatcagccgcctgaaccggtacttatttaccgggaaaaaccggggcggtttaaacttgaaaccggttcagaatcgcttaaccggcgactgaaaacgatgaatgcgataaatggaattgatggtgttgatatagtataa

SEQ ID NO: 286170 - DNA, 462 bp, Morganella morganii
atggtcacttttggatattttgttgacaggatggatattgcatctaagtacagccatgatatcggggttaaacattatcgtgacggatttagtcagtatacggatttttataaaagattaaccgggttgttaagttcttatggcgagtataacaaaggtgtgatagatgatggtaaaagaacaaaatttaagcaaaatttattttattatgacttacataacgaactaatgcggtattatcctgttacgggtgacctgaaaaatgataaaggaaaggattgttcgatatataaaagtaagtttgaaatagatataagtaatggaatgaataattgctcagtatatattgatgataaattaattgattccggggtcagctatgatgatgcgttaaaaaaaatggagtattttttttccgtaattaaaaatccggtctcaggaatccgggttataaaaaaataa

SEQ ID NO: 286171 - DNA, 456 bp, Morganella morganii
atgatagatgttatcgtaatgccggaggcattattacagtggcttgagattcctgttaaaaaagaagattatgaggaagtagattctttttttgataaatctatggatatattaaagcattttaatggtactgataatggcgactattcagcagtaactgctttatatgacaatgcactgaaaaaaaccaaggcaatcgccgaaaaaggattgcaaggcagttattacacaaagactgcttcattaaaaaaagatgagatatggaatttagatcaggggcagattagcgcatataatactaagatagatggaattaaaaaagaattacagatgaccattgatgagttttctcagcgatataatacgattaacagtaattacgataatatgctcagagtgattaccactatgattagcgaactgactcaggaattaaaaggttttttacggatttaa

SEQ ID NO: 286172 - DNA, 423 bp, Morganella morganii
atggtaaataaatccgttattgttcctgttatactctgcttacttccgggttttatacacgctaacacagttaccgaaattcaggtcaataagattggtattgcatattctgacagtacaaatatcaatgaaataaaggcatgcaaacaatttaaaccaagccagacacagttgataacttattttaacactgccgaagaatcgatagaaaataagtggatgcatgaatactattctgcctgcatatcaaccggtcatatcaaatttaatgacggaatgacaggaagatggacagtccagtcaagcggactgggttatgtcactaccgctgataaaaagactatttattttttccgtaaaaataacggatggaacgaccctgacgcctgcacttacggctcaggtgatgagcctgaatgttaa

SEQ ID NO: 286173 - DNA, 135 bp, Morganella morganii
atgctctatattgatgacatcggaatcgttaaatcaaaccgtattactgtattgaaattgcagaaatttccgctgatattgctacagaaaaatatcccgtataccggcatcctgatatcggaagaaagaacttaa

SEQ ID NO: 286174 - DNA, 5004 bp, Morganella morganii
gtgactcccgtggcaacgtcttatgtgcaggccctgaagagtaaaacagtcattgcagccggcacagccatggggttattagggttaaccgcaggaggaaaagtgctgtggaatagtatcaatccacaaactgcacggaatgcagatagcgttattcctgacacagaaccgttagtacagaataaaagcgccgagagagagaatattattcaggactgcaattgcagggttaagcgtgaacagaattcaaacaacatggcatataataatttttatctctcaaatatgccatgtcaaaaagagtttcaggtaatgactgctcagccccgcaaccatgcagcagccttaaacgacatcacacgcagtatgaatgccatccttggccaacataaccggcaatacgattccatagagcttcttaaaaacgcactaaccgaccaacgcggaaaaattcttgtgcgcagaattgaaaatgcgctaaatgaaggcatggccctgattaataacgcttataaaaaatttattaatccggcagagaaagataacattttacgctatctgtctgctgcacttgaaacagataacaaaatagcccttgacgaagcttacgaacggttaagaagaacggcatttcaaacaaccatgctggttaaaaataatatccatcaggccggtttttttgaacgacgggataaaaatatccctttaccctccacggggaataaaagccccatggttcttgttaacagaaagaaccccgcattaatcagaatcaacctggaaaatgcagaaaataatattgcagaacttttggcgctgcaatcatcagcggggtataaccctgaactgatggaggcgttcatgcggcaaatgatcatgctggggggaaacacacaagacgtagttaccctgcctgcatgtcaaaatgagcagggactctctccgggctcatatcagcgggccctgttctatttcgcaatgaaaaatcagccggcacaggcgttaggcattaaaggcgctgtctatcctgatgataatgcagtatgggatatattgaacacacatcataatgtcaccctgacagacactatgcgtgaggacgctaaaaataagcttctgaacccgcaggatgaatattatctgagaaaaacaggtaaatgcgatccggcacgccatgagcaacaagaaattattgatgccataacatggatatacacaggttcagaacgtgattttgagatgacaaaattcttcagtgatcctgtttaccgggcagatatcatgaccgccaatacggactcagcaacgatttacctgcgggatatcggatcagaagacagccaaaacacccatattaaggactcagataacgcacttttcattacttttaagcagaaagcgcaggaactccgtaatcgtttcagtgaccctgctaaagttgcaagaaacatagccggaaataaagtttatgaacgaacgggtcaaaacctcgatccggacaacattttcctgcaccagttcacactgagtcaaacggtaaaagataccaacagctgtacgggctatgcacacaacggtaaaccattgcataccgagacgctcacacaagcctatatggataattttaacgtatttcgcaagcgtcagtttagctcattcatggaagtgttaaataaaggtgccgcttcatcggccggaaatggatatattcctgactacatgaacaatcctgaactgaccgctccgttttttaccggtcccgataaactgtcgggtttatatctggctgatgccggttcagcacatttcggtgctgaaaatgaagttaagtatcttccttctgatctgaaaaatgatatttatgatgcaaatatcatgaaacagattgaggagcagcaacagacattctggcgtgaaaacagcgaagagtggcgggccatggcgaaaggacaattcattgaagaggctcgcttagcctatgtcaataacaccctttcacaacaagcatatgaaatagccatcaaaggcggtgccgccaacatcattctttacgacccggtaaccatgtacgagctaaacgaatctgccgccgcagcgtcctcagtgaaagtcagttttttaaatgttcttacccagtcatactcctggagtcccacagaacccgggccttatcaatcattttataaaaccaatatcctttgtttcaccggcaaagatgggcgtgaggttctttatatcccggggaacagcaatgcatttcgtgaatttaaggatgagaaagcgcttaaagcatggtttgagcaacaaattaaaaaggaagagacccgcaacgcatttcttcagcatatttcgctgatggatcggcaaagcggggccgaagaagcacttatcgaactggcggacagcaaaatatatgatgactgcgggatggaggatctaaaaccgactatcattaaaagaagtattaaaacagaatatgacactgaagatgccttctctgccctcacactgttaacgaaagaacgcacagaacaggacacggatatcttaatcagttcaaacggagaaattgctttagaatcgttccggcagatattgcaggtggtgagtatgctggctatgcccattttgccaatgttcgggccggtaggtattgctttagacatggctttgaccaccacacagctgggtacaggtataggaatcatgtacacagccgatacgcaggatgagtataacgttgcgctgacagatgtcggcatgagtttactctttttaggcttaaacagtatcagtattatttcctcaactataaatgcggctcaccccgccacgtcattccgtcatgctttattgaaaacagagagcaccactctgcaaaaggagtccggggttctgccgcgtattcaattaataaaggaaaagggtttgagtgacagaggtgctattatgaccggaagaaagtggccggcgtgggttaaaaagccgtttggcgaagatctgaattttcgctggattgatgacggaatcggagaaacggaaaaaaatctgcaaaaacggctcttttcccggggggggagtgccgtgaaacttcgtgaatttcgtcaaaatccgtcaggtttctgctatgaggcggcggttgaatcttataattcactcaaaaatcagggcgaacaacccaaaattcttggtttactcatctataagacgccccgggataacgcaccgtcaaatcattttgccgtggttttaaagaaagacgcttctgattttgttatcgaccccactgtccgtcagtttgatcccgctttacctgaagaggcaacaatattaaccctgagtgaatggaaagcattgatgctcaataacgtcggggtcggcaaggattcggttgttgttctgaatacctttgatacccctttactggctaaactgaatgtggctgaacttcatacggcaaagggtaagtattttcagaattcattaatcagaaaagataatataaatatagtaaaacatggcgacagttttgaaaactctgttattaaggaaattcgtgccacaaaagatacgctgcatcatctggccaggggttcagaagaatatgcttatgccggacaggatctggaaagacttatggcacttaaatcacatttcgtcattttttctccggatgaaataaaagtgactcacctgatcagctccggttttaaaaaacagattttaaaatattccgtttccgcagcagacatacccgcattacgctcaacaggagatgccagaggaataacctcaacgttttcaggaaagcattatattaaaataaaaaaaaatgcctggattcatattgagccatcagaagacgcatctttccggataatcttccggggacaaaaaaaactattgatgacttttgatgaaataaagaaaaaatggcattttcctgaccttatcactaatgctaaaaaccgtgataccgttcattccattgcgttcaaatccggccgggacacccccgggcagcacagttcttcagcgaataaaaacgcggtgccgggcacatccggaaccaaagtcgcacaaccgcatattaatccctatattgctgatgagagtcatcagggggttttgatgattaatcatcatgatctcactgaaaatacccatctggcacaaatagctatgttaggcagccacgatgcggggacgtatgcctttaatggttttaatagtgtgggagcaatatttccttttgcctttaagacacaacagataaatttgaaggcccaggctatggccggtgtcaaatactttgatattcgtatcgctgagagagccgatggttcatttggcttttttcacggctccagcgtgacggggggcaatgccgttactgatgtccgggacttactccgttatgcaaaagaggacagcaaaaatttttatatactcaaatttgtattcaaaaaagatcggataaaaaaaggtaccgcaacaaccccttccgacaaatttttacaacagacgctggaagggtatcatgaaaatatgatcacccggaaagatacgccagccctttctatggcaaaagtgacattattaaataaacataaaaatctggcggtgatggttcataagtatcagggccgtgagccacactggcaatataaacaacaggtgcataccaggtgggctaaccatgccgatgcacacaaaactgcagattttattttagcatttcatggtacacccgcacctgaagataaattaacgattattcagaccaacatgccctatgcttcagttgagaatacagagatcacgttaagtgtgaaaaaatatcttaataaaaatgctgacatcattgccaccgctgtagataaaataccgggcacagggattatcagcggagattatataggtatgcctgtcggtgcatcagagagattcaaaactaaaattaatgctgataatcataagcttctcacgcctgcccggcgctga

SEQ ID NO: 286175 - DNA, 780 bp, Morganella morganii
gtgaaggatatttcatcttatttaacacgttcaaatataaacgaaaatattaaagctgataactattctctttttcggtttcatcatgctcatttttattcggttccgtttgaaaatttcagtatgaatgaaaatgcggcatccggatctttcagccaaataattgcagataatataatatttaataaacgcggcggtatttgctttgagtttgcggcattacttgcaccttttttcagttataccggctttgtgtaccgtacgcggttggccagagtgctgatcccgttgctgacaccggcaacacatcagttatttattatttctgttgcgggggaagagtggatttttgatgttggtttcggtgccagagggccgcgggcacctctgcgtatggtggatggttatgttcacgatcatgcttttttatcatcgaaagtaagccgtcatcctgcatatggctgggtcgtgtctgtcagagaaaacagcaggctcaatgctgactgggaggatatttacgctttccatgatacagaaacgtttccgccggatatcagcatggcgtatttttatacgctccattctcctgaaagcctgcttaatatacataaagtggccagcctgccgacagaaaacggcagaatcagtatccgggatactgtttttaccgaagtgaacggtttgtcttcctgttctgcggatattacggataacgaagaactttcacaactactgtccggaaaattcgggatcagtattcatcctcagcaacgtcagtga

SEQ ID NO: 286176 - DNA, 573 bp, Morganella morganii
atgaaaacgacttatctcatcgttccgggttatacgaattcagggcctgaacactggcagtcctttatggaaagaaaataccgcaatgtttttcgtgtacagcagggggactggaataacccgtcacgggaaatctggatcgacagcctgaatcaggcaattgcgcacacagcaggggatattgttctgctgggtcacagttgcggagcggtaaccgccgcccagtgggctgcacagtattcctgcagcagggttaacgccctgattttagtggcaccggcggatgttgatgccgaaaccgcgataacaccgatccggcagcagagcccgttaccgtccggtttactgaaataccgtgcgatgctgatatacagcaataatgatgaacacctcagtgaagcccgtgcgcagatactggcatcacaatggggatgtgaaacacattttgtccccggtgccgggcattttaataccgcttccggttatggtgcctggcccggcggtgaacgggtgtttgaagactttacgggaaggggattgcaggttgccgaagcagggacgaaatatgtttga

SEQ ID NO: 286177 - DNA, 1182 bp, Morganella morganii
atgtttgaagatattaaaaaattcagtattaccgcccgttattttctgatagccaccttcctgatgggactgagtaacggcatgtttgacgcggtgtataatttttacctcgaagcgcgcggtatcgataaaactgcaacgggatttatttatgcggtggcaatgtcgatgatggcagcagccgtggttcccctgatttatctgagcagaaaaatcgcgcagaaaaaactgcttctgatcgccgcctgtctttattcactgccttttatgctgctgccggtattgtcttcggtgtgggcgagcgccgtcactctcgggctgatcctttccggtatgattgcactattatctctgggtaattcccttatgggttcacatattgatccgaaaagcaggacaacattattcagctggttttttgtttcctatttgggggccgcgatgaccggctccgtcgtggtgagtattgtcacccatttttcggagacagcagcattacgtcattatcagtggatcctgacagcatcatttatttcatctctgctgatgatcggctttcgtgttaaatctgttcaggggatttcagaaccagagaaagataaccggcatttttcaggtataaagagtactgaatggctgaatttcattactctttttattgctgctttgcttcttggcgcctcaattacactggttttcaggtttataaatattgtattccatcttgcctatacgatgaatatcagtgaaatatcacttattatgggggccgataaaatagtcagtattattggtgctgtatttgcccccctcattgtaaaacgattctctttaaagatagcaataatcattattggtatcatgacgtttatctgcctgtacttacagtcattacctatttcagtggtgctgtttatctctctttattttatccggctttttctcaattattgtctgatgcctcttttggatacattagcgattaccggattcgcagagggaaaaacattgttatcaaccagtataaggcagctttcgttttatatgggaagtgcattatctgccattttgtacggcgatttgctggatgcgggtcgctgggaggaaacactggtgatttcgtctgtatttgctttggcgggcgctgttttcatgagcctgatccgtgtaaggaaagaataa

SEQ ID NO: 286178 - DNA, 906 bp, Morganella morganii
atggaagcaggtattatcataccggatagtgaaaatgtcgcttttatgctgaaaaaattatcggcgttatggaaaaaccgggctgccgttaataacgtgcagccggaatatcctgagtctgaatttgattcagccaaacaggatttcagtgaatcattgctgcctttcaggcaacatgatgcctggcgggaagcatcggatgaaattaaaaatacctgcctctcttatgcatgggttatgtacaatcttaagactatctgtatcgaatgcgacattgtgacgccggcctgtgaggacatcataaaatatccgccggttaattcccccaacagagcggggttgcaggatgtgatgtcagaaacattgctggatgaagcgcttcatacaaggatgtcagtaatagcgtgtaattacatctgtgatcagcgtaagcttgagccactcaactatactgactttaaccttataaaatggaaggacaacattctggccgattgcggtgcagaatggcaaaggcgtttaacccgttttgccattgcgtgtgccagtgagacgctgataacggattacctgaaagtcatggctgaggataatggtattcagaaaatatgccatgacgttacccggattcatgctgaggatgaatggagccactcaagtgttttcagttatgttgcgtatgacattgtacgcgatctcagtttaagtgaacgccggtacctgagaaataccatgctgaaaacagcgcatttttttgccgataatgaactcggagcctgggatgcaatctttaagctgacgaaaatgccctgtgccggcgatatcatttctgaaactgaaaacagtaatgaaataaacatttatcttgattcagcagaactgattatctcaagaattggtctctga

SEQ ID NO: 286179 - DNA, 288 bp, Morganella morganii
atgatggattcatatgattcgcagagtattacccttcaggtattaaacagaaatcaaaaaataagcgtggatacaaataaaaccattctggataatttattactgcacaatattttcatcagaaataagtgccgatcaggtatttgcgggagttgtaaattcagactgaaaaacggacatatccgcagtgaaccggatttctgtttatcggtaaaagagaaagaacaacacatacatcttgcctgctgctcttttcctgagagtgataccgttatcgacattctctga

SEQ ID NO: 286180 - DNA, 1263 bp, Morganella morganii
atggaaaataaatatgtactgattgttgatcctttctccagcggtgctgtttttgcaaacagaataagaacgctttttggctatgatgttgttgctcttattacgaatcaggcactgccttcagcggtaatggcgacctttcgtcaggaggattactccgctgttttcagttaccactctcttggcaggacggtacaggatattgagtctgtcattggccgtgcgcctgatttcattgtctgtggttcagagccgggtgtgcttatctttgataaactttgttatcactggggattacgccctaatgtgcctgcgcgcagtactgccagacgggataaatatcttatgcagcaacaacttatgctggatggtgttcgctgcattcctcattatcagtccggtgatttggcgcatatattacactggtgcaaggaaaacccgtttgatgaatatgtgatcaagccggttaactcctttggcactgacagtgttttgttctgtaagaataccgctgaaattacacatgcattccattctctgataaacacaactgactatgccggcaataacaacaccgttgttcttgttgagcagaaaattcatggtactgaatatgtggctgatgcagtcagctgtgacggaaaccattttattgtgaatatattcaggtatgttaagcaggagattaatggtgttcctgtttatcatcaaatggtgactgagccggttgatgaacatccggtattaatcagctacgttaaagaggtactggattccctcggtattcgcaacggcgcatcacataatgaagtgattatgtctgacggcggaccggttttggttgaatccggtgccaggatgcatggcggattaggtccgcagcttgcggaggaatgtaattcgcactctctgattgacctgagtctgctggcccggatagccccccgtgaatttgagaataagatacaaaccccccctgttctgaaaaaatatgcggcagaatactttctcagctcaccgcaatccggtgtcctgaatacactgaatattgagtcacagtgctcatttctcgaaagctacggattttgtgtatgcaaataccgccccggggactggctggaaaaaacaacggatttggtgacatcgtatggcaggattgtgctgtttaattccgataaaacgaaactgattgcggatgtacgggttatcactgaactggaaaaaaagggcatgcttatgacattacgatatccgccggcatga

SEQ ID NO: 286181 - DNA, 933 bp, Morganella morganii
atggctaaaccggaaaccggttatgcaatcattgatgcggcgtcagagccggacattttttcattgctggatgaatgcaatccgccggcgtgctgcctgtacagtgagcccctgcaaccggatatggcggaattagccccgtatctggttgaagtgacagaggatgtcagaaaatggctggatacacgtaatacgccgtggggaatggttgtttatacgacagtgacgatgcgggagttacggcaccatctgcggaaattcaccatggtgatcattcccggtcaggaaaaaccggtcttctggcgtttttatgatccgagaaatgtctgggaaattttagccacgtttgatgactggcggctgcatacgtttctcgggccggtaaccaaactggaaacgaacctgtggggaaacaaaaaatcggaccggtttgaggcacagcggaagggatatccggaacaggcaacgctgcgtggtatgtttatgaagttctctgctgatgactatgccaaaattacgatggctttcgatcaagagctggcaaaaaaaatggcggtttattttttaatgaatgaagcaaacagcagcaataccgtcatgacgttatctatcgttgacataatgcaccgcacattgacggatgatcgttttgattatgatcggttatctgtggggctgtccccgtccggtctcgaaagatgcctcactctgtctcaggatgtcattaattttttcagcgggctatcgtctccggatacggaatcttatctgtatttttgctatgcgttgtcattttaccggataaaacgtttcagtgatattccgccggaatggctgcgtttcttatcggaatcagagggtgaagttaactacagagtctgtcagttactggattctctgtttggtgcgcttcctgatatctataaccaataa

SEQ ID NO: 286182 - DNA, 1626 bp, Morganella morganii
atgtcagcaaaccgtatccgcttcatgatgagcaatgtctgccagacgtgtcatattcccccgcgctgcacactggatgccagtatcacgtttggcagtattcaggatacataccgtcaggaaccctctttttcccggcactattattatctggttaatccggataaaaaaccgtatacccgtattccgctggaattaaccgcaacccccaaacactgcatatcgaacagtaagacctgcccgacagggaatgtcttcacggaagaccgtgccctgttcgcggagtttaacccgtcaagcccgtttacaggctcactgctgtatacaaacaaaatcagcggtttttcgctggaagagcacaatcctgtcgtgatactggagcggctgataacgcgggataacacggagacagacccccgttaccgtcagcattacaccatgcggctgtcggagtgtgacggtaagccgtttctgactctgccccgtgcaatgcagataggtgcggcggtgatgcttccggtgacacatggcctgccggccctgttcgcggagggagcccgcgcactggcggacgcccgtttccatctgattctgaaccgtgagttaatcgcgaaggtcagcataggcctggagtcggagattaatgaaaaaagcacgaaggataggaaaaaagagcagatacggaataacgcaaaggcgggaaaacgcccgacagcaaatggttggacgaagcgcacgaataaataccagatcaaaaaaagtctcacgattgaaggagatatactgtccgttatcggcagtgatcgtattggtcacaataaagaactgaaacaggtctttacgaaggacaaaaacaaactgtcgctgcttgactatatggataccgggtttaacaccatcaataaggccttgcggaaagggaaggatgaggggttgtttccgctggtgagtgcggagtttctttacccgaaactggagatagagggcagcattaaaactgacatgtctgcggagaaccgggtgattaaccggggtgaggttattgtcggttttgcaccattcttcgggtttaaaatcacgctggatttactgacggcactgacacggtttctggggccgtatggtcatgttgtcaataccgcacgaacagtagctgcgactaaagaggaagcggtcaaagcgggagaggatggggcatatgtcattctgaaactggagctgacgttcagtttcgggatacacgggttttatgagtttaaaaccgacgataacggccggttttcgtcagcagaccgcgaagttgagattcacggggaaattaccggagatgcccatattgaggccggagtgaatgtcttcggtgtcagtggttttttcagagtgggtgcggaatttaaatccacgctgaagatgggctttgaccgggacgaaggggatgacctgaccggggtgatttaccatgacgggataaaagctcaggtgtatgtgaaaaccagtaaaggggaggatccggacgtagatgatgattttttggatggtccggtgatagatgggaaatacgaggaatgggtgatttatgaagagctgccgaaagacaagtcggactggaaatttaaactgggttaa

SEQ ID NO: 286183 - DNA, 939 bp, Morganella morganii
atgaagagctgccgaaagacaagtcggactggaaatttaaactgggttaagcgggggctggtattgtccgccggattattgctgggcggtcagctttatgcagaggaaacgatgaaaacaaattacacggtatcatttaacgccaatgatgcgctctgtctggtcaaagtcaatgacatgctggtgacgaacaatggcggtatggggaaagggcagttgaccctggggcagacggtcagttcgtacctgcagaacgggcagaataccctgagtatcgcgatgttacacaagcccgtacatggaggggataaactgccggatgatatgtggtgctcagcgaagatacaggatgcacggcaggacggaaccgatgaatacgtggcggcggtgaagttgattgtccgtgacggcaggattacgccggataccggttattacaccgggcagtatacgtcctttggtgacagcccgagagctgacagaggtgaaaaaatgacccgcgaggtatcacagtcgtttcacgctgcagatttaccggagtggccatgggtcaatgcaaggccggtgactgaagatgatatccctgccgttaaagcattttatgagtcacttcagaatgattttaaacgtcaggatttaccggcaatttaccagaaaaccagagggatgtgggaatcactggccactgaacagggtagcacaccggaaaaaatgtggaaatccatgaattacaaaggctattttgagcggggttacaaagccacaccaatcgactggtcggagtttaaattcagttcgtacatgggagggcggatcttccggtttgaaaaaggctacgtaagatcttctcctctaaaaataagaagtagtgaaaataaatcgttttcacccaccccgtatctgtcaattatcgatggtaaagtcacggtggtaaactaa

SEQ ID NO: 286184 - DNA, 828 bp, Morganella morganii
atgaaaacaaattacacggtatcatttaacgccaatgatgcgctctgtctggtcaaagtcaatgacatgctggtgacggataacggcggtatggggaaagggcagtttaccctggggcagacggtcagttcgtacctgcagaacggacagaataccctgagtattgcgatgttacacaagccggttggtggtggtgataaactgccggatgatatgtggtgctcggcgaagatacaggatgcacggcaggacggaaccgatgaatacgtggcggcggtgaagctgattgtccgtgacggtaagattacgccggataccggttattacaccgggcagtatacgtcctttggtgacagcccgagagcgaacggaagtgaacaaatgacccgcgaggtgtcacagacgtttcacgcggcgggtttaccggtatggtcatgggttaatgcaaggccggtgactgaagatgatatccctgctgttaaagcgttttatgaggcgttacacaatgacatgaaacgtcaggatttaccggcaatttaccagaaaaccagagggatgtgggaatcactggctgcagagcagggcagtacaccggaaaaaatgtggaaatcaatggattacaaagggtattttgagcagggctacaaagctgttcccattgactggtcgggatttgaattcagctcatacatggacggacggattttccgctttgagaaagggtatggcagagtgccgccgttaaagataaaaaaccgtgagggtaaagtattcatactcaccccgtacctgtcaattatcgacggtaaagtcacggtggtaaactaa

SEQ ID NO: 286185 - DNA, 936 bp, Morganella morganii
atgaattaccgaaagataaatctgaccggaagtttacgccgggttcagcaggggctgatattgtccgccggattattactgagcgctcagcttcacgcagaggaagcaatgaaaacaaattacacggtatcatttaacgccaacgatgccctttgtcttgtcaaagttaatgatatgctggttactgacaatggcggtatgtggaaaggacagtttaccctggggcaaactgtcagctcttatctgcagaatggtgaaaacacccttagtatcgctatgttgcataagacagctgatggtaattatgaattgcaggataatatgtggtgctcggccaaaatccaggatgtgaggcatggcgggagtaatgagtatctcgctgcggtcaaactgattgttaaggatggaaggattattccggataccacctaccattccggacgacacacgtcctttggtgacagcccgagagctaatggattcgaaaaacggttttatgaagtgtcacagacattttatgcagcagatttgccagcgtggccatgggttaatgcaaggccggtgacagaaagcgatattccggtcatagaagcattttatgagtcacttcaaaatgattttaaacgtcgggatttaccggcgatttatcagaaaaccaaaggtatgtgggaatccttggcagctgaacagggcagcacgccggaactgatgtgggaatcgatggattacaaagggtattttgcccggggctataaagctgtccctatcgactggacggggtttaaattaaacacatatatgggtgggcgaatcttccggtttgaaatagggtacggaaggatgtcacctcttgagataaaaaataaaactgacgagatattcatactcaccccgtacctgtcaattatcgacggtaaagtcacggtggtaaactaa

SEQ ID NO: 286186 - DNA, 150 bp, Morganella morganii
atggcacaggcaaaagaacgcaatattgaaatccggacttcgattgatcccaggtacctcttttgtgaggtcaaaactaacggggtgccggggtatgataaccgggccagtgcgatggacggggaaataacagcatcagaatggagataa

SEQ ID NO: 286187 - DNA, 447 bp, Morganella morganii
atgaaactgcgtgttattccaatgttagtgtcttcagtattactggtttcagtcccggttcaggctggcgaattttcgtcacatcatccttatctggccggttcatcgttctacagtgcaccgagcctgctgagttctgccgttatcagcggaattatactattaccggtgcttatcccggcacagttagtggtgatttctgttcagcacagcgaaaaagataaaaccacgactattaccggaacaacacaaaataatgaaaaggcagccctgctcgttgcgactgaaaaattagaaaataacgccataaatcccggggatgttatgactctggaacccgctgaaacaggaaccggggcctatctgaaaaaagacggcactattatttcgcatatggtgagtccggctgatgaacagctgttatatcccggggaacggatggaataa

SEQ ID NO: 286188 - DNA, 1647 bp, Morganella morganii
atgcttgagcgattgaaaataaccaaaatactgattgcaaccttattaatattttgtatattacaaatactaacgagtgctttatatcttaacacaatggggaaaaacaccacctcattcaatcaattacataatcttacttcacggggaaatctgcaggccaatgtttggtcagaattattaagtacacggctggctctcagtcgtacacttctccaaatgaaaaataatgatggtatattaaacgaaaatgcgattcagttattaaataatgcagccgaacatataaaaaacgctgaaaataattgggcgcaatttcattctgtgccaagtgtcatgagtacaaaaagacaagagctggaggatgcctataacaactaccatgaaaccctcactcaattaatgcaatttgtaagagataatgatttaaactcagcaatgtctcaggatacacaagccagtcaggatgcttatctgaagcaatacaccatttatagccgggacaataacaattttaccgaagacgtagtaaaagaagataaagagtccgatgctcagtcaaaatggatactgactaccgtactgagcatgatactgcttattgtgattggtatatggttaagcattaagcgcatattgattgttccgttgaacaatgtactggataacatccggcatattgccgggggagacctgaccagaaccattgatattcgcggctgtgatgaggtgaataaactgactgagactctgcgctatatgcagggggaactggcggggacagtcagtaatgtccgtgacggggttaatgcgatttacaacggtgccagtgagatcgctgccggtaataacgatctgtcttcccggactgaacagcaggctgcctctcttgaggaaacggctgccagcatggaagaactgaccgccaccgtgcgccagaacgctgataatgcccgtcaggccagtcatctggcgttaaccgcttctgagactgcagagcgcggcgggaaagtggtagatgatgttgtggataccatgcgtggcatcggcgacagctcgaagaaaattgccgatatcatcagtgtgatcgacggtattgctttccagaccaatattctggcgctgaatgccgccgtggaagccgcccgtgccggtgagcagggacgcggatttgcggttgtcgccggtgaggtccgtaatctggctcagcgcagtgcgcaggctgcgagggaaatcaaaaccctgatcgaggattcggtcggcagagtcgataccggtgcggtactggttgagcgtgccggtgagacgatgaatgaaattgtcagcgccgtcacccgtgtcaccgatattatgagtgagatagcgtccgcctcagatgaacaaagccgcgggattgaccagattggtgtggcggtgacagaaatggacaaagtcacccagcagaatgcggcgttagttgagcaatctgcagcagcggctgcatcactggaagatcaggcaggcaaactgactcaggcggtgtctgtatttcatatacagtccggagaactgaagaacaacattaaaaccagtactgtagtaccgttacagcgacccgatattaaaaaaccgacagataataccgaggatgcctgggaagcattttaa

SEQ ID NO: 286189 - DNA, 531 bp, Morganella morganii
atggataaagtcagctatttgattgatattttggaacaggcgattccaaacctgaatacccaaatactcagtaataatttaccgaagacagaaaagcaggaagatgtactggattggttatatcaatccctttcatcccaaagattaatggattatgttgaatggactgagtattttggtgagtaccctgatatagggctgctggatacgctgtctttatctgagtcacctaatgagttcatactggctgaactcagcgaggttgactgggataccgttaatattgatccttatatgcttccttacgaactgccttatttagagcacatcaatacttttttgaccgaagaagggttacggttagttgatttggctgattttgaaaatgcttatattctctgtgtcagaaatgatgaagagattattaagaaacttaatgaagcattaaatgcctttgatatggggatcaatgcgcgaccaccgatgaacagaaaagacacggagagttatattcgttctcttattgtataa

SEQ ID NO: 286190 - DNA, 564 bp, Morganella morganii
gtggctaaaaatgaaattctgattattgaatcaagaagtgctaaagatatttacgatgacagatatgaaggtgcgactcttaaagaagttttgaaactgcagggaatatcagcaaagcaccttgaagtgatcaacaaagcgtactttgaaaaagccattaaatatgcagcgaatgaacacataaaatatgtgcattttagcgggcatggttctgaagacgggattgaattaacaaacgactttattacctggaaagaactcgatcaaattgcatggccacacctgaaagatacttgtctgtgcttttcgagttgtgatattgctaaaggcgtggaagaaatatttgaatatcataagtcattctgtaacgcggtgattgctccaacgcgaaaaattacgtggggggaaggcctggtggcattcagcgcgttgtaccacagagccttatcatgttcaaccagctcaaatcaggatgtgagagttctgaatcatattgttggtgcaggtacatttagttttattgcttctgctttcagatccaccacctactcggtaggccaataa

SEQ ID NO: 286191 - DNA, 150 bp, Morganella morganii
atgtcattgcaggaaaacttaattaaaggcgggcagtccggacgtacagctaaggagaaacgatcacacacccagaccgggggtgcaaatgagggtataaatataatcacatcaaaaattaaatttaaaaaccaacaagataagaaataa

SEQ ID NO: 286192 - DNA, 126 bp, Morganella morganii
atgacaatggcatccctgcataagcagcttgatagggtgctcacactgaatgattatgatgtattccctggctataccgattacatcaaagaaaaagccttagaccacgcaaggcaagaattttga

SEQ ID NO: 286193 - DNA, 222 bp, Morganella morganii
atgagtaatgaaagtaactttagtgtggttgtttttcagcaaggtcaagaattaattgacttcaagatccatcaggaatcacaggaaatatgggcaaccacaaaagaaatagctgcactatacggtgttgacaaagacaccattgcgtatcacataaataacatttatcgcgatgaagaattaagtgaagcctcaactaccgaagattttcaggtagtttaa

SEQ ID NO: 286194 - DNA, 342 bp, Morganella morganii
atggcatttaatgacattgaagtcacacaaattaagcaatgtatgaactatttcatgggaaagcgccgcccaccgaaacatattcgggatgagcacgatcttcagtatcgtattgaagacgatagcgtaatcatttttgaagtccggcaattggcttggagtactggtagagccgaagaaatgctggcaaaaataacaattaacagagtcggtaattcatggtcattgttctggtctactgaagataacgagtggagacactacgacggcaagatgataggcagcttttcagacgcaataaaaattattgatgaagatgcagatcatagattcttcggctaa

SEQ ID NO: 286195 - DNA, 255 bp, Morganella morganii
atgaataaccgattatttaaaaaagtcatggctgcctgtaccgccagtgcgattgctggtgcgttggtgctgatccccgcatatgagggtgttgagtacaaaccttaccgtgatgtggccggagttcttaccgtatgttacggtcataccggcagcgatattcagcccggtaagctgtatacggatgctgagtgtaaggcgctgccgggtaacccgctggacggtgtgatccactatgagtgtgaaacgccatga

SEQ ID NO: 286196 - DNA, 378 bp, Morganella morganii
atgacagagatagaaagtaactggaaaaatctcatatccacagcaaataaaaatatcagagaaaacaatgataccgttgctgtcagagaaattgaggtcagagataaaacagcacaggaagataaggcgagaaactctctgacatttcattttcattggggattctttgcgcttattgtcgggtgttttttattcgttttttggtataacagtcatgcggttgaatggataacagccttaaattctcaggggctttctgatacagctgggtcggtcaggcttcttgagctggataaagtgttgtcagtaattattggtactctcggaacatcgctcggctttatcatcgggtattatttcaaagagaagaaaagttaa

SEQ ID NO: 286197 - DNA, 246 bp, Morganella morganii
gtgtacgatgaagagcagagtgaattacagggggcgccggtattcaaagactgcccgaaatgttcggggcgcgggtataagcgtgtgccgtcatcagtagcttatctggcgataaagtatctggtagcggatttaaacgaaagaacatggcgcagaaactggaaactgttttacgaaggtctgacggagaaatgtcacattgaggaaagccatgctgaatcatggtttgaactgttaacgcgttga

SEQ ID NO: 286198 - DNA, 636 bp, Morganella morganii
atgaatgttaccagtttgagggttaataacgtcagaaaaacagttgagataccaaacaattattttctgattagtgatggtgacagtgacttttattgtaaaactcatcatggttatcagttcggagcagtattaacgaaaatagagcatcctttttttgttgcggtgaatgataaagttgaagtgatcagtaatgtcgacaataatcagataatcggtctttataatcatactgataaatccgcctatctgttcaggtcggacagacatattgattacagtgaaatagcgccgaaatcgatattagcatcagcaatacttatgttttttatcatatttataccttttctgataatattattatatttgggggcagggtttaccggagttattctttcattttttatgagtgtttctcttcctgtcattatttgttttttattatttttaaaaagaaaacgatacgctaagcgaaaaaatccggacaagtttgcactggtggaaaactatatgcaatatcgtttagacctgaataataataaaagcagtatcaatattgtatataacaccggaggtctcagcagatttaatacgactgcatcagataataaaaagatgaggagaaaattaacgtaa

SEQ ID NO: 286199 - DNA, 702 bp, Morganella morganii
atgaaaaaaataatatattcatttgcttgttcggtcttttttttgcttgtcagcaatgttaatgcaagcgttattatgactggaacaagaattgtttttccgtccgtttcgactgaaaaaattattcagttcaaaaatccggactcacaaccctatgtaattcagcttcagttaacaactgctgataatacccctgatccttcggctccttttgtattagtgccaccggtattcagaatggaaccacacaccggacaatctgtcagacttatagccaatggaaccggacgtttacctgaaaataaagaatctgttttttatcttaattttactcaattacccgcattgaaggcaacagagcaaaacagattagtcattgcagtaaccagcagagttaaaatcttttaccgtccggactccctgaaaggtcaggtaactgatgcttatcagtcagttaacttcagtcttaataacggaattttaacagtacataatcctactggtttttatatttctatccggaaagcagtgctgaaaatcggaaacgaatccgtagtgatcagtgaatcggatatgttatcaccccagtcaacagtacaatggcgggtccctgccaaaataaaaacgttaaaagatgcactgttagaaatgaccatggtaaatgattatggtactgattacacaaaagaaagatatttgtaa

SEQ ID NO: 286200 - DNA, 558 bp, Morganella morganii
atgaaaaataaattaaataagctgatttatatcagtgcgttacttacactaccttgtgctgcgttagccgcaccaactgttacttttgaaggtgaagttacttcccagacatgtgctgtcgatatcaatggacaaactgattctgttgttcttctgcccactgtagctattactgatttcggagcctctctggcctccgggcaaactgcaggtctgacaccgtttacagtatccctgaccgggtgtcaggctccctcggcagatactgatattacgacaaaatttttaggctataatgttgacagttctacaggggtattaggcaatacctatactgggagtgatgcagccagcggatttggtatccagctattcagtgaagcggccggaacgactgctattaccttaaatggagtaacgtcagtacccggattggtattaaagaaagataagacatctgctgattatcagtttgctgcaaaatactactctctgggtacttctggtaccgcaggtaaaatcacagctgttgctgaatataccgtgagttatctttaa

SEQ ID NO: 286201 - DNA, 675 bp, Morganella morganii
atgattaatttaattaagatagttacacttatcttttcatgcatttttgtcagtaacagcatggcagatatatatctgggttcaacccgtgttgttatcagtgatggtaaaaatgaaggaagtgtaagtacacataacaaggataataaaaactatcttatccaaagctggattctggatgagaatgataaagaaagtaatgaattcgtaataacaccaccattatttaaactggaaggtaatacatcaagcagcctgcgggttatgatggtcggaaatctgccggcggatcgggagtcactgtattggctgaatgtgaaatttattccgtcaacggataaaaacctgaaagtaaacaaattgacatttgcggttaacaacagaattaaaataatttacagaccaaaatcattatccttttctgattcggtggatgtctttaaaaaagtgactgtcagatatgttgacggaaagctggaatttaaaaatccgacaaaatattttattaacatcagtgaagttaaggctaatgatgttgttctggaatccccgagttatatccgtccggagtcgtcagagttcattccgttaaaaaataataaaaagccatccgtggtaaactacacatttattgatgatttagggaagttgaatctatttaaggccgatttgtga

SEQ ID NO: 286202 - DNA, 519 bp, Morganella morganii
atgaaacttaaatatgctgttttaccagctgctcttgctttgttattcagtgcttcatcatttgcggaagacacaggtacaatttactttaccggaaagattaacgcatctacctgtaaagttaataatggtaacaaagattcttacattgatatgggtacgcatgatgcgagcgtattcaagactattggtacagaaatccaaggcagcgaagacgttgtccttgatctgacggattgtacaggtaatacagccaatctggcattaacggctaacgatcgtaatggcccggctgaaattaatctgaaacaaaccgcgaccacggctaaaggcctggttattgttttaaaagataaagtaacaaatgctaatcgccgcgttgatggtttcatcacgtcacaggcaattaccagcggtaaggctaaatttgaatatgccccatatctggtcagcactgcaaatgtagtggatgcaggtactattgatgcatcagtagattatactattacgtataactaa

SEQ ID NO: 286203 - DNA, 516 bp, Morganella morganii
gtgtgtggcattcgccacggtggtaccgtcctgtttcactgcagactgtaccgcctggttaccgctgctgacggccacgccgttgatcatcagaccgatatcagaggtggtgcccgatacctgcccggcattgatcagtgtctgcatgatattgccgcgatcctgctccagcagagacagatccggtgcaatgaccggtgtttcattgttccactccgctgtgccggatacagagacggttcctttgttcagcgccagcgtatcagcattgatgataccggtggctttggactgcggtgcgccgccctcaaactccagggtaccgccatcgacggtcaggttgtgcagcgtgctgtcctgctgtccggcgcggacagtgctgtccgtcccggcggtcagcgtggcgttgctcagcgcggcggtattaccggcagtcagatcgaaggtggtgtttttcaggctgacattcccggcaaacgcagagccggttttgctccggaaatcaaaggtatctga

SEQ ID NO: 286204 - DNA, 228 bp, Morganella morganii
atggcttcaggcattgcgggtctgttctttactatcccccggaagcacctctcaggattcgtggttgaatttgacgaaaatgcagtgagttgcagcgctgaaggcgggcagggagtgagagcctggcatatatctccgctcatttccgccagagtgtcgacttcaaaagcgggagggtgttgtaattcagcggtgttttcagcgggctctgccccggacgggagatga

SEQ ID NO: 286205 - DNA, 261 bp, Morganella morganii
atgacctgtcatatttcccagcgcagtccaatagtagcctgcacggataaaaatagcagccataaaggccggcactttcagcacattgcgttgcgggggcccttcctctttcatccggtgccttgcgacaatggttatcaccgccagggcggtaaacaggtggatggacgtgtgattttcgtcgttacccaaaaacggttgcaggaatgttccatccgtccagccggtaacggtatctctgataatcgctgccagccgtga

SEQ ID NO: 286206 - DNA, 384 bp, Morganella morganii
gtgaaactcggcgagtgggtggtggtggcagtggttgtaatgatgatggtcgcaactgttagctggcaggcaacacggattgataaactgaaagctgataatgcaagtctgaatggccagttgtcagcccggcaggttgtattcgatacacaccttaaactcacggcggtaatgaatggaatatcacagagtaacgtcagccagcgggagcagacggcgaaagatacggaagaagttaaaaccattatcaagaccgtttttgtgggtaataactgcgctgatgcttatgtcccctctggctatactgacgagctgcgcagattcagaaacggtgaagtacataccggtaacggcaccaccaatgccaccacaactgaccgctga

SEQ ID NO: 286207 - DNA, 408 bp, Morganella morganii
atgactgaaccagcacgcggcgagcgcaacaaaaatcctggaaatattcgtcatggcggatcaaagtggcaggggctgtcagcaacacagactgataacagcttttgccagtttgtatctcctgaatatggtatccgagcgatatataaagtactccagacttaccagcgtgaccgtaacttaaacacggcggcgtcaatcatcaaccggtacgctccaccgaatgaaaataacacggcaggttatatcaaacgtgccgcttctgatatcggcgtaggtattaacgacccgattaacaccaaagacaaaaagaccggtattgcactggctactgcgattgtcggcgttgagcttggttatcagccgtattcaccagatgtgttcgaaagagcctgggggctgttgtga

SEQ ID NO: 286208 - DNA, 516 bp, Morganella morganii
atgcagataaagtcaatttttatgtttttgggcatgtttctgcttaatggatgcagtgtcaaagtgcccaaagatataactccagttaaaccttttgatttatctcattacttaggtgattggtatgaaattgccaggatagataatcgttttgaaaatggcttaagcaaagttacagctaactattctcttcgtgatgatggtggtgtgaaggttatcaacaggggctgggatgcgagtaacaataaatggaaagagagtaccggaaaggcctattttgttaactcaaccgatacaggggcgttaaaggtatctttcttcgggcctttctatggaggttacaatattattaagcttgatgataactatcagtactcactggttgttggccccgataaagattatctgtgggtattatcacgtacgccagctatgccgacagagttgttaaatgagtatctcagctttgctggtgaacatggttttgacagagaaaaaatacttatatttcaataa

SEQ ID NO: 286209 - DNA, 351 bp, Morganella morganii
atgtctaataatccactgcttacaataagacgccgtaacttcattaactatcttcttgctcacattaaatcaaacggaaagaaaccggagtttaaagcaaagattgaagggaaaacaataatcgtaaagttaaacaaagacaatatggaaaagttcttccgtgatgtctatgaagagcaggattgtcgccagcgtaacaaatacagcgaaaatgaaatatatgaatcatatagcctttattacaccgcaagtggtcgcattactgaacttggtgaatacttcgttaaatacataacgaaacacatgcctgattatttaaataacagggagtttaaacattgtgaactttaa

SEQ ID NO: 286210 - DNA, 471 bp, Morganella morganii
atgtttgggttattcaaaaagaaaaatcctgaacctaggcgttatgatgtcacacaagcagaatttgatgtcaccgcattgactgctaatttgatacagaagcaaactgatttctatcgctttcaaaaggaacaaagagaaagaaagaaacattcgcctctattatcgtcggagtatattaccccttggattattggatattgtgtcggcatgcttgatgcaattgctcagacggaggctaataacatggtatatacaagtgagatgcaacagcttttattttcagtggtatttggtgaggagaatgtaatgaatgcgtttagcatgtatatagcctgtaatgaggttgagtcagaatctccatttagtgcaatgaatgaggagtattcttcaggtttaattaaatcttttaatgaggtttgtaacaatgaaacaatagtagggctattaatacacttacagatgtcatga

SEQ ID NO: 286211 - DNA, 150 bp, Morganella morganii; identical to SEQ ID NO: 285874

SEQ ID NO: 286212 - DNA, 519 bp, Morganella morganii
atgacgggcttcgcgggcttctttttcccgtgccattcgtgcctgtttggcttcaaagcggattttggcatcggcagcgcgttgggcttcttcgcggatctcaatgacctgtgctttttcctgacggtaatactgcaccagcgggatgttgctcgggcagacccaggcacaggcaccgcattcgatgcagtcaaacagatggtgttgctctgctttttcgtgttcgttacctttactgaaccagtagagctgctgcggcagcaatccggccggacaggcatccgcacagtggctgcagcggatacaggcttcttccggtgcagcaggctccatctcatttgtggtcggtgccagaatgcagttacagattttcaccaccggcacatccagatccggcagggtaaagcccatcagcgggccacccatcacaaccatttgttcatgctgcggatggaaatcagcttgttgcagcaggaaacggaccggtgtaccgagtcgtgtccagaagttgcccggtga

SEQ ID NO: 286213 - DNA, 318 bp, Morganella morganii
atgaatgatatcaataatttattttattttggctgggttgaactaatattattttatatactatccatgctttttttattcttcatatataaattaaattgttacatatcaaaaaaaaacaagtatattcttaatctaatggggatgtacttatcaattggatttggagttgtgttttttttgatatttgggatcggtagaggcttccctataggagagttatttattcacaatggaaatgaaacaacaataaggattagtagctttatactggcctttatatgcctgtttacttacccaaaagaaaataaaaaatga

SEQ ID NO: 286214 - DNA, 1650 bp, Morganella morganii
atgttagaaaaagtaaaaatatcaacaggaatgctctttatcctgatcgcgtttcttttgatacagcttatatcatcattttattttttcaggtttataaactcacagaatgaaataaataatacgatgaccgttcagtcagaaaaaacccatgtactcgaccgtgtctggattggttttttagagaaccgatcattacttaatattatatccaaaggtgtaatgaaaggcgtttatgaaaatgacgaacaaaagaacaaacgacttgattatgctgaagaacaagtagaaaaaacaaaatcagattggtcagaatttaaattaatgccgacaaaatttggtgaagaccttgaaagcaaaatggatgctgcttttaatgaatatcatggtgcccagcttgagctgattcattatttacgcaacaatagattagatgattttgataaccaacctaccagtgactatcagaatacattcgggaaattatatgagaattattatgctgaagatgttatttatcatgataaccttattcagaatagtaaaagtaatgaaacactgacaatatggataacaatattactgcttgtcagcatttgtattactatcattttagtctggtttggtattcgtcgtttacttattttacctatgaatcacttcctggaaagtattcagcatattgcaaaaggtaatctgataagaccgattgatgtgacagggagttatgaaatcaaaaaactgtctgaaacattgcgtgacatgcagaacgagctttccaaaacggtcagtgatgtccgtgatggtgccaatgcgatttacagcggtgccagtgagatcgctgccggtaataacgacctctcttcgcggactgaacagcaggctgcatctcttgaagaaaccgctgccagcatggaagagctgaccgccactgtgcgtcagaatgctgataacgcccgtcaggccagtcagctggcgttaaccgcctccgagaccgcagagcgcggcgggaaagtggtggatgatgttgtggataccatgcgcggcatcggcgacagctcgaagaaaatcgccgatatcatcagtgtgattgacggtatcgccttccagactaacattctggcactgaatgccgccgtggaagctgcccgtgccggtgagcagggccgcggatttgccgttgtcgccggtgaggtgcgtaacctggctcagcgcagtgcgcaggccgcccgggaaatcaaaaccctgatcgaagattcagtcggcagagtcgatgccggagctgtactggttgagcgcgccggtgaaacgatggatgaaattgtcagcgctgtcacccgggtcaccgatattatgagtgagatagcctctgcctcggatgaacagagccgcgggattgaccaggtgggtgtggcagtgacggaaatggacagggtcacccagcagaatgcggcattagttgagcaatcagccgcagcggctgcgtcacttgaagagcaggccagcagactgactcaggcggtgtctgtatttcacatacaggccggagaactgaagaacagtacccaaaccagcattatggcgccgttacagcgacctgtgcttaaaaaatccgctgataatgccgatgataactgggaaacattttaa

SEQ ID NO: 286215 - DNA, 1044 bp, Morganella morganii
  misc_feature (1006)..(1015): n is a, c, g, or t
atgaaagccaccgaagcgaaactattagaatttcttaaaaaatcgcctcaatttgttattccaatttatcagcgcacttactcttggaaagaaaaagagtgccaacaattgtgggatgacatcattctcagcggcaaggatgatgatattaatgcccattttatgggatctgttgtctatgttgaaaaaggtctgtattccgtctcatcacaaacaccgcttttggtgattgacggtcagcaacgcttaacaacaataacccttttaattgctgcattaaccgaagccattggtgatcaagaaccattggaagatttcagccaagcaaaattaaaaggttattacttaactaacccacttgaaagcggcgagaaattttacaagctggtattgtcacaaaccgacgatctgtcgttaaaagccatcatcaaagggttggagcagccgaacgagagatcaatacgagtagttgaaaattttgagttttttaaatcaaaactgcaaaaaatgggcgatttaaaaccggtatgcagcggcttagctaagttgatggtggtcgatatttcattaaatcgcgaacaagataaccctcagctcatttttgagagcatgaactcaacgggcaaagaactgagccaggcagatctgatccgtaactacatactgatgggcctggagccagagcgtcagacacacctgtatacacagtactggcggccaatggagttagcgtttggacaacaggcatatagtgactactttgacagctttatgcgtcacttccttaccgttaaaacacgtgagatccccaaaattggcgatgtgtatgacgtgtttaaggaatattcaagacgaccagtagttgcaagcaaaggtgtagatgaactagttcaggaaatcagaaactatgcggtgtatttctgcgctttcgccttaggcaaagagaaggacgaacagttaaaactggcatttaaagacttacgagaactgaaagttgatgtggctnnnnnnnnnngtattcagactactcgtctgaactcttga

SEQ ID NO: 286216 - DNA, 942 bp, Morganella morganii
atgggccttaaaaaggatcgctacctcgaaagcatacaagcttccttcctgttattaccatcctaccgccgttttccaaacgatgaggaattccacaggaaaattcaaaccaaagatatctacaacttccgaaacaaaagctactggttacggcggatggaaaactttggccgtaaagaacgcgttttggtcgatgattacaccattgagcacatcatgccgcaggcaggcaataacccagaaaaattgccacaggtgtggcgagctgagttaggcgatgactggcaacgcatttgggaaacttaccgtcataccctcggaaacttaaccttaacggggtacaattcggaatacagcaacagtgcgtttatcgccaagtgtgaacatgaatttggtttcaaattcagccctctcaagatgaacgaggggattgcggccgatcctatatggaacgaagatgcaataacaaaacgtgctaacagactggccgataaggcaactaaggtatgggtagatgtcgcattacccaatgatattatcgacgcctacagaccaacaaatgaccaaacaagtgaatacagtttggcagatcatccacatttgatgacggataaaatggctgaaatttatcaggttttccgtaaatcagtgttggatctggacccatgcgtaactgaagaagtgaaaaaactctatgtcgcctttaaagccgagaccaactttgtcgatgtggtaccacaggcgaaacgcctgcgtttatcgttgaacatgccgtttgccgagatagatgacccccgtggtctctgtaaagatgtaaccaatctagggcgttggggtaacggtgatgttgaggtaggcctcgataatccagacgatctatctcatgtcatggctttggttactcaagcattcgaacgccaaatgggatcagacactatctga

SEQ ID NO: 286217 - DNA, 450 bp, Morganella morganii
  misc_feature (437)..(446): n is a, c, g, or t
atgaaaaaatatgatcaggttgataaggcttttgattttttagtaggaaaggaaaatcggcaagaattttttactattgctgagttagcagtggctactggttggaaagttcagacatgtaaaacatatccaactaaaagatggagtaaatatatatcaagggatggcgctcaatataccacacttggattaaaatacttaagtaaggaagacttcagaaatcttcatagtcagaagagcgttgaaccggccaaaagtgagcgaagcattaatttaaaaaaagcaagagagttcgctatgcttgctgtttctgtttacaataatccatttacagagtttaaaactcatggttttatagttaatgtggttatagcatatacatcattatttcatgctatattcgcaaaaagaggtgttgattatttttacttgaatgnnnnnnnnnngtga

SEQ ID NO: 286218 - DNA, 477 bp, Morganella morganii
atgatttccggtgtaactgatgatgcgcttttttatgaagtgatcaaccttcgcagcagcgaaaaatacggcggtagtatcgacgttgatacggtgctgtggtggctgggtaaaagtaaaaatgccaggggaaaaattaccaacagcacaaaaatgattgatctgcctgttgccctgaccagacttaattcgtttgcctttgagttctgtgaagaacgcgtgcaggtatggggtaacggaagtaatttcgataatgtaatcctgcctactgcatacgaaaactgtgagataaatccattctggaggcactggaatgaccgggatgtgcgcaccattgtcgaacttggtcgcaatgccggcatcgacccgaaaaaagattttccgtttgttggtgaagcacacaatgcactggatgatgcattgcaccaggtgaattacgtggtcgcaatccaccagcatttatttaaaaacctctaa

SEQ ID NO: 286219 - DNA, 294 bp, Morganella morganii; identical to SEQ ID NO: 286010

SEQ ID NO: 286220 - DNA, 315 bp, Morganella morganii
atgaaaatgaaagaagatccgagcgtttgggagctgatacagaatctgtatgacacctacagagaacagggtattagtgctgcacttgccgggggtatggctgctctccgtagtatgtacaacggcggagggtggaaaaaaacctctattgatgggctgatgtgtgcggcatttggctggttcgtgaaagacctgctgttgttttttggtctgaaccaggacttgtcatatttagccagtgtttacatcggttacatcggctcagatgcggtaatacgtgtaattaaaaacagaactggagtaaagcatgactga

SEQ ID NO: 286221 - DNA, 198 bp, Morganella morganii
atgagtgacgaacgagaactgatttacagtgaagtatgcagagtaacaggcagagcagctattatgttactggattcacggcaaatgataacgaaaggaaatatcaggcaattgctgtactcccataaagaacaagaagttgacagatttatgaatgaggtttatgaggttgctatcgacctgatgagcgataactga

SEQ ID NO: 286222 - DNA, 924 bp, Morganella morganii
atgacccgtttatatactgcaaccaggcatcctgagcagctggagacaacattattaaccggggaaagtcacacctatgatgaccctttagccccccgtaaactggtgtttttggatgctgtgaatgagcagcgttgtgtgattaattcaccgcaacgtaacagtcagttaaccaacataattcctttttttatcgctatcctgattatggcttgttatacaatgtttaactttattgatagccatatggagtataaaaaatactttcagcatcgagttcaagaggtggaaaaaaagtatggtgataagccaggtttagatgaagcgacattaaggtatgttaagctctatcaaccatacttcggtagtcgagatgtaagttattatgattatattttagcgtataattcaggcgtgtttttcacgaatagccaatatagtaaatatcttgttataggctggctgatcctcttcccgggggcgttatggttatttgggtatctggctttctttgttcctccggcacaccttattgccgacagacaacggggtattctgtacagctacggtatgggaaaaatatatgtaacccgttatgaagaggcgcaaatcgggttagccggtaaaatgcccgctatcaaactttatggtcttgaccagaaatccggtgagctgaaaataattctcttccggccgaatgtttcgcattattcggcttttctgaccagtacggacagcgaaaaccaccgttttattacattcctcaatgcctatatgcagcagggacgggatgctgtttcagcctcggattatcaggcacgtaaaccattcctgtcatttggtaaaaatccgcttcccgacgattttgaacaacaggttacacaaattctggcaaaatgtgatgagagagataatcgtaaatga

SEQ ID NO: 286223 - DNA, 1608 bp, Morganella morganii
atggttttcaatataagtatcccgacagataatgacgttataacaataaatatttctccgggggactcagttatttttgttggtgcaaatggaacaggaaaaacccggctggcgacattaattgaaaataccttagatttaaatgctcacagagtttcagcacatagagcacttaatttaaatcctctggtacctaaaataagtgaaagtgaagctctgcagggtttacgtactggatatgaaggtggtacaaacccatttcggacaagagatagaggacgatggaaggataaaggagctataacactattaaatgattttgattttttgattcaatcattatttgcagaacaatctaataaatcacgggaaacccataaaaaagttcgggcaggtgataaaagcgatgcagaaccaacaaagtttgaaatccttaccttgatatggcaaaaattacttccacatagaaaattgcatatatcgggcgataatattttagtttcagcgacaggaagtgatagtcaatactccgccagtgaaatgagtgatggtgaaagggctgttttctatatgctgggtcaggctttggttgcagctcctgattctttactgatttttgatgagccggaattacacatccatccttcaataatgtcaaaattatgggacgaaattgaagccgccaggccggactgtgcatttgtattcatcacacatgatttggcattttcatcgtctcgtattgcagataaatatgtattaaaaacatatgacccagcacccttttgggaaattgaaaaagtaccccaaaattctggttttggcgaagagttaacaacgttgattttaggcagccgtaaaccaattttgtttgtggaggggaatgataatagcttagatgttgctatataccgaagctgttttgataactggactgttattccaaaaggctcttgtggtgatgttattcattcagtagttacaatgaaggaaaatgaagatttcacaagggtaacttgttatggaatagttgatgccgatgtctatagtcaggaagataaagattatttcttaagtttgaatgttcatgttttacctgtctctgaaatagaaaatttaatattgattccggagataagtaaatctatagctgaatatgaagggttttcaggtagtgatttagaagaaaaattatcacagttaaaagaagctgtttttaaggaaattatatcagaggatgatatagaaaaagttcttgtcagatattgtcaaagaataatagatcgtattctgaaaaaaattgatttaagcaaatcaaaaaatatttcagagttaataaataattataatgaaaaagttatccctctgaatattgaaagtatagctgaagaactggcaaaaaaaatcagaaaagcagttgagacgaaagatttacatttattactcactgtttatgataataagggaatgataagtttagctgcatctcatttgaaaggatgcagattaacaacgtttgagagttggctggtaagaacactgaagtgtaatacacattctgatatccgaagaaaaattatggatgttctgccaaccctgccgatgtag

SEQ ID NO: 286224 - DNA, 504 bp, Morganella morganii
atgaatattggtgaattactcgaaatcaaagacttcactattttatcggaagaagaacttacaaatatatccatctataatggcgcagcctcacagcgtattattgaaggtctcagcgttgttggtactttaatgtttcagcatgcatgtagtgataatgatacatttaataaggacacaatcagaaaactgagtttactgattcagtacaccacaatgattgcagccacattaaatgaaaactcaatacaatccgaaaaagagctacaaagccgctcagccccccccctgcacactcaggagccggagggacagagaaataaaattatgggtgttattggcgatatcaataatgttgagttatcactacagcaacttaaaagtgacttatacgaaaacgaaccagagaaagaaataatattcgcacagcttgatttagtgacatctaagttaagtggttcattagaccaactggaaaaaatgacggacaacaatcatgactaa

SEQ ID NO: 286225 - DNA, 1041 bp, Morganella morganii
atgaataaaatttatattgttgctgaaattggatgtaatcataacggtgactatgatctcgcaaaaaaaatggtagatgaagcaaagaatgcaggtgtctgcgccgtcaagtttcaaacttttaaagctgaattactgatttctaaaatagcccctaaagcagagtatcaaattaaagagacaggtaatactgaatctcagttagaaatgactaaaaaactcgaattatcatatgagtcatttactaaattagaagaatatgctaaatcattaggcttggatgttttttctactcccttcgatatggactcggtagattttttaatctccagaaaacaaaaaatgtggaaaattccatcaggcgaattattgaacttaccttatctagaaaaaatagctaagatccctgatgatgaaaaagagataattatatcaacaggaatggctacacttaatgaaataaaatcagcattagagattttcaagaataataatgttccatctaataaaattactatcttacattgtaatacagaatatccaacaccttatgaggatgtaaatttaaatgcgattcgctatttaaagagtgagtttccagaatataaaataggcttctcagatcactcaaaaggatattttgcagcagtggcatcggttccatatggtattactttcatagaaaagcactttacattagataaaaatttacctggtccagaccataaagcatcagttactcctgaagaattaattttattatgccaaggcataagagccattgaacaatgtatgggtaaagaagaaaaaatagtcacaaattccgaaaggaaaaataaaattgttgcaagaaaatcaatagttgcaaaaacaaatatctgtaaaggtgatatttttacaacggagaatattactacaaaaaggccaggtaatggaataagccctatggcatggtatgatatcttaggtaaaacagcagagtcagactttctggaagatcaattaatcgaacattctgattttaaagctcaagagatttaa

SEQ ID NO: 286226 - DNA, 828 bp, Morganella morganii
atgaaaacaaattatatggtgtcatttaacgccaatgatgcgttctgtctggtcaaagtcaatgacatgctggtgacggacaacggcggtatgtggaaagggcggtttaccctggggcagacggtcagttcgtacctgcagaacgggcagaataccctgagtatcacaatgctgcagaagccggtcggtggcggtgataaactgccggatgatatgtggtgctcggcgaatatacaggatgtgagacaggacggaaccgatgaatacgtggctgcggtgaagctgattgtccgtgacggcaggattaccccggataccggttattacaccgggcagtatacgtcctttggtgacagcccgagagcggacggaggcgaaaaaaatacccgcgaggtatcacagtcgtttcacgcggcggatttaccggagtggccatgggttaatgcaaggccggtgactgaagatgatatccctgccgttaaagcattttatgaagcgttacacaaggacatgaaacgtcaggatttaccggcgatttaccagaaaaccagagggatgtgggaatcactggccgctgaacagggcagcacaccggaaaaaatgtgggaatcaatgaattacaaagggtattttgagcaaggctacaaagccgttcccatcgactggtcgggatttgaattcagctcatatatgggcggacggatttttcgctttgagaaagggtatggcagagtgccgccgttaaagataaaaaaccgcgagggtaaagtttctatactcaccccgtacctgtcaattatcgacggtaaagtcacggtggtaaactaa

SEQ ID NO: 286227 - DNA, 2148 bp, Morganella morganii
ttggcagaagaaaaaactgaattatctgccctgaagctcaatatttcagttcctcaggcgctacttaatataaaacctcgtggttatgtcaatcccgataattatgattcaggtgaaaatattggttttattaattatttggttaactattaccatatttcttactcgaatgaaaatactgataattttgattccggatggctttctgttaatggtggtgtcaattttggggcattgcagtatcgccaggtgagtaacgtagcgtggaataaaaatgacggatatacatggaataacataagcagttatatacaacgtcccttagttactattatgagtcagttcatggcagggcaactggtcaccaatggccgttttttttccggcatgagttataacggtatcaacctctccaccgctgacgctatgctgcctgattctgtgcgtggttacgctcctgttatcagaggtattgcatcaagcaatgctaaagttgtggtacgccagaacggacaggaaatctaccagacaacggtaccacccggtaactttgaaataaatgatctctatccgacaagttataacggagacctgcaggttcaggtgactgaggctgatggtaccgtaaaaactttcgtggttcctttttctgctgttccggagtcaatgagaccggggatgtcacgctataatcttgctgtcggtcgtacccgtaatactcagaaaaaatcagcatttgcggatattacctatcagcgggggctgacaaattcgataacagcaaatggcggggttcgcgttgccgaagattatgttgccactgtattcggaggtgtgtacaccagtactttcggtgcatttggactgaatacaacgttctcgcgtgctaaattacccggcaatacatctgcagaaggatggatgacacaggcttcatggagtaaaacattcgagccggccggaacgacggtatctctggcaacttatcgttattcaaccagtggttaccgggaactcactgaaattcttggtaccaggagtaatagccagacgggagcggactggttgaactataccagcggacaacgttcgcggtttgatataacactcagccagagtttaggtgactacggcaatatttttattaccggagcaacccagaactaccgtgatggcagatcccgggatacgcagttgcagttagggtacagccagacatttaataatggcatcagtatgaatgcatctcttgccagacaacgtaccgggaattacgacaatgcggggaccatggaaaccgcaaccgctatctcattctcggtcccgttctctttaaattcgccacgtagtgtaagcctgagtgcctcttataattatagtaaaagtagcggcgaacaatatcagacaagtgcttccggtatgatggatgatgcgcagacgatcagttacaacttgaatgcgacacatgacaaaaaatatgcacaaactacattaggaggaagtctgcaaaaaaggcttcctgatgtaaatatcggaatgaatgcatcaacgggtaaaggttactggcaggtatcaggtaatgcccagggagcgcttgccgttcacagtggcgggctgacatttggtccgtacctgggtgacacttttgcactggtcgaggctaaaggtgccgaaggagctaaactattcacgtcatcacaaacacacattgacagtaacggatatgctttggttccttctgtcacgccttaccgctataacaatatatccattgatcctcagggtatgaaagggaatgttgaagtgctggacagtcagaaacgggtagctccgatagcgggctcaggcgtcaaagtcaaattcaggaccagaacaggagctgcattgttaattaaaacaataacagattcgggaatgacgattcctatgggggctcaggtttatgactcacaagatcaactggttggaataacaggacaaggcgggcagatttatgttcgtgttgagcagcatgaaggggtactgacagcgcggtggggaaatggtaatgcatattgtgcgttaccctacaagataaaagaaaacgatattaatcagcctttaattaatatgacagtacactgtaataactcatcaaaaggaatgtga

SEQ ID NO: 286228 - DNA, 1056 bp, Morganella morganii
atgaagcatgacccaatatcaataatggggatggacagaataaattcagtagtcattcaagctgttcagtatttatggaagaatgaatttaacttcatgaagtcgctatatggtgggtatttggtaattgctcaaaaatatagagatgttcggaatcgtttaagacaagaggcatataagcagcacaaatatgaaattaatgataatgactttggacgggagttatctaaagaattagaaagtgtaataaggtgtctggaaaatgaaactaccacggaattcacaacagataatattgaaggcatagataacgacatattgataactgcttttcagcttatacctatggatggtacacataagaaatcagtgccgtttgtcgaggaaattattggaataatttcacaacaattgctttcacgaaataaagaaaatcgaattgattatacttttaggcatgagtttttaaaacactatgcccattttatccttcatctagagaataacgagaaggagagataccttaaatattttactgataatttcaccttgaatgaaggtgtgtcagatttgttgaatgaatttattagcgctatcattgattcaataaacaatcaaggttggaaacattataaagagcgcataatcgaatcttttttgtttgcaagaatcccttggaagaatggagcaaagacatggcatacattttcactgggtaatagagtattttttagtgagttaagcggtaagataggtggacaaccatctttcatatatagcatctgtaaactcctttgtggcatcggaagcgagtttttagatgatgggattcattggatcagtcatgcaataaagacctttgatatcgatttatcccaagatgaatcagggaatacactatttttcttggaaaaatatatgagaagatatttattcaaaaatcacgacaaagtgagacgaacaccaagcctaaaagcaccgtcaatggtagttctggatttcctagtcgagcaatattccattacaggctacctccttagagaagatatagcctag

SEQ ID NO: 286229 - DNA, 687 bp, Morganella morganii
atgagtaaattaaatctattagtaatagggttaatgtttggatgcacaacgggaagtgctttagcatcaaccagtaatgaaggttattatggtgctgcgagactttctaaggtatggcaaaaagcagacagtatggataccagcagcaggcctggtattggtcagtttgtctctggtgatgataaggatgatttctataatgcatcacttgctgcgggttatcagtatggtaatggctggaggacagaagctgagtatacgtttaataaaaaagcagagtacaccagtggttcaacggcttttccggctagttttaatcaccataaaacagaatcacagcgtttgatgttaaatgcttaccgtgactatgaaatttatcagggaatttctgtttatggcactgtaggtatcggtattgcaaaagtgaaatcatcaggatggcaagggaatacgacacgccaatatgctggtaatactgatactaatttagcgtattctcttggtgcaggtttcagctatgagcctatcgacaaacttaattttgacttaggttaccgttacgtcgatttaggaaaaactgagagtggcatgaaccgttttacgaatgcccggggcttacaagacgaacaaatgaaagcacaccttaaatcacaagaacttacatttggcatcagatatttattctga

SEQ ID NO: 286230 - DNA, 249 bp, Morganella morganii
atgtcatatatagcaaccagtaccggaaaacatattgatttcgtcaatatcactccggatcagatttgtatcgaagatatcgcgcgtggcctgtcgaatgaatgccggtttgcggggcaactggagagtttctattccgtggctcagcactctgtatacgtcagccagattgtgccgccggaatacgcattggaagccctgctgcacgatgccgctgaggcgtatatcaaagatatccctcgccactga

SEQ ID NO: 286231 - DNA, 486 bp, Morganella morganii
atggataacgcctcccaacatgatattacatccaagtacagtactaccagacatgggatatggttggttattcacctaattgccgttatcactgtaactaaaatgaatgctatcacactggaatcattattaacggttcttaatgcaccaaaacagataaccggatttttaatcgcactccttattttatcaccagagggtgttggtgctattaaagcggtgcttttgaatcaagtacaacgagctatgaatatattttttggatcagtacttgctacaatatctttaacagtaccagtagtggcaattatttccctaattacaggccaaaccattatttttggtttggatgttccccatattatgatactaagtacggcattattactgagtcatatttcattttcatcaggccgaacaaacgtactgaatggtgcttcgttattagctatctttgtcggctatctggtcactctttcattataa

SEQ ID NO: 286232 - DNA, 3207 bp, Morganella morganii; identical to SEQ ID NO: 281984

SEQ ID NO: 286233 - DNA, 2574 bp, Morganella morganii
atgaaattcactctcaaggactaccagcgcgacgctgtacgtgattcgttggtgaatctcagaaaagctcgccgttactggcataatgaaaatgacaagagtgctttctctttaacggctgtgaccggtgcaggtaaaaccgttatggctgccgctgcgtttgaagcattgttccatggcgacgacgaatttaatttcgatgccgatcctggcgcggtagtgatctggttcagtgacgatcctgcactaaacgagcaaacccgctttcgcttaatggaagccagcgaccgtatcaactacaatgatatggtggtggttgaacatcctttcagtcggcgcaaatttcaggccggaaaaatctattttcttaacacgcagaagtttggtaaaaaaagtctgctggtgcgcgggttcgatgacaaaggcgggctttttgaagccgccccagatgcacaggcttatacgctgtgggataccatacagaacaccatcgaagaccctgatctgacactttatttggttctagacgaagcgcacaggggaatgggttcgtcaacgacttccagcgaagctgctaaaagtactattgtacaacgactcatcaatggttcgcttggagtaaagggtattccagtagtgtggggtatttccgccacagttgaacgtttcgaccaagccattacgaataccggcaatcatgtaaaactgccgaatgtggtggttgaccccgctaaagtgcaggaatcgggacttatcaaggacgatatcattctgggtgtgcctgatgaagctggtgacttcgatacagtgtgggtacgccgtgctgccgacaaactcagggcagcaaccgatgcctgggcagagtacgcaagacagcaggaaaccgtacgagaagtagtgccgctaatggtattccaagtacctaatacgcctgacccgaacgaggtggggcggtggctggatacgctattctcccgttatcctgaattacctattgacagtgttgctcatgtcttcggtgaacataccacacagcgtttcggccaacaccaggtaccttatattgaaccgcagcgggtgcaggaatcaacgtgggtgcgtgtactgattgctaaagatgccatcagcactggctgggattgcccgcgtgcagaagtgatggtttccttccgagctgccagcgataggacacatattacgcaattgctggggcgaatggtgcgtactccgctggcaagacgtattccaggtaatgagcgcttaaactcagtagaatgcctgctacccaagtttaatactaataccgtgagagatgtcgtcaataccttgtttaaaggcgatgatgcttctcctccaagcggacgcgtcctagttaaccctgtggagatgaaacctaacccagcggcttcagctgctgcatgggaactatttgaaacgctaccttcgcaaacccgaccacagaaaggagccagaccagccagacgtctgaccgcgctggcacaagaactggttgatgacggtattcttgatggggcagtcaaaaaagcacatgctgctttgcacgctgtcctagacaagttccagacagaaaatgctgaaaaaatccaaaacaagcgcaatgcagtgctcgttgtggatggtaaggcggtggttgccagccttaagaacaaagcaatgaccttcaacgaattctgggaggaggcggacatagcagtgattgatgacgcctaccggcgtgcagcccgaatcttcagcccagatgtttcacgtacctatgtcgactatctggccgataaggtcgcggatcgagaagaggatgcagaggaatatctggaagcaatcatggaagctcgtgtgaccgttgctggcatgggactggtgatggaggtgcaggattacttcgatgacgaggccgataaactggcgaaggaatggctgaccaagtacataccgcaaatcaaatctttgaaagatgagcgtaaagaggcctatcgtcaagtcatcgaaatgagtaccgaaccgcaggatatggacttggtcagaccggagagcaagtttgaaatgaccaaggtgcgtgaaaatgagaaggagactgaccttccgatctggaaacaccatttattgtgtgacggaagcgggaactatccagctcagttaaaccaatgggaaaccaaggtttttgagactgaaagcaaacgtgaaggatttgctttctggtatcgtaacccacagtacacagggcagtcatcactgggaatcgcctatgttgaagccgaacagtacaaaattgttcgtcccgatttcctgttctttgccgaacaggatggcaaaatggttgtggacttgattgatccacatggcttgcatcttgctgatgctttgcccaaactgaagggactggcgctatatgccgaacagcatcctgatgcttacaggcgaatcgcatctgtcgcagaagtaaaaggtaaattgcggattttggatttaaaacgacagaatgtgcaagaggcggttgctaatgctgaaaatgcagaaatattatttagtagcaaacttgctgatgactatcagtaa

SEQ ID NO: 286234 - DNA, 2130 bp, Morganella morganii
atgtccaggctgactgatttaatagctaaagcgcaagccaaagatcctcaactggccgctgatcttgatcgagaaatcaagatcctgtcgtcacgtctcccctttgggcttaattttgaacgacatagtcctgaagttgttgagttgccattgcggcctattcgcaagggagataaagtccgcgtcctgccaaagcgtgggtccactgagaaaggtgatcaacggttgtggcagattaaaaccatccacaaggtgaagaaggtagctgatcttgtgttgttggatgcagctgatgttgagactcagactgtagagctgagtaaccttgtagttatagctgaatttcgtgacacgatctggccgggtatggtcagtacgggaaaagtacagcgcggtggtgataaacctttccactcagtcatcaatggcgaaaactatcatgtgctgaaagcgttgacctacacgcatagaggcaaggtggatgccatctatatcgacccaccgtataatacaggtgcgaaagactggaaatacaataacgactacgtcgaggaacaagacttgtatcgtcacagtaagtggttagcttttatggagcgccgcctactgatagctaaggagttgttaaatccggctaattcagtattgatcgtcacaatcgatgaaaaggagtatttacgattagggttattgttggaacaagtatatccgaatgcaaagattgagatggtctcttctgtaataaatcctaaaggcactggcaggtcaggtgactttgcccgtacgaatgaatttttgttttttgttcgatttggggcatcaactgtcagtggcagacccgatgaagccgctgttggcgcagaagttgcttgggaaacaatgaggagacgaaatcttgcatctacaagaggcagaaaaggcaaaggagcttgtggtccaaatcagttctatcccatttttgtagacgagacatcaggagccattattgggcgtggcgatccactgaatgttgacgttcctcgagaaagcatcattccccccataggtgctattgcggttttcccagttcgttcagatggaactgaaatgaattgggaatatactgactctgcattcgataaatggtggagagaaggctatattcgcgctaatggtaaaaaagatgaacctcagccttacatcatccaacatcttcctaataaggcacgtaatgaaatagctgatggaattgcaatcgttgagcgtaaacgttctgatggttccattattgcaaaatatgtaaatgcaacgttcaagcatgtgaccacacaatgggattttacttcccatagtgctgaacacggaggcacaggtgttattaaatccattatccctgggcgaaaatttccattccctaaatcgctttatgccgtcgaagatgctcttcgcttttttattgctaacaaacccgaagcaatcatcctcgatttcttcagcggctcaggcacaaccgcccacgcggtcatgcgcctgaacaaacaggacggtggtcgtcgtcagtgtatttccgtcactaacaatgaagttgctgctagcgaacagaaacaattgcgccaacagggcctacgccctggggaccccgaatgggaaaagtggggtatttgtgactacataactaaaccacgtgtacaggccgccatcacaggaaagacacctgagggagagccaattaaaggcgtctacaagtttatagacgaattcccgatgtctgaaggctttgaggaaaatgccgagttcttcaccttaacctacgaagctgaaaaatcggttagccacaatctagcatatacgcgcattgcaccgttgctatggctacgcgcaggtgcacgcggcaaacgtatagaaaaactgccagctgaaggatgggctgtggctgatacttatggcttgctttcggctatggatcgggccactcctttcattgaagcaattagtcatgctagtgacgtacggatggcctttatcgtcactgacgatgaccgtcacttccaggcagtcactaggcgtctgccaaaaggtgttgagccggtacgtttatatgaatcgtacctgaccaatttcagcttcaccagtggggaattaacagaatga

SEQ ID NO: 286235 - DNA, 204 bp, Morganella morganii
atgaacactgaaaattctgatgacaaaagtactttaaagttagtggatttgaaatttatttgtgaaaaaactgggttatcgagagcgtttatttacaaaatgatgagtaatgattcatttcctaaaccactaaaaatggggagatccagtcggtggtatctcagtgaatttcatacatggctagggaactgcgaacgaatgtaa

SEQ ID NO: 286236 - DNA, 999 bp, Morganella morganii
atgaataaaaaaatagaaaacaaaccaagaaaattaaatgaaacctattaccaaaggttactaaaagatactcctcgtaataataaagtaaaagaaaaagaacttaattggtttaaaatacaaaactatgactatattactaatcttagtttacgacagcttataaccgaaatagttatacgtgaaaaactatgtactaattctgatgaaattggatgttccggtctgaaatatggaaaaacagaactatttaatgtatgctatcctgaaattctatcgggtaaacctgaaataaatggattatttgacctacatgaaaaaatacctacactaagttatctcagacatacagatgaatgctcaccttctgttacaaagctaccaattcgtgaattaaatatcagagatatcgatgggtgctataatgcactttcttccgcaagtagtccgagatactcacttgagacatcagtgcacccctgcaatctgggaagaataccaaaaagtcactttccatccgatacaacattaacaactattcaaaatagacttttttcctatggtatcaaacaaatttacctgacaattgatccatcatactcaagatcacaacttattgacgcatttaatgaaatgttaaataacttaaatgaaaattatggaatttttactcaaaataaacaacctgacaacaaacttcggaataaaactttatatgatatttatgcacaccatatcatcccgctaatagatctggtgctttggcagatccataacaaaaaacggctttctttaaagatggtttataacctcctaaaaggccagcaatttgatgcatctgcagacagcacaggctactcacaaacaaattttcaaagcagcactctgaaaacttttgatctaatcatgggacaaaaagaccccagcgaaatattgaaaaaattaataagtgaaacatgtgactatgatatgtctttttatgaagctacgcacaaatag

SEQ ID NO: 286237 - DNA, 588 bp, Morganella morganii
atgctgcgccttcgccgccataaccagatcaccggtgtccaggtaccggaaattattctgttaaacagtcatgacggcaccagcagttatcagatgctgccgggattattccgtgcagtctgtcagaacgggctggtctgcggtgatacctttggtgaggtcagagtgccgcacaaaggtaatgtcatcgataaagtgattgaaggggcttatgaagtgctggaaacgtttgatgcggtggctgaaaaacgcgaacagatgcagtcgctgttgttaccaccaccggcacagcaggcgctggcgcatgccgctatcacgtaccggttcggggatgaccaccagccggtcaccgaagagcaggtgctgcaaccccgccggtgggaagataagaaggatgacctgtggacggtgtaccagcgtttgcaggagaacctgattaaaggcggactgtccggacgtacagccaaagggaaacgatcacacacccgggccgtgacgggtatcgatggtgatatccgtctgaataaagcgttatgggtgatgacagagaaaatgtatgagcatttcggaagccgtcaaccaatctga

SEQ ID NO: 286238 - DNA, 588 bp, Morganella morganii
atgctgcgccttcgccgccataaccagattaccggtgtccaggtaccggaaattattctgttaaacagccatgacggcaccagcagttatcagatgctgccgggattatttcgtgcggtttgtgagaacggactggtctgcggtgatacctttggtgaggtcagagtgccgcacaaaggtaatgtcgtcgataaagtgattgaaggcgcgtatgaagtgctggaaacgtttgatgcggtggctgaaaaacgggaacagatgcagtccctgttgttaccgcctccggcacagcaggcgctggctcatgccgccattacgtaccggttcggggatgaccaccagccggtcaccgaagagcaagtgctgcaaccccgccggtgggaagataagaaggatgacctgtggacagtgtaccagcgtttacaggaaaacctgattaaaggcgggttgtccggacgtacagccaaagggaaacgatcacacacccgggccgtgaccggtatcgatggtgatatccgtctgaataaagtgctgtgggtgatgacggagaaaatgtatgagcatttcactgatcgtcaatcaatatga

SEQ ID NO: 286239 - DNA, 1374 bp, Morganella morganii
atgaacgtagttagcacatcgatgttttcacaaaataaagaaagagaattccctttacattgcataccccaggttataaaagatgctattataggggtaagtagtaaaacaaaagcacctctaccgttaatttttgcctccgctatggctcctgtatcattactttgtcagggacttatcgatattcatcctgccaaagatgtgaaacttcctgtgtcatgtaatttttgtaccgttgcagaatcaggtgaacgcaaatcaacagtagataaatttttcatgtcacctatatatgattacgagcaacaggcactaagccaatatgaacattctatgatagaatttacacaggagttagacacctggaccatcgaacttaatgcattaaaaaatatactgaaaactcttatcaaacgaaataaaccgacagatgaaattaagcaacgaattaaactccactggacaataaaacctcaatctccgaaccttatcaagctggtggctaatgatatcacgcccgcagcattacaacatttgctgtataccggaggggggtcaatatctttacattcggcagaaggtgacattatactcggcgggcaggcaatacagaatttaggactacttaacgatctttgggatggttcaccagtatcagttatacgacgccaaacagaaagttataccattaacaatgcccggttaagtgcgaatataatggtacaagatgctcctttacgtaaatatttcagacggtcacaagaacaggccagaggcagtggttttctctcacgatttttcttttcccgacctgaaagtacaattggttcacgtacaggtcatactttagataattaccatgaactattgagtatgtatcatttccgcataactgaattactgaatagttatactaaaaaagtaaataaaaatgaacagggtgacagagaaatactgaaatttacaccggaagcagccctcagatggaaagatatgtgtgattattttgaagaacaaatgtctgaaagaggtagttattattatcttagggactttgcctcaaaggaaagtaataaactagcacgtctttctgctttatttcattattttaatggtgatgaaggagatattccagaacaaacactactagatgcccagaaaataagtgaatggtatctgaatgaagcactttatctttttgagactattcctgaacaacctcaatatattcaggatggagaaacgttatggaaatggctaaatgataggtttttagataatcagggagaaccattaatgaggagttggattagtcccagagtgcctaataaactacgcaaccaggacgtcttgagccagcattacagtatttag

SEQ ID NO: 286240 - DNA, 579 bp, Morganella morganii
atgaaaacgtataatccatattaccagcaaaaaacagagagagtcgttaacaatgctctcagtgaattaacccgtattatggcattgcgtgttgacctgcgtttaccatctgattatccggacagccccgataactctaaagtaataacccgattctttgactctctgaaagctaagctgcgttatgactcagcccgtaaagcgtcccgctgggggcgtaacctcaacaatccgctttattatgtctgggtgcgtgaatacggtaaaattaataaccgcaggcattaccatctggtcttattagtaaataaagatatttatcattcaccaggagtttataacgggaaaaataatctggcctcttttattcagcaggcctggtgcagtgccaccggtttagcctggccggtgcattcccgtctggttcatttccctgagcacggtgtcgtttatctcgacagaaacagccctgagttacctgcacagctcgcagccttaaaacaacggacggattatttagcaaaagatcataccaagccttaccacgatggttttcggtcgttcggaaccagccggtaa

SEQ ID NO: 286241 - DNA, 402 bp, Morganella morganii
atgggagcagtctcagcaggagcaacccggtttgcgatcgtgttttcattagcttaccgggtagtcgaattgatattcaaagaagaatataccctggttgattttttcgttaatgtcacgatggatatggcaaaattagctgttgccactcaagtaacaaccttagtaaccggaagtattgtaacaggggcattagcagccggagtcagtgttatcgctgtcgcggttggcgtatttgttgttggtgcactgattgcctacgctctctataaacttgatgacgagtacggaattagtgaagcaatcattaaagcattaaaatctcacagaccgccaaaacctgaaacaccttaccatccggatcaattttttacgttgttagggagatatagccgtggttaa

SEQ ID NO: 286242 - DNA, 1692 bp, Morganella morganii
atgcacattacaaagctttccctagtaaattacagaaacttcaaaaatgtaaagttactttttaataagggaataaatacaataattggtgaaaatggttctggtaagactaacttattccgagcgatgagattaatgcttgataattcgataccccgttctgccactaagctcgctgaaggggatttttgtcgagcattaggtaactggcgaggacattggataattattagtatggagtttagtgacattgctgatgatgaagccagccaatcgctattccttcatggtttaggaaatgctgaggatgaggttgttactaaagcaacatacaatctgatcttcaggcctaaagcaaacatccgccaagcactggcacagcttccggaaaataatgtagatgctttagaaaactatttggaagttataactattgatgattatgaaaccgtccttactggcaaaagtgttgctgactttaataatccaattgtatataaaagtatagttggtgatttcgaaaaagtcatatttccagtacagttaaataatcctgacgttggaataaaattaccaaacattcttaatatgccaaatgaagtctcatttacctttattaaagccttaagagatgtagtatctgactttcatagcaataggcgcaatcccttgcttacgctattaaaacgtaagtcaggagcgattagtccggatgactttcggcctattgctaatttaattgggactttaaacagtaatattgaagatctatcagagatctgtgatgttcgtgatgatattgttactactatcagtgatacagtgggtgatacatattctcctaattctatttcaattcgttctggcttaacagacgatgcagatcagctttttcagtcattaaagctgtttgttggtgagtcagatgatgatcacgaggagtctatcaatgaaataagcttaggtggtgccaacctgttatttctcacgttaaagttacttgagtttaaataccaacaggcaaatcaatcaattgcaaactttttattgattgaagaacctgaagcacatatacatactcatattcaaaagtcacttttcgataatattaactacgaaaatactcagattatttattctacccattcttcacatatctcagaagtaagcaatatcaataatatgaatattattggcttcgccaatggtgtttgtgaggtatttcagccttcatcgggactcgaagaagaacaaattggttttgtacaacgatatctagatgcaatacgaagcaacttactattcgcgcgaagtgttgtcctagttgaaggtgatgctgaagaaattctaattcctattctagtaaaaaaagttctaggtttgagcttagatgaaattggtatcactttagttaatattagaagtacaggctttgagaatattgcaatgttattcaatgaaaaaaggattaagaaacgttgcagtattattactgatcttgatgaagcgttctttgatactacaattttgccaacggataactcggcaagtataaagaaaaaagagaaagctataggctctcaagaagcaggtttggctcggaaagtaaggcttgatagcttttgtttaaacaacccttgggttttaactttgaatcgccacgggtttaacagacacctcagagtcatttaa

SEQ ID NO: 286243 - DNA, 249 bp, Morganella morganii
atgctcaccaacggcggcgcatttatctggcctgacatgattgaaacgtcactcccgatggttaacccgcataacggcaataatgcggaactgagtcctgaagcggccggtatcgcggtatgtctcatcacttacagtctctggtcatttaaaactgaaagtccggagatggtggaatatttttatcagttgcgggactacgccctgcagcatgaggagtgtgccgctattttccgtcttatcgattaa

SEQ ID NO: 286244 - DNA, 300 bp, Morganella morganii
atgatggataatctgtgtgacatttatcacggtgcattctgggaattcagcatgctcaccaacggcggcgcatttatctggcctgacatgattgaaacatcactcctgatggttaatccgcataacggcaatgacgcggaactgagccccgaagcggccggtatcgctgtctgtttgatgatgttcagtatctggtcattccggactgaaagcgaaatattagttgagtatttttaccagttacgtaactacgcccttcagcataaggaatgtgctgccatttttcgccttattgattaa

SEQ ID NO: 286245 - DNA, 615 bp, Morganella morganii
atgaaaaaccgtattttgatagtaaccacactctttttattttctgtatcacctgccggcctggcagatgatgtgcgggtcagtgtgacgcatccgcaaataatccgctctgcaccggtcattaccttgccgggaaaatttgtggccagaaatgaaattgctatcggctcgccgctgcagcaacagacggtaacggcggtgtttgctgaggaaggtcggcaggtggagaaaaatcagttgctggcaaccctggaatccccgttgcaaagtgccgctgtccggcagttgcaggcagaaacggaaaaagcagccgcgtatatccggcagcaaagtgtgctggcggcgcaatctcagcgtgatctgacccggatgacaaaactcgcccgcagcggcgttatttccgccagtgaatttgaaaaagccaaatcagacacccaggcccagcgggcactggttgatgccgggcaggcagaactgcgtcagttacaggcgcaactggcacgggaaaaagccaggaggataaatcaaaaatctatgctccggccgccgggattatcagtgagcgccacgcggtacagggcatgctgtctgataacaccctgctgtttaagctga

SEQ ID NO: 286246 - DNA, 774 bp, Morganella morganii
atgtcatcagaaaattttgtcaccttctggctcgctagagccgatcttccatactttcttgaacctcatgaattttacgtttcagaggccaagcgtagacttctatcgcagtttggcaatttagaacaagaagcagaaaggaaggaacaacagtatttggaggcttccgaaaaatatttcgatcctgataacgatgatccaatagctgcctacgagcaagcctaccacgaggggattaattatctgtggtctcttctggagatgcaaagtaccgtgttgttggcagtaacagcaggaatgtaccaccagtttgataaaaaactaagagaacacaccatcaaagaactaagttactggtgtaaaagagaattagttactcccatgatctggaagttaactttccatcagcttattgacttactcgaatggattggcctcaaaatcaatggaactggatacggagaaaggatcaaagcctgtaatttggtagtaaatgtatacaagcatggggacggccctgcgcatcaaaaactatcattcaatcatcctgagtactatccacaccctacagatgttcgagatatgaagaacgtacctaaccatgatgatttacatgtctcagaagaacaatttgtagagtttgctgacgcaataactgaattctggaaagcagttccagagaattgctattactcaaatctcaaagaagaacccaaatggttgagtgaaattgttacaaaattagaaaaaaaacagaagggaaataggggctaa

SEQ ID NO: 286247 - DNA, 555 bp, Morganella morganii
atgaccataattaattactattttgacgacaatcacccgctgcggccatatttcggcgatgactatgcaaataaagactccttttcacctgtcaatgcgttgcgcatcgcacctgaatttaaggctgggtttcatccgtgcgagcgtgatggtgcatggattatgattccggatcaccgtggcgcaaaagtttatgacatcaccaccgcgcaagagtcagaaattaaagaactcggtgaattgccggacggcgtgacaactattgcgccggatgtagattttccgaagtggaatggtaaaaagtgggtaacggataacgcggcaaaaaaggctgctgatattgcggcggcggaagctcaaaaacaatacctgattgccgaggccagccagaaaacccagctttggcagactcagcttattctggggattatcacggaagaagataaagccagcctcaaagaatggatgctgtacgtgcaggaagtgcaggcggtagatccatccctcggggctgctgtagtatggcctacacgaccggcttcaccggccagataa

SEQ ID NO: 286248 - DNA, 993 bp, Morganella morganii
atgaaatctgctgcgcatttacgcagaccgcattgctgttcccggtttgtgctgacattcccctttatctttattcctgtttttcatgcggttgccgccgatgatactctggttgtcactgccgccccgcaagaccgcgaagggagttacagcggggataatgtctattccactctgaaaacactgaccccgcgtaatgaaacgccgcaatccatcagtattgtcacgccgcagttgatccgtgactttaatgtcacttcagtggatgacgcagtaaagtttgtcagcggtgtaactcagggcaacacgctgggcggcattgaggacgggtttgtcaaacgcggcttcggctccaatacggacggctctgtgtttatcgacggggtacgcagcaaccaggggctggcgatggatgccactactgaacgtgttgatgttctgaaaggctcttcttccctgctttacggtattctgaatccgggcggcgtgataaacctgatctccaaaaaaccacagtatcagtggcagggacgcatcagcggacggacaaacagcaacggcggcggtaccggtacgattgatgtgaccggccctctcggcaatggcgtggcagtccggctgatagcagaacgccgccatgaagattactggcgcaatttcggggaagatcagcacacgttgctggcgccttccctgagctggctcggtgacagcgcctcgttcaatgtggcttataccgaaaataaattcgatgtgccttacgatcgcggaaccgcttttatcggcggcagcccgatccgtattccttataatgaacggatagatgacaacgctaatcacgcatgcgggaaaaataaacgtctgaccgcagaataccggcaggaatttgacggcatctgggaaaccggaattaagtatgcgtggatgcagcgccgctacgacagtaatgaggtccgcgcgacggctatcaacccgggttacccgccgtgctga

SEQ ID NO: 286249 - DNA, 162 bp, Morganella morganii
atgtttatttcaaggcagctcaaacaatttattgctatcgctgaaaatatcagcctgacgaacgcggctgaacaacttaatctgacaccttcagcactcagccatggcattcgtgaacttgaatctaaaaccggtatttcattaattaaacgctccggctaa

SEQ ID NO: 286250 - DNA, 1260 bp, Morganella morganii
atgcctaaattaaccgatatacagatcaaggcttggataaagtcaggggaacgttttgaaggccgctctgatggaaatgggctgtacctatgttttcctaaaaactatgccattccattttggcgttttcgttatcggtttgtgggtaagcagcgagcaatggtgattggcacttatgctgaactttcactcgctaaagcgcgtgaaacagctaaatcactttcagcacaggtggcattaggtcacgacgtagcgggcgaaaagcaagaacgcaaagcccaagccataaagaaaatagaagaagaaaagaatgcattaaaggtatctgatctagcacaagaatactttgagcgccagatactaggtcgttggaagcatcctgatatcctacgccgccgtattgaaaaagatattgcccctaatattgggcatcttaaagctgaagacgttcgtccccgagacattgatgcaatgatccagaaaatcaacgctcgtggtgctcgtacagttgccaatgatgttcttcgctggacacgacgtatttttgactacggcattaaacgacatatgctagagactaatccaacaactgcttttgatacatcggatgcaggcggtaaagaaaaatcccgtgagcgatggctaactcaagaagaactaattaagttctttcaggcaatgcaggttaccaaaggtttttcccgtcaaaatgaactaacaatgaagctattacttgctctctgctgtagaaagatggagctgtgcggtgctcggtgggctgagtttgatttagacaatgctatctggcatctacctgctgagcgggtaaagaatggtgatgcgattgatatccccttaccagcggtgaccgttgaatggcttttagaactacgccaaatgtccctcaatagccagtgggtcttgcctgcacgtaagatgcaacacaaaatgatccctcacattcaggaaagcactctacccgtagcgctggcaaaagtacgcagtaacctccctgatgtaccaaacttcaccatccatgacttccgccgcactggtcgttcgcatttagccgcattaggcgttgatcctgtcgtcgcagagcgctgtttgaatcaccgaatcaaaggtgttgaaggcatctataaccgttatgagtacttcaaagaacgtaaggctgctctggaacaatggactgcgttgttggtagccttggaacaaggtgaggattataatgtggtgccgatgaagaaattaaagtaa

SEQ ID NO: 286251 - DNA, 528 bp, Morganella morganii
atgcatagtgagggtaatactgaaaaataccaagacataataaaacaattatctcttattgataatcctgaaaactggcattggtatataccttcatcggagctacaaaaagaagataaaaagcatatctacgaatctgctgaacgattatggataaaacgtaaaatatctgacggtagcctacttattcatccagaggtacgggaggagttaatcgaaagagaatacaatccattgcccatccacaaaagaatgatttggtctagcttgctagcatcttacaacggaaccgatagaaacgactattttaaaaaaataagagaaaaaataactaaaaaatatgggtgtgaatggtgggatgatattgatagaagaataaagcatacttatattgcaaggaagcgactgttaaaacaaaaagattccacagggccagctttacaatatgcagcatcgcaaagtatgttttttggggggcttttaagcgaatctcgtgatgatgttttaagaatgattccgaaagaataa

SEQ ID NO: 286252 - DNA, 378 bp, Morganella morganii
atgaataaaataaccacttacgcactattagccttaacaacgctaagcctccccgtacacggtgcgactaaaaagagtgatgctttagtatatgaaaaagcaaacggtgaaatcgctgtctctcaagtacaaggtcatcccgagcaggccaaatttgacatcattaccaacgtcgatatgcacgcctgcaatgttgaaggtatcgcagataccatatctgacagtaaagcatttacccaactccaatggcaagatgctaatcaatgcaaaatcactctcaagtggggtaacaaacaggtacaggtgacggctacagatgggtgtaatagctattgtgggttgaatgcaggtaactctatatctggcgtgtacagataa

SEQ ID NO: 286253 - DNA, 234 bp, Morganella morganii
atgcataaagtcgaaagagtgatgaataagcatgagcaacaggaaccgttgataatctccgtcagggaatgggtaattcaaaagcagctaacgaaagttactctgtcggatatatccatttcaaggatacagcggcaatttcgtattggctataaccgtgctgctgggattctcgaaatgctggaagctgaaattaacgaaaagatcgccgctatagaggaacatcatgaataa

SEQ ID NO: 286254 - DNA, 372 bp, Morganella morganii
atgaagataaaattactgatgctatttcttacggtgaccatgctttctggttgcgatgctggaacacccaaatgcaacagcgaggatgccagaagccttgttatcagtatagctcaagaacaaatagataaacagatagcggcaatgaaaaactcgcagttatcgggattagttccaaaaaatatcggcgatgtaaagctctctgtgactaatatcagaacgacaggccatgacacgaaactggatatttatcaatgtgctgccgatctggaattctcagcaaagaataaaaaaatcatcccaatcacctatgatatacaaaaaacggatgacgatgacggtcagttttatatcaacgtctatgggttatga

SEQ ID NO: 286255 - DNA, 336 bp, Morganella morganii
atgtcattattggataaagttaaaaaccttcaggaaaataataatgcaaatgataagaagcttcttaatggcggctatggcttaaccaaaacattctggctattttggttcattcctacgcttgtccttattgcgatatttttattttgtattgagtcggaaggttcagcaataaaattatcaggactattgttattctggagtggttacttgtttttgtgcgtcaggaacaccactgacgggaaaaaaacctggaaaacactggcattaattataataggctgtgacttcataaatcgcgcagtcggtattattttgtttatttcagccaagtaa

SEQ ID NO: 286256 - DNA, 201 bp, Morganella morganii
atgtctgaaaaaaacagccgagcaaccaaagaacttggaaataaaaccgcccaaatagatccgttatattgcatagtaattaacttcattttaaatcaaagagtaaattcagttagtgccaaacggatacaacgctatttcaattcccatgcgatgcgtctgtataggcaagttaaactcaataacaccccaattaaataa

SEQ ID NO: 286257 - DNA, 171 bp, Morganella morganii
atgagtctgttaaccggtgtaatcattggtactcttgctgtatgtacatggcaggtaattcagcttactcgccgggttgagaagctagaggatgcgcaaaacaaaccctcaacatcaccggaaaacaaaacacagccaccttcatcatcaaatgataattcattggggtaa

SEQ ID NO: 286258 - DNA, 528 bp, Morganella morganii
atgagtacttctgtcagggatgttgtttcaagcttcgattacctgttttcttcactttatagacgtgaatttgtcaaaactctacgccttaatgagtgtaacgaaagggaacttttaccactggtaaggtgctaccttttaggctggtttggcgacaaccttacaccagaagtacaggcaaagctccccggcgcactctcaggcaacggctacattgattttgttattgatgatgtcgccgtagagtttgccgtcaggcgacctgatgcccctaaagcaaccttctccgcgtatgtaaattcgactgaaatgaaaaagctgatgaagtatgacggtaaagccttgctggtgctgtttgacttctcggctacgccatttacagaacaacagattgatgcttttcgggactggccttcattggggcagggaaaccataaaaaatccgcttttaacgttgcttacttttatgtagagaaacggcgaccgctgacgatggggaaaattatcaagaacattcggataaattag

SEQ ID NO: 286259 - DNA, 378 bp, Morganella morganii
atgacgcgtcaagataaaaaattgcatacatcagacaataatgcttccaatgaaagtggcgaatggttatcagtagctagttttgtgggaatgaaagggatgcccggtactgccaaaggtgctcgtttgcgactggaaaagctggctgccatacatccgggtattaagcgaaagagaactcagggaaaagggtttgaatatcatatcagcgccgcaagtatgtcgctaaaaagtgagcgctcggctgtgcaggtttcatctgacgaacaactgaatctttggatacagctgtttaaatcaatgacgcctgcatcacgtgaaaaaattttgcaacaggcgctggtgctagtggcggaggatttgtctaccaagccctaa

SEQ ID NO: 286260 - DNA, 432 bp, Morganella morganii
atggaaaatataatggcttttaaacagtcagggctgaatttacccatgagtcaggcttttctttctattttgaaaaggattgtttctttaccattcaaaattgaagtaaatcaccatgcagtaatacttaatttccgagaccctcaatataccgcagaaagtgggggatttcatccggtagagatccgtctaatacggtgtaatgatggctggcaatttgattatcttaccgatttcagttttatgggcgcagtatggcctgagctggaaaaagaaatggatatcagctggagacaggaatatgtctggcattatctgatgggggatttagatcccgaagaaggaggggcgttatttgaactatggcaacgtaactttattcaatattggaaaatgaaaatttataccgtctcagttcaatgggaatgttga

SEQ ID NO: 286261 - DNA, 540 bp, Morganella morganii
atggaaaaacttcaagcatcacttttaacccctgcaaaacagggtgaactggacagcctctgtgggctttacagtgtcatcaatacgctttattggttctatggtcaaaaaatccgacgaaagccgctgttcagggcgctcgttcatcatctcagccaacacagtagcattgccgattaccttactaacggcatggaatctccccaaatagattgtctgctgcacttccttcaaaccagccgctataaacgttatcccatcgctgtttaccgtccgtttcttacacagcctaatgtatcaacgaaagccattttagcgcagtgccaggaatggcttgaacataaccacggcgtcatattgctgggcgatcagtatcactggtccgttgtcacgcatattgatgatgattggttatgtttttttgacagtagttcacgtaagcatattcaccggcatcgttggtcactacgtcatcaacaagggaaatatcagttatttaaagacgctatctactttattgaacagggggaacagccgtga

SEQ ID NO: 286262 - DNA, 282 bp, Morganella morganii
atgaaaccgcacatctatccgcgtgaagtcgtaaaactggcactccagtacaacgcggcagcaatcatccttgttcataatcacccaagtggcgatcctgagccaagctgggctgacaagcatattacattcaggctgaaatatgcgcttgaactggtggatatcagagtgctggatcactttattgtcgcgggtagtgagaacctttcatttgctgagcgtggattgattttaatgggaaagctagcctcatcagcgttttattcaagtaatttatcctaa

SEQ ID NO: 286263 - DNA, 579 bp, Morganella morganii
atgaaaaaactgagtgacgaagcggatgcaacatggcatcgagagcgaagggagtcgaatgacttctttggatttatggaaaagaaagtctacttaggccgtgataccagacataagatagcactaatcgccctaaaaatgaccggtagtagattaggtcccgacagaatggacagcaataaagccgccgatattcttagcgcatgtgttaatcatatgtacaattcactcttcagcgatgaagaatgtcatatgtccccagagttgcaggaaaatcctaaaatagttagccctacctctcctaacgctataaaaatttatcatatatatcagattgtgaaagggcgttttgataagctctttaccggagagacagataaagaaaagtatacttctattgcgaaaagacttaccgagaaggaatttataaaacctaagataaaaggtctatctaagggtaaaggatggacgagggaagacgtaacatggattagcaacgcagaaaatattaactattgtattaaacgaataaatgataagtatgccgctagccaacaattactacctgaaaatccttag

SEQ ID NO: 286264 - DNA, 186 bp, Morganella morganii
atgaatcaagatcgcatccttcgcaaagatgaagtcattaatcgtacaggtcttgctagggcaaccatctaccggcaaatcgcaaaaggcactttccctaagtcgaagaaattgactggtaaggaaggccgcgccgttggctggcttgaatcagaaatcaacgcatggattagcaaccgccaatag

SEQ ID NO: 286265 - DNA, 1407 bp, Morganella morganii
atgaataacaggaaaatcccaaaatgggtcgatgaccagattcaggaaatctgcaacatggttatagataatggtcaaatgagggttaaccgtaggcaatgtttaagatgcttccttgcccatatctggctggaaagtgatgaagatggctggacaatagttacaaaacgcactattcgcacctattttaatgcgttggacaggcattggcagatattagttaaaggaaggagaatgcacgcgcttcctttagaaatatttcctaagctgatacctgaactgaagtttcatgcaggaaaagcggctaaagacagcaataaacgtaaacctgatcgctggcgatttgatcccaaacggccagacgatgatattgggcagctcttgctggtagatgtagacactggtgaaaccttcgatgtatggacgctactaaagaaaacagggaaagcaccacaacataacgttgatctcatccctaaaagccaatatgagctaaaaaaacaggaaaagcagtggttaaaaggtatctcaaggggcaggatgcacctgaattttattgaacaactgaaagagcatacctctatgccttactacaagatggggatccgtagcctaaaccatctgtataacgccaaagttgacggtgattatgttacctacgatcatacctataagctgacatttggcggcagatattacgataaggcgtatcaaaacttacctggtgatttgaaagctagctttcgtgctgggctgctgaactatgatattgctgggtgctgtctggcttgcttaaacacattgtttaaacgctacaaaatgagttatcgcgttgatgatgcgctatatcaaactattgcagcacgttctgggcttaagcgtaaatactgtaagttgatcgttatttcaactataaacaggctgggaaaagtcacggcaggaacacaaagcggcatgggtgaggatatctaccattggcttagcaatgataagaaaaaggctaaagaactactgctatggtggaaacaaaaggcaaaaccactgtgcgaggcgctagcaaagctgattaggcgcataaagcaacagcaccataaaaagtgtacatcaccacgacaataccatctgtattctaatgatattgggttggtgctgaatctgatacaggaaaagtatcagattcagaaagctgatgaacaagaaggagataacatcattgaataccgtgagtacgcgcaagataaaggcctactggcgcatatgattacgggtgtcgagcaagcctatatacgagaagttatacggttaaattcgggtaaaatcagtatgctagaccatgatggatttgctgcgactgatgagattatccagcctgagcatgagtttattcgattggagttgaaggattaa

SEQ ID NO: 286266 - DNA, 1548 bp, Morganella morganii
atgaagcaagatacgatcattcaaaaaatttggaatttatgcaacatactgagaggtgacgggattacctattaccagtatgtatctgaactcagttatctactgtttctcaagattgctcaagaaaatggttcagaaaaactgatacccaaaggctatcgatggactgatctagagtcccatgcagaagcaggattattaggattctatcaggaaatgctcactcacttgggcgcaaatgttgaaaatgaagttataagagagatttacgcattccctacaacggttttctctcattccgaaaatttaaaagctgttgtagatggtatttcaaaaatagagtggcaccaagtgggaaaagatagatttggtgacctctacagcggcttaattgataaaagcgctcaggatactcgttcgggggctggacagtacttcaccccacgctctttagttaacactatagtaagattaatgcaaccaaaccttggggagttaattcaagaccctgcgacaggaagtgggggtttcttagtctccgctgatagctatattcgaacaaaatactcacaagaaaaataccaaactaacccgcctaaatatcaaggggtagaaatagagaaaaatactcgtcgaatttgcttaatgaatacctttttacataatttagatgcaaatattatttatggcgatgcactgactgatgacgtaaaggcgttgaataaagccgatataatcgtagctaaccctccctttggtaataaggctgggggccaacgccctttgcgtgaagatattccattccccaatacaaataagcaactcgcttttttgcaacatatttatttaagtcttaaagctggtggtcgggctgctgtagtgttaccagacaacgtactatttgaatctggcatcggtatcgatgtgcgtcgcgacttaatgaataagtgcaatctgcatactatcttgcgcctaccaactggcatcttttatgcccaaggcgttaaaactaacgttttgttctttaccaaaggctccgccaaagacaaacatcagcaagaaaactgcactaagaacatctgggtatacgatctgcgtaccaatatgcccagtttcggtaaacgcacaccttttggcaattccgacattggttttgcaccagaagacttcggcacagacccgcacctcggcgcgttcgagagggtgtttggtgacacccctgacggaaccagcaagcgtaccgaaggtgaatacagctttgacgcgcaagagattgaagtagataaaaatgccgtagaagaaaatcaggatattgatgaacagctcgcacattctcgctggcgttgctttagccgtgagtggattgccaacactaaaggcgactctctggatatctcttggctgaaagacaaagatagtgttgatgccgcaggtttgccggatccggacatactggctcgggaggcaaaagatgaattgcaagcggcactgaatgaactggatgggttgttggctgcgttagaaggggcgattgatgagcgaagttaa

SEQ ID NO: 286267 - DNA, 1653 bp, Morganella morganii
atgagcgaagttaatttgccggagggatggactctatcaacgctaccaaaatctatagcaattgatggtttaatttccgatggagattgggttgagtcaaaagaccaagatccaaatggttctgtccgtctaattcaattagcagatattggcgatggtgactttaaaaataagtctaaacgactcatgtctcctgaacgggccgatgcattgaattgcacttatttacaatctggtgatgttctaattgcccgaatgcccgagccattgggtagggcatgtatatttcccggtgttgggcaggacgcagttacagttgttgacatatgtttaattcgcactggtaaaaagacggcaatatctaataaaattttaacctattggattaactctccttcaatcagaggcttaatttctgcaaatgcatctggcactacacgtacgcgtatcacgcgaaagaaactagaactgtttgaattccccattccccccctagccgaacaaaaagccatcgcagacaaactcgatactctgctgacacaggtggaaaccaccaaatcccgcctcaaacgcatccctgaaattctaaaaaccttcctccaatccgtccttgcctctgctgtgagtggaaagttaataaatagcaattgcaatacatggcaactagaaaagctactgactttaactacaaaaattggttcaggggcgacaccaaaaggaggaaaaactacttacaaagaatcaggtattccattagtacgttctctcaacatacatacatattttatcaaatacgaagaccttgcatttattgatgaaaaacaagcaaataaattagcaaacgttgaaatagaggaaaacgatgtacttttaaacattactggagcatcaattggtcgagttaacatagcgcctaaagattttgttggaggccgtgtaaatcagcatgttgctattattcggtgtatacaagaaaaattaataccaaaatatttatatatatatcttgcttctccatgtatccagaaatggatagagaaagagaattatggtgcgacccggcaagcattaacaaagggaatgattgagcaaatccaaattactttgcctccattagaagaacaaaccgagatcgttcgtcgagttgaagaactgttcgcctttgccgacagcatcgagcaaaaaaccaatgccgctttagcgcaggtcaacaacctgacacaatccattttagccaaagcctttcgcggcgaactcactgccgactggcgcgccgccaacccagagtttatcagcggtgacaacagcgctaaagctttgcttgaaaaaattaaggcagaacgtgaagctatcgagaaacaacctaagccaaaacgctccgctataaaaaagaagacaggtagccatatgagcaaacagattatgaaagtggttgaagcgttgaaacaagcaggagaaccgcttagtggccagcaattattagcggcagctggctacccaagcgacagcaacaccgagcaattggaacagttttttctggatattcgtgacgctcttaccatcgaagaatctattgtaaagcttgagcgcagtgacgacagccaagattggttcgccttggctaatccaccaataaataaagcaaagaactaa

SEQ ID NO: 286268 - DNA, 1590 bp, Morganella morganii
atgaaagtcgacaaactgcatattcgctcacgctttaaaaatcttgaaaacgtaagagtggactttgacgaagaccatctgatgacagtagtggttggccgtaatggttccggtaaatccaacgttctcgaagccttggtggctatatttcgcaacctcgatctaggtgaagccccccctttttcttatgagctgatttatcggctaggtgaacgccataggcccaatcatcccagtgaacgatggttagaaataaccattgatgccaatccaagccgcggcacactagcaaatcaatacgaagtacgtgtgcgtgaccttttaagtaatggcatgtcaaatgaacagccttcaagcaccatcattccgttttccaaagttaaacgggataaaaacggtaaagcgccatatctaccaagctatgtttttgcgtactactcaggccccagcgatcgacttgaaaaccattttaaaaaacaccgtacggatttctaccgtaagttactcgaagataagctggatctaaaaggtgacatccgaccgttattctacgctaaacctcaccacagccaattcgtattacttgccttttttttatcagaacaagacagcgcagaaaaaacatttttgcgggaacacttaggtattgaaggattggatagcattcattttgtgatgcgccaaccagggtgggctaaacagaaaggagaattattttggggagctcgaggcgttgttcgtcgctttcttgatgaactaatacaacacacactctcaccgataaaagtgactcgtcaagaagatacctcgttaaccggaaataatattcgcaatgagttctttcacttatttttaccagatgtaaacgcactacgcaaatttgcaagtgatctcagtgccgacgaattgtttaaaatgctcgaaagcactctgctgtccgaaattatctctgaagtcagcatacgggtgaaagtatccagcagcaaagagcctcttactttcagagaactcagtgaaggtgaacaacaactactaaccgtcttgggtctgctcaaattcactggcggtaaagattccttgtttttactcgacgaacctgacactcatcttaacccatcatgggctgttaaataccttaaattcctgcgtgaatttgtacctaatcacgataccagtcacttgctgatggtaactcatcaccctttggctattgcagagctgaagaaagagcaagttcaggttatgaaatgcgataatgaaaagcaaatatccgccaagatgcctgatgaaaatccgcgaggaatggggattaacttaatcttgcgcagcgatatgttcggtctacaaactacgcttgatgatgatactaaccaaaggcttacaagcagaaatgcacttgctgcaaaggaaactttatctaaagaaaagctagttcgcgagcaaggatttccgcctgaggatgaagaacagtacttggctaggcttaatgctcagctcgagcatttaggtttcaacctagcaacggatgacccagattaccttgagtttcttcgtaataagtaccactccaaacatgaggaaagtcattaa

SEQ ID NO: 286269 - DNA, 810 bp, Morganella morganii
atgcgttggatttgtaaggatgagattgaggaatgcttgactcaggcgtggaaagatacagctgaccaagcaaaagctgaattaattgccgctccggacgaagagacaagaaaggcgatattaaaaagagtcgcttcctcaaatgtttggcgtgaattctataaattgctaccagagtctttaaagcgaaaatgttggtattgcgaagccgaggagatccggtcagatatgccgattgatcatttcagaccaaagaataaggttgaagatgataagcaacatgatggttactggtggttagcattcgattggcaaaattatcgatgcgcttgcacgttttgtaatagccgtagagtttttgaagaaactgagggtggtaaagcatgtcgtttcccacttgaaaacccagaggagagggcctttgtacctgcggaccaaagcaaactgagtaatgaacgaccttactttctagatccctttaacccggatgatgaaaagctgctttggtttgataatgatgggctgccactcgctaagccttcagcaacggtcgagcagcaaacaaaagtacagaattctatagaaatatttcaccttcacgaaagcagaatagtcagagctaggaacatagtacgcttagaggtggagagacagattaggaaaataaaggctaatgatgatgtacaagcagccaaaacgaagttacgacgcatggtaaaagatactgaaaagttgtcgcgcgctgcgattgtttacttacgagcacatagagagctacctgaggtgaaagacatattaaaattggattag

SEQ ID NO: 286270 - DNA, 885 bp, Morganella morganii
atgactgcattttacaacgaaaacgatccgttcgctgctcagtggttacggaatctcattgctgccggtcatatagcgcctggcgtagtggacgaaaggagtattgaagatgtcacaccagatgacttacgcggattcacacaatgccacttcttcgccggtgtcggagtgtggtcactcgccctgcgccgtgcaggatggccggatgataaaccagtctggacaggaagttgtccgtgccagcctttcagcgcggcaggcaaaggaaatgggtttgctgacgagcggcacctttggcctgcattcttccacctcatcagcgagtgcaagcctggcgttatctttggtgaacaggttgcaagtaaagacggcctcggatggctcgaccttgttcagactgacttggaaacagagaactacgccgtcggcgcagttgatttatgcgctgcgggcttcggtgcgccgcatatcaggcaaagattgttctgggtggccgatacctttggcgggaagcgggcgcggagttggaacaagcggcaggcagggaggaatgaatattcaaacggccgcgcagctggcaggctggacaacagcgagcgcctcggatggagaacggggaggaactggaataacgccgggaatgacgggcagcagcttgacgcagcagtcaaaaatgacactgccagtccgacgaacggctactggcgagatgctgactggttactctgccgggatgacaagtggcggccagttgaatccggaacattcccgctggctgatgggattgccggtcgagtgggaaaactccgcgcctacggaaatgccatcgccgcgccggtcgcggaagaattcataagggcttatatgctgataacagaggattga

SEQ ID NO: 286271 - DNA, 1020 bp, Morganella morganii
atgtgttatagcaatgttacagatagtgatctcatggggcaaattgccgctaaactaaatgactatcgaaaccctcctcaaggtggcatgagccttgatcatgttaaacagtggattaatcaatttgagttaaatgataggcgatttgtcttagaggaaacggaccgattaatgggtattggatacttttctgagagtgactatcgcagagttattagtagtatcgccactgatgagcaaaatgaaagtttatttcaaaccgcagcttttctcgatattcagaatcaaggcactagtcaatctgagtttttggatttgcttcgagaagattgtgcagaagaattcgacattatgaccagaatgtctccacgtcaaagagttagttcattccgtgagtttatttacgttgacgacgtttcattctccggagctaaagcaattaatgatttaacttggtttattgataactttgaactccaacatattaaaatattggtgtattttttaggtgggcatacatactcaacatggaagataaaagaccaacttgaacgaagatttgctgacaggaatatttcagttgtcgttggtggaggtgattttgtatttgttgaaaatcaactccgaaacagttcgagttctgaggttttatggccaaaagcacaaagtgtatcaatacctaaatgggctaacggtcagactcattattcaggaacatatcgcaatggttacaccgcgaatactttttttcctgatgagcagagacgagatcgttttgaagcaattctgacaaaaattgggtttgatatccttggtcatagtcaaaatccttctgatgttataaagcccttaggcttttcaactttcaatggtgttgggtttggcggaactatctttactttccgaaactgccccaataatactcctctcgcgtactggtggggaacttatcttcaaacaggaaatagagctctggattgttggtatccacttatgaagcgtaatgtgtataataggtga

SEQ ID NO: 286272 - DNA, 888 bp, Morganella morganii
atggccttattcgcattaatggacaataatgtaacaacacgtatattacgtattgaactagatcaaagtgcaagctcaactataaatacaatttttagtcagcaattaacttactttcaatcacatcataactcacatattaatttctctgcggggtacacaccaaattataatgaatgtttcacactacctaatttcaatgaagctaatatacttattgatgctgtaaccagagataccgccattccaacttggaatccaaacacaattgatgcaaaacatataaaagccttatttgtaggcaccagctccccacaaaataataacattatagcgatccaaacatttaataaaaaacaaatactagatacttcaaaatcttttatcatgggattattcggatcacgaaatacatttagcgaagcaagcaatataggctttagtcttgacgaaaaacttgtagcaataatcgatggtacaaatatttattttagaagcttctttaaacttagaagcatatttgatatgagcagttatttttcagaagcaaccaatcaggaagttgatgatttttctatgcattctgcttttaatgtaccattaggctttagcttatctacaattgcagataccgttatcagaacaaaagtaactttaattaataaaagtggaactttgaatacacaatcaatttcaactttcaggcaagccgcacaaaaaataaacttcccattaataacaaccactataaatggcattgaaaaaattgttatgccacaagaaaaaaaagatatcaaagctttgctggattttcttgatgaagatatattcacatcagaaataaccaatactgtttataaatcaaattcaaaaagaagatacaactaa

SEQ ID NO: 286273 - DNA, 519 bp, Morganella morganii
atgaataaattggcaagactactgcttacggcaagttcaattgcgcctgtatgtataaccctgattttcatcggttgggtgtctaactctgattggttagtacagtacagcctgattacagcactagtgagctggcttctttgtataggaatggtaaaatttgctgaacgcaatctggaaactttatataaaaatatcgattcactgtctcctgctaacaaagaggtaactaactattttttgagctatctatttccactattaggaactgattctatagccgaaaaaaaagaatatgcaattttcttttacctttctctacttttttacatttgcttttctgaaaactacaatttcaaccctgtcttatctttacatggctacaaattttatgaagcggaagacgatactggtgttggttttgttttaatatcaaaagaagtaatcacagatattaaaggaaaacgatttccggttgtcaaattgacagattatacttttttacatgtagaacggtga

SEQ ID NO: 286274 - DNA, 705 bp, Morganella morganii
atgcaggaaaatattcaggcggctatttttgcacatgctgaacgtgaatatccccgcgagtgctgcggggtggtcgcgcagaaatcccgtgtagtgaaatattttccctgccgcaatatcgcggccacaccggaagatcatttcgtattatcgccggaggattacgcggctgcggaagactggggaacggtgaccggtattgttcacagtcaccctgacgccaccactcagccgtcagaactggataaagcgcagtgtgatgcccttggcgtgccgtggtacatcgttagctggccggaaggagatctgcggactgttcagccacgcggtgatcagccattactcggtcggccgtttgtgcttgggtttactgactgctgggggctgattatgagttggtttcggcaggagcgcggcatcgaactgccggattaccgggtcgactatccctggtgggagcagggtgagaaccgttacgccgataactggcgggaatcgggatttattcaggttgacgacccgcaacccggtgatgtcatcgtgatgcagatacaggcaccggtcgccaatcatgccggtattttgctgggagataatatgctgctgcatcatttgtacggacacctgagccagcgggtgccgtatggtggttattggcgcgatcgcacagttatggtactgagacataaaattaccatgacataa

SEQ ID NO: 286275 - DNA, 579 bp, Morganella morganii
  misc_feature (551)..(560): n is a, c, g, or t
atgaaaaaaatattgttgtgcctttttttgattcacacggatactgcatactcagcgaattgtgagctcgatactcaggattcggcattatgcgaggcggcaaatggtggtgacgctggtgcccaggttacaatcggatcttattactactacggtaatggtgctcccatagattataaaacggcggctgactggtatacaaaagctgcggtacagggtaatgagtacgcacaatattctctgggggagatgtattttcagggggagggagtgcaacaggattaccggcaggctattgagtggtttcataaatcaggtgagcagggaaatgctggtgctcagtttcgtcttggtgctatctatgaagacggtgatggagttaatccggactttttaaaagcggcagagtggtataagaaagcagctgaacagggaaatgcattttctcaataccagcttgcgaaaatgtattattacgggaagggaatagaacagaattaccgcgttgcagcggagtggtataagaaagcggccgatcaaaaatatgcatnnnnnnnnnnagatgcatctctctggtga

SEQ ID NO: 286276 - DNA, 561 bp, Morganella morganii; identical to SEQ ID NO: 5006

SEQ ID NO: 286277 - DNA, 2967 bp, Morganella morganii
atgccgcgtcgcttgatcctctcggccacggagcgggacaccctgcttgcgctgccggaaagccaggatgacctgatccgctactacaccttcaacgactccgacctgtcgctgatccgccagcgacgcggcgacgccaaccgcctcggcttcgccgtgcagctctgcctgctgcgctaccccggttacgcgctgggaaccgacagcgagctgcccgagccggtcatcctgtgggtggcgaagcaagtccaggccgagccggcgagctgggcaaagtacggcgagcgcgacgtgacccgtcgcgagcatgcccaggaactgcgcacctacctgcaactggccccgttcggcctgtccgacttccgcgccctggtgcgcgagctaaccgagctggcccagcagaccgacaaaggcttgctgctggccggtcaggccctggagagcctacggcagaaacgacgcatcctgccggcgctgagcgtgattgaccgggcctgctcggaagccattgcgcgagccaatcggcgggtctaccgcgccctggtcgaaccactcacggactcgcatcgggccaagctggacgagctgttgaagctcaaggccggcagcagcatcacctggttgacctggctgcgccaggcaccgctgaaacccaactctcggcacatgctggaacacatcgagcggctgaagacatttcagttggtggacttgcccgaaggcctgggccggcacatccaccagaaccgcctgctcaagctggcccgcgagggtgggcagatgacgcccaaagacctcggtaagttcgagccgcagcgccgctacgcgaccctggccgccgtggtgctggagagcaccgcgaccgtgatcgatgagctggtcgatctgcatgaccgcatcctggtcaagctgttcagcggcgcgaagcacaagcatcagcagcagttccagaagcagggcaaggcgatcaacgacaaggtgcgcctgtactccaggatcggccaggcgctgctggaagcgaaggaaagcggcagcgacccctatgccgccatcgaggcggtgattccctgggacgagttcaccgagagcgtcagcgaggccgagctgctggcccggccggaaggcttcgaccacctgcacctggtcggcgagaacttcgccaccctgcgccgttacacgccggccttgctggaggtgctggaactgcgcgccgcgccggccgcgcaaggcgtgctggcagccgtgcagaccctgcgtgagatgaacgccgacaacctgcgcaaggtgccggccgatgcacccacggccttcatcaagccgcgctggaagccgctggtgatcaccccggaaggcctcgaccggaaattctacgaaatctgcgccctgtccgagctgaagaacgccctgcgctccggcgacatctgggtcaagggctcgcggcagttccgcgacttcgacgactacctgctgccggccgagaagttcgccgcactcaagcgcgagcaggccctgcccctggcgatcaacccgaacagcgaccagtacctggaagagcgtttgcagctgctggacgagcagttggccaccgtcacccgcctggccaaggacaacgagctgcccgatgccatcctcaccgagtcagggctgaaaatcaccccgctggatgcggcggtgccggatcgggcgcaggcgctgatcgaccaaaccagccagttactgccgcgcatcaagatcaccgaactgctgatggacgtggacgactggacgggcttcagccgccacttcacccacttgaaggacggggccgaggccaaagacaggacgttgctgctgtccgcaatcctcggtgatgcgatcaacctcgggctgaccaagatggccgagtcgagccccggcctgacctacgccaagctgtcctggctgcaagcctggcacatccgcgacgaaacctattcggcggccttggccgagctggtcaaccaccagtatcgccacgcctttgccgcccactggggcgacggcacgacctcatcctccgatggccagcgcttccgcgcgggtggccggggcgagagcaccgggcacgtcaacccgaagtacggtagcgagccgggacggctgttctatacccatatctccgaccagtacgcgccgttcagcacccgcgtggtgaatgtcggcgtccgcgattccacctatgtgctcgacggcctgctgtaccacgagtccgacctgcggatcgaggagcactacaccgacacggccggcttcaccgatcacgtctttgccctgatgcacctgctaggcttccgcttcgcgccgcgcatccgcgacctcggcgaaaccaagctgtacgtaccgcagggcgtgcaagcctacccgacgttgcgcccgctgatcggcggcaccctgaacatcaagcacgtgcgtgcccactgggacgacatcctgcgcctggccagctcgatcaagcagggcaccgtcaccgcctcgctgatgctgcgcaagctcggcagctacccgcgccagaacggactggccgtggccctgcgcgagctgggccggatcgagcgcacgctgttcatcctggactggctgcaaagtgttgaactgcgccgccgcgtgcatgccggcctgaacaaaggtgaggcgcgcaactcgctggccagggcggtgttcttcaaccgccttggggaaatcagggatcggagcttcgagcagcagcgctaccgggccagcggcctcaacctggtgacggcggctatcgtgctgtggaacacggtgtacctggaacgcgccacccaggggttggtcgaggccggcaagccggtggacggcgagctgctgcaattcctgtcgccgctgggctgggagcacatcaacctaaccggcgattacgtctggcggcagagccgcagactggaagacgggaagtttcggcccttacggatgcccggaaaaccttag

SEQ ID NO: 286278 - DNA, 243 bp, Morganella morganii; identical to SEQ ID NO: 15164

SEQ ID NO: 286279 - DNA, 678 bp, Morganella morganii; identical to SEQ ID NO: 54015

SEQ ID NO: 286280 - DNA, 1200 bp, Morganella morganii; identical to SEQ ID NO: 6086

SEQ ID NO: 286281 - DNA, 885 bp, Morganella morganii; identical to SEQ ID NO: 54013

SEQ ID NO: 286282 - DNA, 1797 bp, Morganella morganii; identical to SEQ ID NO: 120698

SEQ ID NO: 286283 - DNA, 150 bp, Morganella morganii; identical to SEQ ID NO: 23314

SEQ ID NO: 286284 - DNA, 471 bp, Morganella morganii; identical to SEQ ID NO: 23315

SEQ ID NO: 286285 - DNA, 858 bp, Morganella morganii; identical to SEQ ID NO: 146957

SEQ ID NO: 286286 - DNA, 276 bp, Morganella morganii; identical to SEQ ID NO: 19894

SEQ ID NO: 286287 - DNA, 555 bp, Morganella morganii
atgataagtttatcaccaccgactatttgcaacagtgccatctatgatgatcttgcttccggcggtcgtgatgatcgccctggcttgactgcctgcctcaagtcattgcgtgacggcgatgtgctggtggtctggaagctcgatcgcctcggacgatcgcttgcccatctggtcaacacggtgaaggagctgtcagaccgcaagatcggcctgcgggttctgactggaaagggcgctcagatcgacaccacgactgcgtccggtcgcatggtgttcggaatcttcgccaccttggccgagttcgagcgggatctgatccgagagcgcaccatggcgggtctcgcctccgcgagagcgcgcggtcgcaagggcggacgaaaattcgcgctcaccaaagctcaggtgcgtctcgcgcaagccgccatggcccagcgcgatacttcagtttccgatctctgcaaggaactcggcatcgagcgcgtcactctctaccgatatgtcggtcccaaaggcgagctcagagaccatggaaagcatgttctcggacttacgtag

SEQ ID NO: 286288 - DNA, 1077 bp, Morganella morganii
atgccgcgtcgcgtcactctaaccgatcggcagaaagacgcgctgttgcgcttgccgacttcacagacggatttgctcaagcactatacgctgagtgatgaagaccttgggcatatcaggctgcgtcggcgcgctcacaacaggttcggcttcgccctgcaattgtgtgtcctgcgctatcccggccgggtgctggctccaggcgaactgatccctgcagaggtcatcgaatttatcggagcgcagcttggcctgggtgccgacgatctcgtagactatgctgcccgcgaggaaacacggcacgagcatcttgccgagttacgggggctctacggcttccgcaccttctccggacgtggtgcgagcgagctgaaggaatggttgttccgagaagccgagatggcggtgtcgaacgaggatatcgcccgtcgcttcgtagccgagtgccgacgcacccgcactgtccttcccgcgacatccacgatcgagcggctttgtgccgcggctctcgtcgatgccgagcgacgcatcgagacgaggatcgccagtcggctgcctatgtcgatccgagaacagttgctggcattgctcgaggagacggctgatgatcgggtgacccgttttgtgtggctgcgccagttcgagcctggctcgaactcttcgtcggccaaccggctgctcgaccggctcgaatatctgcaacgcatcgatctccccgaggatctgcttgccggcgttcctgcccatcgggtgactcgtctgcgcaggcagggtgaacggtattatgccgacggcatgcgcgatctcccggaggacaggcggcttgcgatcttggctgtttgcgtctcggaatggcaggcgatgttggccgacgcagtggtcgaaacccacgaccggatcgtcggccgtctctaccgtgcttcggagcgtatttgccatgcaaaggtcgcagacgaagcgggggtggtgcgtgacaccctgaaatccttcgccgagatcgggggcgccctggtcgatgcacaggatgatggccagccgctgggcgatgtcatcgcgagggcactgttgcaaagttag

SEQ ID NO: 286289 - DNA, 411 bp, Morganella morganii
atgaaaggcgatggtagtgatgtgattcagggttacatgaacttcacatcatggtcgatggagttcccgaccaaagagatcgccacgtattccggtgagctgaaagtagcagacgctgacagctttgagtggctgcaggaagaaatcgcggttcagagtatcgcagccaatcccgcgacactgactgttaaagccggtgaaactgcaacattcacggtcggatttaatccggttgacgcgacaaacaaaaattacgaagtggccagcgataagcctaatttcgctaccgtcagtaaactgctgaatgtcgttaccgtcaccggcgtcgctgctggcaccgcgaatattactgtcacatcggaagatggcaacaaaacggcgaagtgtgtcgttacagtcactgcggcctaa

SEQ ID NO: 286290 - DNA, 1137 bp, Morganella morganii
atgatttacaccgacggcaccatagccattaatgccggttcaccgattgtgaccggcactggtacgcagtggaaaaagaacattcacggtgtggccccgggccagcttatcagcatcgagaacggtatagcaccggtcagcatgatgatccgcgcggtaaacagtgataccgaactggtgttgtcattcaatgccccggtaacgctcagtggtgcgaaatactccattgccaccacagtcccggataccatttcggatgcagcccgcaccatgtcagccaatcagggctatatcgtttactttctccaggcaatgcagcagtggatgacagacaccggccaggtggaaattgagttgccgaacgggcagaaggtgacactggaggatgtaaaagggctggcttcgagggaatgggtcggggagatgctgtataagccaaattctgctgttacccgcgtacaaagtccgaacaaaaggaatgttgttcagctggaagacgggggaacagtcggttttaaagacaccgtcacagacagatatcgttttgcgttgatttcggatggctccacccgctgctttagtgacggagaatatacaggactggatttagtaaagatcgatggccgctatgtgcgactggagacaaatcctcatgcgggtacagcatcaatgcttagcattgtgtatcggcaagctaacggcgaaaaccagcacattgtgacgataccatatgacaccggcgtagttgcgactcgctcctggattcagcaggcaaccggatgggggtcagtatacgcggactatcctccgtatatgacaaatttcactaataccaatttgcctaatggtatgtatagatttaaccagaacagtcaaaatcccccttctgtcataggagacagatttggaagcgttataacaactaggtattccggggatattggacaaaggatagtccttcccaactacggcgcgacgcacatggcgatacatcggtatactggttctgcatgggaatcggtaagggtgttgacatccaatatgtatatcgtagacggcagtggatattataaaaaatcgtcgccaatcgttcagatttaccctgatggccattacgacaccaacgacgaatcctaa

SEQ ID NO: 286291 - DNA, 522 bp, Morganella morganii
atgaaatgctctataggctatagcgagacaaaagcaatgatcacttatgaagatttacagcaggaagcgaaaaatgccgcggataaaaatttcgaatatattaaaagtctcaggcagtacttccagcttttttttgaaaaatatttaaactcacttgagatatctagctcatctaagttccaagattcaaacggcaacgaagagcaaatagtcactattggtaacgtagaagatggtagattcgtcaaaagacaccttggtgagttcaaagttaacgataattttgaattaccgatctttgttaaaacaataataaaagtcgatagcatgcagtcgacttgggctgtggtctctgtggttatcaaggaaagtggcggtaaagtgacctttttaattggtaatggcgaggatgctacagtttgctgcatcccatcggggcacacccttgaagtttacggagaggcagttgacctgctgaaggaaatcattatcaaaatggtcaaacgcactgcgccacaataa

SEQ ID NO: 286292 - DNA, 516 bp, Morganella morganii
atgatgccgatagaaaatgatgggatttttgtttccaatgatacaccaattaagatgggcgtaagtccgaatctaacctttgcagacaggaatggaactgttattatcgtgacggatagatcgcctcaacaaaatattaactatgagcagccgcaacaaacagagagcggaataaacgtgggaagaaaagagttttggcttggcataactggagtaatcatcactgtagcggtggctatagttggctcagtgtggtctatagctaaccatgttaacaactccacaaatgaatcaagaagagaagttcagacttctataaatgcaaacaaacaagaagtggttgcattattaaacgccagtgatagtcgcaataatgatagattcaatcgtgtagattctcaatttgacaaggttgacattaaattcaataaacttgaatcaaagattgatgataactttaaagatacaaataaaaacatcaatgaaataaaagatttaattgtaaaatccaagtag

SEQ ID NO: 286293 - DNA, 384 bp, Morganella morganii
atgtcaggacatccacatgctgaccttatggctaaggcagcagagatagcgaagacggatgaacactggtaccggcattttcaggtgtttttaaatgacaactggagcgacccaagcagtgaatttaaattttattcaggtggggaataccgtcttaaaccccgcttcatcgacattagcggccaccaggttcctgagccggttcgggagcctctggaagacgaccaagagtactggatagcggacattcgatatgcgccatctgtttttaattgggagaataatgacgctgactattgctggcttgaacgcggcatcattcatctaaccaaagaagccgcagaagcccactcagccgccctgctctctttcacacagaagtaa

SEQ ID NO: 286294 - DNA, 486 bp, Morganella morganii
atggttgatacaattatccccgtaatactatctatatctagcatagtagctgctcttattggcgcgtttatatctgtcaggtcgattaaagaaagacgtaaaatagaagagcaactttttgacaaaataatagatcaacaagtaaaaaaaattaaaaacaaaaataaaaatgagttggaaaataagcttgttgatatagagtctttactaaagaaaaaaatggatgctttgaacaaaatgcaaatggatttagaagtcgccatgtcagaaaataaactcgattttgataaggcgaaatatctccggaataccatgtataatgaatacttattagaaataaatgatgctttgaaaggttttgatagtaaaaacaaacgattaattagcgatgcccttaatcaaggctctgaaattgggaaaataagatatcttgaaaggataactaaggaagcactagaaaaaacaggatgcgggacaccttcctag

SEQ ID NO: 286295 - DNA, 885 bp, Morganella morganii
atgaaagtttattgcactccaataaaaatatgctcatcagttgctagctattcagtggttgatttctttcatgattttgctaacgcctataaagagcacatggattatgagactgcagaccgaaaggttatgttttccgtattcgaaaggcctgagcattttattttggttgttataacccttaagaaaacaaaagctttttgtcaagcgaaatttgataatcttgatgatttatttttaagttacgaaaagttagacggaaacggtattttggagtgtaatatactgctatttagaagagataacctatctggtgtatatgtttacaatgaaggttcaatgagattggcccatcttgatatcaaattaagaaaattcttttatgaaaaagtaagaaataaatcgaaaagagttcccagaaaagaaaggtttgaaatacagcggttggttgatgactcgacattgatggacaagttagctaaatttgattttgttgatgagctaaatgttacgttgactggtgtaacagtaaacgaacgctttcttaacggatcaagttatgaaaaggctaaaacagtcaggttaagctttaggacagatggtgtatcaatgaagattaaaagaaacaaagaagagcttcatgattatatccaggagttaaaaagggaacatggttcatcaatcagtgtcaaaggtagatacagtggcgcaatggatggcgagacaatcgatgtggtagacacgatcaacagtatttacacgattgaacatgaagaatacttaaaagatttagataatataaaaatgagcaattttggtgaagctggtttgtgtgatgtattaattgataaaattaataaaaacaaattgataaggtcacagtga

SEQ ID NO: 286296 - DNA, 543 bp, Morganella morganii
atgaaatttaacaaaagagtttcatctaacatattgatatcactaataacttctgttttgttatacgctgtggttatatatattcttttcgatataaataatgaagatctagacaaactagttaaagtatattctgagagcattcgggggtatatttttacagcattcctagctgtagcttcttttttgctatcattactgacgtttgtagttatcaatttaaaagaaaaaatgtttgacactaaagaatatattgatatcgccaaaaaaagttgggaaaaacggcggaaggaaagtacctttaagaagaaaaatttatatgagccactagttgtcatatcatgggttctggctttcgctatatctagttgttttttgacatcgatatcacagtttctttttggtttttcctctaaccattatgtattgctgctaccaacatatttaccttttttatcacttaccttactgattattactctatatcagatggttgatcttatattgcagtggctatcttcagatgaagatttagatgtatag

SEQ ID NO: 286297 - DNA, 141 bp, Morganella morganii
atgctgattatcgccgcggtcattctgctgacggtcttcctgctggcgggctgttatctgtattcactcgagagccactgtaagcaggtgccggataaccctctggacggtgtgattcattatgggtgtgaagcgccatga

SEQ ID NO: 286298 - DNA, 306 bp, Morganella morganii
atgttaaaaataacgtcacatgaaaaatatgccatacaggatttttctggtcacggactgactgaaatttccaatgtaaagtcgattactggctatagcgaagagatagataaggttctgcaacacattaaccagaacaagtacttcgagacttatccttttttctacactattaatgccacggggaatgagcaggtagctgctcaaattgaactggcatttttcggccagtatataattgatttagacataaacgaatttgtacagaagctaaatatcccagctgagaactatactattggctga

SEQ ID NO: 286299 - DNA, 663 bp, Morganella morganii
atgacacagagtattcagcaattagcgtttcactctgaccttctgagggctgtcctgtggcagtacgaaggggcggataatctgaaagcactggccgggcataagtcggactggtttgaacaggcaaccgtcagcttctggcagaactggtaccgtgatgtgttcaatatcgatacggccaatgatttcgggctgtcggtgtgggcccgtatcctcgatgttccgctggggattgatatcccgccgagtgaaaaagaaaaaatcggtatcgggttcgggaagaaaaaagccaatttccgggcaaacttccggcgtaatgcggattataccctgtcgctgacacaggaacaaaagcgtctgatcatcaggatgcgttattttaacctgacccgaagcccgaccgtgacgaatatcaatgaattcctgcagcgatttttctggaacaaagacagcaaagtctttgtgctggatccgctcgacatgacatacatgtattacgtcttcaattttaatccggatgagcagttgcgaattattttagagaaatttgatcttatgccccgtccgtccggtgtcggggttaaataccgaattgttacaaaaaaatcgtttggttacggggtttatcgtaaaaacttcctgagcagtaatttcggagcataa

SEQ ID NO: 286300 - DNA, 1110 bp, Morganella morganii
atgacaaaaatatttaaaattccctttgctacacaaggggatcgtactgcggtgcctgatgacgtacaggcggacggttcgctgtcttacactcagggctacggttacgattatgaacgggatcaggccacggatccggcggccaaggatatcgaacgagagaagatgaacagtatcttccatgatattaccggtgcagtcggcgaaatacaggcgtttggtatgcctgtgtgggcggaagagggtaaaccctatgccatccgcagtgtcgtgtatcacaataaaaaagcctggcagtcgaaaattgaaaataataataccgaaccgactgccggtgttgcatggacggaactgaaagcggatgtgactgctgaggatgtcggtgcgtacacgaaggttgaagctaatttaaaatttcagccggttggtaattacgccgataaaaatgaggtcaacggcaaactcgccaaagaccagaacggcgcagacatccaggataaagctgcctttatcagtaaccttggtttaccggaattgctggataagaagttcgataagaccggtgggaagattacaggacagacggatattgaggcaccaggcggtcgcacccagacactgaaagcactaaccggcacatcggtatatcaggagttgtaccttcaggatatcttcgccgcatggtgggggattaccgctggtaacaagttaagcctggaaaacaggattacaggcaatacgcttactatcggtactgatggtttcaaaattgacggtaaaaatattgcgaccacagaccagcttttgggtgtgggccaaacgtacaaggatgtgacggcatccagaaaaaacggagcctcctacaccaacaattcaactaaaccaatcatcgtttatgttgaaacaaacagaaccgcctcaacagaatcagacccatacagtattggtggcgaagtaaatggcattcgtgttgcttaccgttggacgactgtgaatgaaacgatgtctatatcattcattgtcccgcctggggcgacatatatgtttaaaggtggatgggggcagcctcattcatgggaaccagttgttaaagtggtggagttatcatga

SEQ ID NO: 286301 - DNA, 360 bp, Morganella morganii
atgaaaatgcattattacaaagatgaaaacaatggcgtttggggttatgacgatgaccaggtagcgggcggatttgttcgtgatggtctggttaaaatcacagaaaaagaagcagataaattactcgctccgccgccgccaaccaaagagcaattgattgaacaggctgaggctaaaaagcagcgactgatggctgaggcaaccgctgtcatcgcaccgctggaggatgcagtggactttggtatagcaaccccggaagaagcagcagccctgaaagagcggaagaaatatcgtattttgctcagtcgtgttgatacctctctcgcgcctgatatcgactggccatctaagagagagtaa

SEQ ID NO: 286302 - DNA, 831 bp, Morganella morganii
atgaaagtattatataaaataattcgtattttttctttaatgatcttaatcgtgatcattctaggttatttaactattgagtataaaatatatgacaaaaataaaaatggcattgatattatcgcccatgcaggaggggaaatacatggaaatacatacactaattctcttgaggcactaaataaatcatactctgatggtgccagaatttttgaacttgacatcagccaaaccaaagatggtgcttacgttgcggtacatgattgggatggttggaaaaaaatgacttcttacacaggtgatttaccgccaatcttatcagattttaaaaaatataaaatacatgataagtattcaggattagactttgaagatattaataaatggttttcaactcatgaagatgcaattttagtcactgataaaattaatgttccatcagatatagttaatttatttgttgataaaaaaagattacgaatggaacttttttctaaagaagcaatcattgatgcatcacatatatttgatggaggaatggctagtttttatatactgacagatactaatgataactatttcaacaaaatagcactagtatctgcaatgtattttattaaggaaaacaaaatagaatatattgtttcaagtgcaccgatttcatataaagaaaaatttcatctcaagctactaagagcgttcggggttaatgtttacatgtacctatctggctcaaacgaagaaataaaaagtaaagtcacaacttacagaaattatattgatggtgtttactacaacgaaatccctcaggattctaatagtttgaaataa

SEQ ID NO: 286303 - DNA, 795 bp, Morganella morganii
atgttagtaactctaaactcagtttataaaagaaaaaactcatctgattctatcattgatgattttccaacggaaacagctaatacaataaaagatagattccccgcagtggtaggaaatattatatatcttatatactcaaattatagtaatgataaatacaaagagaataatcttgctaaaactttacaccattccattcttggtaaagagaaatcggataatgacatagtagtacttataatgggagaatctgcactcagtctaaggcatagtgtttatggttactcgaaggatacatcaccaaaggcaaataagatatttaacaatcatggttgtatcattgataatgcacactcaaattcaccagtaactcgtaattccataccaatgtcattgtcattttccactcctgaaagtgatgccccattattcaataataaatctgtgatagagatggccaatgataatggttttaaaacatattggcttggagctcaagagttacgtggatatcactcttcaaaatatggttatattgcattacagagtaatgtggtttcactgaggcacaataatgatcttgagttagtagagttgttaaaaaaaatccttcatgataatgaagataataaattcattgttattcacctccaaggtagccaccttccatatataaactattatgatagtgataaaaagaacaatcttaacatggatgactatgaccttacaattttaaaaactgatagcataatcaactcagtaataatttttttatattacatatcttag

SEQ ID NO: 286304 - DNA, 915 bp, Morganella morganii
atgtaccgcgatattgaaaaccggtatcacggacttaaaaaagcactccgtcaactgttcgatctgtcattcaccggcagagaacgaaataaaaactcactctacagctatattctcgctaaaaacgcacagaacgaaccagattcgattatcagggttaacaccggtgtttattcgtatgaccttgctgagcggcctaatgagtacgcacgtttccttgaacggctgcaatctattctggatgagtatctgcttgagggcggaaatgaaaacctgtgggcgttcagccatgtcgcagctgagtatgaccgcggcacactgaatgcatataccaacctgtcgttacagtcagaggtgtatgcatcacagaccacgctcacttacctgatgtcgcagcctgcataccagaaccagatagccgcagcgcttatctcaacgttcagcgactggaaaggtatttctgatgccgcccgcgccgatctgtctaacatcatcggcacatcgatagccagaggtgtcaacccgagagaaacagccagaatcgttagtcagcggctggatgtctcaatgagcaacgcaaagcgcatagctcagacagagcaggtaggcgcgttacgccgtgcaaactggaatgaaaccacatgggcgagtgagagattagggctgcgcaccggcctgttgtggttatctgcactgaagccgacgacacgcagctggcatgctgcacgacacggcaaagtgttcactgtcgaggaggttgagtcgttctacgctgacggcggcaaccggtttaactgctactgcgcgacacagccggtattactgaatgacgacgggacgatttacaacaaaggcattactgaccggctgacagcagagcggaaagcctggtcagacgatgaggagggtaattaa

SEQ ID NO: 286305 - DNA, 1446 bp, Morganella morganii
atggaagtaaacaaagacaggctgtcattggcggtgaataacgctatcagcgcggtagcaagagccagaatgacatatgcaaccggcggcatcggaaccggaaacacaaagcgcccgcgcatctggcgtgagttcggctatccggaagtgctgacgtttaatgacttttacaacgcctatgaccgtaacgctttgggtggtgcggcagtagaccggtatatctccggctgctggattgatgttcctgaaatattcgaaggtgacgaagaagcagaccaagacggttctactgattgggataacaagctgaacaagttgcttaaatcacactgggagcagatcaaagaggccgacaagcgcaatctggttggccggtattctggtctgattattcagttgcgtgatggtcgcaaatgggatgagccggtagacagagccgtggtttcccgcctgaaagataaagccattatccgcatgatccccgcgtgggaagaacaacttgatgtgaagcgctggaatgaagaccagctcagtgaagattacggctatccggcactgtattcattcacggaattgcatgttggtaaggaatcagatggctctccagggcggattattgatattcaccctgaccgcgtaatcattcttgctgaaggggcggcggacggaaagttaacatctggaaccccactactgcggaaaggctacaacaagctcattgatgctgaaaaggtatcgggcggcagtgctgaaggattcctgaaaaacgccagtcgtcagctcaactatgcgttcagcaaagaaaccgacttccagcgactggctgaagcactaggcaccaatatggacggcctggccgatgcgcttgatgagcaggttcgcagactgaacgagagcattgacgcgtcagtgatgatgcaggaaggcacggcgagtgtactgtctgttgctccggctgaccctgaaccgacatggcgtaccgcactggctgaattcgctgcctcaatcaatatgccggttaaggtgctgattggtcagattaccggtgaacgggcatcaacagaggatatgaaggattgggcgagaacgtgcatgtcacggcgcacgggatttctgaaatcggtgattgagtccgtagtatcgcgattctggacacttggtgtcattgagccaagagaagaaatcaccatcagttggtctgatttactggcaccgagtaaggctgagaaaatcgactcgatgaacaaagccgccgatatcgcagttaaaacacaacaggcattcggtcattcggtattccaggagaacgaaatcagggcgctgggtgaatatccgaccatgaccgagtttgagaacaccgacccaccggaaaccggccccaaaggagacccgttaactgatgataaagaaccagagaacagggtcgccgataataccgagaaataa

SEQ ID NO: 286306 - DNA, 417 bp, Morganella morganii
atgaaggtgctgaaagacaaaggctatgactatgccagccacaatgggccgcatgacatcgataaccgcgagtttggttctgacgcgaaatcacgtcgggaactggcacgggaagggtacgaaattgacgggaaaatttattcaatacgtttcgaagtggtgccgaaactgtccgttgatgagggtattgaggcagtgcgtgaaattctgccgctctgcgtgttcgatgagaacaaatgtggtgaaggcatcacccaccttgaggcgtaccggaaagaatgggacgacaagcgagggtgttggaaagataagccgcttcacgactacacatcacatgacgctgacggattccgttatttcgcggtcagtcgccgcaataagaaatctcacaccggcatgctggttcgcaaacgttaa

SEQ ID NO: 286307 - DNA, 156 bp, Morganella morganii
atgacaatcggatttgtattactactggtgatgcacggctctgctgtgcctgttaccgatgatatttatacgctcgaagaatgtgagagacgcacagtgcaggtaatgactgtgcggaatgctgaattagtgtgtgcggaggtggtgaggccatga

SEQ ID NO: 286308 - DNA, 318 bp, Morganella morganii
atgaacaaatatagtgacaaatcagactttgagattaataaggctgtggctattgctcttggaaaggttataggcataagaccagactccaatattatatatttaattggcggtgatgaacttatagaattcgccccctgcaataacccggcggacgcaatgccgattattattgagaataaaatcgacctaactcatctcgtcggtgacatggtgtgcgcaaagcacaaagaatattggtgtattcgtaaaaatccataccgcgccggttgcgaggtttatttgctgatgaaggatgcggagaatgaaaaaagttga

SEQ ID NO: 286309 - DNA, 546 bp, Morganella morganii
atgaaagctgattacggcgggagtacaacaccaaaggaattgcgtgatagatggcaaactcccctacctttattcacagcattggacgctgaatttggtttctatttagatgccgctgccgataaaaataatgctctctgttctcattacctcactgaaaaatacgactcgttgaattgcgactgggaaagttacggggctatttgggtgaatccgccctattcagatattcagccatgggtaaataaagccgctgagcaatgtaaaaagcaattacagcctattgttatgttagttccttctgatacttctgtgggttggtatgaatcagcattagaaacagttgatgaagtaagattaattacaggaggtcgaatatcttttattaatgcagaaacaaaaaagccagttagcggaaataataaaggttctatgtttttaatatggcgaccttatataactcctcgcagaataatcaatactgtaaatagaaattatttattaaatatcggcaataaaatattaaatgaatggaaaatagcatag

SEQ ID NO: 286310 - DNA, 195 bp, Morganella morganii
atggacattatcgactcagcaaatgaaacaaacgaattatatattcaagtgtcattatcaaatcgcaaggtagcaattaaatcatatagcggaatgtgtatctggtgtcaccaagaaccagtcgcacctaatagcgcgtattgtagtaaagattgcggtgatgatcatgaacagtataaaaggaagaatggatag

SEQ ID NO: 286311 - DNA, 207 bp, Morganella morganii
atggaatataaattattgcgcttggatgaagttttagatagaacaggatatagcaagtcatggacttacaaattaatagataaaggagagtttccaaagcaggtaaaaatagggtcacgctcggttcgttttattgaaagcgaagtggatgaatggatagagcaacgaattaataatgctcgttgccctgaaaacaccctcaattga

SEQ ID NO: 286312 - DNA, 1185 bp, Morganella morganii
atgaagctaacggacatggcgattaaaaaagccaaaccacgtgaaaaggtttactcactaggtgatggcaatggattgtctttaatagttgaacctaacggatcaaaaggctggagattcaggtatcaattcaatggtaaatccaagatgatatcacttggtatctatccggttattacattaaatgaagctagagaaaaaagggataatgctaggaaactagttgcaaatggagttgacccatcagaggctagaaaagaagaaagaaataaggttagtgggcaatctgagaatacattcaaaaagataactttagagtggtttaatggaagaaaagaccgatggtctgaaggttatcgcgacgacatgatggaagcatttgaaaatgatgttttcccatatattggagatcgcccaatagcagagattaaacctctcgaattacttgaagtgctttcaataatggaaaaacgtggtgttaccgagaaattaaagaaggtgagacaacgctgtggcgaggtttggaaatacgccataatcactggacgagctgaatataatcctgctccagatttagctagcgcattcattccgcatcaacgagaaaactatccatacttattggctgatgaattgcctgaatttttgtcctcggtagacaagtaccaaggaagtcagatagtaagaactgctttaaacattttaatgcttactggtttaagaccaggagagttacgaaaatcagaatggtcatttatcgactttgaaagtagaacatggaaactaccagaaaaaataatgaagatggggagggttcatgttgtaccaatgtcagatcaggtgatttctttactgcgtcaaatacagccaataagtggcgattaccagtatatttttcctagccgaactaaccataaaaaacatctgtccgaaatggcaataaatacaatgattggaagaatgggttatagaggcagagctactggtcacggttttagacacaccatgagcacaatattgcatgagaaaggatttaatacagcgtggatagagttacaacttgctcatgttgataaaaactctatccgtggtacttataaccatgcgctgtatttggaggggagaagggagatgatgcagtggtatgctgattatatagatgagctgagaagtaaaaagaaataa

SEQ ID NO: 286313 - DNA, 1305 bp, Morganella morganii
atgctgcgaattaatccgtcattcccctcaccgattcctgtatgtacacaagacagcgcctgtcaatccgtgcctgaaacagaaaaaaaactctcttttctgatcaccgatcggacagaaattcttcaccgcagcggtattgctgaaaagcacctcactccgcttctggcttttgcagagaaagaaaaactggtcatcagcttccggccggttgaacacgccgcgacaggtcttattaatgccggttatccgaccaaaaattttcacatcaaaggtaaaagcgctaatctcggaccaatggcgggcttcattccggttgagcaacatcttagcaagttaggtaataaaccgggtgataatgccggcaaaatcagccgaatgaatgaagagatacagcaatgtatcaggggaaaatacgctgaacccggtgatttggttataaccgcgcaacgcatcagagaactgattgaaatgaatctgatcagtgaatgtagtccaccactccgcgagaatatggcaggaaaaatcacgtatacgctgtcggtatcttcaggtaatccggcacacatcgcccgctatatagccagacccgccggcggtgatctgtacgccatttatcacgcagacaacaaaagtccggtacaggtgttatattccccggatgtgaaacaaccactgactgcagattatgacctgatgattgtttcacatcctatggaaaatcacggcgtacaggacacactcagaataaaaagtatcagtccggaagaacatatacgccagcgtgcatatctgctttcctccggtaccacaagaaaacctttcttccgcagtaccacagcagcagaaggactgaaaaccccggtttcattgcccgcaaaagagattttacgccgggcatcagctcaggatgctatccgtaaagagttacaggcactggaacatccgggttatggtaatagttcacaacgcattactgacctgataccggagatcaattccgcactagtctgtaagccgggctgtgacgttgttcatcatggcatggatgcggcaaacccgtattctgaactggatgataattttcccgccactttctttttgccggaacaaataggtgaccttcctcaggttgtaacggcagaaaataaggacgggctgaaacagcttttacacatattgcatcagcacggctattatatcctgtttaatccgcgctgggattctcactttatctcaccacgccgcgaacatttcgaagccacccgcaatatctttgaaaataaaaaattcagcacactgtga

SEQ ID NO: 286314 - DNA, 888 bp, Morganella morganii
atgggatataaatacgaccccgtacgcggaaccgtcatttcatcagagacgccgtacggttttgaggagagacccgattatgatgaattacatcatcaggctaatctgcttaaaataaaatcaatcattggagataaaacggatgatgagaatgttgccgcactgattacggttgaggaagcggagtatgttttaataaataccaatacttcgaatccttttcagtcagcgaaagaggcattgtttggcgtcggtgatattatttccaatttttcaggaagtgtttatgagtcaggccgcgttttccggattattaatgagttcaaagatatcggtattaaagccactgaatataccggaaaaaacggtaatacttatattcggctgtccggtcatgcaggggtaagagctttcctgaatgcgacccgttacttggcagataatccaaaaatattgtatatgggcgtgggaaccctggggcaaaactcagtttcagtcggcgccgcccgtttttcaattgtatattctctggcctatcgtgtcgtggagctgatatttaaagatgaatatacgctgacaaatttttttgtgaatgtgacaatggatatggcaaagctagctgttagcatgaaagtaggtggactagtggttggttattttgtaacagcagggtatgtcgccagtggcagtgtgatagctatatcattgggaatatttgccgttggtattgctgtatctcttattttatatgagattgatgattatttcggaatcagtgaatctattatcagagagctgaaaaaacagcgtaaaccaaggtctgatggtgaaggccgataccatgctgataatttcttcacgaactttggcaggtacagccgtggatga

SEQ ID NO: 286315 - DNA, 441 bp, Morganella morganii
atgctgataatttcttcacgaactttggcaggtacagccgtggatgagataaagccagtaaaaatgtattttgtttctgcaattttgctttttattgtagtggttagtgcatatttttcgataaaaagttatattgaatactttcttgaatttgacaaaatatcattctcatttcagacctgcgttattatttttggtgtaccttttcttgcgcgaggcgcatattttatttttatttccgggtatagaaaatcaaaacaaagccctaatggaaaaataactaatatatgtgcgttattaatagcatttggtattgtttttagtttgattttctcattttatgttgagtatgatctgacatctcgtggctatgtcaaatgtcataaatcatcaattcacgcaccaactaaatacgttatttcaaaggatatgtgcaaatag

SEQ ID NO: 286316 - DNA, 2892 bp, Morganella morganii
atggatacatcgctgttcagtaaaaccccttcaataaccgttcttgacaaccggggtctggccatacgcaatatcgcctatcaccggcatcctgatacaccggatgaaactgaagaacgtattacacatcacagctataatccccggggttttttaaccaaaagcacagacccgcgtctgtccggtaaaaaattatctaactttacaggtattaccggactcagcggcacagtcctatgtatggcaggtgccgataatggcatacaaatcaatctgaaggatgctgcaggacgcccgtttataacaatcacaaatatcggtacagataaaaacggacagcatgatctgagcagtgcggtcacccgggctatccactatgatatggccggccggccgtcatatattgaagaacagagtggaaaaaacacctcactgattgctgaacgtttcttctatgccggtaatacagctcaggagaaagcatataacctggcagggcaatgcatacgccactttgattccgcaggtttgttgcagacagacagtattgcgctgaccggtgtacctctttccgttacccgccggttacttaaagacgcagataacccagcaatcattcaggactggactcagacagaagatacacaactatctcccgaatcctatacaacactgacaactgcagatgccaccggagcaatactgacaaccaccgataccacaggcaaccaacagcgtatcagctatgatattgccggccacctttccgccagttggctcacaatcaaaggtgaaaaagaacaagctataattaaatccattaattactcggccgcaggacaaaaattacaggagacgcacaacaacggtgtcatcacaacatattcctatgaacctgaaactcagcgtcttattggtattaaaacggagcgctctgccggacacaaaaacggggcgaaaatacttcaggatctgcgttacgaatatgatccggtaggtaatattctcagtattacaaatgatgccgaagagactcgtttctggcgaaatcagaaagttgttccgaaaaacacctgcatctatgacagtctgtatcagttggttaaagctaccggccgggaaacagccacaaccccgcaaaatacagatctcccttctcctgttcccgcagacaacatggcatataccaattacacgcgggtttatacctatgataacgccggaaatctgacgcaaatacgccattcatcccccgccaccggtaataattacaccaccccgattaccatcggtgaaagcagtaaccgtggtgtattaagcagtattacacaaaacccgtcagaggcggataccctgtttactccggcgggattacagacaatattacaacccggtcaatccctgcgctggaattcgcgtaatgaactgcaatatgttcagaatcccggctctgcgggtgggggagaatcttaccgttatgacgccggtggccaccgtatcctgaaaatcagcagtaaagaaagtaatgcacaatatcagcgggtcatttatctgaccggtctggaactgcacaccacgtcacgtaataacacagaaacagaaagtctgcagatcatcacatccgggcaggccggacgtgcgcaggtgcgggtgctgcactgggaagccggatgccctgccggtatcactaataaccagatacgttacagttatgacaatctctccggcagcagtaacctggaactggatagtgacggaaatatcatcacgctggaagaatattacccctatggcggtaccgctgttctggccacccgcaacaaaaccgaagccggctacaaaacaatccgttactcaggtaaagaacgtgatgctaccggtctgtattattatggccgccgttattatcagccatgggcgggtcgctggctctctgctgacccggcaggaaccgcagacggactgaatctgttcagaatggtgaataataatccggtatcactgacagatactgacgggctggcaggtgaaaggctttcgaagctctttgcatcagacagtgcacaactgaagaaagggaatatcacacctctgcggaaccgcggattgtttgtcggcaatgacagctcagagacatcgctgccattcagtatcggccggctcgattctgttgactcctctccggtagtaagagaataccgttctgacttactgcaaaaggggggcgatttatacggcgctgtcgatgttttccgcggctcgcaggtaacctctaccgaatccggttcaggaacaatcggaacatattggggaagaaaaacactttccgatgatattaccgggatcaacgtagtaaacggcatgtccggttcagttggtatacgtattaatacccgcgatatagcagaaggaaaaccggttattattacctccggtgccctgagcgggtgcactatgttgtatgcaatggaaagatcacatttctatgccgttcataccgggcaaaaaccgggtgatgatgaatggaaaaccggtattcagggtatcagcacaacgcaacaggtttttaatgtacttgcagataaaaacttaccggtcagcggggttcataataacgaccttataagtaccttacatgaattcgatagcagcgtaatcacttatatgggtaaaggcggtacccgaatcaaccaaactgcggagaatgtttttgcttttgactacaatgaagcacaagcttcccgttttgatatccgggcgggttacagctatgcattactggcaaaaaatgcgggcaaagttcacgcgaaagttctgtcagaagatgtcaccattaatccggcgaccaacaaaattaatgtattgaactcaatgaagactcgtcttcattaa

SEQ ID NO: 286317 - DNA, 558 bp, Morganella morganii
atgagtggagaatgttttccagtgaaatcatttaaagaaattgaaactgaatgggataatcataaggatgacaattttattgaaagttatatcaggccggataatgaatggcgtgtcagaacttggattccgtttgcaaatactaaatatctaagaactataataggaagaatcacatctagattattacgctacgtttcatatcttgtaacaacgtccggtaataatcatcctgtttattttggttcacaatggttttctattaatagaactttagtaacgtctattatagatatagatgataacacacttttctttagaaattataaacaaactgtatgctccgatgaacatgcgtttcaaacatgcgttagactatataacctaagtaatataaaaaataaaaataacagatatataaattttaaacctaaaagttccagccctaactatctcaccagagatgaaataaaaaaaataattaagacaaataattattggtttattagaaaggttaatgaacttgatatgttgtattttttacacggcaatatataa

SEQ ID NO: 286318 - DNA, 510 bp, Morganella morganii
atggataatgttccctatggtggctctgtggttgctgatgcttacctcgatgagcctgagataccgacagttcctaatatggctatcgtccgttcacctgacggaaaatcatggctgcatgttccggattatcgcggttctgtggcgtacgacaaagagacaaagcaacaggctgaaattaccgaaatcggcgaactgccagacaatttgactccggaagcgccaaaaaccccgtttgataaatggaacggtaaaaagtgggtgacggataaaaccgagctacaggcatatgaagttgccgttgccgaaagtcagaaacagtcattactggcagaagctgaacaggcaattgccatgctggagcgtaaaatacgcctcaacatggcaactgatgaagacaaggtaaaattgactgagtgggaaatttatagtgtgaaagttaccgataccgacacatccgccggtatcagtacagaatggcctacaccaccggcttcaccggccagataa

SEQ ID NO: 286319 - DNA, 423 bp, Morganella morganii
atggaatatatctttgataaaaaaacaaacgcattttatccggttgcgttacagcaggaatatgaaaatgcaggaatgtggccggaatcaggcgttgagattaccgaagaagtctttgcttctttccggaacccgcctgaaggcaaaatgctgggttcggataagaaaggtaatcctgcgtgggttgatgtgccgccactgacacatgaacagcatgttgctatcgctgcatcacaaaaacaggcactcattactgaagtcaacaccgaaaccgaaatgctccgggctaaactcgcgcttagtcgcatcaaagatgatgaaaaggcgcggttaaacgcttggatggattatctggacgaagtggagactgtggacgtatccaccgcaccggatattatctggccggtgaagccggtggtgtag

SEQ ID NO: 286320 - DNA, 549 bp, Morganella morganii
atgaccattgatttgtttttattgagaaatgttctgcattatgaccatgacacaggaatttttacttacaaaatccaaagagggcagtcaaaacccggtgacagggctggttatgtccataagagcgggtaccggtacattggtttttgtggcaaaagttttaaagagcaccgccttgcgtggctgtatgtgtacggagtatggccagcgggtgacattgaccacattaatggtgagcaggctgataacaggatatcgaatctccgtgtcactaacgatgcgaaaaactgcctgaataagaactggcaatcatctgtaaacaggtctggcttcagggggatctcataccataatccgaaaaccggcagaccaaagtggagggtccgaattacacatggaaagaaaaggttgtcggtaggtaacttctatacattaccggaagctatagcggcgcggatagaggcggaaaatcgctactatggtgaatatgcaccgtcaaaaggatgcatgaaaggtacggagaaagcggtatgccacggaaccctttaa

SEQ ID NO: 286321 - DNA, 474 bp, Morganella morganii
atgaataaccgattatataaaaaagtaatggccgcttgtgctgctggcgcgattgccggtgcgttggtgctgattcccgcgttagaaggtgtcagatatgagccttatcaggatgtggcaggggtttggacggtttgtgcaggaataaccggcagtgatgtcattcagggtaagaagtacacacagaaagaatgtgatgaccttctggtaaaacacatgcagccagcaatcagggctgtagatacgctggtaaaagtcccgctgaatgattaccagaaagtttcattgtactcactgacatacaacatcggtgtcgctgcatttaaaaaatcaacattgcttaaaaagctaaattccggcgatcaggttggtgcttgtaacgaactcagacgatggatttatgccggtggcgttaaatggaatggcttggttactcgtcgtgagattgagcgcgaactctgcatgatggagtaa

SEQ ID NO: 286322 - DNA, 1578 bp, Morganella morganii
atgttaactatcacaccaaattttgcacaggaaagagcactgcggttattgcgcagcgagtggaaatcacaccgcacgttcatgatcagcagtccgaccggcagcggtaaaacagcgctggctgcattcatcacgcacggttgcaacagccgtgatatgcgggtgatgtttgttgtgccgtatacgatcctgattgaacagaccgcagcacggtttatcgattacgggattccgatggaggatatcggttttgtctggcgtgatcatccgaactatgacccgacacgactgatccagattgcatcagccgatacgctgatccgccgtgaattcccggacaacatcgacctgctgtttatcgatgaggctcacctgcgccgaaaaaagctgctggaagttatccgcgataatgaatttaaggtgattggcctgtccggcacaccgttttctccgttcctggggacgtattacgaaagactgatcaaacccaccacgatgaaagaactgatcgaacgcggggacctgagtccgtatgagttttacgccccgacaaagccggatctttctgcggttaaatccaccagcagcgcagaatatggcagcgattacaaagaggccgatattgctgaaattatgtcgggtgcggatctggtcggtgatgtggtcgataactggctggccaacggtcagaacctgccgaccatctgtttttgtgtgaccgtcagccatgcaaatttcgtcacaatagcgtttaaccgggcgggtgtgaatgctgagattatcactgcagataccccgcatgaagaacgccagcttatcatccaccgctttgagcagggtgggacaaaaatcatcgtaaacgtcggcacactggttgccgggtttgacagtgatgtcaggtgcattatttacgcccgtccgaccaaatcggagatccgctgggtgcagtgcctcggacgcggactgcgtaaagcacaaggcaaagataaatgccttattttcgatcactccggatctgtgcatcgcctgggttttcctgatgatatcgaatatgacgaattgccgggtaaaagtgacggtctggaagaatcatcgtctgtccgtgaccaggaaaggcgggagaaaaaaccgaaggaatgcacatcctgtcactacatgaagcctgccggtgtttacgtctgcccgaaatgtggatttaaaccgctggccggtgaggacgttgacgttgatacctcccgcaacatcaaaaaaatgggtaaatctgaaaaggtttacaccacaaaagacaaacagagtttttactcccagctcaaatattaccagaacatccgcgctgccgaaggaaagccggtcagtgacgggtgggtctccaataccttcagagacaagttcggtgaatggccacgtagcctgcatgccacaccgcaggaaataaccccggaggtatccaatttcatcacacacaaacgtattcagtgggttaagcgtaaacagaaaaccgaagcactgatgccgcagagaatcgcagatttaaaacagcaactgaataaaaacgcacagcagggagaattattgtga

SEQ ID NO: 286323 - DNA, 1626 bp, Morganella morganii
atgacggaaaccatctttaattttaaaaattatcccatagtttttgtcggctccggcatatcaaaacgatacctaaaaaactttccaaaatgggatggtttactggaagagtactgggctaaaataactgataactctaacaatttttataattacttgaatagactaaagaaagaatatcaagaaaattatgcggatgaaacagatttaaatcataaaatatatactgaagcggcctcctatattgaagaaaaattcaatgatttatttaatgaaggagcaattactttagatggattaactgcaaaaatagtatttagcgaaagaatttcaccgtttaaatactcattgtgtcaaaagttttcatcgctagaattgagagacgacatcgatgaggatgagtttaagtcatttaaaaaatttttaaaaaaagcaaaaatgattgtcactactaactatgacccatttatagaatcactactcagggaacaatctgttacaccaaaaatatatgtgggtaacgatggtttctttgatgatacagtaggatggagcgagttatataaaattcatggtgatgtcaatgacccacactcaataattataacgaaacaggattacgatttttatgatgaaaaatcaatattgataagtgccaaaatattatctaatatgataaagaacccaataatgtttatgggttattcactttctgatcgtaatgttagaaagcttctatctgatttttcatctcaattaccaagtgaagatgatagagtttcagctgaaagaataatattaatagaatataagaaagatgaacaggtggttttaaaaaaacacgttacagatcaacaattgaaaatcagttacacctcaattgaaacagataattacaaagcgatatatgacgatattttgcttgtcgatgaaggtctttctccttatgaagtacttagataccaacgagccataaaaaatttaattataaatgaaggagagaaaggtaatctagatacactactagttacaccagcagatctagaccaattagaagaagcagtaaagcaagggaaaaacctagtagttgctcttggtgacaagaaatatgtttcaacatatatagatgaaaatcattatatcaatgattacattttggaaaaaaatgaaatatcgaataaaacagcaattaaatatttacttgatgtaaattcaaccactagagtacccttctcaagactaataaagtcatgtaacttcaataggattgaattaaaatccaaagaaataaagaaattaaataaccgcattgctcggcatgggaagcttgacagcatcatagatgcaataaacttagataaagtaaactcacaaaaaaaattctcatcaattgccgaaataaatgccgagcaattcaataaatttaaagaattaacggtaatagttaaaaacataaagaatatcgaacagaatgaattagttcactatgtcaaaaatatagcaataccattatttaatgatgtcaatactgatgacaatataaaaacagagctaagaaaattatttttgtgttttgatctactgttcaatggagatgtatcgcagattatgcagaataaaaaatga

SEQ ID NO: 286324 - DNA, 285 bp, Morganella morganii
atgacagatttttatatctcagctattcgtatggacaaaacgggtcagcatattgagttcgtaaaagtaattaaagccgggaatacagcaaaccaggcaacactcaattcgagacaattcgtcgctgagctaattaacacaacaaaagttgaatttaagaccatcagattagttaataataaatggatttatggttcaatcgtcaaagcaacatcggcgggatatatcacaacagcacccaatggcaccacactcgacaacctgggaaatctgccgacattttaa

SEQ ID NO: 286325 - DNA, 1443 bp, Morganella morganii
atgaagttaacttgttcattagtaaatggtcagcaaaataatttagcttgccttccgtcaggcagagaaaccggaagggaactaaatagcataatgaaaaatgtcatttctgtacgaaactctccggatacaatgtgtaagagcagtgatttaatgaacagaagcgcggatgtaataaaagcattttttaagaaaacaatagcagctcagagctatcacaaaatgttttctgaaggcggtgatttcaaagatttaggtatcgctctgacagattcatctgcacggaaatcttcatttaattcactacagcatcttgataaagtatctaatgaatacttaacaaaaataaaagaaaaaacgccgaatttgaccttgcaggaaaaggttttgctaagtaaggttgtagatgcaaaaatccatttcagacatcagagtaattcacaactggccaataacgccggaatacttaacatcatgtcgttaaacaagttgcaatctaatgaaattaactctgcaagaaatacatactcagaagatatacgctgtttaagtaatcaggattttgttttttttggtgttgaattttctgataataaggctggactccctctcaataccctccacacaggttcagattttggcgccaatgcttatatagttgatgaacagtctcctcatgggtatctgacattgaccgatcatttctataacagaataccacctgcatttatgcacgaacatcaggaatttataagtcaattctccgtggtaagtaaggaggttcaccgtgacgttcatggggataaaggtacacgggatattcctatctttaattctaaagacatgaagcccggactggggttacacctcatcaatttcctcagaaacagcaatgatacagaatttaaaagctttgctctgaatgaaaatctggacggtgaaaatttagataaaattttaaattttgtatttcagccagagttccatgttccgagaatggtcagcacagataattttcaagaagtaaaattacggaaaataagtgcaaaaaatgcggttaaagcttctaattttgaagctatttcggaacatataaaaaacaaagataatgcatgtaaaattatggggcttgctatagaacttgctaaaaaagatattaccgattggttattctctaaattcatttttactgcagatgatgtaaaaaaaatgtcaaattcaggtaaggagattgagttcttactaagtgatttctctgcggatgaaaaaattctgaaagactttttggaacgtgggttggtggaaccgaacaaagtattcagaagcattaattttggtgatacgatgttagataatgcaatgaaattcgatcaaaaagaaatgattgctctattacttgaatatggtgctgttagtggaaatgaaataagtaaacgaagataa

SEQ ID NO: 286326 - DNA, 195 bp, Morganella morganii
atgggaatgagcgtcctgctcagcaaaacggaagagagctttagttcgattgcgaatatcttactgaaaggcagcgggctgagtgactctctggcactggtgctgtccggtatcgatatacacccgattttacttgcctggctggtggctatcattgatgaggctgatgccgctgtacccgcatatcagccctga

SEQ ID NO: 286327 - DNA, 126 bp, Morganella morganii
atgcctgataatggtcagtattttattgccgtattactgagtctggttaatattatctgtttcaggtgggtaataataaaacaaacaataaaaagcccggataaaccgggcttgtatttctgttga

SEQ ID NO: 286328 - DNA, 1005 bp, Morganella morganii
atgaaaataaaattactggcggcactggccgctctgggaatgtccggtaatgcactggcttatggtgattgtattattgaaagccctcagggatatacaccggtaacacaaacagcaaagccaagggaaattttcactatacgggctgatactcctatcaatacacgtattggtactgctgaatcaacgccactttatagtccgttaacttatgtttgttatacagataatttacattcacgccggccttttcttacatcgtttactccttataccgggcacccggatatgtatgaaacagaaataaaaggaatcgctgtaaaatttgtctatgagtatggcggaagagaaaaaccactaccatttcctgaacaagttgtattacccagccccggctcagattttatcagggtaacaataaatccggaaaggtttatcgcttacttctataaagtagaagataaaatagagttaaacactcgttacccggatcaaaatataatcatgaaaaagaacgctaaattgggtcaaacctttatcgagaatacccttgttctggattatgccatcgatccgattttcgttgtcagtacccctgtctgttcagttgataaaccacttcctgttgatttcaatactgttaatgccactgacgtccggaaaggagtaaagcggccattggaatttggtatactttgcaatactgattacagtaattatgctgttacagcatcaatcagagcagaaaaggaaaacgaagattccactcgtataaaagttaaagataataatggcagctatgattctctggtaatagaaatactggacgaaaacaacacaaccattaaattgaatgacttaacaaaaataccaataaataatattaaaagcggaacaaaagccagtttcaaatggaaagcgaagctaaccaaacgaagtgataagccttatccggcaaatggtccgttccaggcatccgccattattactttaaatataaaataa

SEQ ID NO: 286329 - DNA, 189 bp, Morganella morganii
gtgcatataaagacgggtattaaagataaaggccaggtcttaagaataaacttaagagaaagtcttattgttaatgacaatatctgtttttatcatgtgaaagcgtttctgtgtatatataaaggaacgaacactcttatgtttatgaatgtaaaattatctaaaaatttagttatttttgcggattaa

SEQ ID NO: 286330 - DNA, 132 bp, Morganella morganii
atggatgaacaggtgaagaaaaaatataatgtagctttcatggcattactactgattatgctatctgttttttatactttctataccattgttattgtactttgcatcaggcagtatcatgatttattttga

SEQ ID NO: 286331 - DNA, 264 bp, Morganella morganii
atgagcattaataaaaaacaaacctcaaagaaactggcatcacaggctgccggggtactggcaaataaaaattcatctcctctggcaaagaagctggctgcatcggtattggcgcaatcaaatactaccaaacaaacaggagcggatattgaaactctggcctctgatgtgctgaaaagtgatcagtatgatgaaaaaaccaaagcttttgcagcatcagcattatctcaggctaataaagaacgattcagtccgcggaagtaa

SEQ ID NO: 286332 - DNA, 687 bp, Morganella morganii
atgatgacatcacctgaagaaataagactggcagatattaatgcactgtacaatcaaaacagaactgatgagattgccatcactgaaattcctttttctgatttttttgaaaaaattaaagattatgaaagaaggctgcgtgatgctatagactccgggtataattatattgacaaacagatcacggaatcattaagggataataatcaaatagattatctgactaagatagtaaaaaatattgatgaaaataccctgtatattaacgataattatggtcagatcgatatacaggaactaaaaatcgaaaccgactatttaatggataacatccgatccctgatagtggaatataatgcacaaatcgccctgctggaaaaattaaaactccccctgttatcccggacgaaaagacagacaaattccctgacttccggtattgatgatgtcatcaatacgttgcgccagaaggtcaccattctcaataccactctggatgattacaccaagtttaccgaactgctgggtaatattgataaggtctcactgatggccgtcagtattgccggtgtctggcagaaactggcaaccgaaattacgccatttttactgccgggcgcatctcctgaaggtctcgatgcccgggtacaggcactgaccagctactttgcccgcttcggtagttga

SEQ ID NO: 286333 - DNA, 657 bp, Morganella morganii
atgtcatcaaataacgaaataacattatcagaattacatgatcagtcagatgaaattattttctggcaaaaaaatattgaagaaataccattccctgaacaactgaaggatattaatatccatcaaaaaagaacacacaaggcaatcgaccgtgtatatgataccatacataaagagcttgataccctgccggaatatgacttttccgttgacgtactgaaacagatgcaatccatagttaatgagctatatgcatttaatcatgattgctataacgccatgcagataaatgaattaaccgaaaaaaacaccaattatatttatgaaacatcagctctcattgatgaatatatacgtcaggtagataaactcaaaaaaattgcctctgtacatataggagaagataacactaatgacactattgatattcttaataagaaaattaatgatctgcgccataccctcagtgaagcagtgaaatttgcaattttgctgagtaaaataaatacgtatatgctgaatacattatctgttaccggtttctgggtacagctgatggcatggtatgagccctacttcaggccggaggcaccggctgatggcctggatgatattatccggaagcagaccgactactttcatgctttcggccattaa

SEQ ID NO: 286334 - DNA, 246 bp, Morganella morganii
atgaagacaatgaagacaatgaaaaaaacactaatgctcatatctgccggtattattaccggctgttcttctgcacaggttaaaacaccaagtgcaggaatggcaaacccggcttcagtatattgcctgcaatccggcggaaaatctgaaatggtacaaaccccggagggaacacacagctattgcctgttaccggatggtgaacgtattgaagaatgggccctctaccgccgggaccataaataa

SEQ ID NO: 286335 - DNA, 321 bp, Morganella morganii
atgaacaaatatcgtgaaaaatcagactttgagattaataaggctgtgtttcgcgccgccagaataaaacataaatggtttaaatttttaccgcatggcgtggttacttataatatcaaaagtgattgggtaatcttcgacccctgcaacaaccctgctgacgcaatgccgattatcctggataataaaatcgacttaactcatctcgtcggtgacatggtatgcgcaaagcacaaagaatactggtgtattcgtaaaaatccatatcgcgctgctatggaagtattactgatgatgaaagaggcggagaatgaaaaatag

SEQ ID NO: 286336 - DNA, 516 bp, Morganella morganii
atgaaaatactggaattgcctccactggaaaagataaataagcacttatcatataacccaactacaggtttgtttacctggctaataggcaggccgggaataggtgcaggaaaacaggccgggagagttaggcttgatgggtatgtcgatatcaagttcgaatatatcgcctacctagctcaccgacttgcatggctattttactacggagaagaccctaaagaaaaatatatagaccatataaacttagtaaaagatgacaatcgaattattaatctaagaactgcaacatctactgaaaattcttacaataaagctggcgtggtaaaaagcatatcaggaataaaaggtgttcactggaacaaaagaattaacaaatgggatgttaaaatcactcatgatggcaagaatgaattttttggttcatacagctgcataaaagaagcggaaataatttctgtgcatatgagaaaaaaattacacggcgaatttgcaaacttcgaggttccgcaatga

SEQ ID NO: 286337 - DNA, 477 bp, Morganella morganii
atggatatatcacaagcaggaattgaattaatgcagcacgctctcggcattaaccagcaaaacagaaaaccatacaggaactattttctttcatccggaaaaaatgaagaatgggagagtttaattaaaaatgggttggccgcatcaaatccagcgccaaaagaattttgtggtgatatttattatcaggttactgatgtcggaattaatatagccatatcaaaactaccagcacaaaagaaattaagtcgctacggagaatttcttaatgcagattcaggtttatcatttgccgaatggttaggtatcgagttaccggaatacgaataccggaatcgaagcggtaaatgtgaatacagaatgtatcgcgaaattcgagaccaatggtggaatttaacacgcatagaaggcgaatggatgccaaccatgaaagccgccaaagcaagttataaagaagcactgaaagccagcaggtag

SEQ ID NO: 286338 - DNA, 504 bp, Morganella morganii
atgatgcgccggtttttctcccggagtgtgctggtactgatatgcaccgtgccgtcgtgcatggaatacgccgcactgaatcctgatgatctgcctggtgatatcgggcgagctcagcggcctgctgcggaggctgtgatgacggcagacagttatcttgagcttgtgctgatctttatgggctggctgatgaacaacgcgctgtggcatgttatcacggccacggggctgttcacgctgccgctgattttccgtatcgcggggatctggctggcactgcgtgaaaccggagaggatgaggacgcgaaagggtttgccgcgctggcacgtaccgagcacgtactgtatctctcctttgtggtgatgatgttctgtgccggcccggtatgggatacggatttgtcggcaatgtattttgaccgtatccccgcgctccgcatggccgtaaccacaggagaaaataagttcagaacgacagtctggtatcgatggcgataccggtga

SEQ ID NO: 286339 - DNA, 3021 bp, Morganella morganii
atgtcagagaaattaaaaggtatctttggtaaattaatagataaagcggatgaaagccatacatgtatttatattgatttttcttcaaatgaagatgctcagatcaatgttattcaaaaaaatgagaaatcagcggaaataaatgatgataataaagcgctgacattattgctgtcagatattcagtctcagtttaaacaacaaggcatttcgctgaacagagttcaggggcaaccggaaggaaaacgtaacttaaccgccgggttgaaaacaggcaaagcatcgctgtcagaagtcgaagtggcattgcagaaaatgcagttccgtgcacaggaactgggggctgaactggtgttaaccgatcgcccggcagagatggcaaatgaacggtggcggttacccgggacttccggtcaggaaaaccgctttgagagtatgacggcggcagagggactggcgaaactggccgttgccgttcaggcggtgacggatcagtgtccgttacagattacactgatgattcagcctgatttacggccacaggtgatactaaacgtctctgccggtgaggtgaactggatttttgcggcaaaagagggccgttatccggtgaaagatttactggccaaaatggccggtaaaacgatcacgaatggctgggatgcggttgtggtataccagcgcggtcaggccaacatgctgctgaaacagcagcacattaagcggtttgttacaggcaatgtattagcgccgctgaatgaagatatcgattcatcagacgccacccggttactgacacataatctgacactgagtgccccgcatctgtcattcgacagtgcaggtaccggagattcaatggcgcaggtcggttgggattttgtcaaagggatgattgtttttacacaggaagcggatgacggatcttaccgtgttaagaagattgaaaaaatcaccccgctgaattccccgtttatcggtatgaaggtaccgttgtcaagagcgcccgggtcagtaagtgagattggtgaagtgcagtttgatattaaagagggggatcactttaccaataacctggtggtcaatgacatggggcaggaaatgatcagtaattttttcaagcggagatttgtcgcaaccccggacgatcagcgggtctataaactgggcaccatcagtaattatgaaaatcaacagcttcagccggaaaaatttgatattcgcaccatgggggcgccgaatacagcatcccgcggatcacaggatgaaggcgatggcgcggtggtgttatttgttcagatgaaaggcagtgacggcaggccggtggaaaaggaaactgattggttattagcagataattataccagtgcaatggtcctgggtaacaaatgttttcttgatagcattggttatccagatgcattgattagatttcaaaaatatccgatgggtgataatgttaactcgttatgggggataattagtaaggatgacgggagtggtataggtaacattgcccagatccttgttgattatgaaaatgagcgaccttttccggggatagaaggtcttactaagtatgatgtatcgggggtctataatttctacttaagtgatgaccctgatgtagtaacaccttatattatttatcccgattatgtaccgggtggtgataagcaatttgtaaatacatatcacacacagattgctggtgtggcgtcgatcgacattacgtcatatgatgctaataataaagaatttactgataggtatgcgatttttttctacgttgaaattaaattaaatataaattaccggggtgatgtgataagggagggttatactcattatgttacaatggaccgggctatagaagataatgatgtcaagataggtattatatttagaggatgcgatcctcaacatgaggatactcatctggatattgagaaggtaacagaattttgtaaagatatattgaataatgaattagaagaaaaaataagagacggtattcatgcttttataataaagagaggtctggcttatatcgatacatttttcgttcgaaatctgttatttccgggaaaaaattactttcatcctgaattggctcatcttcccggcgatctgctggtagaggggcagctggctccgggctctgaatcatttgctgtcactcccaccgaaaccgctatcgttgccggttcggaatatcagtttacaaccaccccggaagtcagcggcgtgaaatggagtatctctgattctgaaaaagacaataccggtgttgaattaggtcatattgatgccgcaaccgggaaatataccgcaccacagactggtacaattacagaaggtgtacgccatgtggtggtttgtgctgaaaaaggggacaccaaagtgtatgccctggcctctgttcttgctcatagtgtgaatatttcaccggcgtatcaggttattttgccgggaaaatcttccactctcactgctaattcgctgaacggcggagatctgacctggacactggccgataacccgcagggttcaacactgacaaaagtcagcaataacgaatatacctatacagccggtaaaaagaacgcgaaattaaaactgaatctcgaacgtatttcagtgacggatgaaacgggtacaacgacggaagcaatgattctggtccggaatgtgccgttaaccggatatctccgtgtgtcatatgacaatgtgccggaaaacagtgtacagcttacctatttccctgaccctgatgatgcggaaacgacaataccggcagatgaaattgaatggacactgttgaagtccggtggtgcaacgtttgatgctgaaaccggtattttatcctgcagtcagccgacagataacagttttgcggttatcagtacaaaatatcttgacgaggatataggtgtgttttatagcgtgattgcgatcccgctgccgctgaatacctataaagaaacaatactggcagtctattccccggaacaggaataa

SEQ ID NO: 286340 - DNA, 2835 bp, Morganella morganii
atgaaagtgactgaaaaatataaccaggatgaggttaaaggccgtaactttatatccgatccttattttctggaatgggacgatggtagttgggaaaaaggcgaaccgggtaaatacacagataaaaaagacggagacagaacctatatctatatcatgggtaaaggcagcctttcacagtcggttattttgccgaaaaaaagctcagggaagccagaggagccgcctttttactcattatctttcgattactcggttaaaaacagagcttcggtatcattaattctgacatatatgaacggggaaagtgaacgggataaaaaagaaatttcgttaccggataaaaaagagtggtatcaacatgaattgttacttgatgtatctgaggaagatactgaaataaaaattgagttttatgccggggaatcaggcgggaataaaggaatgaatctgactgccgttgatatgcagctgcatattggtggattcagtccggaatctattgtgtttgataatgaagatattccggcagataagccacagctgcgacttaactatggacgaaagcatactcttaatatcaagccgtctgatgacagtgcatggcgtgatcttggctgtgcactgaagtggtacagtgatatcccggcatctaactatccgatcaattttgatcctgaactgaacaccgggcaaccgttaaaaaaagagggaagcaattggggcatttcctgctcaacacaaaaggtcagtgatattccggaggtattcagcgtcatgctggtatctgaatacagttcagtgccttttatttttgacgcagaaataggtgattttctctataaactgacggagccaaaaatcagcggagtaggcgttattgctcataatgtaccggttgacgttagtattcgcgttgtctgcgattacgatgacgagtatccggacatgccgggtgtttcagatattgatgtttactggaaaattgatgacggagatattatccgtacgaccaaaacagatactgatggtatggctgctctttcgtttttaccggagaaaagcgggaattataaacttgttgcattaataaccgataaaacaggacgggaaagcagccatccgtttgatattattgtttatgatcgttctccgtggctggacgatgcaagggttaagataaacaatgccgatactgagctgtcgggagacgccgtatatctgatgagtggtgaggctacggattttcacctgaactgtgataaaaaccgtgaggcgttcgggctggttaagctcgaaagtaaagcgggaaatacaggtgtcagtatcacaccggcagaagggcgtgaaattccgccggaaggtctgtcatgggatgtcaatatttccggcgcggacagcagaatattgacactcatattgacctgtgaccaattctatattcagcaggaaattcagcttattgcattacagccggataccggaaaagaaattcagtcactcacagttaatggcaaagcaccggaagatataacggcattatgtatcggtccgtcagaaaatatgacactgaattgtgcagtcaataaattactttcccgcttacagattgaactgagcagtaaagagaaaacactgctggcagcagaaccggctttcggacaattacaggaactgagcaatagcaccgcggaatgggcattacactgcatcaatccgcagggcggtttctttgatcttgcgttgaatattccgccattgacaattccgctgacgctttccggccgcgtgctgccgcaggaaatcatctcaggaattgagctcattacgtttaataatacgccggtaacaaccccgggggatttactgcttgcgccggggaggatctgtacactgacagtgaaacctcattctttactgaaggatattcctgtttcattagtttcagaaaccagtaacaacgtttcggttatcagtaatccgccgtttggtcagaaaatcaatctggcagaaaacggaacctcatggcagatatctgctgatcctggctccgcacgcggaaaattctcattgcaaattcagagtcagtgggggggagcgccggttaacctggacggtgttgtattgtctgcggatttacaggatgagggctctgtccgtgtcactgatggtgacataggcagaaaatacgatattgattttaatattggttttgctttcctggcttttgaattctataaactggatttgaaacttcttccggataatttaattagcggacaaaccgtttcctgggaactgacggaaggcgacgatcaccgggatgcagtttcgtttgatccggagacaccgatagtattagatttaccgcgtactgattgggaatttaattatgccaaagaagaaagtactcaattcgatttattattaaatagtcaggggcagttcagttataaagttccgtgccatattttcagtgataaaaaatatctggaggaaagtcaatgtatttttatgttgaatgattcagttattgtccccggtataaataataatcttgaatataagaaaaaggtgtcgcttaaactgaaattatcacaggaagtatcagcgtttctgaatggaatggtattagcattagttactcataaagtagatgatgaaaatgatagtctgattataacctccgatgaattcattactgttgataaaaataaacctgaccttaaatggaccgttgaaaccaatgtggcagttaatcaccgttttacactggagatcgttttggaaaatttaaaagatatccgcgccgttatgaattttacctcagtataa

SEQ ID NO: 286341 - DNA, 4617 bp, Morganella morganii
atgcctcgtaatgtaaaacagattttgaatcatctcgcagagattaaacgggatgcatatgttaattacttcactaattatgttgtgggtaaaaatgaaaatacagcgatgctgggaattactgatgctgatgacctgtatgattattttttaacagatgtaaaaacgagtgctgactttgaaaccagtaatgtttcggatgcactggccagtattcagcaatatatcaataacattcttaatcaaaaagaaccgggttactcaggtgagtttagtgaagatattcatcagtggtgggacggctatctcgggcatatttcactgtggaaagcgtaccagaaaatagaagattatccggaagattataactcaccggattatgtgacagataaaacacaactgtacagtaccttcgcagcagatcttggcagtaacagtctgaatgatgtgggaatacaaacggcttttcttaaatatttgcatggttatgaagcagttaatgctatcagcgttatctctggttatattgattatcccggagagcgtagtgataaggatacatttaaagggcatggctttctgaattctgactattattttatcggtaaaaacaattcctcacccgctggtttttattggcgtgaagcaaatataagagcagataaatcatcaaagcatatctcgccccgtgcatggaaggagtggcagccgctggtcatcactgaagatgcaaaagatatattacaaatgcggattgtcaaagtaagtggttgcttttttattgtttacctggttggtaaggaagaaataattccggatgaagagcaaccagcggcaggaagcagagctgaaaataaaaaacaatacaaggttacacttaagttaagccgtatggggttggatgggaaatgggatattcctgaacagttatatgaaaaaatatacgtaagtaagcccgaaataaaaacaaaagataaatcagaatcgtttaaattaatatccgttgcatttactcaggatgagcaacgaaatgattatctggctattgcatggctggataatgatagtgaagaaaaaaatattgttttttctgatattttaaatgtaatcaggcaaaaattaactatcgacagcaaggaaattcttggaaacggatgggaaaaaaaattagcatcccgattttttagcaacgaaaacgaaaaaaataatatctgtcagcaccgtattttcggtattaaaaaagatatcagcagaatccggggcactgacaacgatcctaatttatcactggaggcattctattctttcatagaaaacaatcatcagttacgggtcagaggggtgtgtcatcgttcagcaaaaatacctgatcttatttcacttaacctccaggcaacggttagtaactggcgtaatgggcgtattattgtcagcggagaccggaacaatattactgtcagagcagaggcaactgaaggggctgaatatttagcgctatccctgtctgataaaaacgtcgttgtgtttaataagggcgatttttcggagcataacggctggctttccgcagagaaaacagtatcactttctcaggaacaatgtgacctgatagccgtaaaaaattacaaagaaatacgcagcggcgctggtttttcctatcagataacgtccgggggatctgtaaattcactggctcatattaaaaaccgcgtcagtacggtgatgcaacctgttgttgttcctgctgagttatctgttattgatggcagtcttccgggtctgaaaaaagaaaactggcagggaaatttaatctaccagaagggtagccatacaccgtggcgtactttcagctggaatgccagtacagaggatacagaggatacagaggagaacgttgactttaaatttggattaacagaggaaggtgtacaaggtaagtttactattgaaatcaggaacttatcaagtcatatcccttttattaccacgtttgcagagcatcagcagtttttgactttcaatcaggatgttgcagagctgaaaaaagtacgtcttaattctgttcaggttcgtgatcttatctaccgtgctcaaatctcaatcaggaatatttttgactgggaagcacaaattatggaagaacctgcagacactgacaacaaaaaagagaagctcgatttatatggtgctaacagccggtatttatgggagttatttttttatttaccttatttggtcgctagtcgtttttcacaaaaccgcctttattatcaggcccgtcagtggctgcactatattttttcaccttatgacgggcaccgtttatcagtaaaagatgacagtgaatcgttacctcctccttattggaactgtcgtgtgttaacacagtcggatctgaattatcaaaataatgataatgcattacctgatccttatgcgatatccgaagattccccttctcactatcgtaaatcagtctatttaatgtatatagataccctgattttcgaagccgatttaaattaccgtcagctcagccgtgacagtattacccgcgcctggggattctaccatcaggctaatggaatgatgggtcgtataccgaaggagcgcagcttaccgaaatggcagccatgtaccgtgagtcaattgatggagaatgaaaattattctgtacaggaaagttcgtctcctgagttattttccgctatatatccggaaaatatgccaaagcaactcagcggctttttctggtacagcagcctgggtaatgatcgattccgtcttccggttcaggatagtttattaagccggcagtctattctggaacaacgtttatttaatttacgtcattatctggatattgaaggcaatatgatgaatttgccattatatgcggctgcatttgatccgttcgacctgctgcgttcccggctgggcggaacctctaaactgacctatttacagtccgggtcattaagtattccgtcatattgtttccggactatgctggaaaaagcaaaagaacaggcggcggcactgattacattaggggataagcgtctcagttattacgagcaaaaagaacgctatcatactgagagcatgcaattacaggatgcgattaagcttgccgatgccagtagcgatattcagtcctcgttactggaacaacaaaaagctatattgctttcgctggatagagccagaacacaggctactgaaaaaaaagcatattataatggactgctcggaataaaagatgaaacgaagaaggaagggaagacaggggtgagtcagaaagaggttgatgccagaaatctgatgctgggttcatccctgtttcagggcgttattacggcagctgcggttgccgcaggtgttgcggctgctgttccgcgtatatttggtatggcgcaggataccggcgaccacggtaaaacggcactcctctcaggtgtggcaggggtggctgcctccggtgcggatattatgcgcggcactgctgaatatattcagctggatgaacagtatcggcgccgtcaggaagaatggacgtttttgggggagcaggcaaaaaatgaagttgaggtcttggatgcacaaatacaagcccaaaaagtggccattaccgcagcggaaaacagcgttaaatatacagatcttcttcagactcaggctaaaaatttgtacgaatatttcagccagacccgtcaggttaacgaaagtttgtaccaaaaaatggccaatattattggcttattacatgatcagttgtgttcactggtcagaacattttgttcactgacagaagcagcctggcgttatgaaacggatgattataaacgacagacgtttattccggcggatctgtggagcggtgataatttaggtgttctggttggtgttaaattacagaaggcattgctggaaatggaaatggcatatacacagcaaaatacacgccgtctgaatatcacaaaaacgatttcactgaaatcactggtcagtaataatctggtgaaaaaagatgaaactccgctgacaacatgggatgaagtgaaagatgcgttaaaaggagcagaaaaactgtccttcggattatctcatcaattttttgatatggatttccccgggcattatgcccgaaaaattcattctttatcagtgacattcccgacgctattaccaccatatcagaatatgcgggttctgctggaacaaacatcgaatacattgttggtttcaccggatattgatgcggttgagtccctttatacatcaacagaaaaagtcaataatcaatcaattatcaataatttgcgggtaaaccaaaaaattatactttcccgggggaatgatgacagcggagagtttccggaagatgtctttaccggaggacaataccatagctttgaacataccggggctatttcacattggttgttatccattccccgcccacaaaatagcccggaacttattgataatcttaatgacattatcattaaacttaattatacggcaaaaagtggtaatgaagactttgaaacagcagtaaataatttattggaaaatacagagttagctaaacaaggtgggaatgaaagtgactga

SEQ ID NO: 286342 - DNA, 3564 bp, Morganella morganii
atgggaactgacaaacataatttacttttttcacgcatcatagatcagtcgcttccgggactgtctgataacctatcggcaaaaaaagcggaaaaatcggttattacccgtctgaaagagggaacaaaagggttgatggctgactatcccggactcgggtatccggatgctaaaatgctgcataaccgcgtagcggttgcggtccgtgcagtggtccgtaaacagcgggaattacgacagctgaatgtattacgggcgccgcgtgaagaaaaaggattgaaagcattaacccggcaattaacgtatgaagatcagttttcgccaaactgggcagaaaacacattaccggatgcgatagattcaggccacggagccgttgcttatctttatgagctgcttgactttacagaaaatgtgattgaaccgaagggcgacagtgataaagcgatcacactgaaacagcgtcgcccggatatttataatattttactgaatgaagaaaacgtaaacggaaacatttcaaaaattcacattattaataaaattatcagcactgcaatcagtcagcaggaaaacggtgaggatcctgaaaaattaatgctgaacgtacgctatccctatcagttcccgtttgaaaactatctgaatcaaatttatgccgtactggatgaatatgatttatcgataggggatattaagcggcgctgtgatatggaggctccttattttacacaaccgggtttgcacggaaagcattcagattctgcactctggctggatagccatttaggtccgggtttgcgtgacattttgctggcagtaccacaaataaaaaatagtcagacagaagataatacgcgctattttaaacaaaactttggtattgaacagtttacggacttgttgaataccaccgttttttgtcagcaattaaaacttgagcgcagtgatctggaatcgttgttttcctgcggggaatatgtaccgcacttatctccgaatgtggatctgaaaacggtagttgcttatgtaggtgagcagggaagggaggtttctcctgctgtttacggatcagtttttattaatagtaatacatcaccggcaatgaaaaccggtagtgataccgatgccggagagcatacattcagccatatggatgagagcaggtgtgaacgaattgagcgttttttacgcctttcccgtgcattgaatctgccttatgaagagttggataaattactgacgtctgtcatacgtgctgaacataatcaggaggataaaaatctgattattaccggtactacgttacgggcaataggtttatttgtgagtcttaacagaaaactgaaatgtactgtcagccagttttctgctttatatgatggtattgctgtttacagccgggggaaagatatcagtgattttgaccggttatttaataatgatgaccggtttggctatcgttttattcttgacgacaaaaaaatggaagagcgggatattaaccgtatatgcagtgtttttggtattaattacgatactttttcttatctggcactggtgacccgtgaagttctgggattggatacattaacccgcagcaggaatgttatttctgctatttatcgccctgtggttttggctaacctgcttaaaataaaaccactggaattactcgccttactgaaatcaatgaatcctgatgctcagtttgaccgcttatttaccgggataccggaaaaccgggtctataatgcatttgaacaggccgatattaccagtgcgatcagtgcgttggtcagtatccatacatggcggacagagaataatttatcggtagcacagatctttaattggataacacctgcgattgttgatgagcaggaagataatactgagcaggaattgttccgtcagattaaagaaaatacaaacagtacgttattcagtaatgaagcattgtatatggccggtgtaccgaaggggatagattgggttttggaattacaagtactggtcagtgagcagggaattttgcgggatactgctgatggccttgactgggatagttataaagctaattcattaactactattacatcagtagtggataataaattaagtagtatagtatcagaagaacgaaaaatagttatcaatacaattttatccgtacttctggaaaaaagaacggctcagtggaaaagtgtgagcggattactggaaggttatctggggaataaaacagacagtattacaccagcgttgtattggtgcggcagtaatacagaatcatttctgaccgctatccgatcgctgcctgataataaaacgttgtctgaggatgatagtcaaattatgacattattatcaggcctgcggcgttatggtgaaattattactcattttcgcctggagccggccatgatgtcacaattattgtctcatgataataataattggtacgaactgaaaacagaaaagccaaccttacaattactttaccggctttcagtatatcggcagcttattgatgatggtaaacaaccggctgaaaaattactcaattatctgtctctgattaattcgctttcgataaatcgcagtagtagtgatgaaatacgtctgtatcgtgaccaggcactgaataaattatcactttttatgggatggagtattaatgagttattaacggctgcgcaatatgttgaaccggaaaatgccatcatccggacattaccgcaactccttctcattaaacaaattcattcagtctgcctgaaaacagggctgagcgcccgtagtgttatttcgctgtttaatctgaatgaagatagtgaatcatctctgtatcagtctgtcgctgatcaggtaatggaaagtctggcatcacaggatgtatcactctacagcaatgatgaatccagtcagggcgacctgactgtgagtgtttcagccgggcagacaacactgctggtttatagtaaaaaccaggaagaagaagatgaggtcgctgaagatgagacacaactgacggttactttactgacactggaaagtacgccgctggagggggtatctgtttcatgggaaaaaatatctgagcagggtgagttatccgcgactaaaacgacaactgataaatcaggccgggcatcagtgacattaaaagcggggctgaaacagggggtcgccttaattaaagcacattatggcgtgaagagtgtcccgttacctcttatccgcattgactgtgatagcagtacgttgggcgccacaaatattgagactgtaccggaagagccggttgctatcccggcagacggaaaaacatccgtcaaaattatcgtgcacttcagtgacagctacgataacccgggtattgataagaatgtccgctgggaaacaaccggagggcgctttatttataaaggcggaattactgatgatgacgggaaatgttacgcaacgctggtcagtgatgaaccggctgatatcacggtgcgtgcattctatgaaggtatgcctgatgattacagtgaagcggatatctcttttatttaa

SEQ ID NO: 286343 - DNA, 201 bp, Morganella morganii
atgcagactgtatcgggcatactaaaaaaaataagcaataacagtaataatacagatcaggtcttatgtaatttaaaaccaccatcctgcactgagacttgttataaatatcatagtgttatttcttccgctgaggctgaagcttttttactgcatgtacaggaacaaaagaaaaaaaataaatttactgattgcgtttaa

SEQ ID NO: 286344 - DNA, 564 bp, Morganella morganii
atgaatagccggtttgatatacaggaggcagttatcagggtgatgtatcagcccgcagattacctccacagcagccgtttgttttccggtttaccggcaaaagcgcaatctgcgtcataccagagaatgcataacgccgccattatggattactaccggctgccgcgggaaagggattttgatctgttttccccgctggttattccgctgctgcgtcactggccacagcttccggaagtcagcctctatctggatatgcttatccgccatgcttatgatctgccggatgatactgtaccggatttgtcacaacaggcatttttgtctctgtgtccggtgctgcaactgccggcatggccggaagcacagacactgcccggcatcccggaaactttgcccggtctgattgccatgacacaattattatccggtttttctcccgcgctggcggcccggtttcagctgatgacggatgccgcgttacttccgtcagaaatctgcctgcctcatctgcctgattctcttttacctctggtattacattatgtgccgttcactacctga

SEQ ID NO: 286345 - DNA, 306 bp, Morganella morganii
atgtcatcatttaaccgggttttacccgtctccaatatcaccggcgtgactgaactgctggccgatctcgctgaccgtgagcagtctgctcatcagaacctgacagtccccgggaataccggaaaaaatcttcacagaaaaactcaggcattgaccggcaaaaaaaccaccactgacaccagcgatgtcatgatgattctggaaaaccaggcgctgatgggcaaatggcataccgaaatcagcttttattcccggatgctgcatctgaccctgaatgccgctgatacagtaattaagggccagtga

SEQ ID NO: 286346 - DNA, 264 bp, Morganella morganii
atggctgatatagcaaagcaaaataatggaataacattttcttcactgcttcagcaattcaaagcacctattcacgaagaaaatgtaaaactaaatacactgatgaataatttacagtcagggaacaaagataccgcgaatgcctatgatatggcgatgttgcaagcctgttcatcatcactgaatattaagtgctccgcactttcagcgatgattcgccagcataaagaaaacctctcaacaccaatcggcaatatgcgctga

SEQ ID NO: 286347 - DNA, 1053 bp, Morganella morganii
atgcaaaaattatacaatgtagtgatgatttcagaaaatacatttaaaaaagaaataacattgccaataggtaagtattgcattaataatatagatactattgaaaataacaaaaacattatttcccttgatttacctgtgacatgttcatcattaaagtatatcgaaatggaactcagtgagagtcactacaccgtcatctgtgaaacacaggataatgaattgataaaaaaggatattagttacaattcaccatttcatcatgccggtgaattacttttttctgtaaaaaaacaccatgatgcatggtgcaaaaacatcgtatctgaaaaagaaacagcttcccgacacaggggcttactgcgattttcgttgcctcttatactgatattatccgccacgctgataatagccctggttttatggcaaccagataataaatcaggaaataacaagcctgaacatgatcatcatcatatcattcaaaaacatataaaaaacaatgaatatattgccagtaataataacatacttttgttcacatctgccgacagcattattaacagaataaaaaacgaccttccggattataatatttaccggatggatagagagagattaaaaataaacaaagatgatattattttaacgcctgagtttaaccacaggaaagaaataattcatatacataaaaacgataaagttattaatacattacttattcctgataaattcagagaagatattacgatacgagcattatcattcagtgatattacccgattaataaacaatcatctgaaaggaaggctggtctggtactctgtaacgaaatcagataatactatttttatttatgcagataaaaggaggggtaaggaaactgataatatcattaaggatataaataatgagatattctctgcaccgggaaatacactggtacagtacagggaaagtgtaccctatgaaatgacaccgggcatgtatggttcactgaattacacttacctgtctgaaaaccatataaaattcatttctgataatagataa

SEQ ID NO: 286348 - DNA, 411 bp, Morganella morganii
atggatcttgcaacattggtaacagaaggtatgaaactgatcggacgcggtgatttggtggaggaaaccggtacattggataatcactcaacaatctcgctatcactggcggaacagcaggaggttcatattgcacaggttgatgaatatccggtgatctgggcgtcgctgcccgcggatctgccggcattactgccggatgtaaaaggcgggctgctggatcttctgacggaagcgccgacctcattgttctatcccggctcaccggcactgcggcagacagataacggcgctgagcttgtcggctgtttcagtcacagtgccgtcagtgacacggaatcatttgtgcaggcactggatcagtttgtccggctcagtcagcagtgtcatacactgatcctcaggggctga

SEQ ID NO: 286349 - DNA, 399 bp, Morganella morganii
atgaaacaggcagattacttgaacagcttacgcaatgacctgcgacagctgatcgcacacttcagcctgaaagagcactacgcacaggcaacattggcacagctgcatcagcgttaccgacaggaacaggaaaataaagataagctgttattgttaatcagcgggttagttcagcaaattaatgaatttgaatgcagtggactattatcttacaccgcactgcatgaacgtcggcgcaaacaggcgatttaccgcaaacaaatcctggatgtccgtgtcagagtggatgaattatcccttcagctggaacaaatttcagaggatattgataaaaataataaagaaataaatagtctgaaaaataaaattattaaatttgaacaatataatgaactataa

SEQ ID NO: 286350 - DNA, 852 bp, Morganella morganii
atgaatattaatccttgtttccgggagactgaattgtgttgtccggatggtaacagtaatcagaagataaccggttttttggccggtatagtaaaaaagaaaaaagaaaacaaacaagacagtgttattcaggtaattaatttaccggcctgtcaatatgatgataaacattatcatggtgatactttatattcacgaatgataacaaaaaagagccataatcacgccgggacagttcacgataccacacggatatatccggtatccggtaagacagaaaaaagcgtgttctgtgatgatatgatgacggaatcctgctctgatatcaggggcgggtctggtaacatcagggcatttcccgccggtaccgatatcctgcaatttaccggtaatatgtcagacaatatgctctctgcggataaactgaagtatgcgccggcagaggaggagcattattcagacggcgatatctgtgcagaggaaaaaataccggcaggcactgcaacgattgatctgccggaaataccgctgtttctgaaccgcccggctcccggggtaaatacggaaataaaactcccatcgttacggcattatgagcagggaaagcacattcaggagaaaatccccctgatcgtttaccctgcggagaaaaaccagttacctccggagcatggcagagctgattattattgcgcttaccatttcaggcagaaatatcagccgccggaacctgtttatatttacagagaaaatccggggcggtttaaattagaaacctcgtctgagccgcttaaacgacgtctgagaacagcagcaaatataaatggaatagataatattgatatattatag

SEQ ID NO: 286351 - DNA, 858 bp, Morganella morganii
atgtattatgatacatgtcaggcaatggagtatctgagttgttatcttccggaaaaaaaagaaatcagtaagagggtaattaattgtcggcttattaatacgcaaaatacattggatgtgttaattgatgttgaatcacttctctgttatctgattggggaaaataatattccttgggaaataataccagagcaatatttgattgagctgattaatgagtataagaaagaaattcatctgccttttttttcaccggagtattattttccggaattcagcattgaaactgctccggcagatatcgcccgtaaactggcattcagccgggagggcgtcgattttttcctgatcagtgcaatgggctggtttgatattcagtcgccgcctctgacaccggatctttctgtgccggtaaatgcgggaatttatattggttcaacccggacattcaccggtgttattcagcaggtgaatgaaggggatgtcatttttattacacaacaccagcgatttctgagagcaggaggatattttcagatgacactgacgcaggagcaggacgaaaccgtcatcactgagcgggggattgtcccggaagaaccggtcgccacaccggaaacggcagtttttgattgcagcagagtcccggttcgggtggattttttgcagtatcgcagggtatttccgctgtctgaactgatggcactgcaaccgggggatacactgccgctgccggcggcggataatcacctgattacactggaaattaacggacagcgctttgcacagggcgagctggtacgtatcggggaacagtacgccgtggaaattcatcatatttttcataagggcggatga

SEQ ID NO: 286352 - DNA, 465 bp, Morganella morganii
atggatgacaatataaataacgatattaaatcgttggtagggaatattttttcgcatcttgaaaatggaaatattttcgacatgctgttgccaaagaagaaagaggattttactgatgtatattctctggcgtgtgattattatgataagggattaatcgagcaggcagagaatatttttcgctcactctgtttatatgatttcagtaatgtggattatttactgggactagctgcggtcaagcaggttcaaaagcagtatcagaaagcaattaacatttattgtctggcgattaatttagatgaaacaaatccgtctgtatatctgtatatagggcaatgttatttatattcaggtgataaagaagcagcaataagcagcttcaggcattgcctttccttagcgtgtaatgacagtgagagagaacaggctatgagttatatagctattctggagggtaactaa

SEQ ID NO: 286353 - DNA, 1485 bp, Morganella morganii
atgcgtttaagtcatgaatacaaagcacttaacggaacagagcatcaagcctcgcaagagtcactgaaaggtgatctggaagatctgaaaagaatacaccgggatttaacatattctggtggcatcagaaatagtgaagccaaaagacatatcgatgcatataacagaataataaatagtagtgattttaaaaagatggtgcacgagaaatcagaatattatgaagagtgctctgagttagttaataaaatatcattggttattgaaaatgttaattatgaagatattaactcgcctggtatatttaacattccatcaaatgaagaaagaatgacatcattttataatgagcttgaaaggataaatgctgttttatctgatcctgaaacaacagaatctcaggcagtagaagcgctaaaaaaatatcaagaattaataaacgataagaaaaatataaagttaatgaatgatgctcgtaatgagacggcaagaaaagcaacaaaaataaatgatgaaatacaagattatttaatgcgacaagatatggtgacatttggttactttgttgaccggatggataatgccagtaaatattcctacaatatttcagttaaatatcaacgggaaagtatgaataaatacgtcgacttttataaggtcgtgacgacaaaactaaataccttcggtgattatatcaaagagagtgttgatgatggcaagaagaataaggtgtataaaagaaagtattatgctgaattatatcacgcaatgaaaccttatttttatcatggggatggtaacggttatattctctatgaaaacaacataaaattgatcaaggttggggatgataaatttaatgttttagtaggtggtgagttagtcgatacggggatatcctataaagaggcatacggaaaaatggaatattttttttcctgccatgagcctgttattaaagggactcggttgtgtaaattatttaatcctgtgaaggatgagtctggaaatataattggactggaaggtaaggtagagcaatttttatttccgacggaattttataattttatggagtttgcatataacgagcatgagcttgatcatataaataaaaatttcgataaggcctttaaggggaatccgccaacattatctaattgggatcgcgttaatgaacaatcaatagccgctaccagtaatgttgaatatacgaaagaagcactgaaaattaattatgatgcaggaatttatgattattacacaaataaagaagaacaggaagttacatctaacctatatcaacatgacataaatagtataaatcaaaaaatagatggggcaaagaaagggttgcaattaacgttggatgaatatactcagcgatataatacgattaatagtaattatgacaatatgctgagaacgattacaacaatgataagtgagttggctcaggaattaaagggatttttaagattctga

SEQ ID NO: 286354 - DNA, 1788 bp, Morganella morganii
atgactataaatattgataaattatctggttcgggtgttttagatactgctccttctggtgaaatagaaaacaataataaacaaaatggtgttaataacaccagtgaatttaataaggggatggttgatgatattagtaagaaatcatcagcagccaatgataggaaaaataaaccatcattaaacagaagcaatacttacagtaaaggtaatgctgacggtaaagaaaacgttgacagtaaagataatgctgaaaataaaaataagactgacagtaaagtggatggcaaaaaaaatagagattactcgcttaatgaattacgttcattattgagcgatttttattctgaagagaaatttaaaattaactcaagagcgcatgggtataatcttaattttatcaaagaattatggtcggagagtaaagagaatcaattgtcagaaatgattttggaatctggtgattttatcaatgaccatattgaagcaacggcagagtattacttctcactaatgaatggtgatcgtgattcattagaaaagatgccggatggtgaactgaagaataaactaactggcaagggtgatgacaagtttaaaaataaggatgaaattctttcttatttaaggaagaaaacaaatgcagatgaggtgattaaaaatataaatacagattcagagtattgtaaggatagaactaaattatttaaatcattttctgaagagttagttaagttgcctgttctggatgatgaacttggtcgttttatatcgggaaatcgtgatgaaattaattcagagttaatctctctgcatgagatggctgatattcaggatgaggcgaaagacattcttaaagattttaaagatatatttgttactcaacggaaaaatgatactgattatagcaatttcttaacagttttgatggggaagttatctgacttacgtgataaattatcacaacgaaaacttgataatgaccgtttaatcgcttcggctcagcaaaaagcattacaggataaaacagatgctaatgcagctgaaatggatgaaaaaataaaaaaagccgaatttttacaggcactgtttaaatggcttgggccactgataattgcactgatggttatattgacagcactgactggtggcttgttggcacaggtattggccgttattattgtggttgtcactatcgtgagtgaaattgttaaggcggcaggcgggccagatattatgggaacgctaatgacaccggtaactaaattggtggaggccgttcagaaatcgattaaagatttggcgatgaaattaggaaaagcacttggattatcaccggaaaaattaaaaaaactggaagaagatatggaaattgcctccatggtacttgcagttgttgttgttatggctatttttatggcagcaggttctatcgcaggaaaagttattggtcaggtagcatcagagacagttaaagaagtattgagacaaattttggctgaagttaaaaaaatattaatcacgatgatgctgacatcgacagtcgttaatggtgctaattcgatcgctcaggcagaaataaataagggaacgatagagcttcaggcggatatcgacctggatcaggatttgctggataaaataatggaattaatggaaagaataatggcaacttttgttgaatcaaaagaggagttaactaagcttaaagaaaaaataatgaaaattggaaaaaatgattttcagcgtaaaaaaagtattatacaacctggtccattgaccgcttaa

SEQ ID NO: 286355 - DNA, 759 bp, Morganella morganii
atggtagctataaccgcagcaggtacacagacgcaggttgatattccggagagcaatggtattcctgcgaaaaatcgtgatttaccggaaatcaatactaatcctgatcttatcaatgagataacaaaaaatggcaatataaaaaccaccggaatgacagatgagcaaatcggtgaagagattcgttcccgggttgctgataccatgccttctttattatccggcaatgatgaaaaatggctgaaattagctattgaactctgcaaggttatgaatgatgactcactgagtcagcaggaacgtcagaacaagctggatacgatcgttattgaactggcaaagaaattaaaagagatgaaatataaggaaggagagcttcagctcaaagccgcaatatccggtgcattaatttctattggtattgctgttgccggtgccgccctctcaataaaaggggttagtgcggctaatccgacagcgccgacagcctgcgggattgcgggtcaggctatttccggattgtctcagccaatcagtcaggtattcgtacaaatagtccagaagaaggctaccgaacttcagggggatgccgaagttgttcgtgcgcaaaaagacttaaaactcaagaccgcatcaacccacggcagagcatcagatgaactaaatgaattaaagaaaagaatgatgagtatgtctgagcgttatcttgataacaagctggcgacagccaataacctgcttaacaatatgcggggataa

SEQ ID NO: 286356 - DNA, 1656 bp, Morganella morganii
atgaattattcccgcagcttcgtttttttatttttgttctggctgaccgggtcactgatttttatcaaaaattcaggcggatacgggctgagtttaccgcagaactgtttttcatgggcaatgatggggatactgatattatttgtcagtctctctgttatccggaaaaagcagtgtctgattgtcacccctgcactgtgctggtttgccgccggtgttgtgatactggctttgccgctgttatacacccgtcctgaatggcggctgaatggcggattgtattgggccgccgccgcaggactgctgttttatgtgtgttgtgtacaactgaaactgagcaaaaaccaaatccgttttttggtactgctatggctgtcggcctgtatggtgcatgcactgcttatattgctgcaattgaccccggcgggcggatggataccctggccggtgatcagcaatcgcccgtacggtgtttttcagcaggtcaatctgctggctacttttttatcctgcgggatggcacttgctttgtttctttttttgctgccggatcagcggcaaagcagtatcagccgggggatatcagtatctgcactgtgtattttaccgtgtgttctggtcgtgattcagtcccggatcggcggcctcagtgctgttattaccgggggaatgatgttgctgtcagccggtacgggcagacgaaaatgtctggcggttatcctgacgggcagcggtgtgctcgcgggctggtggcttaaaaattatacacagattggtgtgatatcacatctggattcagacaatgccagacttgaaatgctcagcagcacatgggagatgctgaaacagcgcccgctgaccggctggggggccggtggttttgaatatgtgtttcagatgttccgggtctggcaggggaaatccacagagggtacgggagttgttattcaccctcacaatgaaattttgttctggggagcggaaggtggtgctgtggcattaaccggcctggcactgattatcaccggcggcggtctgattatccggaaagcatggcgggcattccgccgggaaaacgacccgcagccgctgatattatttctgactctattaccattactgctgcacacccagactgaatatccgtttggtttgtcagcactgcacttttcattatgtttattattactttctcaggtcgacaaagccacaatgtcaccggaaaaagaaatatcattaccctcgtttttcagcatgataacggcaggcgccggaacaggaatgatcggtatgatgacgggggcttttctgacgggaatgattttaactgaaacagaacaacggggaatgcaggatattcaaaggttgtcatctgtgccggaacttgtacggatgacgcaatatgaacggggggaatttgatcttcatgtacacgaattaatacagttcaatcagacccgggatcctcagttattagtcagctatcgacattgggctgaaaattatctgaaaaaacatacggataaaaatgtgtatcattccctgattatgattttacagtttcagggagagactgaagctgaaaagtattatttgtatcaggcagcacaattatttccgcaggacgatcttttttcccccggcggaaaattataa

SEQ ID NO: 286357 - DNA, 1893 bp, Morganella morganii
atgaaatccgagacgctaactgtccagcaaatattccaggatcgccgacaatattgcgttcccttctaccagcgagcctatgtatggacccaacgaaatcagtggtctgctttgctggaggatatcaccgaaaaagctcagatccgcctctcgggtacaaaaccgactccccattttcttggcgcggtagtgctggagccacaactcaagaacggcttgatgggcgtagacactctgcacattatcgatggtcagcaacgactgactacactccaatatattctggcatccatccgactggcgttgcgtgcaactggcctttccgatttagagatgctagtgctgccttgcttgcaaaacacaaacgaagcaacaatgcgaaataaagaggtcgaacgcttcaagctgtggccaacatttcgcgatcaagctcactttattcaaagtcttaacgttgataatgtcgatgacctccgtaaggttttctctgatagctttacattgcatggcacactgcgtaagcatttcagccatcctccgtcactggaggcgctgtggttctttagtggcaactttatcaagtggattcgctcggagggtcactccttacaacaaaatgcagaggcgttgattgaagctgtcatggcagacctgaaactggtcagtatatctcttgaggcagaagacgatgctcaaattattttcgaaacgttaaatggccggggcgctgaacttcatgcgacggacctcattcgcaactatatttttatgcgcgctgaacatgatggcatcaatgccgctacgttgtatgaaaataagtggaaaccctttgaagactcgtactggactgaaaaacaacgccgtggtcgtataaacaaacctcgcctagagtggctaattcacgcaacactgcaagcagaaaagcaacgtgaagtagacctttctcgcctttacaatgaatatcgggactatgtaactaagggctcgccttcacaccgagccgatcagcaggttgaactcctcaatagatatgctcttcaatacaaagaactgatcggtggtttgggcacaactcctatcgcgtgccttggtcgacgcatctcagcctatgacgtgaccacgatttatcctcttgcattgctcatttcagttgctgacatctctgatgctgaaaagacaaccatgtacaacgatcttgtctcgtatgtggtacgaagagcggtgtgtggcctgacgcctaagaactataacaacgtctttatgaatgtcgtccgtcacttagctaaaaccggcatttccagtattgagttacgcagcacccttaatagcttgaatggtgaggcctcccgttggccgactgacgcagaattcctcaatgcttgcacctctgcacgactttaccctggcaggcttgatacgcaaaaggtgcgctcaatgctaaccgagcttgagggggaacttcgtcgctcggtgaaaactgaggagccagttgttccaaacctttccagtctcgatattgatcacctcatgcctcaaaactggtactcccattggcctctcgaaaatgggcataccgtgacaaattcagacgctacgtcagtgaatcagatagttctggccggcgctgagcttacacacgagcagcaacttgtctggaaacggcaacaagctatcgcaacgctgggaaatctaaccttgctcaacctcagcgtgaatcgttcggcccaacactatgcgttccttaagaaacgggatggtcttattacccataccagcctgcgcttgaacgtgccactgatcgctatggataaatgggatgaggagcaaattctcgcccgaagcgagttgctggggaatgctgcactaagaatatgggcgaaaggcgatcaataa

SEQ ID NO: 286358 - DNA, 1113 bp, Morganella morganii
atgccatcaatcagtggattattgagacaccatcaggtaacccctgaggaaaaatgtctgaaaagaatgtcaaaattaccggaaatgaatacattactggaaaaaacatcccatataaaaaatacagactcagaattcaaaggaaagtacataaatataaatccggacattgggaaattgagctgtgatatattatcatttcagtacaaaacagaactgagcagcctgaaaaggctaagcagccctataagtgagaaaaatgaaaatgtaaaaaagatattaaatgaccgggtaaagggatggtatgatagcgaaaaaataacaacccctgccactatcgtctatcgggaaattgataaaatatgtgcagagaaaaacatccggatatccacaaaagaaaaagaaacaatcctggatatcgtcaatgaaaagcatataaaactcaatggattggaaaagaaagcatccgttacttctatgataaatccgctaaaattagataaaaatttgagtaaagaaataaatgagcccggaataaagaaaaacctgattaaggacatgaagaaagaatttcctgaacagttcaaattcctgacagatcagttccataaaaatgatgccgtcattcagaaggaagaattactgtccgctgatgaaaaatccattttttatgacattccgatagtaagagaaactgccggtaaaatggtatcagacgtgtataatggtttgattgaaaatatttacaatgtgttattccggaacaacgaacaacctttagactttgttgcaataaaggcagaagtaagaacacaagtagaacatatagcaaaagataaaaatttcgctgaaaacaataacatcagcgctgaagatatcatccgaaaggcatttgaatcaaaaataaaattaacttcatcatcaccggagcaggatattgaaaatttatttgcaatgatgaataaaggagatatatccgatcagcgttatgaatttaattccgtagcaaaagcaacctctccatctccggagcaggatattgatgatttatttgcaatgatgaacagaggagatatatccggtcagcgttatgaattaaagaataaatcgtaa

SEQ ID NO: 286359 - DNA, 1383 bp, Morganella morganii
atgaaagtcgttccttatgtcatgatccatagtaatcagaataatgatgctttaccaccccctataccgccaaaatcgtcgaaccatcagggacggatgatggcgttacaggcatcatcaaaccggcctccggctgtgcagccacgtcctgaacatacagagaatgttcagttgcgtcagggtaaagtgaattttaatgataatcaaaggcttgcagtgtatgcgggtatgtcgtcattaaaaagagaattaccaacgcctcctgcatttgatccggttgtatcccatcagactccgccatcccggccggcacctattccgccgtcgcggatgcatgagttcatggaacctccgtcatttcatgcaccgtctcctcctgtgtcacaggaacgcagcaggatgccgttaccgggggaaggtcttcagcggtcactggcacaacgcagagctgcacctcagttggcgcctttcactcagggtttaaaaacgggacattcactgaatgaattaaataaaaaatgtgcacaacaatttgtccgggatgactatatcgacaaaggtaatgctgagtaccttaacgggaagatagttaatattagtgactgtaaagtagaacatcagcgttttggcaatattaatacctgtaaagcgacccaattggttacatcaaaaggtgttggcttacctgcaaaccagctgatagttgatggagagaaggccgggatgcgcagtcagtaccccacaactcagaagcttggcagccagctgactatgtatgcagagcaaaaaccggcggtagtggtggttcttgcatctgataaagatattgaagcaagaaatcttccgccttattttcgtgagaataagcattataacgatgcccaatatgatcaatctaacgcagataaatatgatgatgtttctgttcggtgcttagttaataagaagttaccggtgaaagaagcggggaatcttaccgtaaaaaattatcgtaatgaaattacagtgaacggaaaaacaacaccaatatctgttatgcatgtcactaattgggcggatttcacaaccgttggatccaaagaaattgaaatattggcatcggatattctgaagaagattgagcaaaaaattaaagaagacagctcttatagtccgcaggccttgattcattgcagtgccggagccgggcgtgccggcactcttctcgccgcaataaatctgctgattaaaagtaataatggtgaactggataaaaatagtgatgatgaactggatgatactcttatacaaatgcggaatacaggcacttccgcgatagtacagacagaggctcagtatgatacattggcggaattttatgcaaagaaaaaatccggacactaa

SEQ ID NO: 286360 - DNA, 639 bp, Morganella morganii
atggaaccagcacagggaatacagggacgtcaggagattcagaccctgaataatgatatttacggttcggcaggcagtaacagttcatcgtcgtatatcagttcatccggaattaaatctgttttattaaatgcatggaacgctgttaaatccaccgtttccggtatgttatcatcatttggttttctcctcagcggacagcagggcagtgataaaccgggcagagaaattgtgatggatatgtcttcgcgccctctgccgtcgttaccgggtatggatgctcagcttgaaaacactctttatgagagcagtggtgagaatacctatgatttggtttatgcgcataccggatacggacgaccggaaagtctttatgcttcggttgatgacggtgcttctgtccgcgcaccggttgcaccgccggtaccgggctcaccgcgtccgtcactttctgaaccgctttacagtgaaattacagggccgttgtatgaggttattgatgagtatcagacgccgccgcggataccggattcaccacgtccgtcattacggcagactgcagaaaacacattatatgagcgcagcgggtctctttatgataatgcggagtggataaaagcagagaagaactggggataa

SEQ ID NO: 286361 - DNA, 321 bp, Morganella morganii
atgaacaaatatcgtgacaaatcagactttgagattaataaggctgtggctgaatgtaaatatggctctggctgtacagggaaaactcaagggggggatgtcatagtattcactgacagttttactgctgtttttgacccctgcaataacccggcggatgcaatgccgattatcattgagaataaaatcgacctaactcatctcgtcggtgacatggtgtgcgcaaagcacaaagaatattggtgtattcgtaaaaatccataccgcgccggttgcgaggtttatttgctgatgaaggatgcggagaatgaaaaaagttga

SEQ ID NO: 286362 - DNA, 876 bp, Morganella morganii
atgagtgaaaaacatgagcatggtaatataaaatcactgccggaatcacgattacttattgcatttgcattaacattttcttttatgctggtggaatttattggcggttatcttaccggcagcctcgcccttatttcagatgccatgcatatgatgacagatgcattcgctctgctgctggcactgattgccatccgtgcaggaaaaaaagccgccgattatctcaaaacatacggttatatccgctttgaaattcttgccgcgatgatgaatgccattattttgctggccgtcgcattctacgtattatatgaagcctaccgcaggatctccgcaaccccggatattcagtctgtcggtatgctgattattgccactgccggtctgatcattaatctgattgccatgcagcttctgaaaaacagtaaagaagagagcctgaatgttaaaggggcctatcttgaagtctgggcagatatgctgggctcagtcggcgttattgccggtgcggtcattatctggctgacaggctggttaatcgtcgattcggttattgccgtctttatcggctttatggtttttccgagaacctggattctgttaaaatcctgtatcaatatattattacagggtacgccggagaatatcagtatcaatgatattattgatgagataaacagtaatgaggatatcgccggggctcataatgtccatttgtgggcattaacacaaagtaactatgtactaactgctcatataatatataaggctggcgctgaccataacaaaatccggaaatcattaacagatgctattcatgaaaaatataatattgataacattacctttcagatggaacaggaaaagccggagtaa

SEQ ID NO: 286363 - DNA, 168 bp, Morganella morganii
atgaaactactgataaacttactcagatatacattttttctcgctgtaattgctattgcttttgtttatcgtgatgtgctttttcagttttataaccggatcgtttcacaatccggtaccatttctcagatagctgatagtatcagcagtgttctggcgtatttttag

SEQ ID NO: 286364 - DNA, 756 bp, Morganella morganii
atgcagccaacatcagcaggacaaaatgtcagattaacagggtatatttcgtatcagggtaccgatggtatgatcggcgacttaaaagaatcagcatccgtaaaacaatcgggtttatctgagcggttcactgagatccgtaacagtgcagcagagtttttcacagcagtgaaaggcaaaataaataatgtgtttgagccattagggaattggataaataaaataacaatccgggaggagaaaacacaatctgatgctaatcagaacgcacggatggtgctgaaaatagcgcaggaaaacgtgccggattatttaaataaagcccgtgcgtttctggataaaaatgaacctctggatgccgcttcactgaagatgttctcaaaagacatactgagaccattagtcacatttttgagtggtgtggataaagtaaaaggtgcggataaaccagcagagaaattcatgaccgaatttattcacaaagtaaacagcggattatccgctgctgctgactgcggaccgaagccctctgaaaaagtaaatcagcttgcgtcaatctgtgatgatgacagggcaaaggaatatttagacacaaagaattttgaacagaacttcaaagcaagaatgatgacactgatgacggacattgaaggttcaattctgcctgatttgctgtctatcgagcctgcagaggtaatcgcccggcatagtcagcagcaaccggagggaatctggcagcggttacctgataactga

SEQ ID NO: 286365 - DNA, 141 bp, Morganella morganii
atggccgataacaacagtgaatatccggtatgtaaccatgacctgtgtgaatttacatgtgcgatgaactcaggatattgtgcatgcgatcacggcatgagtgaaatacagattgcgctgtttttaacactaatgtgttag

SEQ ID NO: 286366 - DNA, 321 bp, Morganella morganii
atgaacaaatatcgtgacaaatcagactttgagattaataaggctgtgtttcgcgccgccagaataaaacataaatggtttaaatttttaccgcatggcgtggttacttataatatcaaaagtgattgggtaatcttcgacccctgcaacaaccccgctgacgccatgccgattattattgagaatagaatcgatttaactcatctcgtcggcggcacggtatgcgcaaagcacaaagaatattggtgtattcgtaaaagcccatatcgcgctggctgtgaggtttatttactgatgaaggatgcggagaatgaaaaatag

SEQ ID NO: 286367 - DNA, 183 bp, Morganella morganii
atgaaaaatagttaccactgcgaaatatgcaataagcggcttaatgaaagtgagttgctttattacggatatacctgtgaaaaatgtgaacgtcacttcattactgagcatgaaggaaataaattaaaaactgcattgtcgctcatcaggctgtatttcagaaaggtaatttactcagcgtag

SEQ ID NO: 286368 - DNA, 603 bp, Morganella morganii
atgaaaaagtatggcttaattctcgcagacccaccctggcaatacaacaacaaagtatcaaacggcgcagcagataaccactacaacaccaccgatttttattccctcacccgcttacctatcgaaaaaatagcctctgacaactccgtactctgcatgtggtatacgggtaactttgtccgtgaggcttacgatttggctgaggcgtggggatttaaagtgcgtaccggattcgggttcgtgtgggtgaaactgaacaaaaacgccggggatcggatagataaacatccgccggaggatttctttgacttcatggacgcactgaactcagagacacggatcaacggcggcaactatacccgcgctaatgcagaggtatgcctgattgctaccaggggtcgtggacttgaacgccagtcggtcagcgtcaggcagattatttattcttgcctcggtgagcacagcgagaaaccaaaggaagtacatcaccggctggaagagttatatggcgatgtcctgcgcattgaactgtttgccagggagaaatacggcgagtgggatgtgtacggggatcaggttaacagtgacatacaactgaggtaa

SEQ ID NO: 286369 - DNA, 198 bp, Morganella morganii
atggccgatattatcgatgaagccaatgatttaaacgaactgcggctgactaccgcgcttgccaaccggccgccaaagccgaaaagcctgaccggtttctgtatctggtgccgtgatgaaccggttatgccaggcagcgcgtactgctcaaaagagtgcggcgacgatgacgcacagaacaagcgcaaaaacggatag

SEQ ID NO: 286370 - DNA, 177 bp, Morganella morganii
atgctgatccttgcactctatctgtggattgccggttatctcttcgcggaactgagcagaagcgcagatacccgcaccgacatagccgccgtgacgttttattccacattctggctgccggtcggtgcgtgttacctttcatccctgatcgcctgtaaagtgttaggcgacgagtaa

SEQ ID NO: 286371 - DNA, 252 bp, Morganella morganii
atgaataaatccatcctgatcctgcacccgaataaatgggtgacggaagatattctgatgcagcttaccggcctgagcagctcagcaataaaaacagcccgtaaaaagtcctggtttgaaggccgtgaatatcgtcactattccgccgactgtaaccctaaagataacagcccgattatgtataatcgccttgctgtagatgaatgggtggagcggcagaacatggccgttccgcgaggtaacaacggctga

SEQ ID NO: 286372 - DNA, 1290 bp, Morganella morganii
atgacaaaatacccgactggtgtggaggctcacggagagagcctcagaatatggtttatgtataacgggcgcaggcacagagagaatctcggcgtcccggacacattgaaaaacagaagaatggccggtgagctgagggcatcggtctgctttgcgataaaaatgggaacgtttgactatgcattgcaattcccgaactcatcaacaattaaccataaacctactcaaggaaaagagataaccattactgaacttgcagaaaaatggctggatttaaaatcaacggaaataactaaaaatgccctgaacagatatatatcctatattgatgtctgtgcatttttaattggctcgtcacgaaatatatcttcagttttatatgaggatattctctcactgaggaaattacttctgacaggaaatcagatatgcggtacccatcaaaaaaacaggaataagaaaaaaggacggtcagtcagaacggttaatgtttatctgagctgctttaaagccatgatggaatttgctgttaattgcggctatttgcagtcatcaccttttaccggaataaaaccgctgaaacgtgcaaaaactgagccggacccgctgacccgtgaagaattcaccaggtttattgcctgctgttctaatgcgcaaatccgcaacctgtggacactggcagtcagcaccggtatgcggcacggcgagctgtgtgcattgagctgggaagatatagacacccggaactggacaatcacggtgcgcagaaatctgcctattaatgatcatttcacgccaccaaaaacgaccagcggcatcaggactatcgccctcacaataccggctatcagtgcattaaaatcacagatgctttatacaaaaatgagtcgtccggttgaggtggatgttcatctgcgtgaatacgggagggtcagaaaggatctgtgctcatttgttttcaagccacagcagagcagtaataacggtaccggtggtgaatggtatgcacccggatcattcggaacaacctggaacaacacactcaaaagagccggtattcgccaccgtaaagcgtatgaatcccggcatacatttgcctgctgggcgctcagtgcaggtgcaaacccgaattttattgcggaacagatgggacatacatcagcgcagatggtttataccgtttatggaaaatggatggctgacaataacagcagtcagatagacattttgaacgccactttcacgcaaaatgccccatccatgccccacgtcgtaaacggcacacactga

SEQ ID NO: 286373 - DNA, 726 bp, Morganella morganii
atggcagataataaaatctgtttttctgatgtaaaaatggccgggaatgccgggaatacagaaataattaccgcagcggataaaaccgtatacggttttaccggtgatagtgattcagataactacgggctgttaaccgcgctgtttcagctgcgttacttcgccagcagcgttatttaccggcagcagaccgatgatattcagctgatattcaggaattgcacagaatacagcccggttctgcgggagctgaggacagataactatattattcccgccggtgatattgctgaccgcttccggccgtttgttcatgaccatccggtggtgtttctcgatccgccggctgataatacgccttccgccataaccgatgccgggttaaatactgttttgccgctgttgccgcaatacgggaatacatcagatccgggatttttctcaatggtgatattaattcagcgtattatcgccggatacggtgaatttaccactacggaaaaaccggaagagattaacggtatcgtatatatctctatgccggaacatcacctgaatatcccgtggcatgaacattgtattccactgctgaaagccacctttccgcagacagttttttattttgcaacacaatctccggtaatattatcgcaactgaatgacggtgaggcataccgtttattccgggacagcgatgatgttatccgcacacagaaataccgctga

SEQ ID NO: 286374 - DNA, 579 bp, Morganella morganii
ttgaaaattaatgatgtgcatcgtaaccggtttaatgtcctggttatatcatcacccgacccgtcggtggtaatgtctgtacctgacccggtaaaaatctttgtgatggttaactacaactggggaatgggacatgcgggtctggtagtcggtgaaggagaggcagcagtattacacgacccatccggcagctattccgaatgtgcgtcacgggcgtgctacaaagacagaaatgcaaagcgtaatccgcgcagttccggtgaattttttcactacccggaatttgactgggatgattatctttcttttcagttgtgggacggaccggatgtgatagtgattgagtttgtcatccccggagagcaggccgcgagaataacggagatgatttataatcatgggtttgcaggcagttggatgtgtgctcaaacggtgctgactattctacgcaaaagcggaggtatttttaggaatatcaaaaatgatattatctttcaggaagatccgtgggggttcagagaaaagttactggggattcactttcctgagagtggagggctaattagtggcgcgtattaa

SEQ ID NO: 286375 - DNA, 270 bp, Morganella morganii
atgccgcataactgtctgtttcataactacctgtttctgttccatatgcagcacggattaaaaaaactgaaagtccgtttgcaggaagattccgtggcgttatctgttatcgatgcaccaagaaaaataactacggagtgtgaaactgcactggcagtacagttttccgctgaacatgattatctgaaatatacaggtgaaaatatccgtgaaatctggcggatagacggttcggattatcggcgggtgtgggctgacgaaacgacgtaa

SEQ ID NO: 286376 - DNA, 969 bp, Morganella morganii
atgattggcacccacggcaaagccgctgagcagttactgcgcacgacggaaatgctgatcggtgaacaggagaacgtctccttcatcgatttcgtaccgggggaaaatgccgacacactatatgcgaagtacaatgagaagctgcccggtttatcaaccgctgacggggtattattcctcgttgatacctggggcggcagcccgttcaacgcagcaaaccgtattgtgactgagcaggatcaggccgcaggcggcaacagcaattatgagatagtcacaggcgttaacgtgccgatgctggtcgaaacctttatgtgccgtgatgataatccttcattgcaggaactggttgcggtggcgctggaaaccggccgtgaagggatccgcgccctgaaagcacaggacgaaccggcaccgaaagcagcacctgcaccaaaaccggccgcacagccggcggcaccggcaggcccgggcggacacatgactatcgccctcgcccgtatcgatgaccgtctgatccacggccaggtcgccacccgctggaccaaagaaaccaacgtcaaacgcattattgtcgtcagtgacgaggttgccaaagatactgtccgctcaacactgctcaagcaggttgctcctccgggtgtaaccgcgcatgtggtggatgtggccaaaatggtgcgtgtctggaataacccgaaatacgccaatgaccgctgcatgctcctgttcaccaaccctgcggatgttctgcgcctggtggaagacggcgtggagattaaatcggtcaacatcggcgggatggccttccacgaaggtaaaaaacaggttaacaatgcggtttctatcgatgaaaacgatatcgtggcattcaaagcgctgaatgaccgcaacatcgagctggaagtccgcaaagtctccaccgattcaaaaataaaaatgatggatttaatcagcaaagctgaaagttaa

SEQ ID NO: 286377 - DNA, 930 bp, Morganella morganii
atgcgatttgttatagggcaaaaatatttatataaagaaatactggaattatacaagatggataatagcccgggattaacctcacagggttttttaaatccatcatccggaaaagaaaatgcaccaataagagctatttttgccagacagagtaaaaatggaccattgccgtatatgctttgtgtttccggagataacaactataaaaattatcgtagcagaatgatgaaagcctgtctcgatagttctcagtttctgtattttaatgaagtaaacggtttttgggtcttcaatggactaagtaaaataaaatctattgtggacatatctgatccgtcagttcgctgtttgttagaaaaagaaggatacacgttacagcatgaatttgcagaaactggtgatagtttatggcagttttaccaaagagaacatcctgttttaccaaaggccagaacaattgactttgcagtaatcattgagtgtgacgtattctcacttcctttagatgaaaatgagaaagcccgtcttgggagacgtattaaccggcaagtaaaaggaagacaggatcagcagatttttgcttccggtgttcggagtatttatcagggtaattgtattattaccggagctggtaaagacgtaaattcaaaatttattcacgcatgtcacattaacgatgataaaaatgatgagggtcattttatagataataatccttcgaacggagtattattacgggcagaccttcatgcattatttgatgatatgcaactgtcctttaatattgaaactggtgaggcattgtttaaaggaaaaaaattgcaggcactttatcatgagtatcatcaaaagcgatgtaagcactggaaccttgtttccgatattacaaaagctaaattatgtaacaggctgaaaaataaaaagagctga

SEQ ID NO: 286378 - DNA, 1419 bp, Morganella morganii
atggatagcaagaaaggtacgtataacaaccctaaatcatggtatgacgaaggtaaggttggtgatatatattattctcaggaaaaaggtttttatttcaaaataaaggtaaatggtaatccgtcggaatataactggtattatccaatgatgcctgaaggaaataaatattgggatttcgcagggtattattccggtacgatgtcagaacctaaaacatggtcagaatatggtatagtggggagtatttattatgaatatgaatccggttacctgcgtttgaaaaaagagggtaatccttcagccaataaatggtatttcccggatgctggcggttcaaatgaatattgggactttatcagccggagggccggaaccccggcagatcctaaaggttggaatgatgaagggaaggtgggtgattattatttttctcctgaacatcgttttcattttatattaaaaaaaaatggtaaaccatctgatcataattggtactatccgacagatggtcaagataatacctattggcgtaatatgggatttttgttaaaggctcagtggcttaaatttattgatggtaatttaccaattaaccagatatcgttgccgggtactcatgattcagcgacaggtacatattcagaagaatttggtcaaggcggaatggtaaaaacacaagatgattctgtttacgatcagcttaactccggcatcagatttattgatgcacgctgtcgtcatatcagcaatgcatttgccatgcatcatggtatgatatatttagacaaaatgttcggcgatatattaaatgaatgcaggcgttttttgcgggaaaacccgagtgaatttattcttatgtcagttaaacctgagcataccacagaaaattgtacccgtacttttgaagaaacatttaaacagtcttattatgactccactttgtggtttaccgaagatcgttttcctcttttaaatgaagtcagagggaaaattgttcttttcagtcgtttcagcggttctcttggcataaaaacccatggttggaaagataatgctacatttgatatggacgggcgaatgcatgtgcaggatgaatatgatcagagggatgaggtcaaaaaatggcatgcaataagaagcgcatggaattttgcggctgacagagggagaactgactggatgacgcttaattttaccagtattgcatccgatttttggtctggtacaagtatcagagattatgctgaagataaaaatccggaactggcaggatatatacatatgcgtaatgagcacagtggtattgtcatctctgatttccataatataggaagaatttccagtgctgtaatcctgaccaattttggaaatttacgtagtcctcttaggttcaatcatttgatattgttacattaa

SEQ ID NO: 286379 - DNA, 477 bp, Morganella morganii
gtgaatggattaaaattgattaagctaattatttttctgttactggttttttctcttttcgtgacatcagtatttttattcctgccgggaagcagaaagtatacaaaattaaatatagtctactatcatttatatacatttgatgaaataaaagaaatgccaataatatcaagtgagtatcaaataaactatgagcctgtggacgggaattcaggtgaattcaatgatattattttctttaatgtcgatgcaaagagaaaccatgaactctttgactatgttaaacggtcaggttttccggggagtttgaccaataccggaagagagaacgatgggttaagggtaatacaagaattgatattatcatcaatgaaacagaacaaaccacatcgttcctggtggaaaaagactgatgctccggcactgagagggttcggggtgatgctttcatattttatcgggcagatatattggtaa

SEQ ID NO: 286380 - DNA, 669 bp, Morganella morganii
atgcaattaaatggaatagtgcagcaagcgattcgtgaaacatccgccaatcaggctaccgcagaaaataaaaatagttttcaggcgatagcggataagtgtatcactgttgttaacagtgataagtcaatcttcgcggggtgccttcaaaagaaaaaaaataatatcaggatggcgtgtggtgcattactggcgaaaacactggtgaagaatgaatattatactgaaggtatcaccggtgactgtgtaaaaaaacttaatatgacattgcctgataagatccttgcccggaaagaaaccggtgtacccggtagcgactttatcagccggtggtctgatctgaatggatctgattactctgcacaggagctgtatgacatgctgagcaaacagctgcataaacaggaattttcaccagagatacaggaaaaaatgcaggctgcactaaagatggcagaaaaaggttcaggtagtgaatctatcctgaagaaagaatacgcagagataatcagacgtcatgaagatgagattaaaaacaaccttatttccgacatattaaccgcccatgacattaatgatactgagggcggcccggtattagaagatacggatattattcagctggaacttatgaaagatatttcattttattcattgaaggattactga

SEQ ID NO: 286381 - DNA, 429 bp, Morganella morganii
atgaatattgatatgattacaatcataacaccgacctacaatgcaaaagaatatataaacgctcaacgtattcgattaggccctttacttaaggagcataatataaaatggatcattattgatgacgccagtactgataatactgacatattaatagaaaaaataaatgatagtaatatcatatatcataaacttattactaattctggcccatcagcagcacgctacatcggagctacgttggcagaaacagaattcatcttctttttagacgcggatgatatattatataataatgattttattgatttcatgcctattttagaaaaaaataaaattcatgattatgtatatactactgtagatataacatcgaaaaaaatagactatttagcagagaacaaaacaataaagattattatattataa

SEQ ID NO: 286382 - DNA, 1257 bp, Morganella morganii
atgcttataaatcaatacgataaattaatcttagttttacatgatggactgcgtcgtaatttatacctatcaatcgcagaagcagcaaaagataataacatgaatgtggttatcttttgctttagtattgaagaatattattggtttaagataaacttcgatcaaaaaaattgtatatcattaatacgcaatcacaaaccaaataaattagattcaggaaaggtagaaagatctattgatgttgttgctgattttatatccataaaccaagccgcaaaaatatattcatctatgcttaatgccttaaataacgaagtgctcgcacaagaaaaaactattatttttggtggtaatggtcttcattcctttgacattgcaattaaaaacttcagtttagcacacccaaatattcatactatattttcagagttatccaacattgataataaaacattcttcgattgcttagggtcaaacgctagttcttttttttacaaggcattgaaaaacaattcaatatcatttccaaactataataatgaaaagtttaagaaatggaaagaggactattgcaaacataaattatctacgcatataataaagcaagcacctcaacgcaacttagtaaaaaagatcatacatagaatatgtgggcttatagaaatagtattaaatatcccttcatatcaaaaatataaatttacctataacctcaagaaaaagaaaaagaaaaaaacgatatatatagaaagttggaatggacacatcgatgaaattgaaaaaaaagaaaattatattttctttccactccaagtatttgaagactcgcaaataaaattacattcaaatattgacaacctatctgcaataaaacatctaaataaattagccgaagaattaaaattaacattagtcatcaaaccacatcctgctgaaacaaatagatacgctctagatagcatattagaattaaagaaaatatataaatttaaaatctccaataaaaatacttttgaacttataaagcattcacaaaaaacagttgtgataaattcaaccgttggtttagaatcaatactgctcaacaaagaaacaatttttcttggggagtctttttataaatatttttcagatgaaaagatattaaattattatctaaatcactggttaattgatattgatatattctcacaccaaaagatatctaatgataaattaaatgctattttagaaaaagcaaataatatccatgattaa

SEQ ID NO: 286383 - DNA, 3222 bp, Morganella morganii
atgaccacctttaaaacagaagcgcaatttgagcaggcatttattgacgttctcaccctgaaagggtgggaaacgacgatacttaaaaataaaactgaagcggatttgctgcaaaactgggcgaatattttgtttgaaaataatcgtcagcgtgatcgcttaaatgacgtgccgttaactgatacagaaatgcagcagattattgagcaaatcaaagaacttaaaacaccgctcaaactaaacggtttaattaacggtaaaacagtagcgattaagcgcgataatcctgccgatacgttgcatttgggcaaagaagtcagcttaaaaatatacgatcgtcaggaaattgccgcaggtcaaagccgttaccagatagtgcagcaacccaaatttgaacgcggcagccccctgcgtaatgaccggcgcggtgatgtattgttactgatcaacggaatgccggtgatccatgtcgagctgaaacgcagcggcattccggtcatccaggccgtaaaccagattgaaaaatacagcaaagaagggatattcagcggtctgttttcgcttattcaggtatttgtcgccatggagccggatgaagccaaatactttgccaatcccggaatggatggcaggtttaaccctgattatcagtttaactgggccgattttaataacgaacctgtgaaccactggaaagatattgcctctaccttgctttctattcctatggcgcatcagctgattggtttttataccgttgccgatgataccgacggtgtacttaaagtcatgcgcagttaccagtattacgccgctaatgcgatatctgacaaagtggctaaaaccaactggcagcaattgggcagtacggcaaataaccctgatcgtctcggggggtatgtatggcataccacgggttccggtaaaaccatgaccagctttaaatcggcgcagttgattgcacaatcaaaagatgccgataaagtggtttttttaatggacagaattgagctgggcacccagtcgctcgcggaataccgtaactttgccggtgatggcgaagatgtacaagccaccgaaaatacctatgtactcattactaaattaaaaagcacggctccggccgatacgctgattgtcagttctattcaaaaaatgagtaatatttttgaagccgcagacgatgaaggctccgccacaaactttgcggatattgaaaaaatacgggccaagcgattggtttttattgttgatgaagcgcatcgttccactttcggcgatatgctgattatcattaaacgtactttcccgggcgcgttattctttggttttaccggcacgcctattcaggaagaaaacgaaaaaaacggcaatacaaccagcacagtattcggcaatgagctgcaccgttatagcattgctgatggtatacgtgatggcaatgtactgggcttcgatccttataaagtgatgaccgtcaaagacggcgatttaaaacgcgtggtggcgttagagcaggccagagccggctcagtggcggaggccatgagtgacccggtcaaaaagaaaaagtttaatcactttatgaacgatgtgcctatggcgggctataaagacggcacaggtaaatatcacaaagggattgaagactatgtgcctaaaagccaatacttaagtgaaactcatcaggccaaagtgacagaagatattctggataaatgggatgttctcagccagggcaacaaatttcacgcgcttttggcgacgaacagcattgccgaagctattgattattatcgtcgtttaaaagcggctaaacctgatcttaaaatatccgcactgtttgacccgcatattgataatgatggcagtggcgaccgggctcctgattttaaaggcaaaggtctggaagaaataatggcagattataacgcacgctacgggcaggattttgattttgcccgccatgcggcctttaaaaaagatttagcggcccgccttgcccataaaaaaccttatgagcgcgttcatactgaacctgcaaaacaattagatttactgattgtggtggatcaaatgctcacaggttttgattctaaatggcttaatacgctgtatttagacaaggtcattaaataccagaatattattcaggcattttcacgaaccaaccgcttatttggccccgacaaacctcacggtattatccgttattatcgttatccgcacaccatggagcagcatattcaggatgcggtaaaactctattccggcgacagacctgccggcttatttgtggacagactggaaagcaatcttaacgccatgaataaattagcagaggagattaccgcgctgttttctggtgcgggtgttgataattttgaaaaactgccggacgataccgaagcctgtgccaaatttgccaaattatttaataccttcaatcagcacttagaagctgccagggtacaaggttttcattgggggcagctggtctattcatctgctgaagatgaatacgaacataaatatgaagtgacgctgactatagatgaacaaagctacctgagcctggtgctgcgctacaaagaattggcagaaaaaggcgaaagctgtagtgcgggtggcggcgatgtaccttttgatatcagtggttatctgacagaaatagataccggaaaaatcgatgccgactatatgaacagccgctttgataaatatttaaaagagctgcacaatcagcagaattcagcagatattgaagccacattaaatgagctgcataagtcgtttgcatcgctcacccaacgcgagcaaaagtatgccagactctttctgcatgacctgcagcgcggcgatgtgcagccaattgagggtcatacattcagagactatatcaatatttacaaagagaacgcggaaaatgcacgcttaaactcggttatcagcgcacttggtttagataaaggactgctcataaagctcatggctgataatgttaatgagaaaaatattaacaattttggccgcttcgatgcattaaaaaatacggtagataaagcaaaggccaaggcttattttgaaaagaaagatggcgtcagtatcccgctgttcaggctgaatattcgcattgatcagtttttaaagcagtttatttttacacaaacagatgatttctcagatgatggaattggttcagcagatggagaaccggaatag

SEQ ID NO: 286384 - DNA, 1221 bp, Morganella morganii
atgagtatggataataaagtgccggatattcggtttaaggggtttagcggggcttgggataagaaaatattaggtgacttggttaagctagaaaatggtttcgcttttcagagtaaatattttaagaacaagccaactcaagttatagttcttacaccaggaagcgtaaatattggcggcggatttaaagctggtaaaggacaatactacgatgagaaacaggaggttccgtctaagtatgtatttaagcccggtgaaatgttcataaccatgacggatttgactccaacagcccaagctttgggctttccggctataattccaaaagatgaaaacacatatcttcacaatcaacggctcggtaagttagttggattccaaggtgatatagcttttctgtataatctgttgcgcactacgataaaacaaaaagaagttgtattagcttcttcgggtaccacagtaaaacacacgtcacccgacaaatttttgaatcgcatttgcttattccccaagaagcaagaacaaaccatcataggcaactacttccaaaaactcgatagcctaataaaccaacatcagcaaaagcatgacaaactcaataatattaaaaaagccatgctggaaaaaatgttcccaaaaccaggtgaaactatcccggaaattcgctttaaagggtttagcggggaatgggaggagagagcgttttcagacatcgcaaccagggtatcaatacaccatcaaagtacatgtctaccttgtgttgaatatgaagatatagttgcaggggagggctgtctcaataaggatatttatcagaaaaaaatcttcaaggctggtttgaaatttaaagctggcgatattttatttgggaaattgcggccttatctgaaaaattggtttctggccgattttgagggactcgctgttggggatttttgggtgttacgtgctgataatgttgcgagtacatttttgttttctttaattcaaaccagtaaatttgaatacatttcaaacctttcggcaggttcaaaaatgcctcgttctgattgggggcttgtatcctcatcttgtttttttgttccgaaggatatttttgaaagtaatgaaataggtaactatttccaaaaacttgacacactaatcaacctgcaccaacagcaaatcactaaactcaataacatcaaacaagcctgcttaagcaaaatgtttgtataa

SEQ ID NO: 286385 - DNA, 2592 bp, Morganella morganii
atgaacaaacaacaattggctgctaaaatctgggaatctgccaaccagatgcgttctaaaattgaagctaacgaatacaaagattacatactcggctttatcttctacaagtacctcagtgaccaactggtacagtttgtcaccaaagagggaatgacggccaacgatatcaaagctctcagtgaagatgacgctgacaccgttgaatacgtgcaaagtaacctgggttactttattgcctatgataacctgttttccacatggattgacccggcatccgaatttaatgaatctgacgtgcgggatgcgctctccgcgtttagccgtttgatttcaccaacatacaaaaaattgtttgagggtatttttaccacgctggaaaccggtttaagcaaactgggtgaaagtgccggtaaacggaccaaagccatcagcgacttactgcacctgatcaaaagcatccccatgaatagcaatcaggggtatgacgtactgggctacatttacgaatatctgattgaaaaatttgctgccaatgcaggtaaaaaagccggtgagttttacacccctcatgaagtctcggtactcatgtcaaatattattgcccatgagttaaaacacaaagataccattgtcatttatgaccctacgtcaggctctggttcgctgctgatcaatatcggtgaagcagtcgggaaatacgcaaaaaataaagacagcattacttattacgctcaggaattaaaagctaacacctacaacctgacccgtatgaatctcatcatgcgcggtattaaagccagtaatattaaaacccgtaatggcgacaccctggaagacgactggccgtattttgatgaaaacgacccgcaaggttcatattatgccttgtatgtcgatgctgtcgtttccaacccgccgtactcacaaaactgggatccaagctttaaagacagcgacccgcgttattcgcgctttggtctggcgcctaaaaccaaagccgattttgcgtttttgctgcacgatctctatcacctgaaacctgatggtattatggccattgtgctgcctcatggtgtcttattccgtggtggagaagaaggtgaaattcgcaaacaactcattgagcaaaatcatattgatacgattatcggcctgcctgccaatatcttttttggcaccggtattcccactgtgattttaattctcagacaaaaacgcaaaaatacggatgtgctggtggttgatgcctctaagcactttatgaaggaaggcaaaaacaataaactgcaaaccagtgatatcaagcgcatcacggatgtggtgatcagccgggaaagtatcgataaattctcacaatgtgtgagtaaacaaaccattatcgataacggttataacctcaacataccgcgctatgtggactcttctgaggcggcccaaagctgggatttacacgcgaccatgcttggtggtatccctgacagcgaaattgcagcgctgcacgattactggcaggtcttcccgcaattacacaatacgttgtttacgccgaaatctgcggcttacagtgagcttgccattgccaaacaagacgtcagggactgtatcagcggggatccgcaagtgctggactttatcagtgcctacaaccgggcatttgagggttttgatgactacctgaatacggaattagtacaaaactgtcaaagcgtaaaacgcaaccagcaggaagtgatattaacggacgggctatttacccgcctggcatctgtccccttaatcgataaataccaggcttaccaatttctgagtgaccaatggcaggtcatcagcgccgatttggaaatgatacaaacagagggctttgctgccactaaacaagttgaccctgatatggtcattaagaagaaagacggcaaagatatcgaagtacaggacggctggaaaggccacatactgccgtttgagttagttcagcaaacgcatttaagtgatgatttacacgccctggcggagaaagaaaatcgcctggcagaaatcgccggtgcactggacgaaattttggaatccctgactgaagaagaaaaagaacaggatacggtaaaagagagcaaagacggttttgccaatactgaagtcagcaaagcggccaaaggcttcctgaaagagcaaaaaagcgccaaagcggcgttcgcggaagagagctatgaagccaaaatcatccgtgccggtgagcttatcgatgaagaaaaagccctgaaaaaagcggttaaagacgcggctgccgcactgcacttaaaaaccaaagccataattgaaggtttcaccgatgagcaggtggaaaaactgctgcaccttaaatggattaccccgttaagcaccagactggccgcgatgccaaacgccgtcattgaccagctcaccagccgggtacaagcccttgctgataaatacgccgtcacttattcacaggttgccggtgaaataaaaaccaccgggcaggaactggcggagatgatgagcgaattaacgggtaatgagtttgatctgcagggcctgaccgaactcacccgcttattaaagggtgaataa

SEQ ID NO: 286386 - DNA, 915 bp, Morganella morganii
atggcggttccgacctacgataagtttattgagcctgtattacgatttttaaaacgccatcctgaaggcgtagctgcaaaagaagctcatgagggcgcagcagaaattttaggcctggatgaaaatcagcgttctgagttaatttcaagcggtcagctggtttataaaaatcgtgccggctgggctcatgaccggctaaaacgcgcgggtctctcgcaaagcgtatcaaaaggaaaatggtgcctgacagaagcgggtatggcatggataaaaaataacccgttccctctgaataaagaacaaacagaccatctggcctttgattttatcaatgtaaaactcaaaactaacccggatgccgttttgctggatgaacagacacaaacagattcagacaatctccggcaggtccgcagcccggatgatcgtctgagtgatgcactaagcgaaatccgtgagtctgttgccatcgatttactggcaaatttacttcaggtatccccttcacgctttgaattcatcgtattagatgtactgcataaattgggctatggcagccatcgtgatgatttacaacgcgttggtggcaccggtgacggcggaattgacggcgtcatatcgctggataaacttggattagaacgaatttatgtgcaggcaaaacgctggcagggaaccgtcgggcgtcccgatttacaagctttctatggtgctctggcgggacaaaaagccaaacgcggtatttttattaccacctcaggctatactgctcatgcaattgattttgctaaatcggttgagggattagtccttattgatggtaaccgtctggtgaatttaatgatggataatgagatcggagtcagctctcagctgattaaacttcctaaaatggatatggattattttgagtaa

SEQ ID NO: 286387 - DNA, 714 bp, Morganella morganii
atgagtgaaatagatattaaatcttttgattataacgatatagggagggcctatgattttaaatcaccgttacccgagggagaatattttgctcttgaattaaccagccctgttccacccggggccgtacctgttgttgatgaagattcagggatatgtattggttatttatatggattttccggggtctatgatgtttatgacgcaaccggagagtatttaggtaaatatgagttaccattagaatcaccactgattgatcctttggatataatcttaattggcggatggtttattaaaaatggtttaaaactggttactctgttaaaaacaggtggttcatctttagtaaaagcagggtcaattaaattaactgaacatctggtttcacttttacggggtcggttaaagttaggtttatcacccagaacattaaagtttacacctaaggcagccgctcatatggctgaagcagaacgatatgttcctataacaattattgaaaaagcaataagatatggaaaaagaggaatagatgcgaaaggccggtctgctttagtactcaaaagatacactatcaatattaaaaaatatcgttatccgtcaacaacaaaaaatcttcagggtaagaatatcaatgagataaaagagtacactctggaggttgttgtcgatgaaagagcctggaccgttactcattttatgtataaatag

SEQ ID NO: 286388 - DNA, 486 bp, Morganella morganii
atgaaagagcctggaccgttactcattttatgtataaatagagggaatatgtttaatatagaaggcgatgttaatcagattaattttaatataagtaatatatgcgatttttctgtttccggtgatgcgtgtacagaatatgacaaatcaatttactttaatattgaattgattttggaaagaggtttttttaatattttaaattgtgaattctattattttgagttagaggattttattaaaggccttttacttattttaaataataataaagatgaatatttattttcagatgaaaggaatatagtaaatattaattttaagagagataaggattcttctgatatttcagtttgttataaattatttgagtcttttgatagcgagtgctatataaccggagtcttttatctttttgaagaaaaaatctatgatattataaacaatataaaaccttatctttcagaaaataaagcatctgtttag

SEQ ID NO: 286389 - DNA, 480 bp, Morganella morganii
atggccaatattatatatatgaccctgacaggtaataagcagggattaatatctaaaggatgttcaagttatgattccatcggaaataaataccagaaagatcatgaagatgaaattttagtattcgcggtcaggcattcgatttccagagcgcagaactcgcatcatcatccgttagaaataataaaacctatagataaatcatcacctctgctgggcgttgctatatccaataatgaacttctcgactgtaatattgatttttttcgtaccagtcagaatggtgcccaggaaaagtactacagcatctcattacaaaaggccaccataaagaatataacatatgattatcctaactcggtgtctcataacgacagacagccagaggaaataatattattagattacagagatattacctggagacatttaatggcatcaacctccgggtacagtataaaagaagaaagcatctactaa

SEQ ID NO: 286390 - DNA, 123 bp, Morganella morganii
atgctgaccggctctgtcatttcagcggccggtaatctgttcccggctgagattaaagcgggccagatacttccgcagccggtcagcatcattgggctgttttttctgctgacgatcaaataa

SEQ ID NO: 286391 - DNA, 423 bp, Morganella morganii
atggcctgtttttcaatcttagaagggaaagatactaaaaaaatttattgcgaatttcaggatgattttgttattgaaaaagttattggagacactactaaatatgtttttgtccaagtaaaaactaaaagaaaacttagtgatatatggaacataaatgatgtttttggaatattgaaaaaagaaacaaaaactaaggttcagtcagatgagaatattcgtaatagttttataggtaaacttttacagcatactattaattttcctgacacatgcgataaggttgtatttatgacaaatacgcatgtagatgatgatatagttactctattgctcgatcttagcaataattataatggaaaacatagtaaggttttaattgatagatttaataaatgctttcatgataatggtaatatataa

SEQ ID NO: 286392 - DNA, 603 bp, Morganella morganii
ttgaaggaaaaatttgatgcattttactctattgcaagggactcaatatataaatacagcgaaattgatttagaatacaatgaagttaatgagataatgatatctcttctaaatttagtcaataaaaaatccagcgttaaaattgatgtggtaaatcaagaaaacattgaagttagctcgggaattggaattgatgacttattaaaagtgcttagtatttctcataaagcttatcatgacttgcttgatagtggtgatcagaatgcaattaaatcagcatctatcattgagcgaactttgcgacgggcaggtgcttctgatgagcaaattttattttgttcagattgtaaaataaaatgggatagttgggttagaaataataggcatattttaagtaggatagatctaatttctattgatagctattttcaagactcactaaatgagctgtctaaaggtagtatgatcattggaattagtttcttaaaacatcttgttttgaaattgaaagaagaattaggaaataacggattattatttgatctcgatgatgaaacaataataggtgggatactgtctaaagtgattgggtacaaaaaatga

SEQ ID NO: 286393 - DNA, 474 bp, Morganella morganii
atgaatagtaatgaattctttaactcaatattaaataaagaaatagcagtagagttctcacaagatataagtatttcttctattgggctaaataatgaagcattatttcaaattccattcatcgccatgatattattagttatttctacagataaaagaaaaactgatctatctgaagttggtcatttagttggtgagttaattgaagaaacgatgattggctttaaaaaatcatctcaacaccttaactggtcagcaaatttaagaatacgaacagttacagctctaaattttttagagttaaaagaaactatctctattaaaaaaaataaaatttatgctactagtttaggaaagaaaatcatagaaaaagtgtacaactctgatacagatctagcttataatttaggcttgatcaagcgagcatatagaaataatttggtagataaaaaattagatggtgaacttatatga

SEQ ID NO: 286394 - DNA, 1596 bp, Morganella morganii
atgcagcgttataatcaatctctgtggctgccagccctgattgcggcaaccagccttaccgccgtaccggcaattgccgcagctcaatccggagcacctgttgctctgtcacaacaaggggctgtcgaaggggtactgaaagatggctattttcagttcaaaggcattccttatgctcagccgcctgtcggtgatcttcgctggcaaccgcctgttgagcccgcaaacagaaaaggaacgctgaaagcagaccatttcggtaatacctgtgcaacaaaactcacgttaggcggattcggaccggtcagcgacagcgaagattgtctttacctgaacgtatataccccggcaaatatcagtaaaaaagacgcggaaaaactgccggtgatggtatggatcccggggggcgggctcggttccggctccggtaatgaatataatcctgtcgaactggttgccgataatgtcattgtcgtcaccatgaattaccgcctcgggatgtttggcttcttttctcatccggctcttgcgaaagaaggccataaaaccatcaactacggcacaatggatcagcaggctgcactgacctgggtaaacaaaaacattgatgctttcggcggtgataaaaataatattaccctctttggtgaatctgccggcggacacagtgtcctggcccagatggcctctcctgctgccaaaggcttatttcagaaagcgattatttccagcggttcattttcacttgttcagccgactgtcggggaagcaacccaaatgggtgagctggtcgcgaaaaatgtgggttgcagcggtatgaatgacgaaaaaaccgcagcctgcctgcgggccgtaccaacgaaaaccattctggataaaggcgtaaactatatgacaaccgcgcaggttgttactgatggtgacgttatgccgctttctctgaaagaggccttcagtaccggaaaatataatcaggtgccggttatcaatggttttaataccaatgaaggtaccttctttgccgcaatgatggaactggattcaggcaaaccgattgataaacaaagctatcgcggtggtttaacagcctttttcggtgaaaaagatgcggacaaactcatgactatcgctgatttaccggacacaaaagcaaacttaggcgcaaactacgcagatttcttcggacgtgcgaaatttatctgccggactccgcttatcaataatctgctggcggaaagaagcccggtatacagttatgaatttgctgataaaacagcaccacagtttgcagagacagtttctttcccttacaaagcggcacataccagtgatttgcaatatatcttccgtgatttcaaaggtgccaccggttcattgcatcctctgaatgcaaaacagcagatgctttcttctgccatggtcggctactggacgaattttgccaaaaccggcaatccgaattccgaagggttaccactctgggaaaactacacaccgaaacaggaaaatacactgtatatgagtcctgagaaaatcatcatgacggataatatttctcagcagtttaactgcagtgaattcaaaggaattctctga

SEQ ID NO: 286395 - DNA, 372 bp, Morganella morganii
atgaaagtattattatcaattaaacctgaatatgttgaaaagattcttgatggaacaaagaaatttgaatttagaaaaggaagattcaaaaacccagatgtaaaatctgtggttatttattcaacaatgcctgttggtatgattgttgctgagtttgatattgctgatgttattgaagacaaacctagtactgtttggaaaaaaacatgtcgatatgctgggattagcaagcagttcttcgattcttatttttgtagtcgggataaagcctttgctatcaagataggaaagttaaaaatttacgatgaacctcgtcatttaagctcacttggtgaaaatattactgcgcctcagtcctatcggtatttataa

SEQ ID NO: 286396 - DNA, 1071 bp, Morganella morganii
atggaaaacttaaaatacatccccttcagtcaggtaaatttctctgatatttttttcgattctttaaaatctgattattcccacggctttatccaatggtttcattcgaaatgtagttcacgcgattacgcttatgtgctttatgatgagaatgatagtattgatggcttcctatatcttaaaatagaaacaggtgttattgacgatgtagaccccatcatacaaaatggcacccacttaaaagtcggaacctttaaatttaatccgaaaggtactctaagaggacagcgctttctgaaaaaaatatttgaccatgctataaaaaatagcgttgataacatatacgtaactgtatttgaaaaacatgaatatcttattaaactatttgggatatatggattcatagatagaggaattaaagaatcaaaaaacggaatagaacacgtattgatcaaagaaatgaataaaaacacactcaccggaaatatactttctgattacccttttattaataacaaaaaagacacacataaatttttactttctatttaccccgcatttcataccagattattccctgactcaaaattaataacagagtcacccgatattatttcagatatttcatatgcaaatagcattaggaaagtttatatttgtgggatgtccgatgctgaatcaatgaaaccaaacgatataatattaatatatagaacatcagataaccaagggccagcatattaccgttctgttgcaacttctctatgcgtcgttgaaacagttcgtaatatccattcctttgttacagaaaaagaattcttagattattgctctagatattcagtgttcactgagtctgaactaaaaagtttttatagaacaaaaaaatatccttatattataagttttacatacaaccttgctttaccaaaaaggctaaatcgtgctaagcttatttcagatataggattaaacccacaggcttactggggtataatgaagttaacaaatgaacagtttaataacattgttaaacttggtgacgtcaatgaaagtattattatcaattaa

SEQ ID NO: 286397 - DNA, 783 bp, Morganella morganii
atgactgatttaccagacagtaaggaaatgcatctctatgctaaaaggaatcttgaattttttataaaaacattttatttacatttctccccagatatagaaatattacaaacaccagcacaaccagaaacggatgatcaacggctaaaacgcttgattttagagaaagatagtttcttccagtctggtttagtaatactatttaactcagcagaaatatatctaaaatctataatcgcagaaaaaagtgtgtatttacttcttaaagaagtaaaagactgctgtaagaataaatctttttttaattgctcgacattagatgctgcggaattgcataagattgctaaaaacattagcggacgaaactttcctccacgattcgatgatatttatgatgcgctacgtattgagcgaaacaaagttattcacttagggaaaagtaatagtaaagaagtaaggaaagacttcctacgttcatttttaatattccgcgaggaaatatatcaagcacctctaaatgaacttgtaaattgtttaattaataaaaaaaatcttgcggatcaaccgttagaggatgcgaaaaaaagtttcgctgctagtataatctctatgatgaaaatctttttcccattagaagatattctggtggaaatatataaacatgaggggaaatttagaaattgggatgagtgtcctagttgtaatacatcagaaaaatcacttgcagtattatcgaaatcaaaatctatctgtttatcatgcgattttaaaatagggctttaa

SEQ ID NO: 286398 - DNA, 171 bp, Morganella morganii
atgaagaaaaaaatgatctgtgcggtatccgccgtgatgctgctgaccctggccggctgcggactgaaaggcccgctttacttcccgccggaagagcctgccgccaagcctgcggcagagcagtctgctgtgcagactgacaacgctgagaccggcaaaacgcaaaaatga

SEQ ID NO: 286399 - DNA, 387 bp, Morganella morganii
atgtctaaaaatgtcaacgatgttttttcaaaccgaacttctttggaatgtgctgtgaatgcagcgctggatcgtcgtatcggtctgcgtgtcgggttccctcattaccgagaaggagcaaacggtgtggtttgtgagatcgaagcagagtatccattgctgaacactcattcgagcgttgcatggcccctgatcgatgagcttaaccgttacaccatccaaaaaaaccaatcactcattgatcacattgataatgcggtcgctgagctgttgaagcacaaggctcgtctacagcttgatattcaaaagctgcaagacggtgacattgatctggtgaaacaggccaagcagcaatacgaagacaaccaaatgtcgagtaccagctag

SEQ ID NO: 286400 - DNA, 555 bp, Morganella morganii
atgagtacattagaacaacttgtaaatcagagggtgcttgaggaaggtctgaaaaaggcgaagccattggccgcgcaaatggggcttgaatcagtacctgatgagatgcttgaaatgatctgcccaaacctgaactactctgggcagtttacgccagctctgtacgcgagatttcaaagcgtaaagcgattgctgaaagagttgtcggaacaaacctcacctaagcacgggcatattgtgaagtttaccaaccaatatgggagctacgatgagtcagctttgctattcaaagaaggcgacgtcagaaaccagaacctcgttgcttgtgtgggcgggaaaacgctaaatctcggagatctagagcttcgagattatgggctcaatatgcacatcggttgcggtggaccatttgagccgatctcagaagcgcagattaagtctttatctgagtttgacttctatgagacgacctacagattctggggccagaatccatgtggaaacgggatgttaatcatcaccgttccgatgaaacgttggttcttgactgtgtag

SEQ ID NO: 286401 - DNA, 300 bp, Morganella morganii
atgatcgtaaacccagagaccaaagcaaaggttctccggtatgcgatgggcaaccctgggaatttatccatcacaaagctggcggttgcgctggattacgatgcggtagatgctctgggtgttcgttttaaagacaccgtaaatcttgaggttcgcagagccaggcgctgggaagtctggcagtggttctggaaccatccggatcaaagtgtccaactgtcaatcaaattgggggtggttggcgctgtgttgggagtcatgggcttcctgacaggcgtagctccgtacctcttgggataa

SEQ ID NO: 286402 - DNA, 1626 bp, Morganella morganii
atggctactatcgtaaacaccaagttaggagaacatcgaggcaagaagcgcgtctggctggaaggccaaaagctactgcgtgaaggttactatcctggcatgaagtacgatctggagttgaaagattcccaggttgtgcttcgcgtcaaagaggagggtaagttcacagtcagtaagcgtgagcgcaatggccgggtgtctccaatcatcgatctaaccgcgcaggaactcgctaccgtttttgacggtgtagagatgctccgcgtgttcattcgtaacggcgcaattgtgatctccgctcaccatcaacaagagcgagtgatcgagcgcgtcaaccggcttatcagcaagctggaaaatggagaatcgctttcggtatgcagcctctttcatgggggtggtgtgcttgataaagcgattcacgccggttttcacaaggcgggaattgccagtgccatatctgtggccgtggagatggaaggaaaatatctcgattcgtctttggcaaataacccggagctttggaacgaagattctattgttatcgaatcgccaatccaggctgtgaatctcagcaaacgcccaccgcaggtggatgttttgatggggggcataccgtgtaccggcgcgtcaaagtcaggtcgcagtaagaacaagttggagtttgccgaatcgcatgaggcggcaggtgccatgttcttcaatttcctgcaattcgtagaagcgctaaacccagccgttgtgctgattgagaacgtgcctgagtaccagaacaccgcttcgatggaagtgattcgttcggtgctctcttcgttgggttactccctacaagagcgcattcttgacggcaatgagtttggggtgattgagcgccgcaagcgtctttgtgttgttgcgctttcccacgggatcgacgggtttgaacttgagaaggttcagcctgttcgcaccaaggaaagccgcatacaggacatcctggagccagttcctctcgattctgaacgttggaagtcatttgactatctggctgagaaggagttaagagacaaagctgctggcaaggggttctctcgccagcttctgactggcgacgatgagttttgcggcaccataggtaaagactatgcaaaatgcagaagtaccgaacctttcattgttcatccagaacatccggagttatctcgcatctttacaccgacagaacattgtcgagtgaaagggatacctgaggagctcatccaaggtctgtcggacactattgcccaccagattctcgggcaatcggtagtctttcccgcgttcgaggctttagccctcgcattagggaacagcctgtggagctgggttggaatgatgccaatcatggtcgaagtcgtggatgaatcacagccggtgatcggtggtgaagacttccattgggcaacggcattggttgacgcaaagggcactctcaagctgtcaccggcagcgaaaaaacaggggatgcccttcaacattatggacggtcaattggctgtctattcacctaacggaactaaaaagagctgcggccatgagccttgcgaatatctcccggtaatgatgtccggagacgcaatcatggtcacttcatctttggttcattag

SEQ ID NO: 286403 - DNA, 303 bp, Morganella morganii
atggaagaacataacctcaaatccggattcagcatctatttcgctgatgtccatttcgagaaacaagtctacgcattcggctcaggacttggcttcacatctgtgatttacgcctactcgctgggccgagatccggaagaagctgagaagctggcgcttgagaagtacgactctgacgaaacgaaggtgaagaaggtgcatgtcaatctggctcgcagccaggacatcaaccgctacaccttccctgaacaaatggctggctttgctaatgccattcagtctcacggcatcgctgtgaactga

SEQ ID NO: 286404 - DNA, 345 bp, Morganella morganii
atgactactcttgccagctttgcgaatccgatttctgttattcaactctcaccaaccagtggggtgtttggctcaaatcagttcgtaggagacaaagagggatttgtacaaaaggtgctcggaaagtggtactgcaatccagggaataccattcccgtcgagagcatgtcccacctagagcaggcggagaaactgtatgacttctatgtcaagtatctccaagtgaaagaaaagacctctgtgaaccttggccgggtgctgcataagctgtacagcactggttctatcaaggaagcagagatcgcgcttgaagcagtaaaagttcaggctggcgtaacagcttga

SEQ ID NO: 286405 - DNA, 354 bp, Morganella morganii
atgaacgcagtaaagatgatccagaaggaaagccagcttgagctgcctctttttttcttggacgaagagccgaaaaccgcagaagttattccatttgagccaaggcttgaatggtctgatgatgaggtgaagcagttaagatatgggcttctatggcacagccttagggtcctggcagatggtcgagcaggaactgaaatcaagcaggaaacgatggagtggatgatgtccgacgaggtgcatcctttctcatttgtggcctgctgtggtgaagccggttacgatccatctggaataagggaaggcgtgaagtctatcctaaaccgcttagcgcgggttaaagcggggggttaa

SEQ ID NO: 286406 - DNA, 192 bp, Morganella morganii
atgaaagatcacagtcaaacgattgtgttccctgggaacaatgttgaatcacttgctgaggctaacgccatgttgagcgctgtgtcggaagacgcacgtaaagcaagcaatctgaaagacaagtgtgaccttgaatcacttcaaatctggttggaagagagtatcaactctcaactggcaggcgcgaagtaa

SEQ ID NO: 286407 - DNA, 276 bp, Morganella morganii
atggatgctgtagcgcatatagcagcagataaccttgtaccggcatgtggaggtgcagagaagccgtttaccgttggcggtagacagtggctttactgctatcacccagccagtgggaggcactgctacttagacctcgataatgaccgtccagtctggcatcgaggatttaatcctgcttttcatcctgagcttgagttcgctgatgaagctgaattgcttcgaccagttgagcgaaagcctgaccatgaagagctggaggatttttacttttaa

SEQ ID NO: 286408 - DNA, 453 bp, Morganella morganii
atgcagcttaaccgatacacggccagggagtctgacaaaagtcggatacttcggaccatcggctggtgcaagcgcaatcaccttacacttgccggtcttccatacgaggacaatcttgcaggaagtgacgggatcagcatagagatcatcactcctcctggtatgtcgcgggaaatgttggagcaagccgtcagagaggggtattcagagcgagatgtcgtaaggcatcgcattctggagtgccctgtcggttggttcatggaagctgatggcaaggcatttgatcatgaagtgttccacgattacgtggtggctcatggttatggcgaaccttccagcgaagcctatgagctggcggagcggtggttctggcagggcaacgattatgcgttgatagctgcggaaatagttgctcgtgatctttgtgttcgtgatgacgaagaggaggactga

SEQ ID NO: 286409 - DNA, 390 bp, Morganella morganii
atgtctatcaataccaaagttgaacaaatcgcatacggtcatgctaccgctctagtgctcagtgaactgggccaacaagagaattggtgcaaggcttatgagtatttgtctgagtgtgttgaacggggagacgagcctgaggatctggtcgtttggcaaccgtttgagcactgggaatggaaagacattctggagcaaatcgagagcgaagccgagtctctgctttcgactattaagtcggttttaggcttggcccacaaaggcatcattcagtcagcaattgactgctctctggattcggacatgacccagcttgacctgattggaatggtcgagctcggaagtgaaatcgaagatggggcgtgtgctggaggtggctatgcagcttaa

SEQ ID NO: 286410 - DNA, 225 bp, Morganella morganii; identical to SEQ ID NO: 83975

SEQ ID NO: 286411 - DNA, 885 bp, Morganella morganii; identical to SEQ ID NO: 25082

SEQ ID NO: 286412 - DNA, 501 bp, Morganella morganii
atgaaaaacctatcagctttggaagcagttcttgactacgacaaaccttctcgacgttttcttgatgagctcaacgaaaaccagatgaaggatttgtccggggaaatcttcgccaagctctactggagcaagcgtaatccccagtggtacgagaaagacaccaagcgactgtttgcacgacttcgttggattcagcgcatcatcaagaagcgcttgaaaaccggcaaagttaaacctgaactgacagaaaatggttcagtgatggagcgcttcaacttcccttgtggtgacactctcgatttcttccatcggtacttgcgacatcccaaatgggaggttgtgtatcaagaatcggggtgtagtgccttttggaaaaatgaagcaacgcttgagctatgcacctactgcgagggtgatgtggtcatgatgaaggctcctgatgaagcagctttctttcgtgattgcaatcgccttagctggtggtatgcagataacgcttga

SEQ ID NO: 286413 - DNA, 540 bp, Morganella morganii
atgtctcatctgaacaatctcaaatccgtaatgatctctctcgccgccgaacataagctgcctgaaatctacaaggatgacatcactaccgatgtggagtctctggatcgattcgatggtttacgtctggtctggctgttgcggtcttgcggcagcgtattggtgccagcggaagttggcgttaatccgatctatatcacccattggttgtggtctaaccacggtcaacaggtggttccattctctgtggatacccgcacggggttgattgaaaaaatcgacttcgagcaagctgaaaagctgatcatgcagatgccttgcaacctctcttcattgcagaacaaggaatacttggttgaccaggtaaaccgagttttgcaacgaggttgtgaaatgcgtatctggggtatcttcgagtctctaagctcggtggaatccgttggtggatggaaagagtggcagagctatttcagctctactgggaatcgactgatggccgatttcgttggtaaagccattcgattcactaaccctcgataa

SEQ ID NO: 286414 - DNA, 336 bp, Morganella morganii
atgaaccaattccattcatctttggatttgtatcatcggaacaaaggtagaagggctacagtgccggagacgccttttttactgcttgctaagcgcattcctccgatgtactggagacttttccagggtgttactttggatagtcgtatgggatacacaggcaggcggcagttccacagtcttgggcaagcaatcgactgggcaaagtcatcagttggcgattcctggtcaaataagcgctttcacaagccggtaggcctcgatgtattgctggcctgtactgcgagtaaggtgcctgaacatctggtcgaagaactgaaaagacggggcagttga

SEQ ID NO: 286415 - DNA, 1797 bp, Morganella morganii
atgtccaaaaaacgcaccatttacagcgctctaccaatcgtggccgcagcctatggtgaaaaactcggtgtcaaagtcgccatcggtaacgatgacgcatacaccgatggtaagaccatcgtggttccgaatatccccgacgactatcctcacatggatgctgtctgggggtatttggcccatgaagcagcccatgtccggtttacggactttggtgttgagcgccgcagaggccttcatgctgagttgtccaacattttagaggactgccgcatagaacgcgccatgatggaactcttccccggtacgtcgcagaccctgaatgaggttgctcgctatatggctcaagctggtcattacgagcacgtcacagacaaagaggctccagcctccattctgacagggttttgtttgtactggttacaaaccaaggctgtagggcaatccgtccttcaaccctatctcgattcggctacccccgtattcgagcgtgtgtttcctcaaggtgttgttgttcggctgaacgctttactgcgtaaggctgtgaacacgaagtcaacagcagaggtgacatccttggccgaccaaatcatcaagatgatcgaggaggaaaaggagaaagaagagcaaaagccccagaatggtcaggatggcaacaatcagcagaatgctggtggcaaccagcctcagaacagtcagggtggaagtggtaacgatcaaaaccaagggcctggtgccaatggtggtggtcagcaaggtaacgaccagaagcaaggcaacgctggcgggaagtctgatccgaaaggacagggcgaccaaagcaagtcggatgctgatggtggcagtaaggcaggacaaagccaagctggtggcaattctgacgcggctaaacaagacgcggccaaaatgctccagcaggttctgaatgccggtgccggtgacttgcgtggtgacgcgcatgatgcacttaaagccgagctcaaccgggtggctcaagacaagggagacagtagttatatgactgttcgctctgctgtgaacacccagaacaaccccgctgttggcaaaagcctggtaggggacgttaagagcaccacttcaaagataagaacgcagctttacggattggtccaggccagccagcgagttgctcaccgtaaccaacgatcagggaagcgtgtggatgctcggaaactacatcgtgtagtgacaggcgatacccgcgtattcctcaagccggaagccaagaagcgccctaacacggcggttcacatcctggttgatatgagctcctcgatggcctataaggctgccaatggaaaggagcgtcaagacattgcgcgggaagcgtccttagctatttcgatggctctggaggcaatccccggcgtaaacccggcagtcaccttttttggtggcaaccggaaccagccagtgttcagtgtcgtgaaacatggagatacggttcagaatcgggccggtcggtttgggttcaaagcaactggcggtacgccgatggcggaagctatctggtatgcagcctttgaactcaccaagacccgtgaagagcggaaaatgttgatcgtggtgactgacgggcagcctcaaagcgccccggcatgtcgctctgtaattgacctctgtgaacgaagcgatgttgaggtgatcggcataggggtagagactaccgcagtgtcaggactgttccaaaagaacattgtcattgatgatgcggcagctctgcaacgcacactgtttaagttgatggagcggtcattgactgcttttgcagcttaa

SEQ ID NO: 286416 - DNA, 1278 bp, Morganella morganii
atgactaaagtgaaccatctacaaagcctctgtgttatccacgtagactttgacatttggagtggacaaacccgtttgtctgcatctgatctcaagctgggcgagggtggtgaaattccacctgagaaagtagctcaactgggaagtaagaagatctgtgatccggctaagctgaaaggctttcaccgcctgaaaacagaaactcgtcgtctcctgctgaaattcggtatgccgttcatgaacggatttgccgtccccgtcagcaagaccgatgaaatctgtaacaagctgaatgacatcaactttcagtttaaccaactgaaacaggatttcatcaaaggttacaacaaagccgtggatgaatggtgtcaggagaaccctgagtatgaacgagctatccgtgccggagcccttccaaaggaaacggtcgaggagcggattggctttgagtaccaggtgttcatgatccagcctgtgaacgaagatgaggccaacgccaaacgccttaaccgcaaggttgagcgcctgggtgacgatctcatctccgaagtggttcaggaagcgaataagttctatatggaacgtttggccggtcgagaccaatgtgcggtcactactcggcagacactccgtaacatccgcgacaaggtggatggacttagcttcctgaacagcgcttttaaccctctggtcaagctgctcgaccaaaccctccggggatacgagcaacatgccgatggccgaaacatcgttgcgcctttcttttatcaggtcgtggccgcagtgctgatcatgagcgagagggaccgcatcgagcagtatgccaatggctcgattactgtagagggcatggctaatgacattggcggttcggaagcccagatgggggaccgttctaaagatgaaaaggccgaacagaaaagcgataaagccggtgagcttacccttgcaacagaggggggcgaaaccaagcagcaacaggtaggtggtactgaccctgttcaatctgaacagactaacagcggtggtaacgctgttgacctggatgaagacatcgacaacttcttcaagaattttgcagaacgaggcgagggtgaatcggaagatgaatccaatgccggtgatgtggttcaagaagagcgcgttgatgttgaggatgagcctgttttgcctgaggaaactccggtagagcaagaacctgtccaagaggagcccacagaggagcctctcaaccaggagctgcctaaaactgacgatgatggcgactatttcttctaa

SEQ ID NO: 286417 - DNA, 1011 bp, Morganella morganii
atgaaaatagtcaacctatcgcaacgcgaggaagattggcttgattggcggcgtcaaggtgtaacagccactgacgccgctatcctgctcaatcggtctccgtacaaaacacgatggagactgtgggccgagaagactgggtatgcgcgtgaagtcgatctgagtctcaatccgctggttcgccgggggatagaaaacgaagatgctgcaagacgcgctttcgaggagaagtatgatgacatgctgctccctgcctgtgtcgaatcggttcaatacccgctcatgagggcctccctggatggcctgagagataacggggagcccgtcgagctgaaaagcccgagtgcgactgtctgggaagatgtttgtgctgagaaagcaaacagcaaagcataccagctttattacccgcaggtgcaacaccagctcctggtaacgggggccaagcaaggctggttagtcttctactttgaaggtcagattcaggagtttccaatactccgagacgaagccatgattcaagaaatcttggccgaggctaaaaagttctggcaacaggtagtagacaagaaggagcccgacaaagatccagagagagacctgtacataccgcaaggtgaagaggtcaaccgttggattgctgctgctgaggaataccgcctctatgatgctgagattcaggagctgaaacaacgactgtctgagcttcaagaaaggcaaaagcctcatctcgacaccatgaagtccctcatgggggaatacttccatgccgactactgcggcgtgatggtaacgagatacaaagcggctggccgggtagactacaaaaagctgttggctgataaggcgtcaggcgtgaagcctgaggatgttgaccagtacagagagaagtcatcagagcggtgccgtgtaacggttactggctctgtgaagccacggtacattgttgatgaggacgtgcttgctcctcttgatgatttgccggaagaagtagagacgttctactggtga

SEQ ID NO: 286418 - DNA, 993 bp, Morganella morganii
atgtcaactgatagcaaatcccttataacccgcattgcctctcggtacggtgttgatagcaccaagttttttgaaaccttgaaagcaactgcgtttaagcaacgtgatggctccgctccaaccaacgaccaaatgatggttcttctggttgtggcagagcaatacaaccttaatccgtttactcgggagatctatgcgtttcctgatagacaaaacgggatcatcccggtagtgggtgttgacggttggagccgcatcatcaacgagcatccccaacatgatggtgtcgagttcgtgtatgcggacaagatggtcagaatggagggagcaaacgttgattgccctgagtggatagaatgcgtgatttaccgtaaggacagatctcgccctatccgcatcaaggagttcattgatgaggtgtaccgtgaaccgtttcagggtcaaggtcgcaatggtgcttacactgttgatggcccctggcaaacgcacaccaagcgtcaactccggcacaagtcgctgatccagtgttctcgtgtcgcatttggtttctctggtatttatgaccaggatgaagctgaacgcatccgtgaaatggagcaggcatcggccattaacccggctattgccaatctcccttcaccatctcaagttcaaagccaagagcctttggctattgagcacaaagagcttgacccgatcctgaccaaactcgcaaatcgcgctattgctgaaaacgcatggtctgcggcgcatgagtatgtgaaaggacggtatgaaggttcggaactgcaatatgcgactcaattccttcgtgacaaggagatggatcaaatggagcctccgaaacctgactaccaggaagcgcacgagcaagagtccgccgctggtggttctgcaaatgctgaacctggtgccgaagaaatgccgcctttgagtgacgaggacatgatccctgttacagaagaggagggcgcggaaggcagttactactaa

SEQ ID NO: 286419 - DNA, 906 bp, Morganella morganii
atgaagaaaaatgactgtttgtgccgtcgttacacatcatttgatgtgttcacctcggcaacaatggaagtctttattggctacaaattgctccgggagcccagctcctcggagccaggccaattcacgatggtcgagctacgccgaaccgtcactgatgggaaagctgaaaattggtctgagacaaagctcgaaggaccttttgaagctaacggcccagacacgatcccaatgtcctataaggacaaagaaagccagtatgtgtcacagtttctcagccaggggtacacctttctggatgaggtgctggtaaacgcagagacacagacggtgctggaaggggggaatgtttcagccggacaaacagccagcttgggatctctcaactggctgttatctccgccctctgagttacctccaggtgacataaacctcttcaaaggttttgttgctggggtttttgccaaaggagccggtttaatcggctttgaggttgctcggagcgaaggctcaaatgacttgctacccagtgtgctgatgcgtactgacagcggttatgagcttggggttagcactggactaggcgagaacactatccatccagctacgctggaaggcgctggtgaactccgcccggaacatggtcacaaacccctgctgatgttggtttacctgcaacagcgtttcgcggatgacttttcaaacgtagagaagccgctggtggcattctgtgatgaacagggtgataccttcgactacgagcgttttgattcactaaaacccctcattgaacggtttggtttcagctacgacgaagtaagagcagatgcagaaaggcttggccttgtatctgagctgattcgcctggcagagatcgatgccgaacaagaggatctctttttttaa

SEQ ID NO: 286420 - DNA, 969 bp, Morganella morganii
atgtctcaatactctcaattctcagtaagcaaggttttcggtatgcccagcattccggagaaggtaacggccatcggctacgctgacggttcaaaccctttcatccctgccactgataccaactacgttttccgcaaagagtttctgcgagaggtcttggcctatctcaaagagcctggcggtgacgcattgttcgtaaccggccctaccgggtctggcaaaacctcaggtatcaccgagatcgctggtcgtctcaactggcctgttcagcaaatcactgcccacgggcggatggagctgacagatctgattggacatcacgctctggtcgcggaaaagcctggtcaaccacctgtcatgaagttcatgtatggacctctggcagtcgctatgcgtgaaggtcatctgctcctcatcaacgaggtggatttggccgaccctgccgagctggctggtctcaacgatgtccttgaagggcgtccccttgtgatcgctcagaatggcggggaaatcatcaagccgcacccgatgtttcgtgtggtcgttactggtaactctacggggtccggtgatgcttctggtttgtaccagggggtgatgatgcagaacctcgcagctatggatcgctatcgtttcaccaaagtagggtatgcggatgaggaagctgaactcagcattcttggccgtgttactccgaaacttccggaaaatgtgcggaagggaatggttcggattgctaatcaggtccgcaaactgtttcttggtgaaaacggagaagatggtcagatcagcgtcactatgtccactcggacgttggtgcgttgggcgaaactgtctctagcgttccgtggtgccccaaatgctcttgaatacgccctggatcaagctctgcttatccgtgcggccaaagaggagcgtgaagccatcctgcgtgttgcgaaggatgtgttcggggaccaatggcgctaa

SEQ ID NO: 286421 - DNA, 186 bp, Morganella morganii
atgcaacagaatcttcatgtttacgacgatcacgcaggcatcatctatctggctgatggacgcgaggtgaaatttgatccgaaactgtattccagctcctaccaggcgcatagtgaagcagtgaagtgggccaaagaaaccggggtcattggtcaagacgacgatgtggtgatgttcgtccattga

SEQ ID NO: 286422 - DNA, 321 bp, Morganella morganii
atgcacatcatcactttcattgtagttctgcttgcatctctgggcgcactgtacgtaggcgcgaaggcatttgctttttccttcatcgttctcgctaaagtgttccagcgtatcggtttgttcctttggaacaaattcgcagttcctgcaatgcggtctgtacaggccgtcatcaaagaacgtactgctaaggctgaacaagccaaagcagtcgttgaacctgaggtaactcaagttcaagaagtcgctaaacaagaacctgactgggattatctcgaaatcccgacttaccttcgtaagggcaaggaacttgtttggtaa

SEQ ID NO: 286423 - DNA, 642 bp, Morganella morganii
atggcagaagcacaagtagcactggacacaaacaacgaccgcagcaaccactactctcgccctgttttcaagcaagttctgaaagtaaacagcctccaagctcagcgcgtcatggaacgcagctttgagcgagtttccaactccctgttctccatcgacgtgatccttcgcatcatcggtgagcaggaggaaattgaccaggttgaaaccgtcatcctggaacatatctccaaggtctccgaagacctggacaaagctaccgctcagctcaacaagctgatggaagataacggcatcgacatgatgcccggctacaccaacccgaacgaatacaccatcgagatcaactctcctcaggttgctcagtttgcacacctgatccgcaaactggataccctgatggggatcgttgacactctctggctgaacaccgtactgaccagcaagcagcgcaccgacgccacttaccaatggcagcaacgcctcatcaagctggccggtcgaatcatcggcatcgagaaacgggctcgcatttccgcccacagcaaaggcaaagaaggtgaagtggccgaggccgctccggaatctgcaaccggcgacaaggaaatcgcagacgaagccgagaaaacaaaagcagcataa

SEQ ID NO: 286424 - DNA, 861 bp, Morganella morganii
atgaaaaaggctttaatcaccaccgtggctctggctgtagcagctctatctggctgtgcatccaccagcagttacgaacccacagcgtacaaaaccaatcacagccgcgcttacaacatcgcggaggccggtggcctggtaactggcatccaagacgcttctgttccgcgtgacaagctggagcgtctgaccgacaccaaaacgtttggggcagcctacgtgctgtctggctacatgtcccctcagctcggaatgaccgactggcaaggtggcttggtcaaccttgcgaactgggctatcggccccaaacagcatggcgctcgcaatagcttgatcgcttggatgcctgctaacgaagctgtttcaccggcagacgctcaggccaaatttctttcacatgtgaaagtttccattgagtcagcgctgactgatttgggtgccaatttcacgcttctgtatgacaaagacggtcgcctaacctatcagttctacaagaatgaatggggttgcccgacgtgggtgaacggacaaagtaaggtagctgacatgtgttcagttaaggtgaaaatcgtggagcctcgcctagggtcagctcctgattttgtctctggcgttcaaggtacagcgtatgccttcacatcaggccatgagaccgcatacaactttgtgaatgtcggtaatggggcagcaagccatgctccgcagcaagcgatctacgcagctattagcaaacagctaccagcttgggcctatctctaccttgctccaaaatcggttgagctggataatggcgaaaaagttgctttcccttaccttcttgatcagggaaaagcagagttgtttgtttacccagaagcgtaa

SEQ ID NO: 286425 - DNA, 1386 bp, Morganella morganii
atgcacttcatttcagaccctgcacaatgggcgcaatatctctttcaacatgctagcttgggtgatagtcgacgtgtcaaacgtttgattacactgtcggcgaccttagctgctcatacggggaaatctgtgccacaagccaatcaatctgccgcagacatcgaagcggcttatcgttttattcgcaatgatgcgatttcagccaatgccattgcggaagcaggttttatggcaactaaacaagaagctttggcctttaacactctgctggcgctggaagataccagttctttgaatttctcccataagggggtcaatgatgagctgggtcacattacgtcttatcaatccagtcgcggatttcaggcgcattcggtgttgctatatgcgcccattgaaaagcaagtggttggtttaattgaacaaaccctgtggacccgtgatatagcaaccaaaggcatcagcaaggaagcgaccaaaaggccctatcaggaaaaggaaagcttcaagtgggaaagagcctcgcgtcaggttgctgcacgtttaggaagtcacatgccacatgtcatcagcgtttgtgaccgagaagccgacttaattgagtacctccaatataaacttgagcatcaacaacggtttgtggtgcgttcgatgataagtcgtcatatcgaagaagcggacggtaagttgcatctctatggtaggtcgttgcaaagtgccggtgagcggcaggttgatgtagtgcaaaaaggtgggcgcaaagcgcgcactgcaatttgtgatgtgcgttttacgccggtgacgctgaagatgcccagtaacaaagaagggcaaagtacagaattgtattatgtcagctgtattgagcgaggccgtgacgatggcttgtgctggcaccttctgacctcggaaccagtaataacgaaagagcaggcgttgacgactctgggctggtatgaaaagcgctggttgattgaagacttccataaatcatggaaaacagggggtactcaggtcgaagccctgcgattgcaaagtaaaagtaaccttgagcgaatgatcaccatacaggcgtttattgcggtgcgaattcagcaactgcgccaccttggcttgcaaaaagaactctccggaaaacaaagctgtgaaaccttactcggtcctaaagcttggaaattattatggctgaaggtcgaaaagagtaagccaccaaaagaagccccatcagtgcactgggcttacctaagtttaggcaaactagctggttggcatgatagtaaacgaacaggaatagtcggttgggagcggttgtgggaaggatggtttatgttacaaaccatccttgaagggtacgagctggcactgtctcttgagcatgagatgtga

SEQ ID NO: 286426 - DNA, 2799 bp, Morganella morganii
atgcgaagtcataattactttatgaaagctgtggcctcgctgttgacagtaaccatgtctgcgctgccgatacattcctacgctaacggtagccaagaccaggacatcacagcggtgggtaaagaggcccaggctttcggacaaaatctctcaaactcattcaagtcgagctcggggactgtgcaagatggcacaatctctatgccgacgttgaaagacggtcaattccaaatgaacggggggagtcagattaatgtcaatgatctattccccggaacgagcgggaccaacaataaacctgatagttattacttccctgatgccaataaacctgatgtgggcggtctgcaaggcatttacgactctggcgatgacatggacagcgtggggaataatgcaaaagggtcgctgtggagtgatgccaatagtgctaatccatcaatctctggggcggcatacaaggttcttctcgatgcctcaaatcgatcacgccctgatttcagtaatgacccggtactaaatctaagcaaaaagacctatgaggatatggacctcatcgcaggtggctttggggattgttctgccgaaacaaccattaatcagaatactatcaacgcccacattccagagtatgaacggtgtcagcgtgttgtagatcaaagcgcggactgtgaggttgtccatgactacgacgcctctgtggtgaagcactatgatggcccatacaacctcaagtcctgtggtgacggatgcacggagctctggattggtaaggttggggacgactactgggctggtaactgtaaaatttatgaagagtacacaagagtccaggttagtaacccggatgctatcgtttccgcaacacttgaatatgttaagtgggatgattacatgcaagtgtgggtcggtaagtccggccaagagactaaagtgtggtctggcccagatggcaacttccctccagaaacagcaggtagatgtgagctctccacgagttgggagcgaaaccctaatgttgatgtcactccctattttaagaacgtgaaagatggtgatgttgttacattcaagatccgtgtttcagtaaccggtgaaggtgagggttttggccgcataaaactccgctatgacccatcgaaagccattaccaaggatgagtgggctccacagagctgcatggattccgccaaaggggttgtagatggttttgcggaaggcgagatcacatgtatagatgacccgactgatgctacaggctgcacagtcatcaacgggatcaaagtttgcgaatcccaactcaaaccgtcacctttacctggtattccaaagctatgcaaaaaggttcgagttaaagccgactatgacttctataagggtcaaatggactgctggactgaccctcaaggtgaaacacactgtccggtaaacacgggcgggaaccttgatagctgtcagaaatatgaagaaaaccctcagtgtggcttcatcagttccaaatgtgttgatggtgctcagggaagttctggtacgtgctacgtccacgaggatacttatgactgtggtacagatgtttctgttccgaccttggaaaaggaaactgagtaccagtgcggtgggcctatacgctgcatgggagatgactgccttgatttgaccaaaacacaaagcactgattttgctcgcgctactgcgttgctcaatgcagcccaattcatgacgcaggatatgagctgcacaggccaagatggggatgacaatcctaccggggatgaaaacgttatttgctctgcttttgcaggggaagctggcgaatgcaagatagctgttgggggagtttctgattgctgtgaaaagccaaccaatatatcacttgccgattatctgaacctaataatggccgttccaaagctcgatggcgcagtgatggggctgactgatggtaatgcgcttaaaggggcttatcaggtacttagggagccagcccttcaagggtggacagaagtcacaaaaccgttcacaagttatatagagaacgtttcaggtgctgttgattcgttctttcagcctgtagagcagtttgttgatcaactcattgaccagctcaaagagcaagtcaaagaagtgatgatggatgtcatgaaatcagcaggccaagatgcagcaacagagcaggcggctgccgcagcatctgaacaagctgccgaagcgatgatggagacggcgacaacatggcttagcactgccatgacgatatataccgtctatgtcgttgcgatggtgatgatccagatgatttataagtgcgaggaagaagagttcactatgaacgccaaaagagcgctcaagaattgcacctatgtaggctcttattgtaaatctaaggtgttgggcgcttgtattgaaaaaagagaagcgtattgctgcttcaactctccgctctctcgtattatacaagaacaggttcgccctcaattggggcagaactttggagaccccaaaaatcctcagtgtgaagggattccactagataaaattgccgaaattgattggagcaaaattaatttggatgagtggcttgggatattacagcagaacggtaaattccctgatccggcctcaataaatctcgactcgctgactggagcagggaatgacttcaatattgacgggacgcggaagaatgctcaggaaagggcgttggagcggttggaagggattgatattgacgcgaagcgaaaagaggcgacaaacagcatagaccctcaaacaggcgcgccaactggtggtggtggataa

SEQ ID NO: 286427 - DNA, 1008 bp, Morganella morganii
atgatgcaaaaaattctacggatcatggccgttagcgcggtcttttgggttggttcggtatcggctgaccctgggtgccagaatgcggaagtaatcggcggaaaattgattactgacatctgctggagctgtatttttcccatcaaagtagcaggggttcctataagtggtggaggcggatcattcccgagtgaagccgtaagcaaccctctgtgtatgtgcgaggataatctaggggtccctcggcctggagtaaccacttctatgtgggagccagcacggctcgttgaatttcagagagtgcctggctgctcatcagtcttgaatggtgtcaggttcccgtttgataggaccaaccaagggcatcatggcatgggagacatggatggtggtgatggttcttttatgcactatcactactatgcgtttcctctgttggtgatgctcgatttatttattaagcagacctgtaatgctgatgggtatatggatctcgacatcatgtacatgtcggagcttgacccgacctggaacaatgatgagctcgctttttttaccaatccagaggcggcggcagtagcaaacccaattgcggcggctgcctgtactgctgatgctgtctcatcaaccgctggaaaacctttaaaacagcttttctggtgtgctggttcatggggcaccctgtatccatttagtggcaaccagaatggtggaaaaggtgttatccgcgatagcagtcttcttagcacaagggttctggctgctttgcatcgccggggtttagcgtggaagacaatgggttctgaggctatgtgtagaggcgttattagcccaacactacccaaaacgcagtacaaattcacgctattgcatccggttcctgagaccaactcatctcacgtaattggcgaatctactcttacgtggggtctggcgcgaactataccggcaattgggcaagaccctatttacaccatctggcgatggaatgattgttgtaacaattga

SEQ ID NO: 286428 - DNA, 672 bp, Morganella morganii
atgatttttgccccggctttccaaccaattaaagacgtcggcacaggttcgtttgtcgctgctgaggtactggctcgttggtacgacgaaggccgggttcttacaccatcctctctgtcatcacctccttattgggggctggtggatatggagatggcgcggttcattcaggacaaccttcattattgcttggatctgtacccagctctctttctgaatgtctctgaacaaactttgcaatcagacgtcattttcaaagcgtggtggagggttgtccgcgacattgctaagaatcactcatcacggcttgtcatcgagattaccgagggcattcaggatgcctctctcgcattgagatgggaggctcttaccgaaataggggttgagctggcgctggatgactatggagacaaaaactcttcgctggagcgcttgagtcgttatgactggcactattgcaagtttgacgcgagaagactgcggtcgcttgaagactacccggccatcctccactgccgccgaaaaggcatacagctcattgctgagcaggtggagagcttcccattgggggagagcgccaaattacttggactgtcatggcaacaaggtttctatcacgggaagcctgctgtcatggagaaacatttgaattacgtaaaggccttaccatga

SEQ ID NO: 286429 - DNA, 1266 bp, Morganella morganii
atgaccagatcattggccgcgcatatcccctgttctaagagcgttctggtggcattgatgctctctattactggcggagcatacgctcaagagtctccgctcacggaacaggataaggcgcttattgagcaaggaaagcaacttgcccaaaaggctcagaagatggaaatgccatctctgttgcagaaccagtacatggacgaggctcaggccgaagccaagacgtttttcaaacagctccaaactactaacccgacgctcaaggagatgcaccgtaaacaggctgaaaagggcatctactctgatcatcggatactggttttcgcttccttgtctcttggcgaacaggggttagatgacgtcctaacggcggtgtcaggccagcctgatgctgtaattgtgttccgtggcatcccggaaggaatgaacttggggcagggagttaaagctattcaggaactcgcggccaaaaaagaccctgtgccgaacatcatcatcaatcctacgttgttcaaaacgtacaacatcacagccgtgcccacgatagtgatgctggaggatgagccactgcctggcgaacaaccaaacgtcgtcgcccaggtcgccggtttgtccgacccggtatggttggctcgggaagtggataacggagaaaagggcgatctcggtgttaagggaccggtggagaaaattagcgagccagaccttattgatgttgccaagaaacgccttgccaatatcgactgggaagagaagaagaaacaggctgttgagcgcttctggaccaagcagaatttcaatgagctacccagagcgcccaaatctcgaacccgagaaattgaccccagcgtcatgatcaccagtgacatcagcacaccggatggcactgtgttcgctcacgcgggtgacgtgatcaacccattgtgcgatccgaaggaagtttgcaaacctggaacgcggccatttacccaagcggtcgtagttttcgaccctctggataaaaagcaaatggaactactcgccaagaagctgcctgaaatcaagctggagccaggcgtacaacggatcacctatatcgccacagagttcgacaaagacaaaggctgggattcctacaagagtgtcaccgacaactttgacgcgccggtatatctgctgacgccagatctgattacccggttcgagctggagcacacaccgagcgtcattactgccagaggcaagaagtttgttgtccgcgaacttgctgaggagggcggtgaatga

SEQ ID NO: 286430 - DNA, 531 bp, Morganella morganii
atgaattttccactcaagaagtatttcgtcaaaaaggaatcctggaagcgtttcggggttaaggccggtgtgacactactggttctttgggctgctggtgcggcctttgccagccgctaccgtattggcattgatccacaacaggagaagtgcttgccgggttacacattctttctcattgatctgaacgaccagactctggagaggggagctgtttacgccttccgtgccaagaacatgcagcctttctacaaggacgggactcgcatggtcaaaatcctcaccggtatgccgggggataaagtcgagatcaacgataagtggaagattaccgtcaatggtgatgttgtcggagaggggctccagctcgcagggaaactacatctgccagagagccacttttacggcaaggccacgctgaaagagaacaactactggtttatgggcaaaagcccattcagctttgactcacgttactgggggactgtgaaaaatgaccagatcattggccgcgcatatcccctgttctaa

SEQ ID NO: 286431 - DNA, 318 bp, Morganella morganii
atggacattaaatcaatcgcaatcgccgctattcttggtgccgctggtggcttcggcggtagctactacgtgatgagcgaacaaacggcaagcattcatcagcgtttgaatcaaaccccgccagtggtcgtggttgatttcgctaaagtggcatcggcgtatcccgctggtgcctctcaggcggaagttgaaaggctgatggtcaagaccaatgacgcaattttgaagttgaaagacgcaggttatttggtccttgacgcaagtgctgtcgtcggggctccaagtgacgtgtaccttcctgatgaggtgctgaaatga

SEQ ID NO: 286432 - DNA, 2448 bp, Morganella morganii
atgatcgtaaccatcaaaaagaaactcgaagaaacgttgatcccggagcacttgcgagctgccgggattattcctgtcctggcctatgacgaagacgatcatgtcttccttatggatgaccacagtgcaggctttggtttcatgtgtgagcccctgtgtggtgccgatgaaaaagttcaggagcgaatgaacggtttcctgaatcaggagttcccgtcgaagactacgctccaatttgttctgttccgctccccggatatcaatcaggagatgtaccggatgatggggttgcgtgatggcttccgtcacgagctgctgacatctgtcatcaaggaacggattaacttcctccagcaccacacgacagatcgcatatttgccaagaccaacaaaggtatctacgacaatggcttgatccaagacctcaagctgttcgttacgtgcaaagtccccatcaagaacaataacccgactgaaagcgaactccagcagctcgcacagcttcgcacgaaggtcgaatcatcgcttcaaaccgttggtttgcgtccccgaacaatgacggcggtgaactacatccggatcatgagcaccatcctgaattgggggccggatgcttcatggcgacatgactctgtggattgggagatggataagcccatctgcgagcaaatcttcgattacggcaccgacgtggaagtcagcaagaatggcatcaggctgggtgactaccacgcgaaagtcatgtcagcgaaaaagctgcctgacgttttctactttggtgatgcgttgacctatgccggggatctcagcggcggcaactccagcattaaagaaaactacatggtcgtgaccaatgtgtttttccctgaggcagaaagcacgaaaaacactctggagcgcaaacgccagttcactgtaaaccaagcctacgggccgatgctcaaattcgtgccggtgctggcggacaaaaaggagagcttcgacactctctatgagtcgatgaaagagggggctaagccagtcaagatcacctattcggtggttttatttgctccaaccaaagaacgtgttgaagcggcggcgatggccgcacgaaacatctggcgtgaatctaggttcgagctgatggaggataagttcgttgctctgccgatgttcctcaactgcctgccattctgtaccgaccgagatgcagtgcgagacctattccgctacaagaccatgacaaccgagcaggctgctgtggtcctgccggtgttcggggaatggaaggggaccgggacctatcatgctgcgctgatttcccgcaacggccagctcatgagtctgtctcttcacgacagcaataccaacaagaacctggtgatcgcagccgaatccggctcgggtaaatcgttccttaccaacgaactgattttttcctacttgtccgagggggctcaggtctgggttattgatgccggtaagtcctaccagaagttgtcggaaatgctcaatggcgacttcgttcactttgaagaaggaacgcacgtctgcctcaacccgtttgagctcatacagaactacgaggacgaagaagatgcgatagtcagcctcgtttgtgcgatggcttcggccaagggcttgctggatgaatggcaaatctctgcgctgaaacaggtcctttctcgtctgtgggaagagaaaggtaaagagatgaaggttgacgacatcgctgagcgctgcctggaagaagaaaatgaccagcgcctcaaggatattggtcagcagctctacgcctttacgtcgcagggcagctacgggaaatacttctctcgcaagaacaacgtcagcttccagaaccagttcactgtactggagctcgatgaactgcaagggcgtaagcacttgcgtcaggttgtactactccagcttatttaccagatccagcaagaagtattcttgggtgaacgtaaccgcaagaaagtcgtcatcgtggatgaggcctgggacctgctcaaagagggtgaggtctcggtcttcatggaacatgcctaccgcaaattccgtaagtacggtggctccgttgtcattgcaacgcagtccatcaacgacctctatgagaacgcagtgggccgcgccatcgcggagaactcggccagcatgtacttactcggccaaaccgaagaaaccgtggaatctgttaaacgtagcggtcgtctgaccctttcagagggcgggttccacaccctcaagacggtacacaccatccagggcgtgtactcagaaatctttatcaaatcgaagagcggtatgggcgtcggtcgcttgatagtgggcgacttccagaagctactttattcgaccgatccggtggacgttaacgccatcgaccagtttgtgaaacaaggcatgagcatccctgaggcaatcaaggccgtgatgcgaagccgtcggcaggctgcataa

SEQ ID NO: 286433 - DNA, 708 bp, Morganella morganii
atgcggacaaaattacttggggcgctgatggtgttcgggattattaccggcacggctcatgcgtcatcgaaattggaaatcaccgatcccagagcggcgaagatcgaggacatcgtagagctacccatcaaaggggttcgagccgtccaaagtgatgggcagatcatgttcctctctgaaaacggacgatttgttatttcaggacaaatctacgacctgtggagcaagaagcccctcaacacgatgtcccaaatgagggatgtagcggagcgtatccacttcaagagcatgggcatggatgtggacacgctgaacaccgtgtcgatggggcgtggtgacaaagaggtggtggtctttgtcgatcctagatgcgcggtttgccatcagctcatgggtgatgccaaatcgctggtggatgattacacctttaaatttatcgtgattcctgctctgggtgctgagtcaaaccgcttggcaaaaaacttgtactgcgcgaaagacaaaacccacgcgctcgatgcgctgatgaacaacaccttgggttcccttccttcaaaagaaacctgcgaccccggccaatacgatcaaacgctgctgacagctcatttcattgggattgagggtgttccgttcgtggttgctccggatggtcgtgtcagcaaaggacgtccgaagaacctgaaatcatggttggagagtgttgaatga

SEQ ID NO: 286434 - DNA, 5487 bp, Morganella morganii
atgatcaatttcaagcctaaaattccggcgatgcttggggctctggcggttcttaccgctggtgctgctcatgcagagctgctggaatacacctttaaggctccagatggtacgcaacggtctctgactccgaatgccaactatgccaacccaacgggcaatatctcgtttgccttgagtgccggtatcgaccgaaaggtaaagatttcggtgcttcggtcggatggaacagtggtttcgacagcgaccagccaccttcttggggctactgatcgcatcacagtgggtggaaaatcctactatggtgcggaacttcaactaccagctccagttggtggggcatacactatcagggcggaaattcttgcctctgatggttctacagtacagacggatgaatatcccttcactgtcgatgttacatcaccgacatactcttcgcttgcgcctgtttatggcggttatgggcaggtcattagtggcgatgtttggaaattaggcctaggtggttctcaggataatgcctttttactatcaggtatttctgatgagtcacccatcaaaggagttaaagcgaaactctaccgtcaggatggttcactctacaaagatgtgtctgtgaattacgatgacgccaatggacaagctaggcagtcttaccagtctggatttttccccgcttctgacttagatgaggtgtttacacttcagtttgagataagtgatagcgctgggaatagctatcttacacctcgccaaaaagtgatgtttgataacatagccaatgctccgtctgcgccttttggtgtttatgacccttcaagtacaaacaatttaggccctggattaaccggatttgttgcttacactgagggcatgacagttaaaaccaacccaatcaagttggcttggcgtgttcctcgtgataactggcatgagtacagagaaggtgggataaatatgaccaatgccttgggagagatgtccaaggtaggagaagatgccagctatgtttatctcgtcacaaccgcaccttatggcaataccgacggcaattattggcgttgggtgaacttcggccagtgggggggaggcggtattgcttataacctcacactctctccatcagcgcctaaaagtcctagacttttgggtgtggactacaattacagtgatataggatggtctagtttttaccgctactgggtgaacaattctgttcttcccgtcactgttagtagtatccgtgtcaaagttgaaccaaggccttacgttcaaactgccgttcacaggggaagctgtgaaattcctgttggtcaagatagctgcgtgattgcaaatagcttcacaatggctaaaggcacaacagggtacgtccacgataatgcgacagttttcaatccggataaatctcttcgctcgaatcctctttgggcagaggttaactggaacgatcagcactaccctcagctaagtcagcagtacgatcaaaatagcaaggtatttaccttattcgttaaccagccaggacgaggcgcttactttgataggctgcgtctgcgaagtgcatggatcgaagatagcaaaggcaacaagctgtctccaactggtgggttaatagccaacaactgggagaactacacttaccagtgggatcttaaaactctccctgaggggcaatacagtcttgttgccgcagcagaggagatgcacgggcctttaacgcgacaaccaatgttccagataacgtctgatagaacggcaccaaccatgacactcagtgtggcagatggagcagctatccagactctggatgatgttgttattaccttggctgatgctatcgacccttcacctaaattgacctctattgcccttgtaggggggcctgccaatgacaaggtgcagttgtcttggcgtgaggagtcgaaaggtcgattccgccttgagtacccagtaatgttcccttctttgaaggaaggggaatcttacacgctgactgtttccggtgaggatgcacaaggcaattcggttcaaaaggcggttggcttcgagtacaaacctcgtcaggtaatgctggcggatgggatggatggcaaggtcatggtccccgctgtcactcatgaatttgttcatgcagatggcaaacggatcatcgaaaccaagccgctgacgctcagtgatggtgctgtcgtgacaggttcatacgacgtgtttgcgaccctccgttctgatgcgaaagtaccgctggtggttaatggggtgcgtatcgagccaggccagacaatggggatcatgagccaacatgatttcggtgcgtcaggtggtcgtttgagcattccggttaaacctgctgttcctgatgtggtcggctcttccagccttcttgtcatgacttccgcgccgaactcacccattttggttgtggacatcaatacctggaaagggacggctaagctctcggctgaatcatggacaattcgccaggtcattgacccggtgaaaatctatgccctgccagagtcgggtgtgccttgccggttcaccacgaaagaggatgtggctatggccgcagacccaattcgtgacccggtgtgtttgctccagtgggacagaactccagatgaggctgaacaaactacgcaggacaataacgggatgaaagttgctgggctggtggggcaggctgtgagcattggtgaacaacctgtcgaatacagcctgtacctgttcagtggtgacggttccaaggtaaaagttgggtctggctctcagaacctgacggtaactactgcctatggctctgttggctacaccccgattgatgacattgctcaggtgaatcgcgtcattgaagattttgatgtgaacttcaagcagagcaaggggccagactgttctataaccctcagcgcagaccgtgcgaaaaaagaggccgcgaacaaggctgttggtagtgcaagccgtgcctgtctgttcgagtggcagcagatccccgatggattggtccaagacccgttatcggaatcaccttcgctctctggttcattggcctccaacggcgttcatccacttgggtggcgggtaagtatattcacccgtaacggcactagggtgacgttgaacgacgagactttcaatgtcgaagcggttgacccaccagctccgaccgttgaactagcctccgactacaacttcaaagacaacatctacatggtgccgatgacaggtaactacctgggtgatgccattatcaactctgaacgagctgatctggatattgccatatcgcgcaactctgatgttcttgagtccgagaccttcactccgggatggggtgccaccaataaggtgtatcgccgcatcaataccgatgagcgagcgttgtgggaggagaccacctacaaggtgaacgcggcctacaacaaggtgcctgatgtgaagactgaggttgtctaccgggctatctctgcaccttctgacagtatccgtcctatcgttgaagttaaaggtgataccgcgattgacacccaggcattgccggttagggttctcatccgtgatcagtacaaacctgatggtgactatgacgctaacacgatgggggtgtggaaagtacgcctgatccagcaaaaggcctacaacgagacggttgctctcactgattatgcggaagcatcgaacggtgaagctcagttctcagtagacctgtctggtgtggatacttcctccgtccgtatcgctgctgaggctgttctggaaagccctgttgagggttacaaccgcacagagttgtctatcagacctgccttcttgacagtgcttcgtggtggtgccatcggtgctggcgtggaggctcgcaagttgtctggtgaagctccgttcactgctgtgttcaagctatctctggacgaccgtcaggatctccgggctaccggccaggttgtttgggaaaccagtaaggacgacggtaaaacctgggagcagttcatcccagaagatcgatacaagtatcagcttgtgaagaccttcgacaagggggagtaccaggttcgggccaaggtggtgaacgtcaactcaggtgcggaaaagtacaccgaagcggtcagtgttgtcgcttacgacaaacctgatattgctgttatcggcccgaccacgttgtttgtcggaagcgaaggcaagtacaccgcgaacctgactttgaacgatgagccaatctccggtggcaatgccattgttgagtggtctactgacggtggcaaaacctactcgcagacaggggatagcatcacgctttcgagtgatgaagaaacccgataccgcctgtgggctcgtgtgcgctctgccacggcaccggctgatgacggctatgcctatgaagttgcgaaaacggcggttgacttccgagcagtgaaggcacctcgtccttacgtgacagggccgcgagttattgagaccggcaagaagtatgtgttcaaagccgaaaccagcctgccttaccgtgggatggacgtgaagctgaacgggttcttcacgctgcctgatggctcgattgtgcaaggtgatactgctgagtacgtgccctctgacactgacctcaaccaggctactgtagaaacgaagtacaccacctggatcgaaggataccgagatcagggtgcagaagcctcgcatagcctacgctcccgcgtttggcagtatgtatggccgagcttcggaatgcaggtcaggaagaacgctgacgtggctcctgcgacgatcaccgcctcagtgcggccaattgccttcaacggtaagctggaagaaccgacctacgagtgggagttgccggaaggcgctgtgattcaggatcagcggcaggatattgtccggtcctttgtgatcaatgagccgggtgattacaacatcaaggtgactgtccgtgatgctcgcggccatgagaccttgatcgagcaaccgctcaaaatcggccaggcagcgccctatgccattgacctgcaatactctggctcgaacaaatacgagcgtgagcctctggatgtgctgttgcgaccgtacatttctggcggccacccacgcgaccgtatttcgactcgtgtttattcggtagacggtacaccgttggaaggcagtggttactatggcagagcaactctgggcgctggtgagcacagcatcaagctgaaaataacctcagaaatggggcatgaagctgagggcgaggtgaacatcaatgtggcagagaacaagttgcctgcatgtagcctgagctcacgagagaccgttgggtcgtggatcgtctatgcgaactgcgaagataccgatggccgcatgaagtcctacgaatggaccattgccggtgagttgcagagcatcagctctgatcgagtgactatcagcaagggcacctatgaaacgatgccgaccatctctctggttggggtcgatgactctggtggcaaatccgaagctgttaccatgaactaa

SEQ ID NO: 286435 - DNA, 384 bp, Morganella morganii; identical to SEQ ID NO: 25106

SEQ ID NO: 286436 - DNA, 579 bp, Morganella morganii; identical to SEQ ID NO: 25107

SEQ ID NO: 286437 - DNA, 1317 bp, Morganella morganii
atgattaagcgattttggacacagttagaccccaacaagaagcgttgggtgtctatcgctggtggcgtcttcgttctttttgcggtcgtgacaatgttctctggtgaacccaagaaagaagagaagcgcggtcgccaagaaaccatcaagcacgttctcacagacaaaaacacccgtgagatcgggatagattcgttgtctgccgatgtgaagatggtgtctcgtgaaaactccgacctgaaaaaggagctggaacgagtcaagaaagagctggaggaaaccaaaaccactgccgggaaatccagtgatgttggccgtgagatgacccgccttcgtcaagatttagaccgtctgacccagaagaacatggaattggctaagaaagtcgaaaccggcgctgctggtggaaagacatcctcttcatcagaggatgccagagccgatgttaatggtgcatctggtggtgatggtcagttcatggagaaaaagctcgactacaaagatcctgcatccttttttcgggacgcaccgcttcctgactcgaagggtggggctcctgcaactggcaagggtgacggtcgtgatgcaaccaaaccaggcatccaaatagtgagctactcgcagaaagcgccagaagttgaagagaagaacaacaaggatgatgagtctatctacctgccttctggctctatcctgacaggggtgctcatcaacggtatggacgcaccaacatctcaaggtgctcgtcgagatccattcccttcgaccctcaggattcagaaagaggctattttgcctaaccgcttccgtgcggatgttcgggagtgcttcctgattgtttccggctatggagatctcagttcagagcgagcgtacctgcgtggcgagaccttctcgtgcgttcgggatgatgggggtgtcatcgaagcgaagctggattcctatgcagtgggtgaagacggtaaggccggtgtccgtggtcgcgtcgtatcgaagcaggggcaaatcatcgccaagagcttgatggcaggcttccttggtggcgtgtccgaagcctttgacgtcaatccggtgccggtcgtcagcactaaccctggctcaaatacccagtaccagtcagtgttctccgaccagatgttgcagggtgcagcagtgaagggggccagtaaggcgctagatcgcatcgctcagttctatatcgacatggccgaaggcatcttccctgttatcgaggtcgatgctggccgtcaggtagacatcatcgtgaccaaaggcaccaagctacaaattcgttccaccgggggaaccaagaaatga

SEQ ID NO: 286438 - DNA, 918 bp, Morganella morganii
atgaagaacaacgctaaactttcgctcctggcgctgtccttggcgcttggaacttcaatggcctatgcctcggatgacattcctgttgtcccggccagtgttatgaaaaaggacgttcctgcccctgtgacgtcaggacaaagctcccatgatgttgtgggcagcatgaatgaaaaccccttactgacgatgaagccgggggttaaccagatcatcccgatagccgttggtcatccgaaccgaatcgtcacgcctttcagcaatcctgagatcgtttcaacctctctgaccggggcgacggataacggccaatgtggtgaggtctgcatcaaagagaatgtggtctatgtcgccacggataagcagtatccggtgactatgttcattactgaaaaaggctcggaagcccaagctctcagcctgacgatggttccccgtcgtattccgcccagagaagtctttctcaagctcgatggtggtgtaggtatcactggtgctttcgccaataccaaggctgagacctgggaagagagtcagccttatgtcgaaaccatccggtcggtattccgcaagattgctcttggtgaagtccctcaaggttacacgttgaaccgcatccctgctggtgctgcggtgccgagctgcgctcatcctggggtaaaggtggatttcagcaaggggcaatacatgatgggccaccaccttaacgtgttcatcggtgtcgccctgaacgtctctgatcagcctatcgagttcaaagaggcgttgtgtgggagctgggatgtggctgcggtgactacgtggccgcttaacgtgcttgagcccggccagaagacggagatctatgtggcgaagaagcagaagcgtggtctcgcaccaacgtctaagcgtccatcgctgctgggaggtgcccaatga

SEQ ID NO: 286439 - DNA, 627 bp, Morganella morganii
ttgaacctgaaaaagtatctcaagacctgggaagggacccaaacagaaaataagtgggggcgaatcttccagggtggtcttattgctatcgttttcctgctggtgctccaggtattcagcaaggaaaccatcgtcactattcagccttttactctcacggaagaagcctgggtgacgaagagtaacgcctctcagtcctataaagaggcttggggtttcgcttttgctcagctccttggcaacgtgacgccaggaacagtggactttgtgaaggaacggatcaccccgcttctctccccgagcatctatcaggacgtgattgatgccatcgaaattcaagctcaacagatcaagaacgaccgcgtaaccatgcggtttgagccgcgttttgttgagtacgagcccaagagcgacaaggtgtttgtctacggatattcctacgttaaaggggcttcttctaacgaagagcgtagcgaacgctcctacgagttcgccatcaagatttcaaactacgcgcccgtgctggactacatcgacacctatgtaggaaagccacgcaccaaaactgttttggagcaactccagcgcaaagaagaaaaccggagaaagcatgaagaacaacgctaa

SEQ ID NO: 286440 - DNA, 282 bp, Morganella morganii
atgaagcctgtaaagataccgcgccgggtcgatgagcccccgcatctgctgttgtggagcgcagatgagctggccccgatgcttttggggctaacgataggggtcatcatcggtaaggccctgatctgctttctaggggggttacttgtaaccaacctttatcgccggttcagggataaccatccggatggatacctgctccacatgatctactgggccgggttcatcatgaccaaggccaaatctctcaagaacccgtttgtccggaggtatttgccttga

SEQ ID NO: 286441 - DNA, 366 bp, Morganella morganii
gtgaaccttaataaacaatttttctggtttttgatgaacgcggtgctgatgtgcatcttcatcgttccagtggccgtcgcgttttggctgtctgcttttgcggcaggttttgactggagtcagtgggttaagttggctgctgatacggccaacatggctgcaagtgaccctgccaaggctctgggcacgattcagacctactggggcattctcagcttcttcctgctggcggcgtacagtctgatgttcaagtttaaagccaatgctaacaaggaagtgaaaactctcgggactgtccggcctgccaatgaagttggcgttgcggcttcggaaaaacactcggacgcggttcctcaaaatcaataa

SEQ ID NO: 286442 - DNA, 144 bp, Morganella morganii
atgtccgcacaagctcacgtcagagaaagcgaaagctcatctggttcattcatctcctggcagttcctcgtatggcaggtgatgttcgttataggtgttgttgcagggatgaacctggaacacgcattcaattttctaggttaa

SEQ ID NO: 286443 - DNA, 663 bp, Morganella morganii
atgcgtaagagagatttcttttttggagaggtgtatgaggggagtggaggagccactctacgactgagtgatatggaaccattggcaagaaaagtgtcagcagagttcttcactgcacaactgaaccgtatgttgaaagagcatgacggtcagttgacgctcagcgatggaacgtcgtaccccagcttttggagcttcatcgacaaggttgatccagagcaggtcggtttcgtggagatctacgctcgtcaggatgttaacgataatgttgaagcgacactggcgtgtgacatcgttttggtaaatggtgtgatcaccgttaaacctcactggtgtgcttacaaggacatccgggctgacgaagtgatttccaccttgctggtgcctttgcatttgaaggctctccagggtaaggcttacattcgctgggatgatggtgaaaccgaacctctgttacaaaacgacaactatcaggctgaacttgaaaatgtgtttagtgtttccaagtacccatcagccatgagctggggcgatacagcagaccagaaggttaagcagtacaagatggaccttgagtgcgccacagatgttggtcgtcgaggtgtctcatcagagcaagcatgggatgcttatcgagaactccgttacaatagaacagtgtga

SEQ ID NO: 286444 - DNA, 378 bp, Morganella morganii
atgaaagtaactaatagactccaactgctggtactggggctgtgtatggccggtacgtccatcgcggctcctgatgtgctcaatgacgacgcaaagctcaagaaccttgagaaggtgtgtcccgactgtcagatggtggcaaaagatgtactcaaccttcgggttgaaaactgccagctcaaagacacttccagtgcaatgatgattggcaccatgcaaaatgaccctatgttttcgtttatgctggcagtacacacagcggcaggctcggaggcatacaaaacagtagttggtgccgctggcaaccatgttgactgtgaaaacccgttgaactggatcaagctgacccagcaagcgattaaaggaggcaaagtctaa

SEQ ID NO: 286445 - DNA, 447 bp, Morganella morganii
atgagctactccgttataaatcaagatggggtgcatctgtgcgacatcccattgaacgtctaccaggtgatacgtcgccaatccttgtctgcgttgtggctttactgggcgcagagcttgaatttggtgaaggtgctcattgcttgcgtcggaaagatgatctttgtgatgccggtaatgtggttctgggtgctggtggtgtgccgcttggttgaaccagaacgtatctcagacgtgtcaggacttatctctccggacgtgatcgggtgggccgctggtgcggccatcaccctcattatcttttccgtttttacacgcccagcgttgtacggataccacaactttttcaagcagcatatttgctcaagagtaaagcaagtaacgccggaactcagaacagtcactgggccactgttcttttaccgaaacgaaattggaacgatatag

SEQ ID NO: 286446 - DNA, 630 bp, Morganella morganii
atgaagaagccgtggttgctggtcgcatggctgctggttattgagttgctggcaatattgctgctgatccctggcgactggacagacagagccatcaaaagggaatccgagctggtggaacagagtcttggtgtcgaagcaagagactggatacagaacaaagcatctacctggttcaggtcgagcgttattgattcaggattctatgaggggatgtaccaaacgctgatcccatcagaagaggagcgccagaagtccaaggggatgcaggacatgggcaagggctggtttgtgtgggtcaaaggccgcatggaagcctttgtcaacgtcatttaccagttctacacaaggttggcgctgttagccgcgtgggctccctatatgctgatcctgttcgtacctgcggtatatgacgggatgatgacatggcgaattaagcggaccaacttcgattatgcgagtccggttctccatcgttacagcgttcgcggaacgatgtacctgatggccggattgttcatcgcgttcttcatccccatagcgctcgatccggttgtcatcccgatgacaatgatgacgtgctgtgtcctggttggcctgacgttcggcaacctccagaaacgggtatag

SEQ ID NO: 286447 - DNA, 546 bp, Morganella morganii
atggtcgatgtgaaccctttcgacagggttatgaatgaattgaaaagtcgtggacgcaagaacgctcacatcctgagcatcctccaattcgactggcctgcatcggaggccatcatcgagaagctgagctgctacatcacagacgggattaaggctaatcaggagcctgtgatttacccgatcattgaagaagctctgcatcgctacagccagctcgtgtttcatgagcagagagagaaatatgaagacccggccagaattggggcatttctggaaaccctgatcaccgaaacctgccgggcgttggaagtgcaaattgtcgatagtggcggtgattcatggtctgtcgattcaggagagtcgttctcactgtggctttcttcccatccaggagaactatccattaacccgcagccccatgaggatgagacctctttgcgtggcttgctgtatgagctcatcacttgtgagagcgtgaaaactgttttaaggagaaccgactatgaagaagccgtggttgctggtcgcatggctgctggttattga

SEQ ID NO: 286448 - DNA, 1866 bp, Morganella morganii
atgacaatgagttatgacccgctcgcctacgagatgccgtggcggcccaactatgaaaaaaatgctgtagcaggctggcttgccgcctccggcgcggctttggccgtagagcaagtcagcacgatgcctccggagcccttctattggatgacggggatctgtggcgtgatggcgatggctcgtttgccaaaggctatcaaacttcacctgctccaaaagcatttgaaggggcgtgatctggagtttatttccattgcggagctccaaaagtacatcaaggacacgccggacgatatgtggcttggtagtgggttcctgtgggaaaaccgccatgcccagcgtgtgtttgagatcctgaaacgcgactggacttccatcgtagggagagagtccacggtcaaaaaggttgtccggaagatacagggtaagaaaaaggagctgccaatcggccagccctggattcacggggtagagcccaaagaagagaagctgatgcagccactcaagcacactgaggggcattcgctgatcgttgggaccaccggctcgggcaagacccgtatgttcgacatcctgatttcacaggccattctgcgtggggaagccgtgatcatcatagacccgaaaggggataaggagatgcgggacaatgcacgacgtgcctgtgaagctatggggcagccggaaagattcgtctcatttcatccagcattcccggaagagtcggtgcgtatcgaccctctgcgtaatttcacccgcgtgactgaaattgcaagtcgtttggcagcgttgatcccgtccgaagcaggggccgacccgttcaaatcatttggatggcaggcactgaacaacatcgctcagggcttggtcatcactcatgatcgtcccaacctgacaaagctccgccgattccttgaaggtggcgctgctggcttggtcatcaaggccgttcaggcttactcagagcgagttatgcccgactgggaggcagaagcagcggcttatttggagaaagtcaaaaacggttcgcgtgagaagatcgctttcgcgttgatgaagttctactacgacattatccaacctgagcacccaaactctgatctggaaggcttgctgtcgatgttccagcacgaccaaacccacttctccaagatggtggcgaacctcctgccgatcatgaatatgctgacgtccggggagctaggccctctgctgtctccagactcatctgatctgagcgacgaacgccagatcaccgattccgcaaaaatcatcaacaacgctcaagttgcttatctggggctcgactccctgaccgacaacatggttggtagtgctatggggtccatcttcctgtcagacctgacagcggttgccggtgacagatacaactacggcgtcaacaacagacccgtaaatatctttgttgatgaggctgccgaggtgatcaacgacccgttcatccagctcctgaacaaaggtcgcggtgcgaaacttcgtcttttcgttgcaactcagacttttgctgacttcgcagctcgactgggtagcaaagacaaagcgctccaagtgttggggaacatcaacaacacgtttgctctgcgtatcgtcgatggtgaaacccaggagtatatcgcagataacttgccgaagacccggctcaagtacgtcatgcggactcaaggccagaactcggatggcaaggagcccattatgcacggaggcaaccaaggcgagcgtttgatggaggaggaagctgatctgttcccagcccagttattgggaatgcttccgaacctggaatacatagccaaaatttcaggcggaacaatcgtaaaaggccgtctgcccatattgacccagtaa

SEQ ID NO: 286449 - DNA, 2979 bp, Morganella morganii
atgctgaaagccctgaacaagttatttggtgggcgaagtggagtgatcgagaccgcgccgagcgccagagtgttgccgcttaaagacgtggaagatgaagaaatccctcgatacccaccttttgccaagggcctgccagtggccccactagacaagatactggcaacccaagctgaactgattgagaaagtgcggaactctctcggtttcactgtggacgacttcaaccggcttgttctgccggtgatccagcggtatgccgcgtttgttcacctgttgccagcttccgaatcacaccaccaccgtggcgcaggtggactgttccgacatgggcttgaagtggccttctgggcagctcaggcatctgagtcagttatcttttccatcgaggggacgcctcgggaacgccgtgacaatgagccgcgttggagactggcgagctgtttctccgggctgctgcatgatgtgggtaaaccgctctcggatgtgtccattacggacaaagacgggtcaatcacatggaacccgtattcggagtcacttcatgactgggcacaccgtcacgaaatcgaccgttactttatccggtggcgcgacaagcgacacaaaagacatgagcaattctcgctgctggcggtggatcgaattattccggctgagactcgggagtttctgtccaagtctggcccgtccatcatggaagcgatgctggaagctatctcaggaaccagcgtcaatcagcctgtgaccaagctgatgcttcgcgctgaccaagagagcgtctcacgggaccttcgccagagtcgtctcgatgtggacgagttctcctatggtgtgcctgtcgagcggtacgtgttcgatgccatccgccgcctggttaaaaccggaaaatggaaggtcaatgagccaggcgcgaaagtctggcacctcaaccaaggtgtattcattgcctggaaacagcttggggacctttatgacttgatcagccacgacaagatccccggtattccacgagaccctgacacactggccgacattctcatcgaacgtggttttgctgtaccaaacacggtgcaggagaagggtgaacgtgcgtactaccgctactgggaagttttgcctgagatgctccaggaggcggcgggttcggtgaagatcttgatgctccgactcgaatcaaacgatctggtgtttacgactgagcctccttcggctgttgctgcggaagttgtcggtgatgttgaggacgctgagattgagttcgttgatcctgaggaagccgatgacggtgacgaccaagaggaaggtgaagcagctctaaacaatgacatgttggccgcagagcgggaagcagagaaagctctagcaggtcttggctttggtgatgcgatggagatgctgaaaagcacctcagatgctgtcgaggagaaccctgagcaaaaagatgcgggatcaacggaatcatctaagcctgacgctggcaagaagggtaagccgcagagcaaaccgggcaaagcaaaaccgaagagtgatacggagaaacaaccccacaaaccagaggcaaaagaggatttgtccccacaggacattgctaaaaacgcaccacctttggcaaacgacaatccgttacaagcactcaaggatgttgggggtggactgggggacatcgactttccgtttgacgcattcagcgcatcggcagagacagccagcactgacgcaacaaactcagaaatcccagatgtggcaatgcccggaaagcaagagaagcagccaaaacaggacttcgttccacaagaacaaaactccctgcagggcgatgactttccaatgttcggtagttctgatgaaccgccatcatgggcgattgagccgctccctatgctgactgacgcaccagaacaaacaacaccagtgtcagcaatgccacctacggacaaacctaatctgcatgagaaagacgcaaagaccttactcgttgagatgttagccgggtacggagaagcagcggcgttgcttgaacaagcgatcatgcctgttttggaaggtaaaacgacgctgggcgaagtcctatgcctgatgaagggtcaagccgtcattttgtacccggatggcgctcggtcgctgggtgcgccgtcagaggttctctcgaagctgtcccacgccaacgcgattgttccagacccgattatgccaggtcgcaaagttcgtgatttcagcggagtgaaggcaattgtactggcggagcagctttcagatgcagtcgtggcggccattaaggatgccgaggcgtcaatgggtggataccaggatgcctttgagctcgtctcttcccctagcttggatgcaagcaagaataagtctgcaccgaaacaacaaagccgaaaaaaggcgcagcagcagaagcctgaggttaacgccggtaaaccctcgcctgaacaaaaggcgaaaggtaaggactcccagccacagccgaaggagaagaaggtcgatgttacttctccggttgaagagccgcagcgcaagccggtccaagaaaaacagaacgtggctcgccttcctaagcgggaggttcaaccagtggctcctgagcccaaagttgagcgtgagaaggaattgggacacgtcgaggtgcgagaaagggaagagccagaggttagggagtttgagccgcctaaggcgaaaacaaacccgaaagacatcaacgcggaagatttcttgccgtctggtgttacgcctcagaaagcactccagatgctcaaggacatgatccaaaaacgctcgggcagatggctcgtgacaccagtcctggaagaggatggctgcttagtaaccagtgacaaagccttcgacatgattgccggtgaaaacatcggcatcagcaaacacatcctctgcgggatgctgagccgggcacagagacggcctttgctcaagaaacgtcagggaaaattgtatttagaggtaaatgaaacatga

SEQ ID NO: 286450 - DNA, 618 bp, Morganella morganii
atgagacaactgatagcgattttgggagtggcaattctggccgggtgtgcatctaacgcccccgagcaaaagcctcaaccccagactgcccctgccgaaaatgacaaacctgcccgagttagccgggaactgtcgatggcatgggacaacatggggcgcggtggtgctgcattacgtcaacctggttatatccatgtgctgggcgacggtaatgtcagcgcaacgatgaacaaggtcaaagatgactccgctggttcagataaaactccagcaggggtcaaacagcacggggatgtcaacgaagccatcaataccttcaagtccatgaataaaggcaaaggctactcgctgtacgagttgtcacgctgggaacgctattgcgatggtggcaaaggtatggacgagcacgattggcgctttgtggaagccgaggggaccacaaacatccccaaggacgttgtaaccggctgcataccacctacccacacctatcaagattatctgaatgcctggacgcacttttgcaccagtcaggctgtaactgacgcagatcgccgcattgtgcgcgagtccgtgcgtccctattcagtggtgaacccatgcaaagctctgaaataa

SEQ ID NO: 286451 - DNA, 2193 bp, Morganella morganii
atggacctttatatctgcgagaagccttctcaggcaaaagatttggctggcgtaatgaaggcctcccaacgaggtgatggatttctccatgatggaggaaaccgcgttattacgtgggcgttcggccacctgctggaattgtatatgccagacgattatgacgaacgctacaagtcatggtcactggagaccctccctattgcaccagagtcatggcggtacaacgttcgcaagagtgcgttcaaacagtacaaaattgttgagggactggtcaaaaaggcgagcaccatctacatctcaacggactacgaccgagaaggtgaggctatcgcccgttcgcttctggatcgattccgctactctggccctattcgccgggtttgtttgacggctctcgatgagtcaagcatcaagaaagcgctgaacaacgtaaaggatggcaaggatacggtctcactctactacgccgcattggcacggcaacgcgctgactggttggtaggcatgaacgtgagccgcctctacacagtgctggcccgagatgtcggcttcaaccacactcttcacgttggcagggttatcaccccaaccgtcgctcttgtttgtcaacgggaccgagagatcgccggtttcaccccctcaccatactggactctgggtgtgaacgtgtccgtacagaatggacagtttgccgcccaatggataccaccagaagagtgcagtgacgagcaaggccggtgcgtcaataaggcctatgccgagcaggtagcctcccaggtcaatggtgccaatgctgttatcagcaaagcagaaaccaaaccaggtaaagagtcagcccccctccccttcgatctaacgtcactgcaacaatacgcgagcaaacgatggggatacacagctcagcaggtactggatgcagctcaagctctgtacgagacgcacaaagcgaccacctaccctcgtactgacagtcgttatctacccgagagccaaaaggaagatattccggacattctccaggcactaattttgtccgatcagaacgtatctgggctggtggctggcgcagatcctcatcgcaaggccagggtattcaatgacgccaaagtgaccgcgcaccacgcgatcattccgacaccggccagaacagacatcagtgccatgtctgagatcgagttcaatctctacgacgccatccgtcgtttctacatcgcgcagttctacagcgagttcgagttcaccaaaacctccatcgaggtgcagtgtgggcgtcacctcttcgcagcctctggcaagacaccggccaaacaaggctggaaggttttgtttgcttctgacagtgaaagtagccccaaggacgaaggggaagacaccgacgcgccggttgaacaagagaagctccccagggttagccaaggtgaacctgccttacttaatggtgccgagctggcaaacaaaatgacgcggccagcaccgcacttcaccgaagccacattgcttgccgcgatggagaacattgcccggttcgtgactgaggagaagttcaagcaaatcctcaaagacacagccggtttaggcactccagcaacacgcgcaagcatcattcagggcgctgttgataaaggctacttcaaacgtcagaaaaaggtactgcttgcaactgataaggctcatgcgcttatcgcagtgcttccaccagccatcaaatcacccggcatgactgcggcttgggagcaggagcttgagaaagtcgcctccggctccgggaatatgtctgtcttcatgaagcagatttccacctggatctgccaaatggtcgagcagctcaaagtggccgcgccggttctaaccaaagaaggtggcgcgatggctaaagccttcgagggcgcgaaaccgccttcacacgaatgcttcaactgcggtggagagatgcaccggatcaaagggaagaacggttttttctggggctgccagaacgaggcttgcaagaagacgttcccagacaaccgagggaaacccgagaagcgtatcgcggcagaggattgtccagactgcccagattgcggtagcccgatgcgtctcaggaaaggaaaggcccccggcaagaagcgagcttctaagttctggggctgcactgcttatcccgattgcaaaggcactatgcctttcaagaagtcggactttatggattga

SEQ ID NO: 286452 - DNA, 489 bp, Morganella morganii
atgtttggaacaattattttaaccgccatgctcaccaccagctcagtctctgccgaagatgcaggaacgagcatagcctcagacttggcgacggcatccgccagccaaataggtcaggtcatcgtgccaactctagccatcggctcggctattgcaaaaagcgcaggtaaaggcatgatatcaggtttggctgcggcgactgccagctatattccccacgacgagctgagcgccactcgaagctatcaaaaccctgaggctgttgatatggcaaaaggcctggggaccttgaaagacgtccctgatttcctgtacgtcattacagacgtaaatgccaacatggctgacaaatgcaagcgcgtctgggagcctcaatctctggctttaagtcaattgattgttgagctggtggagctgcgtaagacgaacaacaaagttagctacgaacaagcgttatcacacctcgattgttcaacattcacagactaa

SEQ ID NO: 286453 - DNA, 1407 bp, Morganella morganii
atgcattccgcgggaatgcccaccactctggagcaggccaacgagctgatttataagctcctcgaccgcatcgccgagctggaggaccgcctcaatcagcacagcggcaactcctccaagccgccttccagcgacggccccggtgcaccgccgccggcccgcaagcgtccggcgtccggcaagcaacggggggcgcagcccggtcacaagggacatcgccgcgagcggcatccgcttgatgcccgcctgaccctggtcccgcattaccctgccgccgattgcgcttgctgtggcggggacatggtggcccatgccaaaccctatcaggttcatcaggtgttcgagctgcccgaggtgagctatctcgtcaccgaacaccaactgtatcgtgcgacctgctcacggtgtatcggcacgacccaggccgcactgccagacaacgtcagcagcagccagatgggggccaatctgctcagctacatcgcgctgcaaagcggccagtttcaccagagcgtcagccagatacagcagcagctcaaacagcatttcggcctgagttttagccggggcgccatcagtgaggcgcaggggcgggtgagtgccatgctcaccccgacctaccaggccatcaagcagcaggtgcagacggccacccacgttcatgccgatgagacccggcatcagcggggtggagagcgccgctggatgtggctggcgctgagcaagatagccgtctgcttcatgacggcctatggccgtggtcaggaggcggccaagcggctgctgggcgccgagtttgacggggtgctggtgaccgaccagtacgccggctaccggtttatcgacgccgaccagcggcaactgtgctgggcccacgtggcccgcaatctcgcggccatcgccgagagtagcgagcagtgcaaccagcccatcggtgcccggttggtcttgctggcggatgcggtgtttcgtacccggcaccgttgggaaagcggtgcgttgagcaagcagaaatacctgcgcaggctcgcgcgttaccggcaaagctggcgaagccagttggagcgcggcgccctgttgtgcagcaaacgctaccgtggacgatgccagttgctgctgcgggatgacgagatgctgtggcggtttatgactgacgacgaaatagcgctgaccaacaacgaggcggagcgggcgctgcgtggctatgtgctctggcgcaagggtagctacggcgtgtggtctcaccggggcgagctgtttcgccagcgcatcctgtcgttggtggagaccggcaagcgattgggccgctgcccacaggagtggttgagggccgtggtcagggcgtgcatcgagaagacagattatcccatcccggcagaactgatgccgtcaaccccgtcctggtga

SEQ ID NO: 286454 - DNA, 639 bp, Morganella morganii
atgcgtttattgatagcagaaaagcctcatttcgcaagagttttaagagaacacaatttgataggtccagacatcgaagttgtgttcacatttggcatcggcttatggagatatgccgctccaaaaatgtcgtttgtggacattccctttacctcttatccaaattcattgcgtcctcagccatacaagccaagaaacattcttttagggcctgacggaactcctaagctctctgtccatgaaagctccacattgggtgagctcgaagaaacgttagatgcgttggtgaagtatcttcgtgagaagatgggggagtacgaggaaataatctgtgcggtagactgtgatagaacaggttacggctcggccaagcagttattagataaaatggggtggacgatagacagcaatgttccagttcactgcctttatctgatggcgatggacaagaactctctcgacaaggcttggtcagctagatttgataacacatggcacctagattcctttgctgaaaaactagcaagccagcaattaatcaagaaaacttttgattactggtggaatgccaactcatctgttgtcttctctgaaataagtaagtggtcaggtcgtatctattcaccaggacggggttga

SEQ ID NO: 286455 - DNA, 381 bp, Morganella morganii
atgaccgtaccgttatgggaggcacagagaatgcttcataaagaaggcgaacaagcaattagattctctgtccacaaatacaacccttacaataaagggcgtaaaaccactcttgaagaggcggtccgatgtcttgcttttcagtcgcgttttgctggtacgcactcatttgtcgatagcgaaaccaaagagccaatgcacttacaaattgatatagcatcaaaaacagatgttcctatgcttggcatgttcctgtcagtctacatttcggatggaaaagaaaagtacctgtctcaatttattgtaagcgaatcaaagtcgcactacttcttcctagattttagtttggcagcagctaaagccaaatccatagaagtataa

SEQ ID NO: 286456 - DNA, 366 bp, Morganella morganii
atgaacttcaatgaattgcagaaagaaatggaagcattactaaaaaccattcctcaaggcgtagttgttgaatatggtattgcaggaaataagatcgattttttaatcaaagaaaggcccgttgattttacaaagcagcaagagaaagaactaattgaacaactaaattctgtggtgtttcaatcgttttttgttgagtctgatgtttcacagttaaaagtcgtgcctattggtaaatcaattgccagtatttccgaacgagcagagattttgatgaaagttgggcgtaaaacgaatagcaaacctgtagtgcaaccaaacaagctgtcatatccgcagccacgcaaaagtaagaaaatgaagtaa

SEQ ID NO: 286457 - DNA, 657 bp, Morganella morganii
atggcagtcatttactacggcgagggaacccatgacgccggtttcgtcgggttccgtgtcgcacgaacagttggggtggcggatgattaccggcaggaatacttctccttgagagagtattcctacgcaacagctcaccggctggcctacagcttggatcgaaagtgggaagctgaggcagaagaggtgaagcgtcagaataagacttgtaagcgacgacgtaactccgggccaaatatcattgctgaggggctgagggcttatatcagcatcgagaaccggagccggatgggggtgaagagaacctacttcgcgccttgttttctcgtcacaaagccaggctacggcaatggggatattgctttcaggatttccactcatggctacgcagaagcctacgaaaaggcggtggaaaaatattgtgagatccatgatttgacggatgagcagtatgttgagttgcttgaccgtatgccgagtacagaggtgttcactggatacctgctgaatgctcttttaatgcgcggccatcgcgccacaaaagctgaaatactgagtaagctgggggctgagaagaatgaaaaggacatcaccaatggcaaagggaaatgcggccagaacagagtgcggtgcccagagtatcggtgggcgcaataa

SEQ ID NO: 286458 - DNA, 1428 bp, Morganella morganii
atgttaccgatcgtctccccctccgtagtaaccaaacaacttgcgttcaatcgagtaggcgataaacgcaaggttagggtttcgtccaactttttggatgttatggggttcaagccaggtatgggcatcgccgttgagccaggggaggggatgggcggtttttcggtgatcccggcaaccgatgaactacagacgcaccaggtttatcagcgccggtatcaaccaaagagtcgctccaacaacccgctggaaaccgttattgagttttcggggcaagggctcatagataagtgcttccctcgctatacagagcgtttccacgtcgaaatgcgaaaaggccgagtcgtcttcactcctgtcgcaaacagagcctttgccattgctgatcggttcagaaaaaccagccctttccgtgcctttgtggcattgactggcggggtagacattcatgttatggaagcgcttggctggaaggctgagattgttttggagcatcgtccagttgaagccagagacagagcatccgggcggaacctgagtgaagtacatgcgctcaatacgctggtgaacagctccccgcgtatcctgctgaatgaagacattcatcacctggagctggatcgccttggagccttgctggcggagtgcccaccaattggtttggcccattactcgttggggtgtgatgaccactcaaacgccaaaagcccaagggacaaagagcgttctcttgaagatctctccaccatgctcgacatggtttacccggcactaaaacagatcgaggtggtgaaccctgccgtcgtgctggtggaaaacgtcccgaacttcaaagcatccggagccggggcgatgatgggaacgacactgcggcggatggggtacttcctcactgagatggtcttgaacggtctggatttcggcgcttaccaggggcgagaacgctattacatggtggcgtcggtcttccctgggttcgttccaccgaaacctgagcagagagctggtggacgattgtggccggtgatcgagaggcacctcggtgattgtgctgacgtcacagcgttgaagtcaattcaggccagggagtcaacttctcgcaggatgcctgcgttcttgacgagagaaagcaccagttgcccgaccatcctcaagtctcaggatcgtggggtaaaggatgcagtgtacatccaagacggtggccgcatttacaagccatcggtcgatctggttcaggagctgatgtcgatccctgatagctttgatgtttcgtggatggcaaaagaacaagcgacagaaacgcttgggcagagtgtggattacagattgcattcagcggtcatggccgcagtccgggatcacctgaatgtgaattgcggtcgccataccgtggtgcagcacggtatcagaaataaggaaggtaaataa

SEQ ID NO: 286459 - DNA, 456 bp, Morganella morganii
gtgttgtacgcagccctttattacatctctgatgatgataaagcaaaggtcgaggttacagagtggatagttcgctctattcagaaacgacgcaactcaaccggcgatcaacgctatgtcaatcttgcccaaaagttagatgggattacgtgggggaaaaggtcacggaagaatggggactttggttggttgccatctataccgagctggtgcttgaagcagttccgggaaggtggcgaattgccttttggcgtttatacgacgcgactggccgctctcaagtttgcgaaagtcagcttgcaggaagaggtccaatattgcgaggccgagctgaaaaagcctcagacagaagaggatactcaggaactccaagatgagctggcggagaaccagagacttctgaaagctgctggagcaatggtgaagcgcgagcaaaacaagaagaaaagaggttga

SEQ ID NO: 286460 - DNA, 294 bp, Morganella morganii
atgacacctaagctgctgattatagatgagataggttatcttccgttcagtcaggaagaagcaaaactgttcttccaggtcgtagcgaaacgttatgaaaaaaatgcaatgatcctgacgtcgaatctgccgttcgggcaatgggatcaaaccttcgctggggacgcagcactaacctcagcaatgctggacagaatattacatcactcccacgttgttcagataaaaggagaaagctaccgactgaagcaaaaacgtaaggccgggattatcgctgaagtgaatcctgagtaa

SEQ ID NO: 286461 - DNA, 618 bp, Morganella morganii
atgaaaaactggttactgataatgctcctgtctgtgttgagctgtgcaaaggctaccgctgcgttggaagcaaattatgatgaaggtctggtcaattttgtagggaaagtcgttgatatttcttgtgatatttcagttaacgatcaaggtagtgatgcgaatatttatctagctcccatttcattatttgaaattcataatagtgaaggcggggcttatatgaagtctaaaatgtttaccattaaactatcacagtgccaatcgattagtcataatggtgaagtcgttgatgctgatttaaataaaattagtgtagcctggtcaaatggttacttggtacctaaaactaattttgaaacatcagggttgctaaaaaatatgttagcagatggagctcaaaatattaattttgcactatcgattaataataatacaacgttagatgcagataataagattgtgcctgctgatcctgctcagcttaaagtcattcctaaagtttctgataataaggatgctatatttcaatattatatcgggtatacaacaggatcccctaaaacggtgacaacaggtttaatggcaagttatgccacttatgaagtacagtataattaa

SEQ ID NO: 286462 - DNA, 939 bp, Morganella morganii
atgtttaagatgaattattgttgtattttccctgccattttctttttcacattaccggtcagtgcaaatgaatgtgatataaaatcaaatactgatatcgtcagaagcgctcatatacagataagaactgaagaaaaaatcacagtaaataaagtattgggtactcaggtttttcagggcgaaaaaatatctgtttgtgataatccaaaaaccggtgattttatattaatggctaatgaaccacgcagtaatgcaccggcgcgttattttaaagatatcaatggtgttccggcatattatctgaacgatgagtatgcatattcaattaagtcagataaaaatgtcagctttactgcgcagggtgaaaaattgtctgttaccggacaaccggggcagttgcccggttcagtgattactatttatgcaacaacagataatccacgaccattatcattatcctctgcacaaatcggcagtataaaaaacagtcacaatgaaactgtcatgagactgatgctgtcagccaacattgatccggcagataactgtgttatcaataatgaaaatgtttattttaaattcagagcaatagataccagtgagttacccgccaatacaggattaacctcgttctcagctgataatacgttatcactgagctgtacagacagccggataaataaaactgtcacgatgaaattaaacagtaccagtgactatgcagaccccggacaatcaataattgcatcggataacccgggaataggatttatgctcttcagtaacggaaagcaaataacacatcagactgaaacagaactgggcgatatgacgaatcattttgagcctcagctggttgcgcgcctttataagctgaccagagatatcacccccggtgcatttaaaggatctgttgaatatacccttaaattcaattaa

SEQ ID NO: 286463 - DNA, 2532 bp, Morganella morganii
atgccagcttctgccaaacacaaccatctttctgtcctgatattgttatcacttttatcttccgcagaccttgttcacgcagaagattattttgaaccggcattcgtgaccgatccgtcaggtaaacgcctttctgttgatttaacacctttcaggaaatcctcttacctgccgggaacttaccgtgttgatatttttattaatgacaactatgtcgacaccagggatataaaatttacagcgtcagatgataactcagaagaattagctccctgtttatctgatactctgttaattcagtacggtataaaagcagataactatctcagcgataatcacagcgggcaatgttatgacccgggtaatatccctgacacctcataccgcttcataccatctgaaaaccggcttattgtgtcagttccgcagattgcccttgataatcagatattggataaactcattgaacagcggtgggatgacgggatctccgcggtattttctgattataatctatccggccggaaccagaaaaataccaaatataatcagactgataacacgctttatctgaatcttcgctccggaattaatgccggcgcctggcgctaccgtaattacgggatatggaacagggaatctgacggcagtcagcattgggaaacacaacttaattatattgaacgtccgttacggacactcaaaagccgccttttatttggtgacaattactcagattcacaagtatttgaagccatacctttccgcggtgtaaagatgtggtctgataatcagatgtacccggattatgccggcgtttatgcgcccgccatttccggtacagcatccgttgattccgcgattgaagtttcccagaacggcagggttatctaccggaccaatgttccggcaggtccttatgagattactgatgttgtcccgttaaataacggtgataatctggatgttttacagactgggattgacggcagtattcagcgttttattgttccgttttctgtccttgattttcttaaacgcaaaggacacctcgaatacagcttaaccggcggacagtatcgtccgtcagaaaaaaataaagataataataagcatcattttttacagacagatgctttttatggtctgaccgacaatattacgctgttcggcggtattcaggcttcctcccgttaccgggcatatgatatgggtgcggggattaatataccggatttaggcgcagtcagtgctgatgttaccgcgacacatgcaacaccagaacatacccgtcccctgaacgggcaggcattccgcctccgttattcgaaaggactgaattcatacggcaccaatattacatttctggggtatcgctatatgcgcggcgattatctcactatgcaggatatgtttgatttctgccggaatacaccggataaccaatcttattcacgccggaaaaatcagtttgatgttacattaacacagcaattgccggcatctgcgggacagattagtgcaaccagttcatatcaaacgtatcatagttacgataataatgaacagaaagttgaatcctataatataggatacagcaattcattccgttatttcagcctgaatatgaactatacattttataaaaacacactgaacaaccatactggaaataatatccgggatgaaaataacgatcacgttttatcaatgaatatcagtatacctctcacaggaaaatataaagaaaactggataaactatggtatgtccactaacaaaaacggagatacggataattacgcaggggttggtggcctggcatttgacgatcgcagtttgtcatggaatgtacaacagggatacggtaatcgcggacgcggaaattatggcagcgcatacggtacctacaaacacgcatacggtgatttaaatgccggctactcatatcagaaagataaccggcagtacagttacggcgccagcggttctctgatcataagtgaatatggtagcgcagcaacccgcccgctgggtgaaacgaatgctctgatatatacgccgggcgcacaggggatcaccacagaaaatgaatcaggagccagaacaaactattttggtctggcggttacacccaatcttattccgtaccgcagcaatatcatacgcctgaatcaatattcactgccggataatgcagaagtggatacccctctgaaagaagtttatccgacacgcggcgctatcgttctggcggattattcaactcagattggtcaaaaaatgctgataactctgcatgataccgccgggaatacattgccgtttggtgcatatgccacgctgaacggaagtgaggaacggtattatgtcagtaactacggtcgtgtttatttatccggcgcaccggaatcagatgaaatacaggtagtctggggtaataaaaatcaatatcagtgccggtttacttatgatataagcagtaaaaagaaagtgaatggtctttatatttttgatgaagcatgccggtaa

SEQ ID NO: 286464 - DNA, 675 bp, Morganella morganii
atgaaacacattaaattaataaccatcatgatttttatatcattatcacaattttcatatgcaggtattttacttggatctacccgtgttgttatagaaaatggctgcaatgaaggctctgtgaatgtgcataacagagaagataacaactatcttattcaaagctgggttctggataaatctgaaatacctacagacgatattgcattaactccgccgctgttcaagctgaatgcaaacacatccaacgcattacgtattgtaatcacgaaaaacttaccgcaggacagagaaacgctttactggcttaatgtgaaatttattccttccgttaaaaaaagcaaccttgataataattcactgagttttgccttaaataacagaattaaaattatttacagaccggaacaactgtccggagaatccatcaatcaggcattcgaaaaaataattatacaaaaatcaggtaacgcacttaaaataaaaaacccgacaaaatacttcatcaacattagtgaaatatcaataaataagaaaaaaattaaaaacccgggctatatcgaaccagagactgaggaatctcttgatttaccggaaaataataaaaccggaaatcttgaatatatattaattgatgaccttgggaaattaaatacattttcagtcatcatctga

SEQ ID NO: 286465 - DNA, 537 bp, Morganella morganii
atgaaattaacaaagatattattaccatctctgagtactctattattagcatctggtgcaatggctgcaccacagcaatcaacagggacaattaactttaccggttttattggtgctgccacatgtgaagtcaatggcgggaaagatttaaatgtttatctgggtcgtcatgaagtttcaaaatttaccggcaccggtacagcggttaaaggtgataacgatgttaacctgactttaactaactgttcaggcaatgctcagttacgtctggttggtgaaaaacatgccggtggcgataaaagtgttctcgctcttaaagagcagacaggttctgcctccggtgttggtatcgcattaaaacgcgataatgatccaggccgttatttcaatttagatggttctgataattatgatttacaagttggccgggatggttccgctacttttaaattcatgacttattatcttcagaaagagaacagagtcactgaaggtaaagctgatggtacattaacttatacaatcacatattcataa

SEQ ID NO: 286466 - DNA, 180 bp, Morganella morganii
atgccgctgagcagctcactgaccgcacattttttcttgttcatgacaaccctgcaaagtcatccccgcagacaacaggtgtcagcagagtacggtacggaaaccggcaggctgaccgccggaaaagcggtcatcataacatgcggtgagccgggtgctacaacagattttccggcataa

SEQ ID NO: 286467 - DNA, 1050 bp, Morganella morganii
atgcttactcaggttaacattaaaaattttaaaagtattaatgatgaaaaattaaagctaacacctttaacgatactaactggaactaactcttcaggaaagtcgagtgtaattcaagcaatcatgttgatgatcatgaatagtactgaaagcaaccaatttagtatggaaagtttgcttagatatgttggcgaattcaaaactataagaaacaagagaaccaatgcaaaaataatcgaaatatcattgcatgacaaaaataatgaagtccatactgttatttttaacgatgatggcattacaaaaaaaagcgcggaattatattattatgagcaggcaaaatataaacaattccctgaacttctttatctaaatgcaaataggcttggtgcacaagactttgttcctacttctaatcgtagagtaggagaacaaggtgaatttttattttctacttttgaaaaaataaaaactgaaatagcagaagagtccttgataaaattcgaggattctaaaactatatcatttcaagttgctgagtggttaagctatataaccggaaccacctcagaactcaaaacagagaaggttggtgagcaggttaatatttactttagcatcaaggatttagagggtgatgtatcccctttcaatcttggcgcaggcatgagctatataagtaaggttattataatttgcctaatggccaaaaaaggcgatttagttattttggaaaatccagaagtacaattacatcctaaagctcaagctcacctaggcgaattccttacctttgttgcaaatggtggcgttcaacttatagtagaaactcattgcgaacatttattaaataaaatagcgtatcaaatttttgatgataaattttctaataacgatttagttatacactataaatcaaatgttgaaaacaactttacaacacttttaatagatgagaatggaagttatacagatttgaatggtcaaccaactagctttccatcaggattctttgatgcaactcttaatgatcttttgagtatgaggtaa

SEQ ID NO: 286468 - DNA, 1128 bp, Morganella morganii
atgcacaagaaagataattacgaagatgctattgagcttgagaatcaagatgaacttgaattgaactctcatccgcatcagatggacactgatacggaagttcggattgctaaagaacaatcaagcgtctttgagttattgagaaaagaaggcaacggaaagctagtcttagcacctgactttcaaagaaaagatgtatgggatagaaagcaccaatctgagttgattgaatcaatattaatgggcatcccaataccattaatttatctttttgaaaatgaaaatggaattcgtcaaattattgatggaaaacaacgtgtatcggctttaaaagaatttttaaacaatagattccgtttgacagacctgtcaatgtttcctaatttgaaagggatgaaattttcagatatcccgcaattacttcaatcaaaactcgaagactatcaattgcattgctacataatccaaccacctactccagaacatgtgaagttcaatatttttgagagggtcaaccgtggtggtataaatcttaataagcaagagatgaggcatgcactatatcaagggaaatccacgaaattaatacaagaacttgcagaaagtgatgagtttaaactctctactggtggtggagtgaagcctgaaagaatgagagacagatatctagttctgcggttcatcagtttttatttattgatgaccgaaaaaaaagcttttattcaatatcgttcagatattgatacttttctggcctcaacaatgaaatttataaattcaaaggctagtgatcacataattgaaaaagtcaaagaagcttgcttaaaggggatgagaaacatctatcgtctaatgggcgatgaggcatttagatttaaaccaaaagcaggtggtaacagaaggccagtaaatatggggcttttcgaaatgtttgtgtttgcatttagttttgtcgatgcagataagctagatgattatgatattgaagattatataaatgattataaaagtaattttgaagagcttggcatattttcaggttcaattgacacaaatgaatatgtaaagattagatttgattttgcagctgaaattacaaagggcttaaaaaatgcttactcaggttaa

SEQ ID NO: 286469 - DNA, 258 bp, Morganella morganii; identical to SEQ ID NO: 240882

SEQ ID NO: 286470 - DNA, 1197 bp, Morganella morganii
atgaactcatcatcttcattcgcgtcccaaaaattcgaccgtaaacttgctcgcacggccatcgaccgcattaaatcaagcctcaaaaaatttgactctgtagccgacatcaacacatttcggcaaggttaccatgatgcgtaccatgtccaagggcaacagtcgggtgaaacggatttgttgactgccatgctgggcgtcgaaaagctcaatgatatcccggcacttgcccttgtcgtcgatgaaggtttgtcctggaaccaggttattgatcgccgtaaggctatggctgaccgcctgtctgcatttatcaatcaccatgcggcgaaagcacatttccgggtgccggataatctttatgctcagtgtgtgaacctcatcgagttagtgcagccccttgcgattgtagaagacaagtatgaatcaaattatcaggagatggttcaggcaaaagatgaaggccgcctgattgaggaattccaccatgtgtttgatcatttggttgggtctgagaatcctgagcaaaaacatgtgtaccgagctatcgctttacacttcctagcccaagaggacaaccttatggccaaagttcgttcttcgcctgcctgggagttgctcattcttgaggttggcaccattgctacatgctggattaacaccggagagcccattaaaacctggcgtggcatcatggcactgtcgggaatgtttcagcttggcgagatatacgctggccatcagctagcacaatcactttttgataaggctgatacgacccggattgataagcagctggcgttagaggtgattgagatgacctttgaacaatatcgacagcgtcggacccaggggccagtatttgcgcatggtgattccgaaaccgatctctatcgcaattacaacactatcctgggagaggctattcgtaacagtgatgatccggtggaagtggatcgactaacgcgtaatttggtaaccatacagcttgagggcgctgaaaagcgcatggaaggctttgcagcctgcgcactgtgcatcctgaccccggattttttgccgctgcacggtgttgatcccgaaaacgagcgcctgcacgcgctacgccataaaatttctgccttcccagatactgaagcctggtgccgtgagctggcaacgaccccccaaattaaatcccttcaggcgcgattttactaa

SEQ ID NO: 286471 - DNA, 1416 bp, Morganella morganii
atgagcatagaagcaattttcgagaatgatgtcggctcaatagttgcgcccgcaggatgcggtaaaactcagctaataacagataccctaactattagacaacataaaccatatcttgtattaactcacgccacagccggtgttgctgcactaaagcagaggttaaaaaaattatcagttccaacaaagaacttctttgttacaacaatagatggttgggctttgaaattagcaaaaaactttcctgtttcatgccctgtactcacgtctcctgaaaatccaaggacattctatccagagttgagaagaagtgttcttgaattactccaaaatgggaatgtaaacgacattctaagagcatcatattcacgactacttgttgatgagtaccaagactgtaatttgattcaacatcagatggttacagagctgtcatcattaattccgacgacggtttttggcgatccgatgcagtgtatctttaacttcgcaggacggatgcctgactggaacactgaggttcaagcgaggtttcctctaatacatgaattaacagtaccatggcgttggaataatgcaggttcccatggcctaggactgtgggtactcgactgccgaaatatattgagccaaggtaataaaatagatctttcgacatgccctggttatgttcaccacaaaccattggtcggtgttgtaaacacagacttacaatctcaacaaactactcaatatgacatttttaatagagctcaaaatgaatctttgctcgtaataggtgattcaataaacgcaagatctaggcataaatatgctcaaagtagtagaaacattgatgttgttgaaccggtgcaactcgacgatgtggctaatgctgctcgctcttttgatggtgcgcaaggcatagatttggttgatgccattcttacctactcgggtgagatgatgaccaatgtgcaaaggccacagaccctacaaagattacgcacaattcaagctgggagaaatcgaacacctataacttcactagagagtgctctcttcaaagtcctccaggatagctctcgcaacaatattctggcggctttacagcaattagagtctaaacaaggggctaaagtttatcgcaaggctgcatttgcagcgctgaaagataccatttctctttcaagctctatgcttgaccagaccatcttggatgcagcatcatcaattcgtgagcaactcaggctacgcggcgatagacggataccacaacgagcaattggatctacactactcctgaaagggttagaatgtgatcattccctgattcttaatgctgacaatatgaatgcacaaaatttatatgttgcactatcaagagcggctaaatctgtgactgttttctctcagagcaattttgttgggttataa

SEQ ID NO: 286472 - DNA, 1731 bp, Morganella morganii
atgtcagtgataagagcaataagaatacagaactttagagccataaaagagtttaactggtacccaaaacctggtcttaactgcattattggccctggtgactcaggaaaatctactgttctagatgctatagacttagctctcggggcaaggagaagttataattttactgatgctgatttccatggactaaatatccaagagcctatcatgataacagtcactatcggttgcctagatgatgagctaatgaatattgaaaaatatggtttttttcttcgtggttttaaccatacatcacttgaaatacatgatgaaccacaaccagatgatgaaacggtacttacaattaaattaattgttgaacaggatctatacccagattggcgcttgtactcagaaagagcggaaaatgatagtttagagaagcgactacaatggaagcataaagagctgctaagcccagcgaggcttggaactactacatatcaacaccttgcttggggtaatagatccatcctcaataggctttcagaagataccctagatgtttcagcaacacttgctgaactaggaagacaaactagacaacatttcgcagagcagcaaattgatggcgttaatgatattctgataaaagtgcaacaaatcgcaaatggcttgggagtgcctgtcggtacacttaaagcgctcttagatgtaaatggcgtatcgctttcaaacggtgctataagtctacacaacagtgataacacccctttacgtcaactaggcacggggtcatctagattattgattagtgggttacaaaaggctgcaagtaaatcgaacattatcttagttgatgaagcagaatatggactagaaccatatcgaataactcgtttgctaaatgagttaggttccaaagatacacagccgactcaacaagtatttattactacacattcaccatatgttctccgagaactacaagctcaacaattaaatgtattaagaaaagtatcttcaactactgaaatttcaggtaacacccaagaatctcatagactccatagccttgaaggaaccgatgagcaacaatcgactttgcgagtttgtgctgaatcattcttcagtaaagctgtgatcgtttgtgaaggtaaaacagaaatcggatatgttcgaggaattgatttacacagtcaaagcatgaatcatctcagtatcaatgcatgtggcgtccattgtgccgatggtggtggggatagtatgttcgcaagagcgagagtttttgcccaattaggttatccaacagccttatttaaggactcagacaaagctcaggagcatgtagaaccttctcaactagctactagcaatggtatcgttatctatgagtggggtaataactctgcgactgaagatgtgctttttatggcttgtcctgcgcaggtgattcctcaattactggatattgcaattcagcgaaaaggccaagcagcaatcgaagaccatattattgctcactcacaaaaccaaataacgcttgatgtttgtctaaatcattttcaagatgattatcgaactattttagccaaagctgcaaacaagaagtcatggtttaaagatattgaaccagcagaaacgtttgcacgaaatatcattgcccccaattatgctcaattttcagagattctcacaactacgacaaaccaactgtttcaatgggctctagagcaaggtgattga

SEQ ID NO: 286473 - DNA, 4104 bp, Morganella morganii
ttggctacaatagacttcaatcagattcgtgctacacctagaagcaaacatgatagttttgaatctttagctatacaactttttaaggctcattgccaaccaccgcagggggcgtctttttttagtttgcgaggtgatggcggtgatggtggggttgaagcttattataaaacactctctggtgaaatattgggtgtccaagctaagtatttttttaagcttggcaatagtgagttcagccaaattaagagctctttgaaaaccgcgttaaaaaatcaccctacactaactgaatattggatttatttgccctttgatctaacaggcaaagtggcggagggaaaacgaggaaaaagtgaagttgagaagtttcaagagtggtatgacgacataaccactaaaaatccaaaccttctcataaaactcattacagccgaatctgttaggcaacaaatcttggcaatggataactttggcggtttcgttctctattggtttgacgaagatctcttaactactcagaaagtacgtagttgcttagactcagccgccgtttttgctgggccacgatattgtagtgatttagacattactacagaagctcatgatgctttagatgcttttggaaatatttatgattttaatcaatggctaattaatagctggaaatcattgaagaccaacttcagaaaaaaaactcaatatacagaaaagattttttccaaatctccagataatgaaaaagcacaagcaacatacctattagaagaacttctagataaaacttctagtaaatacaatgttctagatagaagcattctttgttcaatcctagataacatcagttcgctcaagccactctgtgaaaatgcggtaaagtggcaagagaaagactttttttcggaacatggtgaaggtagtgatacgccttcatttaggcaattccaagctgagtatatgtgtgtgttccctgcagcaaatctggattattcaagagaattactttctgcaataattgagattgaagaaatactcaacagccctctaattcaatcgtaccatgcccgctcttttttgctaacagggccggcaggagcgggcaaaacacactctatcgtgagttttgcaaagagaagactcgacagaggtgctcatacgctagtgttatttggtgaagattttgacaatgctgaaccttgggacgtggtgagaagcaaacttggatttggctctgatattggcagagataaattactatcttgtcttcaagcaagtgctcaagctaacaattcttgttttgttattgctatcgacgctctgaacgaaagtgaaaaagcaagaaaatggaaaaataaactaccagagataattcaacaattaaaggagtatgattccatcaaaatcgtagtgtctactcgtgatatttatactaacataattgtagatgaacgattccctggttatgcttacaaccatattggattcaccagaaactttcacgacgtactatcttcattttcgcagcgctacaatgttgaaagcgagataactcctattttcacgaacgaattacgaaaccctttacttctgcacttgatttttaaaacacacaagcaagaaggctctctatctcttgatgtatcaactactggtttctcagccatattttcaaaataccttaagcaaatcaatgaatcactaagagatcgcttagactttgttagtccccaaaatattgttcgagcagtaatgagtaaattgtctgatgttttagcatattcaggtactcaaactataaattgggaagccgctgtagatacaataaagcctatcctgggaagtgaatcatctccagaaaaatttattaatgagctgataaatgaacaactactaattttgtcatcaaatggtggtgacgagtttattgtcagatttggttatcagaagtttggtgacatactgcgtgcatcttcgatagttcaatcttaccaagaaactggaaatagtgacttctcaattcttgcggaaaaggtggctgttttaaataccatagaaaatggtgttctagaagcccttgcaagtattcttcctgaagagttaggtgttgagataacagacaaacgtctgggattagaacgagatttagctcacagtcttttcgttaagtcactaacttggagatcaaagcagagtgttactcctgatattgaaaagcatatatacggggcattaagaacaggtggattatggcaaaccgtttttgaaagcctatttaagctatctgttgtaccacaacattaccttaacgcagaaaattggttcaaggattttcaattacgacaagatgctccgtcaagagatacatacctttctctcgcattatctgaatcatacgataaaaaaggtgcgatctggtttctgttagaagctttagaaaagatagatacaacttcatggcctaaagaaagttataaattagcatccattgctttactttggtgttgttcagctacagatagacgagtcagagatcaagcaacacgttgccttagtttactttttaaaaagtacccagagataagccttcatgctgtaaacacatttatagggtgtgatgatgactacatacttgaaagcctaataatcgctatgtattcagcttgtttagtttcacctgaatttgcggagagctttatactgccactagaaagatatattcgattcaatagctcatctaagaatattttgattcgtgaacattgcctgctattgaagcaagaacttttgagattaggaattgacaaaagcagaatgtcaaatcagtttgttcctctcaccttgccagcaaaatggccagttctaagcgatgtacagaccttactgactctaaaagatttgccatcaaacatgaaactatggggagagcaattaggtcccgatttttggcgctatcaggttgaaccaaaacttagaacttttgacctgaaatcacaaaatataagccatgaaaacattgcttgttggataatgcaacaagccgaatttattggctatccaggttatggtagtggcgccctcaaacacgacttggcaactctttataaatatgggagaggaagagcaaaacctgggtatgcagaaacgatcggaaagaaatgctattggattgctttacacagacttataggtttactggcagccaatgtggaaacagtgcattctcgttgggagccaaaactatcttctgatagattatggtcattagggctaagaaaagtagacgtctcagacatcagagatttgcttccgatggagcaatatccgctcagaagtttaatagaaaaagagattgatctaccaaagaataatatagatagttggttgcaggctgatgattattatcttgcagacaacgttctcatcatgaaagacgagaacaatacgacatggataaatttggtcttcgactcagagtttcatgctcaacaagatgaggatgacgtttcgttcgatgctgaaagttccttatgtatagctagctataacggatacttcgttgaagctaataatacaaaaacattcgagccctataatcattgtaataaccacagctaccgcacttactttgcagagtacccaaaaagtccagctttcaaacaatgcatcacagagcaagataccactgtttcggatgacgacagaatatacgctagtattcagctcttacgagggagagagtgggaatatgattattcaagcaatgtggaacaaagctctgtttacatgcctagccccgatatagttgaaaaaatgaaccttcaatgggatcagcggggcggttggattgatgaaaaccaagaactagccgcatttaattatagtaatgatagaagttctgctttatttataagaaaagatgtcttggatgaatatttattaagaattaaaaaatccttggttttttctcgtttcagtcgaaagcaattcggtagaagtttcgcagctgatgcaaaactaatagaagtaaccagcagatatgtatatatgccaacagattgttctataaaactcctaagtgaagatattgagaagtttggcttctaa

SEQ ID NO: 286474 - DNA, 402 bp, Morganella morganii
atggcccgttactatgacggggattcactgacctatgaagacttggcggaaaaagcacacgcacggggcaccgcaacgacccgtgtacggattaaatatcaggaaaatacagaaaccggccgcccggatgtgacgtctttcgcgacagaaggcagtaacgaccaggtccgggtacgtatggggataaaagccactgaagaggaagcgaataaaatacggtacagcagtcaggcgtaccgttcagacggtctgccgaccccgcagtcactggcgacgatttataaatttgagctggatgatggtaatattctttatcttggtgcagatacagataataaatttgttgaactgatattattaacctatcagcaggaactgacatatctttggaagtcaggctaa

SEQ ID NO: 286475 - DNA, 297 bp, Morganella morganii
atgtcttctaaaaacaatgaaaataatttatttaaattaattgatgaatttattcatggggggatttcggctcctatcttcgaaattgactacatgaatgaatggaggaaatatagggatctgagtttcagtagagaactcagcaagaataatcaagaatattttgacagaatttttacggcattagatatttactgctcaaaccctgatctcagagatgaaaatgactttgatgatagtgaattacttaacgaagtaattaaaataaatgaagaatggtgtctatcaaaagattaa

SEQ ID NO: 286476 - DNA, 489 bp, Morganella morganii
atgatgacaaaccataatttaatatcatcttttgaactggattcactattaaatcccatattaggatatcactcttgtatattgggtctttttgatttttataaaagtaatgcagttgttgtagaagggaaaatacaaaactgggaaaaaatgaatgatatcgatattttgaataatataaatatatggaagtataaatttaatgatgtcatcattgtaaatgatagcaccatcataaataatgaagcgttctatgttaaaaaagaaaaactaagtgattttgtgactaattatctatctgattatggcgaatgtttttttaatagcgatattttctttattcctgtcgggatagggaaaataatttcttttaatcatgatggctataagttaaattataatcttcctgtggaactaacgagtgatggttttaaaaaatataatgatttaataataaataaagctcgggagaaaaactcagaaagatga

SEQ ID NO: 286477 - DNA, 969 bp, Morganella morganii
gtgcagtttatccccggcacccgcgaatggcggccgccgtatcgcttccgtccgcaggcagacggcgacgagctggcaactgtggtcggcccggaaggggaagagatttacaccaacgagcagggtgcagtgaaggtgtattttcattgggatcgctacggtaacgcggatcacagcgcctcctgctgggtgcgggtggcacacggctggaacggtgacggtttcgggtttatgtcgatcccgcgtatcggtcaggaagtcattgtctcatatctcagcggcgacatagaccggccgattattaccggctgcacctataacggccgaaatcgtcccccgctgaatctgccgaaagaaaaaacccggactaccttccgcacgcggactcataaaggtgacggatttaacgagctgcgttttgaggattcagccggggaagaagaaatttatattcatgcccagaaagacatgaatgcgcatattgagcatgatgccacctggcatatacagcatgatttaaagcggcggattgataacaacagtcacaccgaactgaccggtgatgagcatgtgatcatcaacggctcgcaaaaacaccagatcagcggggatgtctcgctgcatatcaaaggagagcagcatacccgcgcggataagaacctggtaacggaaagcgggcagcagacccatcacctcagtgacggaaaaatcattattgaagcgggaacggagatcaccctcaaagtcggcgacagttttgtccgcatcacgcccggcgcgattttcacctccggcaatctgaatatcggtgacagcggtccgggcaacggtgtcccggtcagactgatgccgccggagggtgtaccacccgccccggaaccgtatccggtgaaaaaatactgtgcggtggcggctcagacagaaggaagctgggtgattaagtccggaggcggaaatggaaaaacgtaa

SEQ ID NO: 286478 - DNA, 1434 bp, Morganella morganii
atggtcacgcacaagacattaaaaaggagcctgcttgccctgagtgtggcggccagtctcgtcatggcaccgacaggggcgatagccgctaacggcctccaatcacagatggacaaacttttcaatgaaatgagcaacacaacaccacctggggtttatgaaagccaacgacgtggcgttttagctggtggccggttcactgcaaagacacgaatcttcgacgagaacctggtgagctttgcccctccatcatggaaagctggttgcggtggtgtagatctgttcggcggttcgctttccttcattaacgcggatcaaattgtccaactccttcgggctgtagcagccaacgccaagggctatgccttccagcttgcgctcgataacgttttcccggacggagcgaagtggatagagaacttccagaagaaagtgcaagcgctcaaccaacatctgggcaactcctgccagctcgctcaaggtttcgtgaacgacctaaccagcggcatggaccttaaacacaaaactgatgcttctataaccgcgacaacttccggcctgtatgaagacttcttcgggtccaagcaggaaaccagcggcaagagtcccctggaagaactgaaagccaacaagcctgacgaatacaacaagatgattggcaacatcgtctggaagcaactcaagagcaacaacgccaacacctggttccagtacggggataacacccttcttgaagcgatcatgtctttaaccggcacagtcatcattggtgatctggtaaacgacccgaactcaaccggcactggtgcgaaaacaacccctctgacgaccctaccaggtaacaagatcaccttgtcagacctgatttcaggcggttctgttgagatctattcctgtgattctgatacgaccaactgcctgagtgctggctccagtaataaaactgtcgtgctcaaaggtatcaagaaccagatcaccgacatgctgttaggaaccagctctacacctggtgtgatctacaaatacgcaacgaactctggaaccttaaccgacccagaaaaggcctttgtttctaacctccccggagggattggcaccattattcgtaacttgtctgtcctttcacaggacggcgctaacctgttcgcaacagagtcatcaggagcgatagccctgaccatgatgtatagcttctcggaagagttcttccgcgcagctcgcattgcgatggctaacagcaaatcaccctacaagaaagaggcactagagcttctcgcgcaatcgcaacagcaaatccgtgctgaatacacaatcctgtcctctcaatacggcgatctggcaagccaaattgagaaatacaacaacctactggacaacatccgcaagcaaaaatacatgctggcaactttgtccaatcctcctagcacgaactaa

SEQ ID NO: 286479 - DNA, 3615 bp, Morganella morganii
atgggatctttttcaatccactctatcggtgactctgcttttctggagcaaattctgattgcagtatcaatgatcaccggcaccggggatttcgagaagatggtcagtattggcctgcttcttggggtcttgatgatctgtattcagtccgtctttcagggcgcaaagcaaatcaacctccagcaagtgctggtaggttggattctatatgcctgtttcttcggcccaaccacaacggtgactatcgaggacgcttatacagggcaggttcgagtcgtcgccaatgtccctattggggtaggctttgctggaggtgtcatatccaacgtgggatacaccatcaccaatttgtttgaaactggatatggggtaatcgtaccaaatgtcacggaaagccacttttccgaaacactgaaactgttgaatgacgtcagacggcgagcctatgacacaggggtttttactgcgcttaactcagcaaatgggggcggctatgttgacgtgaggcgttcctggaacaattacattcgggaatgcacgttaaccaaagtcgatctcaacctaatgtcccttgatgagttgatgaaccgttcaactgactcagctttgcgattcaactcacagctctacggaactaggttgtatttgtctacagcaaaccctgacggcgctgactacacatgtactgacggatgggtggctattagcactgcaaccgccaacctaagcagcccggttgttgttgatgctcttaacagcctacttggtattgacacatcaactggagacaacgctctaacgaagctgaccgattcgcttcaagcgatgggtgccacaactacgtcatcaatcgactatctgaaagccgccgttctggagcccctctattatgaagccgcagcaggacgttatcaggacctccaggattatggctctgcattgatggtcaaccaggctattcagcaacggaacacccagtgggccgcagagcagtcgatgttcatgaccgtcgtccgaccaatgctgacgttctttgaaggctttatttatgctataaccccgatcattgcttttattatcgtgatgggcagcttcggcctccagttagccggtaaatatgtgcaaaccatcctctggattcagctatggatgccagtcctctcaattataaacctgtttgtccataccgccgcgtcaaatgagatgtctagcctcagtgctggtggtctcaactccatgtacgctctttcctcaactggagatgttctgcaacactggattgcaaccggcggcatgttggctgcggccactccggtgatttccctgtttatcgtcacaggtagcacctacgcattcaccagcttggcatcgagaataagtggttctgaccacgttgacgaaaagatgcaaacgccagatctactcaagcaaggtccggttatgcaaagtcagccagcgtacaatcacaaccagttcagtggtgcgattgcaaacggcgcagaaagcatgatcagtaccttctcgcttggctccactttggcatcaggtgtgagctccgcacaggcattacaaagtcagaaatcggaggcgttccaaagcactctcggtcgaggtttttctgatggagtaagtcaggatcaagcctattcaagactctccaatgtcgggcgcaacgtttcgtcgcaaaacacagctcagagccaattgatcaaccagcaagccaagaacttcatggataagttccaggtggatgatagccactctgatgctgtcaaaggtgcttttgccatgcaggctatgggcacactcgatgttgacgaagctgcgtccatgcttatgcctatggttggtaaggccagggcagcaatgaaggccgctgctggtgtgaaatcaaacagtacagccctagttcctgctggtggtaatggcgaatcaggcggcggcagtgatgtcctggacatcaaagcgcaagcgaagggagcaacagagtcatcaactcaagactcttcaagctggtcagcgagtgatgtgtcccagttcatgaagggtgtgagctattcgcaaaccgatagccaggcgttgacaaatcaattagcgcagggtttcagccgttctggaagcgagtcatttaagcaaacctggggtgatagcttatcccagaacctatccaagtccgcttctgaactggtgtctgcatcggacaccttcacaacaatgagtcagctccaaaaccaaatgggctccatgactaataccgactttaaaactctcggtggtgcagtggcacaaacccctgcggccatgaaccaactgaatgactatttccgaaatgccgcgccgcaatcggttaaagacgaggctgcttcactacagcaaagataccaagcctacggaatgtctcctcaagtggcccaggcagcagcgcgaatgacagcaatgaccaactccaaaaattacgaacagggtaaggagcttggcgggtatcaagccgcactacaggcgatcaataccgcgtccggtcgcaatggagcatttagtggtgatgcttacggaaataacggcattgaaggcccgaatgttcaaggcctaccaggtcaggttcaaggggctgtaggcagtggacctagcatcccaaccggattccgggagaatgtggctgggatggctggaactaatccggcatcagaagctggtcagttaccaacgaatagcccccttgttcaaaatgaacatgcagccggtacgtcagctcttcataaccaagcacagcaaacagagcgaaatgtatctgctcctgaactgaaaaaagcccaagataaccttatgaactcgcttccggaaatgtcttggagcgcttcggggtggggagcgtgggacaactccagtgattggatgggccgcagagctgaacaagcaggtggagctctcattgctggtggtcaagctggcgctgatgcgttctcaaaagcgatggatcaaatgagaacgatgacacctgaacaacgcgaccaattcatcgcggccactcaacgcggcgaccaggccgtgcaagaggagtttggctgggccggtgatgcgatggtcggtatggctaaacttggccgcaacgtcatgggagctgctgcaagcggctatgatgcagcgaaggagtggttaactggtaaatctgatctatcggaagccgctaaagggatgagcattgaggaacgcggcgcgttctatgcagcagcgctatcctctgccgcagaagctggtggtggagccgcgcagcagtttatgaaccagtacggtgatgaattcaaagaaacgatgcagtctatcgctcaaagccgttatgggctgactgaatcccaagccgctgtttatgccgaatcttttgacacaaacgaaggtcgcatgaatcaggctgttcagaatctgaaaatggagtatgcagaacgtaacccggatggctcaccgatgatgcaaggaggtcagcctgttctttctcagcaaaacgaagagtttacggacaagctggtaaacgtattgcagaactcgacggaagctggagaccgttcaggtagctatttgactgccgtcagggggtacaacattgcaaatcaaaggttctaa

SEQ ID NO: 286480 - DNA, 363 bp, Morganella morganii
atgaaacatgtggtcaatattcttctgctgggaatggtgctcctgggaatagccatgatggctgacacaccttggggacttggtgtggcactggctcccttcggcgtttggggtgctcgtttcctatttctggttcacagaagcctttgggctgctgttatcttctggggagggatcgcttacttccagtggcaagttgctttggttgtcggggctctgtttggactaacgtgctttatccgtgctgcgcggtcagcatataaagaggcaccacctacccggcgcagaaaaaaacaaactggtgggtttcaagattcctatgattttgaccagcgcttccatattggagctggagacgaataa

SEQ ID NO: 286481 - DNA, 258 bp, Morganella morganii
atgatagacatcccaagcgacccagagaagaagcgtgagtggatcaagtacaaactcaagatccaggggctttctctggccgcattgggcagaaaacacaaaacatctcggcaggtggtgtctacggcactctacaagcccagtccacgctgggaacatgagatagcgacagctttgggtgtgaagccatctgagatttggccggagcggtacgacgaagaacacgaaatacccctcagacataaggaggcaagctga

SEQ ID NO: 286482 - DNA, 534 bp, Morganella morganii
atgaagaacaaagccaaggcgctggttctgtctgcggctctcctgtcatcaacagcgaatgctattgacctgagtggaaccatcttcgacaaagcggcgaaagcatataacctcgaccctcttctagtgtattcggtcgcattggccgaatctgcatcagggagaggtaatggctctataagtccttggccttggacgcttcgcgttcctgggcttcctttctatgccaagtcggaagatcaggcaaaggctaagctcgctgagtttcagcagcagtacggtcgtgccattgatgtcgggtttatgcaagtgagcatccggtggaatggtcatagagtttcttctccagcagatcttctcgacccagagaccaatgtcatggttggagcagaggtgctatcagaagccattcagtcatctccaaatgacttggagcttggcgttggccgctatcacgcctgggaagacgaaatccgagccagaaactatggtagccgagtcttggctatctatcgcaaccttcgtgatttgtga

SEQ ID NO: 286483 - DNA, 609 bp, Morganella morganii
atgttggaactggatattattggtgcgtgggatgcaagagccgtcaacctcgatcaagaagaagctgatagaaacgtctacgagttcgatctgacattgtggaacctgctatccactctggcaaaagaacgtccagatgatgcggcctcacaattttctttgggcatggacaccgttcaaaagctgtcactggcaacaccttcccaattggaagctctggcctctggcgtgttgatctctttcaagctcgaaacagcagagcagaacatcatcacgcgactctctggcgactacgacccggtagtttttatcaaccatagtgttgatgaatttgatgctgcctactggttgctatttaaccgcgtcgcatcgagagacccggagatggcaaaggaagttttcggggtttcgagagagcttgcggagctggttgctaaggcaacagacagccagttgcgccacatgtctggaacaacggttacgcatttttcgcttcgctttgctccgagcatcattgaagaaattctcgatgacagccgggaagagttaacacacccggtattgaaaaaactgcaacagtctctacagggacgtgggaggtggagatga

SEQ ID NO: 286484 - DNA, 552 bp, Morganella morganii
atgaacattggcaactctggtacattgggtcgctgggttacagctcgacacatggcccttgctgggtacatcacaaaaatcatcatgatcgagactggcctgacctacaaacaggtcagacggctttaccaggatctggagagggacggatatactctggaacgaaaatccagaactttccggggtggtgcgacactgattcatagtcacacatccaagatacaggcctctcttctaatgcagctctacttcaacattggtggagaagccgtgttgcggtctgtgaacatcaaagccttgaacaaggcatttagaatgtatcacgcaatccgcaaagaagtgcccggaatgaaaggtgctcggtgggctccgtttgatattactgatgcctggtgtcttgcttcggagttgagaagtggggacgcaatgctggaggtgtgcgacaactgcaagtgtacatacttcacctctgttaatcaaagaacctgcgttgaatgtccgttctgcaaagaacaaggaaggcatggtggtggggagaaagagtgtgcttga

SEQ ID NO: 286485 - DNA, 420 bp, Morganella morganii
atgaaagaccacgaggagttctctacgctatcagcggctgaacgtagagagttaataatcgcagagttaaagcgtaaaagccgcattcgcaccctgttgcgaggactcccgttagatgaagttcgggagatcattgacagaatgaagggcgttctcaatgaactggaggaagagtacaaaaagcgagaagaagaagaaaaagaaaagcgagctcaggccgagcgaataatgagcgacatggaatcctgcggtgtggacatcggcttgctcaacgaaatgttcacgagcagatcagaacctgataatgctaaatattcaaaagacggagtttcgtggagtgggcaaggacgtcgcccggatgctttcaaggggttgggagctgtcgagctggagcgctaccgtatcccacagaagaagtaa

SEQ ID NO: 286486 - DNA, 984 bp, Morganella morganii
atgagtcaatttgttctgggtttggatattggttactccaacctgaaaatggcaatggggcataaaggtgaggaagctcgcacagtcgtcatgccggtgggggcaggtccactggaactgatgccacaacagttaactggcggtgcagggacctgcattcaggttgtgattgatggagagaaatgggttgcaggcgtcgagcctgaccgattgcaaggatgggagcgtgagcttcacggcgactatccttcgaccaatccatacaaggctcttttctacgctgcactcctgatgtccgagcagaaggagatcgatgtgctggtgactggcctgcctgttagtcagtacatggacgtagagcgcagagaggcgttgaaagctcggcttgagggcgaacaccagatcacgccaaaacgatcggtagaggttaagtctgtcgtggttgtacctcaacctgccggtgcttacatggatgttgtaagttcaaccaaagatgaagacctcctggagattatccagggaggaaaaaccgttgtaattgaccctgggttcttctctgtagactgggtagctcttgaagagggagaggtccgctatcactcatctggcaccagcctcaaggcgatgtcggtgttgctacaggaaacggaccggctaattcaggaagaccacggcggtgcccctggcatcgaaaagatcgagaaagctattcgtgccggtaaggccgaaatcttcctctacggtgaaaaggtatcgatcaaagactacttcaagaaagcctcaaccaaagtcgctcaaaacgccttgatccctatgcggaagtcaatgcgtgaggacgggatggatgctgacgtagttctgctggctggtggcggtgccgaggcttaccaagatgcggccaaggagcttttccctaagagcaggatcgtactgcccaacgaatccgtggcatccaatgccaggggcttctggttctgcggctga

SEQ ID NO: 286487 - DNA, 540 bp, Morganella morganii
gtgagtctaccaacggagcgatggctagatctgctagatccgaagctcgaagaagaacgatccgagataacagaggatctgctagaggcagagggacgagagtttgttgcagaggtacggagcaaactggatcacgccttagcggttcttgctgtcgaggcgcagcaggaagcggacatgtactggaacgcgcacaaatcagcgcgtgaagaagcgccagaggacgaacaagggcgtgtcggtacacgggttcgcattctaggcgtatcactcgttgcagagtggtatcgcaacagatttgtcgaacaagttcccggacaaaagaaaagggttctatcgacacatatcaagaagggtcgcggtcatgcctacagcatgtcgcacttcaagaaagagcctatctgggcacaagagttgatccagcaagttgaaaccaggtatgccgtgttaagacaacgcgccactgccttagcaaaaattcgccgggcgctaaacgagtacgagcgccagctaaacaagacacatagcgacgaggtgtga

SEQ ID NO: 286488 - DNA, 288 bp, Morganella morganii; identical to SEQ ID NO: 25034

SEQ ID NO: 286489 - DNA, 1065 bp, Morganella morganii
atgagcaagagaaccaaagacaaagacctggagaaactcgacgtaatcaaagactcaccgcaaatgagcctgtttgagatcattgaatctccggccaagaaagacgactactccaacaccatcgagatctacgatgcgctgccgaagtacatttgggaccaaaagcgtgagcatgaagatttatccaacgctgtagtgacacgacaatgcaccatcagaggccagcatttcacggtgaaggtgaagccagccatcatcgagaaggatgacggaagaaccgtgctgatctacgcgggacagcgagaggaaatccttgaggatgctctacgcaagctcgcagtgaacgggaaaggccatatcatcgagggcaaggctggagtcatgttcactctgtacgaactccagaaagagctctcgaagatgggtcacggttacaacctgaacgaaatcaaggaagcaatccaggtttgtcgtggcgcaacactcgaatgtatcagtgatgacggcgaagccttcatcagctccagcttcttcccgatggtgggacttaccaccagaggtgagtttcgcaagaaaggcgggaacgccaggtgctatgtgcagttcaacccgctggtaaacgaatcgatcatgaatctgtcgtttcgtcagtacaactacaaaatcggaatgcaaatccgctcccctcttgcacggtacatctacaagcgaatgagccactactggactcaagcatcacctgattcgccgtacacgccatcgcttatcagcttcctgacccagagccctcgtgaattgagcccacggatgccggagaacgtcagagccatgaagctcgctctggaggccctcatcaaacaagaggtaataagcgactacgacgcgaaccagatcaaggatggccgcagagtcatcgacgtgcggtacgtcataaggcctcatgagaacttcgtgaagcaggtgatggcgtccaacaagcgtaagcagcagacagagctacgggccatcaagcacggcatgatcgaccacgacatcattgatgaaccccagcgtaaggggagatag

SEQ ID NO: 286490 - DNA, 435 bp, Morganella morganii
atgttggattttgttcttttggtgtttgtgggtttgggaatatctatggtgttggtacgtcgctcttcccggaaggggatggatctggagctgacatggtttcagtccctgaaagtcgtgttggtgcgtggtgccgtagccctggggctggggtttggtattggcaagctcacatcgctggggatgcagtatggactcctgagtgagtctgtcctaagagaacatgcccttgtgtctgtagcggtggtgctgttttgtgggcttggttcgtttgtagcgtttcagtggatcgtagggaggatctcgggaagatcgttcagtgtgatttctgtgatcaaagctgtgatgtatgagtctggttactttgtgctgtcgatgcttatcttgttggtgatattcgtcctgttcggccttgcatacgagagttttttctaa

SEQ ID NO: 286491 - DNA, 1116 bp, Morganella morganii
atgttgagacgagaaaaccaaggagatttgttcgatgaccaggtggtgttgccatcactggagtcggttcttaccggcatatcttccagtcagcgttgtgacgatagagcaacgtacttctccgctccggatgtggacctgagtttgtacgaccacatcattgtttgcctgtctggaggcaaagactcgattgcggcgtacttgcggctggtggacatgggtgttgataagtcaaaggtggagttctggcaccatgatgttgatggtcaggaaggtagttcgttgatggattgggccttcatgcgtgattactgtcgtcagctcggggaggaactgggtataccaatgtacttctcgtggcttgagggcggctttgagggcgaaatgctcaaagacaatgcctatagccacccccatcgtgtagagacgcctgaggggcttctggtgctgcctagagaccataagcgttctaagcctgcgacacgtcttcgttttcctcagcaatctccatcgctccaaacaaggtggtgctcatcggccttaaagatcgatgttggccgcagagctcttaataaccaggagcgcttcaaggggaagaagatccttttcatcactggtgaacgccgggaggaaagtgcaaacagatccaagtacaaccagcttgaggctcatgcctgtgacagaagatatgggaagactgcacggttagttgatgcttggagaccagttcttcattggactgaggaagaggtatgggaggtgatcgagcgttaccggatcatggccccagtcccttatcgccttggctggagccggtcgtcttgtatgacctgcatctacaactcacagcgtatctggtccacgatccgtcactactggcctgagcgagctgggaaaattgctcagtatgagcaaacctttggtgtgacggtttcaagaaaaaaaatcgacgtaatagatttaggttctgctgttgcgccgatacagattagtgatgctgaggcgttggagcaggtatccagagaagattacacgctcccgatctttgtgcctgaggggcaaaagtgggttctccctggtggtgcatttggccgagaggcctgtggttctgattga

SEQ ID NO: 286492 - DNA, 609 bp, Morganella morganii
atgaaaacgacaaagcggttcatcgtatgggtgaattacggtcttgagggttggagcattttcggatcgagcgatgactgggatgaagctgtatccatccgttcggaagcgatagacgaatgcaatattgatgaggaagacatcatcttggcagaaaacaaaaacgagctggtggtaaaacctgcggccaagcaaatgaccgagtggcaccgggaactggaagccgtccttatgaccctggatgactgccagatggaatgtgacggcatgacatgggcagtaagccacctactcaatgaagcgggtgtgcctcatgactgcatgtatggctttgtgcgaaacgaacagaccaaggacatcgtgacaccgcatttctggattgtcctggatgatgggtggctggtggatctgaggctacgcatgtggcttggcgatcacgacaacattcctcacggagtattccatcccgataacgagccaggatttttctacaagggagacccggttcaaaaccataaagggatgagactgggcaaagccgtcctggacatcatgaccgacggaaaactttcacatgtgaaagttcctgaacgacaagacggagagtaa

SEQ ID NO: 286493 - DNA, 522 bp, Morganella morganii
gtggaatttgattacgacaagtcagtatcaaacgcacatcttgaggccgcaggctggggtatggatgcctttaaccactctaacccatttgagagtcatgtcatctatgtgcgcgactaccgcaacgatcacatccgcctgttcaccatcaagcaggctgacttcgacacgataaagctgccgcttcaccttacctccgacatgctggcttcggtgatcgctgagttcgtatcgaaggcagcaaaagggaagttgaatacgaaggagtccgacacgctggctcctgccttggttggctatgccaaatcaacagaaacctaccggagctggcggagagtgtctggagcaacagagcgattgcatatggtcatcaatatctacgcgggttctggattgctgagacctttcatcgctcaggctcctgagaccgtcctgacggcccaagagctactggtcttctcatcacaggttaagagcatggatgtatcaaatcatccagagtggtttaggggccggaggtag

SEQ ID NO: 286494 - DNA, 522 bp, Morganella morganii
atgaaggcagttctctggatattcgtcctgatcatcgcccctttcgtcattgcgaaagtggaccagtggcgcaaacgcggcattggagacacctgggcgtggtggaaatcagagaacatgccttatgagctgcgctcatccactctgtttttgtccgaacaggacatatcaaccacacagccggtgcccatgcacggcagggttgatcaggtgtaccaaaccaagaatggggttctcattcccttggacaccaagctgcgccaggtaaaccacatctatgagtcggacattatccagctctcggtttaccgggtaattctgtcacacaagtacaaagcacccgttgccaagtacggctatgtccgaaccgttgttgagacagtggacggggatagagtccgttacatcaagacaaaccttctcagcgaaaaagaagtggtcaagctgtggcaccgctatcaatccatccgttctggtcaggtaaaaacctcctgttcctgtggcggaaagtttcacaagtga

SEQ ID NO: 286495 - DNA, 474 bp, Morganella morganii
gtggcccagcttaaacataaccgcttcgtcatggtgggggccctggtggcgactgtcgtagctgccgccaatggtttgagttttctcacccttatggctggtggaataacccttctccagttcatggcttggaagcaacaagttgctgtccggagccggtttaaagctgcgaaggatgcgtttgaagcgttgaacgtcattgcgttcgacaagcactgggtaggttcaaccgcgacggtcgccaaggtgtcgaacatgatcaccccgcccgaacgactggataaaccctgggcggtgcaagttctggccgtaaccagaggtgggacgtggttcgcagtggacctgcaagtgacaggcactgacaaggttcaaatgcttagcctccaccagcttagtgaaaaggcagcaaagaccatgctggccttcgacctcgaagtgtatgagagatttttcggaaaacctgatgttgcatga

SEQ ID NO: 286496 - DNA, 294 bp, Morganella morganii
atggaaaaagtcaaaagcgtagatgccgtggagttcacggcagcagataagaaggcgatgacccatgcggcatacgcccagtgtttcttcattctggcccaggtgatggcattcccttccctgggggtggctggcgctattgttgccgcgctgtgcggcatgatgccgtggttgagcaaattcgccaaggaggctccatcgaaagcctttggcatggtgatggcttcgctctgcttggcaccagtgtacggcaaactctgtgagctggtggtccacgcgattcagggggcttga

SEQ ID NO: 286497 - DNA, 855 bp, Morganella morganii
atgggggtagtacgagttccctacctcttggctgagctgaaagaacgcggcggggttgatgaatctgatctggttcaggttatgcagccaggatgccggattggtgaggaagatctacggaagttggccgctgcattaggggttgaggtgtccgagctggcaccagcaccagagagcgcggctaacacccggttcaaagcaaagctgagaggaggtttggcctcctttctttttgagtacgacggctgtttccgacatgccgaaggctccagccatgcagaaatgttgggcatcgagcaagaagacgacattggtcttccgagtcgagctgctgacgccatgctcctggagaagacgctttaccaggtaattgctcgggctaagtacatgcttagcaaaatcgacagcaagtttgtcaggtcagaacaagcaatcgagttccgtgagcaacttgctcctgggatcttcaaaccaggttacagaggtttccgattcaaggaggctgccgctggtgatttgcctactgtcatgattgacggtcggaagttcaactgcgttgccagcatagccagagcacatggacttgatccggtaacggtgcgtaggcgcattgcggacacggggaaggccgcagacaaactctccaatgatgagtggaagctcatcctcgccaagaaaaaaggtaaagggaaacccttcacctatctggacaggacctacagcaacattgctcagttctgtcgtgagcatcagctcaacaccaaccttgtttaccagaaagtcaaagaccgggctgatagcgctgatgaagagttctggggacagataatcgaaacatgcaaaaggaaaaactaa

SEQ ID NO: 286498 - DNA, 960 bp, Morganella morganii
atggcagaaaacaaagagatcccctgggagaaagaactcattgagaagtacatgttcaccctgcataaagagcaggtgaaagaccggcgctggcggaccatgttgcgtgtgcttcgcgcatcgggtttcgtgcttctcatgatcggcttcatcattttggcatctaatccgggtgggatgccgtggcaaagcgccaaggcaggagcccctcacaccgcgtatatcaacatccgtggtgaaattgctgctggcaccctggccgatgctgatcaccttatcccgtccatccaagctgcattcgacaacccgaactcacaagctatcgtgcttcgcataaacagccctggcggtagcccggttcaagcaggacggatttatgacgaagtgaaggcgcagcgagcccttcatccggagaaaaaggtctacgccatcattgatgacatcggtgcctctggcggttactacatcgcctctgctgcggatgaaatctatgctgaccgcgccagtcttgtcggttctatcggcgtcatcagctcagggtttggattcaccggtttgatggacaagctcggcatcgagcgccgggctatcacttccggagagcacaaagcgcttctcgacccattctcccctcttacctctgacatgaagaaattctgggagggcgttctatcgaaaacccaccagcagttcatcgaacgagtgaaggctgggcggggtgatcgactgaaagacgacccagaggtgttttctggattgctctggaacggtgagcaggccaaagacattgggctgattgatggcctgggtagtttgaactccgtggcgcgagacgtcatccaccagagcaacttggtggactacacaccaaccgaagacatcatccggcgactgacccaacgagcgaagctcgaagccagttccttcgtgcaagaactcagcgctgtgaaagtttactga

SEQ ID NO: 286499 - DNA, 861 bp, Morganella morganii; identical to SEQ ID NO: 25022

SEQ ID NO: 286500 - DNA, 429 bp, Morganella morganii; identical to SEQ ID NO: 25021

SEQ ID NO: 286501 - DNA, 360 bp, Morganella morganii; identical to SEQ ID NO: 25020

SEQ ID NO: 286502 - DNA, 447 bp, Morganella morganii; identical to SEQ ID NO: 25019

SEQ ID NO: 286503 - DNA, 519 bp, Morganella morganii
atgacgacgaatactcaaaacgcgaacgccaaccaggttcggtctttacgcgacatgcttgtccccgccctgttgttctatgtggtgatgacggccatgtttgtgggtcttgacgcattcatggataaacccaccagcatgaacctgccatttatgccgttccttgtctcgatggtgagttttaccagtgacgcacgtcgagcgtgggactggcgaaacgggaccaaggttgtagctgtattgactgcggtagccatgctgttggcattcatctatcagctcgcggtcggagagatgaatctcttaggggttggtatatacccggccacagccatccttctgttggcaatctcctgggtgattcgcgctatcggaaagacagcacctttccagttcctggggagacacctggcgcggtttggtgcatcgaagtgggtccagcgtaccgccgcagtcattgtgctcgcgggaggccttgccatcactgtctatgcctactggcttaaccacgggagctga

SEQ ID NO: 286504 - DNA, 228 bp, Morganella morganii
atgatcattgcaacgaagaacggcttgctggtggccgcagaactaatcagggaagaggccgggtactggctactacagcctcgtgaccaaaagacgccggtcagggtgaataagcaggataacaataaacgcgctttcacgcatatgggagacgcccttcgctgggccggtgatcctgagcttgcaaagcaattcgatgccgagggggaagaacatgcaaattcgtga

SEQ ID NO: 286505 - DNA, 858 bp, Morganella morganii
atgcaaattcgtgactacatgacaaagttgtttgacgcatttggtgatgtggaggaagtcacccgagaaatgcttctggagcaggcggagctcattcatacgatcagcgataagtgtcagagcacaggcctgtttctggatagtcaggttcgtttcaaccagttcgttcaagagattgaggctgacgacaaggtagaggatcggttgcttcatgcttggtgctgggtaatagaccgaatagtgaaggctccaacatcctttcacatggatggggctgtgattttgacaatgcctctggtcgccagatacctgccaccggttgaacgggagccggaaaccatcgtggtgaatctcgatgaggactacaaggctcctgtaggcaaccaaacgctctgcgagctcgttatggaacggaggcattggccgcaaggtgcaacctgtgcgacccaagaagcggacgggggagtcctctactgggacgccccggttgatgtggtagaggaaggcagaaaggtcgccggtaagcacggcatgatggccgagatcggattgaaacatcaggttgatgcctggtatgcagatatggacgaaacacggctcgcaaccgattggaacaccgccgtcattacgcctcactgcttgctgctttcctatctggatgtgcttcaaaagaacaaagttccctttgatgaaggtgtgcagctcgctgccgaatgggtgaagcaacttggcggggaatttcgtgaagacactgaggaagcgccggaagctgaggctacagtgctttccctggggagagccacggctcattgctttaaaccctatccggacacaaaaaatttctattacgaggcctaa

SEQ ID NO: 286506 - DNA, 189 bp, Morganella morganii
atgcgataccaggtatttaaaacgaaggaagggggccagccggtgtttacggcaccgtggtactggttggcctctgccattgctcactggtcatctcttaactgggatgcctgtcgaatcgtagacagcaaggtggatgaaacaaggctctgttgggccaaggctctaccggctgggaaaaacaagtaa

SEQ ID NO: 286507 - DNA, 528 bp, Morganella morganii
atgaggttaggttttgtgaaaaatacgggggtttcagcgttcctggtagccatgctggtggtggcccctcaggtatgggcagaaacctttactgcgaaggttgtgggggtgtctgacggtgatacggtcaaggtcctgactgaacaaagctgtgactccgggaaagattgccggagcggcaaagtccagtaccgggtaaggctggcggaaatcgacaccccagagaagaaacaaccctacggctcaaaggcgaaacaggcgttgtccgatctggtgtttggtcgaatgattaaagtcgagcaaatcgacaaagaccgttatggccgtctggtcgccaacctttatgtcgatggcaaatgggtcaatgccgaaatggtccgttctgggagtgcgtgggtgtaccggcagtacgccaaaacaccggagctgttcaagctggagaccgaggccaaagccgataagcgaggtctctgggcattaccggaatcggagagaactcccccttgggagtggcgaagaaagcactaa

SEQ ID NO: 286508 - DNA, 273 bp, Morganella morganii; identical to SEQ ID NO: 229190

SEQ ID NO: 286509 - DNA, 303 bp, Morganella morganii; identical to SEQ ID NO: 25011

SEQ ID NO: 286510 - DNA, 351 bp, Morganella morganii
atgtgggtcatcgagacaaccgacacctttgatgagtggttcgatgcactggatgataccgatagagccaacgtgctggcttcgatgatggtgctgcgagatagaggtcccatgctgtcgagaccatacgcggatactgttaacggttcatcctacagcaacatgaaagagctgcgggtccaaagcaaaggagatcctatcagggcattctttgcgttcgatccaaagcgtaaggggattcttctctgcgccggtaacaagaccggggacgagaaaaggttttatgaagtaatgatcccaattgcagaccgcgagtttgcggcgcacttggataaattgaagaaggagtga

SEQ ID NO: 286511 - DNA, 549 bp, Morganella morganii
atgaacaacctgcccctactgctcgacgcaagagaagccattgactactaccaccagcatccagacatgactgatgcagaaaaggcctatgtggtcgcgttcctaagcggagaggggcgctcaaacagtcagatcagagaggaactggggattgagaaggtatacacggttacacacctgaaacgcgccggtacgctgtcggaggaagagctcacactctggctcagaaatccacgcaagatcaccctgggacatgtgagagccgtggctaagttacctatcagcaagagagaaaagctcctgagggatctcctgcataccaggacaccggttcatacatatgaggcgatagcgaagggcaaagaagtggatagggatgctgacattaagcgtctggaaaccctgatgagcgatgcgacgggtaggcacatcaaaattcgctataaccccgcgaagcgctccggggagctgacgctgggattcttcacgctcgatgacctggatgacgtgtgcaaggctctggggtttgatccaagcgagcagatgtaa

SEQ ID NO: 286512 - DNA, 195 bp, Morganella morganii
atggacgaaaaaattacctacgaagaaatgcttgaacaactcgaccagaaaggcatccgcgtcaccaacggtgcgagacgcctttatgtcgcgttgaacagcggagtcaaagctgaggtactgggtaactgcggtcccgccacaatcagcttggttgacgggatgattgttgtggaagagcagactcttcactaa

SEQ ID NO: 286513 - DNA, 372 bp, Morganella morganii
atgggcaaaaaagtacacatcatttgtggaaagtgcggcagtgacgagatgaactttgtcatcaatgaacactgcccagacgatccccagaatgttgccagtctgtcctgcttaaattgttgcgaactgacaggcatagccgagtggtcggaatttaatggacgtgagctgaaaggtgaagccgtcgccctatcaacaccggcaaacgtgaatgctcttctaagattgcttcgccaggcgatggacagcgttgagtatcgcctctatggcggggacatgtcattgagcggtaatgatgctgccgaactcatagacctccaggagcgagctgagaaggtcttatctgttcttcggagtgatcagcatgagtga

SEQ ID NO: 286514 - DNA, 471 bp, Morganella morganii
atgagtgatttatacgaaccgcttgagtttgtgttctgcggctttaggaaaggggacgctggactctttatctcagtagccactttgcgcgatggtgttttaggccgtgagatgtatttctcaaagggaaaaagcaaaaggcgctgggttgtcggtggcatttactcaggggcctcgttttcggacaacggagcaaaaggtctggatgatgctcattacgttaaagcatgggaagtgcaaggcgacaagatagagtggcaagcaaaaagcgagcaagccgaagccttggcgcgaagcgagaaacttgaagccgacgataggaagcgcaatgaactcgaagagcttatgctacccatcaggaagcaatatggggcattaacaaagcgacgagatagagcgggggccgcagctcttgaagaagctgtcctgagagcgctgagagcgcccatcaggaaggctgaggagaaataa

SEQ ID NO: 286515 - DNA, 342 bp, Morganella morganii
atgaaacatgtactgaatatcgcgctgatggctgttgttgttcttggcctggctatgcttgattccaccaactggggttacgcagtgctggctatcccggcagtgatttgggccaagccggtgcttaaccttctgcacaagctgccagttctggctgctgctttttggattcttgttgctgttttcgcgtggcaagcggcacttgttggtatcctgttctatggcgtacttgcgacccctaaagcgccagctccagcaaacaccaatggcaaaaaaagccgtaaagccaatctgatgggcacgtacagctacgactttaaaaccggcgaatgctttagctaa

SEQ ID NO: 286516 - DNA, 489 bp, Morganella morganii
ttgagtgcaattatcagcaagtgcggcatgtacagataccgtctggaaagggatgtgcaacccgaaggccttgtgttcggttattttggtgtaaacggctctacggccacggccaccgaggacgatcacacggtcagaaagtggatagggtttaccaaggtcaacggagggaggcgattcatagtcggtaatgcttttgcttttcgggcgaccgacgttcgagagctggctacgacggttgatcctgtgggacctgaaaatgaaatccacttggaaaggattattcgggatgctgatgtcttggtgccctgctgggggagccgaaccaagctgcctaagtctttgcatgttcatttggacaggcttttagagcagctcgttgcatctgggaagccggtattggcatttggcgtgactggttcgggggacccgaagcacccgctaatgcttggatattcgacaaaacttgtgccttggggaggaaaataa

SEQ ID NO: 286517 - DNA, 498 bp, Morganella morganii
atgtcgatgcttgaagcacgttacttcgtggcaaagataagcgatgcacaggccgtgctctgcgatgaggagctggcgacactggaaaggctgatccggaaggttgatgatggccgcagagcaaatggcaagagctcgcttacttgcgttgttgtcgaagaagattggccgaactggcagcaaacggttgactctgtactttcacttgctgacgggaaagacagcgattggaccaatgccacaccagaacaaatcaaggccttttgggtcgatgactcagtttggaaaactctggatggccgggataaatggattgaagatctcgacctgctggtggacggttcccaggtggcttctgagtgggaaccttttgacttggaatcagggcagtctgtcgtcatacgaggcggatggatagaagggaatgccttgagtgatgatggcgtaccgctagtgcaggcattcgtcgcttggaaacagggccaagacaaccactaa

SEQ ID NO: 286518 - DNA, 264 bp, Morganella morganii
atgctcactgctaaatgtatagggtgcggatgtaccgatgatcacgcttgcgttgaaaacggtcaaccttgtcactggcttcgcgtgaatagagtggaaggtatcggggtctgctcttcgtgcccggacgctctcaatcagttcgcatcgaccagccaggaacaagcaactggacaggatgactaccggaacagtccagaatggaaggatttttcatcacgcattggtaatgcactatgcggggaccggagcaaagcaaagtaa

SEQ ID NO: 286519 - DNA, 552 bp, Morganella morganii
atggggcaaaaagccttacgtgaaatcagtgaggcatcttccagtgtttcgtcagcacaaacaatggaggttctcgaccttgtgactgacaacaagggcatttccgtcatgtcgtcgatgtcaaactcctcggccagcagtgaaatagacgatgcaaagagagctgtgaaagccttcgcaaatgcgctgggggatcatcgtgacattgtgggctcactgcaccactcaatggcaacagagtttatcgatctgggtatggactttgccggtttgaatgatggtttcgactttgggagcgtcttctcgctgttcagcttgtcgtctgccagttcgtctctgggcaaagtagagtctcgcgttgaatctctgatgccagatctaaaacgagccgcctccaattcggcagcagagtatgcccgtgttaacgaagagttctttggcctaaaacaacaggcctgttgccaagtgcatgagttgctggtgacaaatggtatagacgtgtcagtcaagcgcgttgagtccgccgtgaacagctacagagttggaaggtga

SEQ ID NO: 286520 - DNA, 1464 bp, Morganella morganii
atgagcgatattacacagcaaatggacaaacttgagattccaatcaagttgtcctttccagtcatcaacgttagcacttttgagctgggccgcgcagagagcgttttctctgacattgcaaagaaagtcggcaagcactttattgtaatgccattcaagaagctgcctgatccaggcacgatgaaggcaatggtggacgagtccaagaagtcctccaaaaacggtgttgtcgtgttcgacactttctttttcgaccgccaacgtgcaaacccggaaacactcccagccctcaagtcatcactaacctatctggagaatgaggggatcaactacatcatcgctggcaaagacgtcttcaatgaagagttcgtttatcacatcgatctcccggctatgagcaatcaggaaatcctgaaactgctccagacctgtgaagataacgtgaaagatggtggagtcttcgagagcaacgaacgtgctgtcatcgcaaaccacgcccttggcttgtcacacacccagatgaaaaacgtcttcacctactccgcttacttgaaattcaagggtgaagaatacctgggcgagatccgaaaagaaaaagctcacatcttgcgtgatgtcggcctcgatgtgcttgaggccattgatattgggaatgtcggtggtctcgaaaacctcaaggagttcctccagatacgtaaagccggttgggacaaagaccttccggtaaaaggtgtccttctggccggtgtacctggtggtggtaaatcgctgacggcaaaagccgctgccggtgtacttggcactaccttggttcgcctggatatgggccgtttctatagcaagtatctcggtgaaaccgagcgccagttcaatcgtgcattgcagaccattgaacagatcgcacccgttgttgtgttgattgacgagatggagaagttttttggtaatgccgatggcgaacacgaagtatccaagcgcctgctgggctctttcctctactggcttcaagagcgcaagaagaagatcttcattgtggcgacggccaaccgggttcagtcgctgcctcctgaattgatgcgagctggccgctgggaccgagcattcttcattgatctgccaagtgtggctgagcgccagaagattttcgagatccacctcgccaagcagaaggccaacatcgccgcgttcgatatgcctacgctactgcgtaccaccgagggatacaccggggcagagattgaacaggccgtcattgacgcgatgtatctggcgaacgctcaggacaaagagctcaacaatgaagcgctggtggatgcggtcactcgcattaccccgaccagtgaaactcgccgggaagacatcaaccagattcgcagtttgcgggatcaaggcttctatccggccaataacttcgatgttcaagagcagaatggctctggacgaaaactcgccatcgaggactaa

SEQ ID NO: 286521 - DNA, 393 bp, Morganella morganii
atgagccatatcgtaaaaggcaaggtgcaggtcgcctacaaagacaaagagctgctgttgaaggctctggagggagttggcgtcgttgttgaaaacgaaaagctgtaccgcgtgggcgctggctacaccttcgagaaatacccgattgttctgatcgaccagaacaacaaggagcaccggattggctacaaggaaaaaaacggtgtttgggagcagtaccaggaaaactacggctcttatggccgctggacgcagcaggcaagcagcaaggtgcaggatcgctacattgccttccactacgagcagcagttgaaagaggaaggtttcagcgtgacggtgaagcagcatcatgatggcactttggaactggaagctgaggaagctgtttggtaa

SEQ ID NO: 286522 - DNA, 195 bp, Morganella morganii
gtgaaaaaggtaaacatcaagatcaagggcggcaagattgctgccgatttcacgggattccagggtaagacctgtgaagcgctggagcagcgtattcgcccggaagagctcgaagtcgaagaaaaagagctgaaacccgagtaccacttcaatgctggtcaaacccagcacgaaacggaaaagaacgaatggtga

SEQ ID NO: 286523 - DNA, 1185 bp, Morganella morganii
atggtgatgagaaggacagggcgcgtcccccttcttttgctggttggtctcatggtcgcagctcctgcggcctttgccagtgactttgtgactggcgtagcagtggggcaaatgctctcagatgactcaggcagcaagaaggtagaggacactggcccagagagtaaaactgtcattgattaccatgacggccagccggttgtaaccaaagtggaggccttcaaaagtaataagtggcgcaagctagacggccctcagggtggctattttgtttgcccaggtgaataccgtagctactcgggaagactgcgatgccgtattcatgatgacgggtttaatggctttatgggcggtatgactgatgctcaggagctgccgctccaagaagctctgaccaagttggaaggtaaacccatctccctgcaaaccattgaagtccacggcaacaacctggcagtcaaataccagttagcaccaccagaacaaacgcacgtcaaaactcaggatctgggggtggtcaagcaggatggtgaaacgcagaagtctgccagccaacaatcagcgccatccatagtgactgcaccaaagagtgaacctcccaagcagattagtgctgcacaagacaccgaccgcaataccagtgcgtttcaaagtccgttcgaggaggtaagtgactccatgatcggtctaatggatagctctttcgtcaaagtcatagcgggattgatgctggtgtttggggttgctagtggaattatgaggcagagcccatcaggaattgtgatggggataatgcctgcaattatgatcatgaccgcgccaacggttattcgtaccgtgttcgatacaggcgcggccagtaccaagccagtggaagatagcggaagctcatttcctttcttcttggtggcaatagtaccggtgctgattttctttgcctatagagcttttatgaacaaccggagcgactccgaaattgatgagttgttaagagaagcccgacgtgctgaaagggctgaacgaccaagcaatgagcctccctcagtggatgaactccgtgagcgccagcaacaaaacccagaaagagaaccggtggttgtcagctcatcagctccggcaccaaaggtgcaaaaggaagagccaatcgaagtacagccaggcaagcgcaaaattattttggattag

SEQ ID NO: 286524 - DNA, 348 bp, Morganella morganii
atgagcaaaaagcgcatcgtaatcaaaaatggtgaggtctgcgggtttgccgatgaggtttccttcaaaggccttgacgtgcaggaatacagtaaaaaaagggtttcgcgcatcgtgccgacgaacggatttctaatggtcgcgttctacgttattcgcggactttgttcagacgagtcaaagattgctgcatggactcgtgtttggcgttgccagtggaaggtgctgatcgacggtaaaagctatggcccattcatcagtcgtgcggatgctatcgcgttcgagaaggacgagatctacaaacaaggcaaattctttgccgaggtccctcacgaggcggcagtatga

SEQ ID NO: 286525 - DNA, 429 bp, Morganella morganii
atgatgacacgggcggctatggccgttttgttatccgcgttggtaataggctttgtgtctgatttgaccgcacaagagctggtggtaagtcaggtggctaaagaaaagtccactgaggtggagaaagaagccactttccacaaccgcaagtgggtgttaaggacggggcaggttagtggattcttcatctgccaaggagataacaaagacatttattaccggcatgacagggtgggcgctcactgccagaagacatcgactgggtggcgcaatgtactgggtctcagggacgatgttctggaagttgagcttagcgtgtacctggggaccattgaaggcgtccccgtgaaagtccttcaccaggaagtggatggttacgatctgaaagtgcggtacaaggttgcacgtaaagggtcagcaaatgagtga

SEQ ID NO: 286526 - DNA, 564 bp, Morganella morganii
atgagtgagagtgtgcgccagtcaacgccgatggtgaagattaaagtcctgccgagtttcgtagggattcccttcccgtcggcgctgcttatcggtgcgggtatcctcaatggccctttgtggggctttgccgcattcgtctttcatatcgtcatcaagcggtacatctacagagaataccggaggttgccatatccgatgccaaccagctcaaggcatatggatgagttgagcgagctccttgtaaaggggataccggaggaatttttccagcggcttgacgcggcttgcagctctgatgcgtcagtacaaataacctgcccaaaaaaataccggctgctcaaaatgtcgttggatcgctatgccaaccgcgctggttgttacccgcagttccgggagggggatgaaatagcgattgaggtaacagagccgagaccaagaaaagcaggagccgggaagggctttccaagtattcaagatctgaaagcgtcagagggtgttatgagtgaatcggagcagcctatcgaaattcagaaagataagcgcaagattatcttggattga

SEQ ID NO: 286527 - DNA, 570 bp, Morganella morganii
atgcggtcatttttatacagaatattgcttctttgcttcgtcattatcgtccagatagggctaatcgccattgatgcgagcccgttggttgttgctatgttcctctcgctaacagctttagtcgctggggtctggatggcgtaccttcattcccgatttttgatggcggtgactccagtagttgtctctgtgctaatggcgaccctcgccatgaaaatgtttgagccgagactctttgtttctgccagcgaaaaaggctggttccctttgtcattgttcgtctcgataccgttttacttctacttgagttacttgcttgagatagaggagaagagacgtacattccgggccaatgtgattggttttttgcgtggagtttcggaagagatccgtcgttcaaccagagagcatagagatcaaggtgagataagacacggtggaacagagctggggagtattgatgaactacaaaggggcgaggccaaagagccagaagtcatcagctccaccacggaccagaaagaacaaggcactcccaagcgagacaagagaaaaatcattctggactga

SEQ ID NO: 286528 - DNA, 546 bp, Morganella morganii
atggaacaaatcagaaaaggcctaaccctcgaatacgcaaaagagaagcgtgagaagctcttggcggagctcaaatcagatgaacactacaaccagactgaaacagtggcctatgggcaccacgacccgctcagcgttcctgtggcagcttgcgatagttgtcatggccgggcgcaaatgcagaaggttataggtcctcctgtacgctggaatatggcctgcctgggttgtgggaaggcgatccagcaaatccagaaacgaccgtggcaagcagcaatggcctggaaccaaattaacttgggaacacaggactacagacaactgcccctctttggacttgggagtctgtctcctgagtcagcaagacagagaatggtgggaatacgcaggaacctggagctgagaaagagcctcgccggtatcgagaggacgatagctcacaaggaaggtcagcgccccccagggaaagagtaccagcaacgactagaagcatatctgcaatgggccatgctggcgctgaggttgctcaaggtcaaagcacgttag

SEQ ID NO: 286529 - DNA, 939 bp, Morganella morganii
atggctgttatcaactcactccgcgctctcaaaggcgtaaccgcccccgaagaactgaaaaaaggggatggattcactatctctcctcagcttctgctggaggaagaagggtttaacacccgtggcgctttctgcgagaactactacgaacgcccggacatcaaggctggtattcgagtgctggccgatgcctacaagcgtggcgactatgttccgccgatcatcgtcaaggttatcgacggaaaggtgtatgtccgtgaaggtcatcgccgtcgccgcgccatcctgcttgctatcgaggaaggtgccgacatccagttcgtgcaggtcgtagagcacaaaggcgatgaagccgaacagagccttctgatcgccaccagcaacgatgggctccctctttctccacttgagagagccgtgatctacgctcggcttgcaaactgggggtggagcgaccagatgattgcccagcgtgttggccgctcggctgagcacgttcgtctcgcccgtgcccttctggagatgcctctggaactgaaacggatgattcaggaaggctctgtggctgccacctacgctcaggagctctacaacgagcacggcaccaacgctgttgagatcctgaaaaaggcgcaggaagaacaggccaatggcaatgacggcaagaagaccccgaaaaaactgaccaaaaagtctgtcgagaaaggtccccgcctgggcaaaaaggtggttgaagccatgcaccgaggcgtgagctctattaccagtcgcctggacaacatcaagccgaatgatgacggtgaaacgttcacccttaccctgagccgggaagatgttgatgcgcttcaggagctgaaagacaagctggcggagctggagcccaagaccgacgagcccaatgaagaccagcaagagctggatttggcgggtaatcagtaa

SEQ ID NO: 286530 - DNA, 195 bp, Morganella morganii
atggggcgctgtactgttgaggatgccatccagttgctggaagggggaaccattgttgcggtcgtaccggcgtcatccggaccagatacgctggtggtttcctctatcaggcttgaatccggactgacagtacagttttcccctccagcggcagccagtgtcagtgttcagctcgcggatctcgatgatgagtag

SEQ ID NO: 286531 - DNA, 243 bp, Morganella morganii
gtggcgaagttgaaggtttatggcgggatcacttatggggcagaggggcagttcagaactgtcgttgcggccacaagtaagagcaaggctgcttccattcttaatatcacgatttaccagatgaatagctggtggacggagacttttaacaagtacgaggtcgaggcggcgatgtctgagccgggggttattttttcaaagcctctcgatggcagaggcccatttgtaaagcaggaaggataa

SEQ ID NO: 286532 - DNA, 243 bp, Morganella morganii
atgtcatccacatgggttaaagaaaggtttggcctagacctcggtgcaatgtgccgttatgacaaaccccagcatgtcgagttcaaagtccttcctgatcagactatccagttccgctgctcatggtttgaaggcggtggattaacctggtggcctttctacaccgagcatgatgtaaagagcgccgaggcgacctctgtgctcaatgacatcttcctgggtacggaggggcatgatgagtag

SEQ ID NO: 286533 - DNA, 1245 bp, Morganella morganii
atgagtagccagctagaactctttcatgtccaagaggcgtatgccaaggccgataagccgctatcgaatgaggagctctacgattcagtagcagagctcgctggaatcccgaaaagcgctctgaatgaacaaagtgaaattggcaaggcaaaggtcaagcggagcaagctgaaaagacagatacgctggtatcagcaaaccctcaagtcgatgaaccttctccagaaggtggacggtgagcggggtgtctgggagctctcaagccaaaccaagaagggcctgcatgaagcgcttggtggcgttcgactggtcgcctattcgacaaatcttgggctggcggtgtggtcaaacaacaagagctttttctctgacctcgatgagccggtgcatctgtgtgtgacatctccgccgtttccactacgcatacagcgtggctatggaaatgttgatgaagccaaatgggtggatttcataacccaggcgctcgaaccgatagtcaagaacctggtgccaggaggaagcgttgtcctgaatgtcagcaatgacatcttcgaggccaagagcccctccagatctctctatgttgagagaatggtgctggcgctccatgatcggctcgggctgtctctcatggatagatggccgtggatcaacctgtcaaaaccaccaagtccaacccactgggcttgtgtgaaccgttaccagttgtgtgccgggtgggagcctgtttattggttcaccaacgaccctgacagggtgcgttctgacaacagaagggtccttatccctcatacagagaaacatcagaagctgatggcccaaggcggtgatagccgagtggtcagttatggtgacggggcatatcgactgagagggaacgcattctctaacgtcacggaaggacggataccgaaaaacgttatccagcgcggccaccgttgtgcggatacgctggagcttcggagaatcgctagagaactggggttgccaccgcacccagcaatgttcccaacagacatacctgaaatggctatccgctttctgacggaagagggcgatcttgttgttgatccgttcagtgggtcgaataagagcgggttggccgcagaaaggaataaccggcgctggatcgcctgtgacatcattcttgagtacattcgtacccaggcggaaatgttcaccggctttgatggattttggatgaacccggccatagcagcagtgggcgggggagcgttgaattaa

SEQ ID NO: 286534 - DNA, 450 bp, Morganella morganii
atgagtttaagttttatcgcaagagtcttgcgccaattggcaattatgtttgtcctctccgtgcttattatggccggatatatctactatgccggtaaacagcatcagcaggcagcaatcaacttttggggtgagcaataccagcctgatgccatctcgacgcaaattgattgggggtttatcggtaattgggttattcctcgcgggggaccaattatttctccgggcattgctggagtgtgtcccaatacaccacttcccgttgtgcctcttaaaattggtcctgatggccggggttatgttctctgtggcattggaagtgaggctgtcgctaccagctttgatgtcaatgacatccatgatgaagagatacgaaacacattaaaaacgatgtttgaggaagaatttgaaaaaactgttaagggggataaatggacactcaagaactga

SEQ ID NO: 286535 - DNA, 312 bp, Morganella morganii
atggacactcaagaactgaaccacatgatagctgaggcctacagccgggatctgcaaaagcctgagctagtatcgttcaaagaggtgagtcgctgggggcgtaagtacggtttccccgtcgtatgcaccctggccgatgaaagtgaagaaaagcagattcactgggctgccagtttgctcattcaagtagccggtacgtggccgcgagaagatatgccggaattgctcacaccggaacgggactctgcgctgttcaacgatgcgaagcagctattggcgaatggccttggggcagcaaatcaattgcgctga

SEQ ID NO: 286536 - DNA, 786 bp, Morganella morganii
atggcaaaagtaatcagcttcgccaaccagaaaggcggagtgggtaagagtaccctctgtatccagcaggccttttatctggcgttacagaagaaaaagaaagtgctggtcttggatatggatggtcaggggaacacgtcctctcgactggcccccagacgagagcttgaggatggtgactacgagcccatcctcacaggaaccaaaaccgcagagctgttcgcttacgagctggacggcattgaggtcatgcactgcccttgcggtgcagacctcattcatacgccgaagaatgacccggatctgtttgagatggaggctgtgcctcttgaccaagctatgaatccggctcgccatttggctgagctgtttgagaactacgactacgtgttgattgattgtccgcctagcctcggcagaaagctggtggcagcgttggtgatgtctacccatgtggcatgtccggtaaagctatctggcttcgctgtggacggcgtagaaggtctcctgaacacgattattggtgtgcgcgaggcatacaaccaagatttggagatcctgggcatcgtgatcaacgacatggaccgctctgtcaatcacgacaaagctctcaagtcgctggagaacacagttccggatctgctgtttgagaacaaaattatgcaccggcctccgctcgatacggcgacgactgatggcatccctgtctgggagcttcgctatgggcatgtcgcggccaaagaggttgaggcggtgttggaagaactattagagaaggtgggctaa

SEQ ID NO: 286537 - DNA, 1182 bp, Morganella morganii
atggcattgaacaatttaaaaggcctgtccgaacttgctaaagccgccaaaggcaagaaaggcaaggaagttctaaccgtacctgttgaagacgttgtatccaaggtccaggttcgtaagcgcttccgtaacattgaagagctggcggcaaccttgctgaccgaagggcagcagtctccgatcatcgtgttcccgaagaacgaagaaggcaagttcgtcatccaaaaaggggaacgacgttggagggcgtgtaaacacgctggtattgagaccatcgacctggtggttaatgacaaggttcagaacaacttggacgagactgctggtgagctgatcgaaaacatccagcgggatgacttgactccggtagagattgccgaggcgttaaacctgtttattgatgagggttggaagcaaaaggatattgctgatcgtctcgggaagaatatcactttcgtatccactcatctgtcgttgctcaagctacctgactgtgtgcgcgagttatacgataatgaagtatgttctgatacagaaactctgaataatcttcgtctgttgttcgatttgaacgaagaaagatgtcgcgccgtctgcgcggtggctatgtctgacgggattacccgtaaacaaagccgtgagctgctgaatgatgccaagcgtatcaaagacgagatggaaaaaggcccactgactggctcccaccagaatgatgagcttggcgctggcaacaccgatgagcaagcctttaactcaggtgcggatggtacgtcggaacaaaccgggaatgacgacctgaaccttgcccaggaggaactggaagggggtgaaaattccaatggtcaggacgatgatgacgaagaccctttgcgtgatgaagagggtgagcacaaagatcctgtcaagcagccagctaacagcggcaaggacaaagatgaagaaggcggtgatgctcttcctcctctgccgaaggacaaggaatggaagaacgtccgggctgacagtttgatttttgctgtcaacgttaacctggatggcgagacaaaacgtggagtcatcatgaccgaccgtgttgctctggttccgtctactgtttgggttaaaacgctcgatggcgaaggcaaggaaaagcatgttcatgtgcctgtgtcagacattgaactcctgagtgtcgaaggctaa

SEQ ID NO: 286538 - DNA, 273 bp, Morganella morganii
atgaagatctcacaggacatgaaaagaaaatttgctttggtgaatgccctgtctaaaacggagaagccaagtctccaggaccttcacaaggcaacaaatattcctgaatcaacgatcaagagacagttgtctgccctgcgtgatgagttcggaatgaatatcttgttcgtcagggagtctaccggcgaacgaggtgccaccggctactacatgctgacagactgggggatcttagacaggtcttcgttcttgaacaggtacggaaaactgtaa

SEQ ID NO: 286539 - DNA, 636 bp, Morganella morganii
atgtcaccagaaacacaacaacttacatcaaaggctttgtctctcatcgagcagtcccgataccgaatggggacttctcggtttgttgaggcatttattgaccagtgggcatacttgcagactggcctgtacccagccaaagaggagatcccggaggaactacagacggtcgcattcgagctctctcatgtcctgtctgccgccatgaagcgcgatcccaccagcgatgttttgggctacgtcctaagcatgtcgggctttcacaagaagggcacaaattacttccccacccctccagagattggccgcttgctatcactcattactggaacggagtcttcggcagacttctatgagccctgctgtggctctggcatcaacgccattcactggatggaaaacctgatcgataacaaaggcccagaggctctggccgaagcctcaatctacctggaagacattgatccgttgatggtaaagtgctgtatgctccagctcttccattatttcgagtcccgcaataccactcccaaaaggctgagtatcgtcggcatagacacccttagcagacgaaccaagaacatcgcctactacgccgaaaaacctccagcaaccgctgctaccgtggcagcataa

SEQ ID NO: 286540 - DNA, 144 bp, Morganella morganii; identical to SEQ ID NO: 25134

SEQ ID NO: 286541 - DNA, 282 bp, Morganella morganii
atgagtaagcgatatgcggtagtgccgcatccgaaactgaaacgagagtacaaaggtcggctggtcagaactactcgggtactgaaaaacggctgggggttgatccctctaggggctgtggcaacggtcacgcatcagtctcccaagggatctgcgctgacctttgaaccgtgcgactgctgcggcctgaaagccactatcagtcatgtaagcatggactccattgaatttatcgaaccgattactgaggaagaagatggacgagaacaagctcaacattga

SEQ ID NO: 286542 - DNA, 675 bp, Morganella morganii
atggacgagaacaagctcaacattgaaacggtcgatgggcacaacgagctggtagtcagctttttgtccagaatggtaagcctgagtgacgaggaaaagcagacagtattgtcctgccttccggacaccggcaaacaaacaatcacccagctttatgaggcgctgcgttctcaagggcaccaggatcttgcagagaaagtcgaaccatacctccagcagggggtgtttgggccgatcttcgataacgccaagtccaaggtgttcgttcgggacgaagcgccttttttcctcatggatgaaaatcctttgaacctggatgacgctaaagcattcaatcgcctgcgtatgagcacgacctgtgttattggccgtggcggctggactatcggtgagcgttttgatgaccgctttgataccgaggtaggcggaacacagctcatcgttacccagtcactcaacggaaaaggtgagattgaaggaggacttcctacctcgatgtcgctgaatgactttgctgagttccctaaacagccaaggcctcctcaaatagtcgattaccaggaagataagcgatacacgcttgaggaagcggaagctatccctgagctcgcaccagtggttcagcgtctgaaagagcgcatcgcagagtatgaggagagaagcacccatgattga

SEQ ID NO: 286543 - DNA, 507 bp, Morganella morganii
atgattgacctgacatgccgcctctgtgctggttccggtgtttatgacttttccccttccaaagaaacctgcggtatgtgccaagggcatgggaaatttgctgacgccaaagcaatgctggtggctgccatcgagctggcaaagaagcaacgcgagcctgtcattgaagtggtgatggggttggtgctccagggggtggatgttagagggaaggagcctggagagcgattcaaggctgctcaggcctttaacgccccagggcacaacctgttgcgatacggatgggatgcgtgggagctctatgccctccatgagggtgtaactccagagcttgcatcgcttggccgaagtgtgatgcgcgagtggcatagccattcatggggccgattcagtggagaggtaggctttaatgccgccgagatcatgatcaaacaggccaaagacaacccagaaacagcagaagagcgctgggcgttcctgcttagtgaagaatggatggtggagtaa

SEQ ID NO: 286544 - DNA, 312 bp, Morganella morganii
gtgacagaacaaaccaataagaaattgatgctggatgagtctccagatatgcccctgcaattcaagtggcgaaagtttggtggtgcgatttttactgccacgcaaacaatggagcacgtcaaggaagggcgtaagctcgggccgactccagcagggatgctacctcaagaagtgtggctgaaccgcctgatcgctatggaagaaaccctgccacgagggaagttttttgacagattccgccgccgcgacaaaaacgagcagtatgacttggccgccgatcatctccgtcttgtcggacagaaaaagcgatag

SEQ ID NO: 286545 - DNA, 180 bp, Morganella morganii
atgttggaatatattcccttactcaccacaagtaagaaggagaccaacatgggtctatacagaagttcagcacatgtattctggcgttgcaaatatcatatagtctggacacctaaatatcgttataagatcttgaaagataaggttggaaaggagctctatcggattaataatggatag

SEQ ID NO: 286546 - DNA, 1041 bp, Morganella morganii
atgagcaatttagacttaaagaaaggtgagcgagccgaagaattattaagaaaatatttcctgagcattggttattatgttttgagatcagttgaattcaaatatcatggtttcgacattacggatattgacttatggttatattcacgaccgtctccaatttccagggaaagaacaaatgttgatataaaaatgaaaaaacaaccacaagcacttgaacgtgtattgtggacgaaaggattgcaaaaagttttaaacctcgaaaaatgcatcgttgcgactacggataaaagacctgatgtaacggaattcggcattgagcatgacgtacttattttagatggtaacttcctctcaaaattaacatctactgaacgatatgatgacaaaagaataagtgaagaagaatttgaaaatattctaactttacttgactctagttcttatggtggcaactggaagcaaagataccgtaagtcaaaagccgttttagtcacaaaacttaatttcgacggtgtaaatcatctcctagatgacattcagtattatttagaaagagttgcaacatctgaaagtgagtcttatagtccagcgtgtagagcactttactcatcaatatctatgttgttgattttaatggattattcaattaatgatataatattcaaagaacatgaagaacgtatcaaaatgattagcgaaggtattcgctacggtatagacggtaaggatcaagctaaaaaattattgtcaatggcaacaacattaatttcatcattcgtaggttcttcgccaattgataatactgcaattactgcagaagttgaaaaccagttcaaaagcattcctgctgagatcatagggaatcatttttctacaactcaatcaatgaaaagcatgtttcacttagcaatagcttttgaagagttagcatttggtaaagaaacagttagaaccatagatcttgaattcgagatgaaatcaattcttggagtgttatgtgattttaactcaatagatagaaaaaaggtcattagataa

SEQ ID NO: 286547 - DNA, 645 bp, Morganella morganii
atggataacaatactaaaggtgcatggttagtacatcatgctgaaaaaatcaaaaaattccctggggctgatagtgaatttgaacaaataagtttttccggtaagtgtggaattcttttgtcaagcattagttctaattcgcagcacgttctatctgaagatagaatcttaagtttatctaaagctgctggaataaatcgtagaactgaacttccatcaattttagacgagttaaaaaagcaacaaataattacatactcgaaaaatttaagtaagtatgaagttttgggtattcctaattccattacaatacttaatcatgtatcgagaatttttgatgaatccgaacccagtcaatcagaaaatgcagcgattgagctttctgagttatgctctgaatctccaataaatgaaagcagcgctaaaacaataattgaagacacattcaggctagcaagaggcgatagtgataacttgttcactaatagccaacttgttggcttcgtagattctgagcaagcatactcgggcgacaaacttttattcaatggtaatttattcagaacagatgatgttaataaatcatacactatactcaattcttttagcgatggagatgcgcaaaaaaccaaggaattcaattag

SEQ ID NO: 286548 - DNA, 621 bp, Morganella morganii
atgagaattaaacaaatcgccgaacaacgaggaattccgcacctcgtacactttacccgcatcgataacttagcaagcataatgcaatacggaataattccaattgccgacactccatcatatggaattacaccattagttaatgatgaatatagatgggatggacacagaaatgcatcctgtctgtcaattactcacccaaatcatagtatgttttacagcgtgcgctgcaacaatccacagacagattgggtagtattgattttacacccttccatactttgggaaaaatcatgcgcattttgttatcataacgctgccgatgcaagaataagcggccaacctttgactcaacatcaaaatcaccaagcattcttaaaaatgtttgatgagattgatactattccttccagggaagatcaacgattacaatcttatgacactactgatgtgcaagcagaagtgttagtatttggtataatagaacccgaatatattatcggagctgcatttgacaaagaaaaaactaaaatagctaatgaaaaccttctaccacatagacagatttgtctacaagcgccaggggaaggaatgttcgcttcccgttcatacattagataa

SEQ ID NO: 286549 - DNA, 708 bp, Morganella morganii
atggctaaaagacctgtgtatgtcccagtgactaaaaaatcactttttgtgaaaacagaatttattgattttacttggtttcctggtatgtccatttctcaaaaacaaaaatcgatcgactctctccatgacgcagcaaaaataacattaccagatgtggaaagaattcttgagatttccagcaaatctcgcaccccacttggagttgcattgagtgctttcaatctttcattcactacactgaaacagcaacgaactttaactgttgaatgtgcattccaaggtagtaaagtctttcaacatggtgggccttatgttgacatattcaatctgactgcacgtgaagccaaaaaagataaacgtctcctgacttcaggtcgcctgactggatttaaattctttggtactgaatgggaacttgaaccacaaacagcattttatgactggctttatattagcgcgttaaaaaaacagcaaacgctagcaaagcagattattgaatatgatgcatttacagatattgagttcaatcctgaacgttcaatcaactgccaagcatattctgctgcgctttacgtttctttattcaaattagatattcttgatgaagcaatttcttcaaaagacgcatttttgcgtatacttaaaaatgtgtctattagtaatgcacaacaagatgaaacaaatcaacctgaattaggattttaa

SEQ ID NO: 286550 - DNA, 192 bp, Morganella morganii
atgaccggagcgccggggaatatccccggcaacggcgtgctgcattatcactttttcggctgcggatttattgagttactgatggtggatccggcgctgcgcgggcagggggataatctggatgacggtgatccggaactgttttatttccgcagactgagttacggaaagattaaaaatattaattattaa

SEQ ID NO: 286551 - DNA, 159 bp, Morganella morganii
atgaaagactttcgcggcatgctgctgcgcggccagtgctgccccttcgtggatcaggagatcgcccagcgcggtatctgcattgcagagatcagcccggaacagtgcatcaccgaaatagtccgtaaactgcagcccggcgggatgacggcggaataa

SEQ ID NO: 286552 - DNA, 219 bp, Morganella morganii
atgaacctcgcaaacctaactcaagaagaaaaagacaaaatcaatgtcgatttggccgcaagtggtgtcgcatacaaagagcgactcaatatgccagttgtcgcctcagaagttgaacgacaacaaccagcacatttacgtgagtactttaatgaacgactggcgttttatcgtgagagaagtaagaggctgcctgcagtaaatcggtgcagtatttga

SEQ ID NO: 286553 - DNA, 1089 bp, Morganella morganii
atggaaaacaagagaacaatatataatatacaaatattgagattcgttgccgctgcgctagtggtactagctcacgcagagatatttatttatgatggagctaaatctgagccattaggtggatttggggttgatatattttttgttattagtggatttataatcccttatatagcatacagaggaattgactataacggaaaattcaaggttggatctataaatttctttcttcgtcgtattgtcagagtagtccctttatatgctattagtacagctatatgcgttttttttgcctatctagtatcatataaacttagtaacccaactccgccagtttcattttggtggccatctacaaaaattgatatgttatggtacattgatagtataacattcactcactggaatcgaccccctatattgggtgttggatggacgttacagtatgaatttttattttatgcgtttttctctctttttatagcagttaaactttctaagatcgaatatgttgaagtggcgttcattacaatcattgtattgtcaaatatgttactatcatatagtggaacttcttggtttattcatgagtatgctccttttattaacttgactgctagcccgataatgattgagtttgctatgggcatgctactatatagattatacatttctaatgccctattgtgtaaaggtgtatcactaacaatactggtattgtttatccctgtattttatgttttagaaaaaaatatgattaccacctcattaggaggagattggcacaggcctttggtgtggggtttttttgccttttatggcgtgtgggccgcaattagccttgaaggtaaaataaaagcgcctaaatttatagtttttttgggaaatgcatcttacagtatttatttaatgcatgcgctcattacagcatggatggctcacatttttgtagttagcgacatggtaagcaaaattggaatttatgggtattatattatttattttaccctcagctgtgctctaggctctattgctcacatttgtattgaaaaaccaatagctaggcatttgaggcgttttttttga

SEQ ID NO: 286554 - DNA, 2583 bp, Morganella morganii
atggctactatccctactcaaaatgcagtacctagtgaagcaccgcgcgacctgaaatttaactcaggcaaagttgacgagttcgttacgtcaaataatcatttttacactgaccgctttggtaaaaaacattatactatagatggtattaattttttatcaaaacaggcaatgcttaactatggctatatcacgaagaggtcttttgaatcgggtaataccatcatcaatcctaacgatgttcttctctgggaagacaatggcgaatactacagatgggatggcgaactccccaaagtagttagtgctggctcaactccagagtcagcgggaggaattggagcgggagggtgggtttcaattggtgatgcagcccttaggggggagattagccaatcaacaaaaaactacaacacatttatagatgctgttaattctaacacagattctattataaaaagtatatttattgcgggtagaatatctccaaacgatggtggctgtggtctatatactaaaaccggcacaggtacaccaggagatacagatgatggtagtttttttgtaacccaaaatggtgttaggtttgatttagtatcagatgcaactatagctacatttggtggtgtcgatggtggaagttttcgttctgcgttggataggctaaaaacttatgttagtaacagagatagagttttaaaaataaaatcaaatcacgaaattttgatgaatttttctcctgaaattccctctgggtattttaatggatttactcttgatgttgatgaaaacgtgacgatagccactgctagtgatgaagcagttaagtcgccattggtaaatttggttagaccggtaaagtttttcttcacgggaaataatactagttatttgttgcgccctactgttgggataactaatggggaatataaacctctaatttcagaaacaccgcctaaaccaccacaaataactaatgcaaactatactgataataaatcattatttatcaatatccctgaaaaagagaactatgtttacacatcttttttaaatgattgggaattcttatctagctcttggcctatgggggtgtttgatactgtttctccagtcgctatcttagaagattcattgtcaatacctgcgccgacagaaaaatttgtatgcgcctcattcagtaaaataaagccgagtgcagaatattttgtatctatgtacgctggagataatactaatggtatctctgctattactgttgaggcggaagataaacggtggatttactacgagaatcgctttggggaggggtattttattgagggaaccgtcggtggttcattcaaagaaaaaaaagtttcatatttaggaggttccactcatgggtcacaatggattaaaaactccatcacctctgtgagaattgatactctcaaatcatttacaatccttgtaaatggtattgaacgtattgctgttagggagacagagggcattattggcagaataggattcggatcttatggtgcggataataattatatgtctttattctacccgtatatcatagaaaacaggcagtaccgttccgcaaaaccaattaatattgccattgttggtgattcaatcacagatgcatcaataggaaatggatgggctcaattcgcacaacaggcgttggagggtactcatggaattagggtcggacggatggaaaccattgctattagtggatatgcatcaaatgatattataggcgtgtttaatgcaacaaatctgtctgatattgatgtggttttatttcaaataggcgttaacgacatccaaaggcaatcaggtagggaattgctacgtgataatgtaagacaaatgatggtaaaagccaacgacctcggaatcccgtgcatagtttctcttccaactcaattttataccagagatcaaagtgtaacgttaacaggagtacaggggtatgggcaaccatcagctaattatgagaagggcgccatatacagggcaatacttgcaaatgacgttactcgtcttaattttgagatcggtcagccactaaatgcaataaatacaggttctcttgatgatatggggccagttgttgctgaatatttaatgacaaatcaagatcccatggttatggataatattcaccctacatcatacggcagaatgttattgggtttgtctaatgctagagctatagcatcgcatatgtttggtaaaagaaccgatcctgttattaataatcaaatgcctgaatcatggggaaaaaatagctggtctgtaaatttggcaactagtgcgtcagtgacatcataccctgatggtaaaatagctctaagtggagttatatccaatactggctcaggaattacagaaaatggcaccatagtttgccatctgccgctaagcatctctccaaccaagagaatggtatttgcagtagcaaaagtagatgaaaaaggagaccctatagggcaaggtaacattgttatagataataatggtgaaattaagatttatggtttctcgactggaaatatctgccttgatggtgtaatttattag

SEQ ID NO: 286555 - DNA, 489 bp, Morganella morganii
gtgttgaatatagcaggggagtttgtagaaggaataaactatctgtctgttgatgacattatcaatatcaacagagcgctgatagaactgcaaacccccagcgaaccaatagaagtcctcaatttcaataatctaagttcatctcaggcaaggccaaatcaggtaagatattatcagcaaacagacgacatgtttgttctttcctctgttttaatcgaaagcctgatacgaaatcacccgttcgcgaatgcaaataaacgtacagctatgatggctggctatgtcttcctgctgctcaatggttatgagcttacagcgccagaagatgaagttgttgaaatggctaccgggctggcaacaaaagaatattcagttgatgagctggatagctggctgtgcttctggtcgaggcctttcgattcaaggcaattatgcacgagcaaaataagcattgaatgctgctctatttttgagataaagcaagattaa

SEQ ID NO: 286556 - DNA, 180 bp, Morganella morganii
atgggtcacgcactgcaaaagcctaaccgcttaaatatacctgctcgtgacaaaagtaaaatcgcggcacctagtgcagccatgagcgagcagtgtactcacgaaaatcaggtcaaaaatgcatttgacttcggtttcgctcgctatgaaaaagccatggaaaaattagctaaggtgtag

SEQ ID NO: 286557 - DNA, 441 bp, Morganella morganii
atggcggcgaaaatcagaggtatcgcagaggtaagcgctaatatcaatgcactggtcggcaatatcaccggtcgcaaagttacccgtgcaatacaggcggcgatgctgattggtggcgctcaggccacgctgtttacgcctatcgacacatcaacgcttatcaactctcagttccgtgaaatcacagtcagcggcaccaggttaacggggaaggttgggtactctgcaaaatatgccatgtatgttcatagcgcatcaggaaaactgaaaggccagccacgagctgatttcggtgtcaccagggcaggggttgcctttggcggcggtacaggaaccggaaaatactgggaccctaacgctaagccaggattcctgaaagcaggctttgaagagtctcgtcagcagattgaggcggcaatggagcgggaaatgaagatatga

SEQ ID NO: 286558 - DNA, 159 bp, Morganella morganii
atgttttttgggttatttattattgccgcggggataatctccttacttgaaaactttggcgttattgcgggtgatgttaagtggggacttcctctcgccattatctgttttggcgcaagtattgtttatgacgcagtcaaaggtaagaaaaaagattaa

SEQ ID NO: 286559 - DNA, 450 bp, Morganella morganii
atgagcaccgcaacaaagatatggctcggcgtttgcggaatactgactgtcagtctgctgcttatcctgcatctgtatggtggtctgaaggataactatcagttgctgtcctctcagtttgctgagcaggtcgccatcaacaaagactacaaatcccgcattcagtcacttcacgaactggacaccatgtacacgcaggagttaaccaatgccaaaactgaaattgatagcctgcgtgatgctgttaagtctggcactaagcgggtgtacatcaaagccgagtgtccaaagtccggagccgataccgccgaaagcggaagcaatgaagcctccccacgacttagtgaagcaactgaacaggattattggcgtctcagagaaatgatggctgagaacgaaaagcagaccctgtatttgcaggactacataaagactcagtgtctgaaatga

SEQ ID NO: 286560 - DNA, 570 bp, Morganella morganii
atgactaaattaactgtcatcagtaacgctttgcctgcggaagggcaaccaacaatgaccagtctggaaatggtcgattacatcaatgctgaccgcaaggcgaaagctgaagcagaaggcctgaagtttccatgtcagaaatatcgcaagttacagcataaggatttcttgcggaaagcgcctaaggttttgggtgaaaatcaatcagcgaaattttacgccgattacgtcgacagcaaagggcggtcatatccatgcctgaggtttcctaagcgtgaggcctgcctgatggctatgagctacagttacgagttgcaggctcaggtattcgaccacatgacggagttggaggctgaatccggttttggatttaccatacagcagttacaccatatgctcgttcttgcgagaaaagcatctgatgaggactcgtctgacgctggccgccggttgaagaaaagacagcgtgatttggtgatattagaccgtgcagaaaagatgattgaggatattgggcagatggcgcttggtctcgttggtggcggaaagctaatcacccgcaggaactga

SEQ ID NO: 286561 - DNA, 201 bp, Morganella morganii
atgggtgaggaaatgaaaaacacaggacgcgtcgctttccgttttacggtgccagacgacattgatatcaccagtattgttgagcgcattaacggtgagatgtttggcaagccgattaacgaagaaacaagacaggaagcgcaagacttggccgttaagtacgtgactgagatgattgccgtaaaaaccgtcattttataa

SEQ ID NO: 286562 - DNA, 399 bp, Morganella morganii
atggcgactaaaacaaaaatgggtcgcccaagtaaatttgcagagagtttagttaaagcaaaagaatacttaatgggcggatatgaaacggttggtgatgtcgtgccaagtgtggctggtctggcctgttatttaggcgtgtcacgtaagaccgtttatgaatgggtaaaagaaagcaccgacttaagtgacacgttagaaggtattttggcaatgcaagaaaacaaactcatcaacaaggggcttaacggtgatttcaacccaacaatcacaaaactaatgctggctaatcacggctattccgataagcaggaaatagaccaccaatcatctaacgggtcgatgacgccgaagccaacaacaatccagcttgtaccggtggagcctgacaatgaatga

SEQ ID NO: 286563 - DNA, 1230 bp, Morganella morganii
atgaatgacactgtgcagcttcagattcccgcaaaactggccccgctatttaccgcaatagataagcgataccggtgctcacacggcgggcgaggcagcgcaaagactaggacattcgcactgatgacagcggttaaggcgtatcaggccgcgaacaacggagagtcgggagtaatactgtgcgcccgtgagtttatgaactcactggaagaatcgtcaatggaggaagtgaaacaggcgattcgttctgtaccgtggctggcggctaacttcgatattggtgagaaatatatccgcacccttgatcgcaatgtcagctacgtattctgcggtctgcgtcacaaccttgacagtattaaatcaaaagcccgcattttactctgctgggtcgatgaggctgaaactgtaagtgaagcagcatggcaaaagcttgaccctactgtgcgtgaaagcggctcggaaatatgggtgacgtggaacccggagaaagacggtagcgccaccgataagcgattcaggaaacagcctgataatgacacgatagttgtcgagatgaactacaccgataacccgtggtttcctgacgtactggaaaaggtcaggctcagagacaaaaagaatcttgatgaccaaacttacgcatggatttgggaaggcgcttacctcgaaaactcagacaaacaggtactggcgaataaatacgtcgtacagtcatttcctgatgatttgtggaagaaagccgacagattactgttcggtgctgacttcggctttgcgaaagacccgaacacattgattcgccagttcatcctggatgattgcctgcatatcgagtacgaggcatacggcattggcgtagaactcgaccacatgccggcgttttacgacaagataccggaagcgaggaagtggcctattaaagctgactcagcgcgtccggaaacaatcagctacctccgtcgtcagggattcaatatctccgctgccaaaaagtggcagggtagcgtagaggacggaatcacattcctgcgcggatttaagcagatcatcattcatccccgctgcaaagagacagcaaaagaagcccgtctttactcgtacaaaacagaccggattaccggcgaggttctgccggtgattgctgacgctcataaccattgctgggatgcgtcacgatacggactggatgggtatatcaaggggcgaacaacagtctgggacatcatgtaa

SEQ ID NO: 286564 - DNA, 573 bp, Morganella morganii
atgattaaaaactccggtaacttcagtggcgcgggtctcaaagcattagaggcccgtatccgcgaattgggtaagaaaaaagtagtggtcggcgtaccggcagcaaccgactctcttcgtgatgacgcattgagcaatgtcactatcgccgcagcgcatgagttcggggcaacaatcaaccaccctggcggtactcggtacgataaaaacgctgacggaaaagcaaaattcgtcagtcattcttttatgggcccggtacgcggggtcaccagtgcgcacaaaatcgttattcctgagcgttcattcctgcggtcaacactgaatgaaaataaggataaggcgacgaagctgttaattcgtgagttgaaaggcgatatctcacagggtgatttttcaggcagggcatttgctattgtcggcgagaatttatccggcgaggttaagcggaaaattcagtccggtattgagcctgcgcttgatcctgaaacggtgaggcggaaagggtcatcaaaaccgcttatcgataccggcaacctgcttcagtctataacctacgaggtacgcgataaatga

SEQ ID NO: 286565 - DNA, 339 bp, Morganella morganii
atgatggataactttgctgaaggtatcttttccgatccgttcttcgcgcaggagcgtgagtttgaatccgaatccggtggaaaacgtacgctgacctgtattgttcagccagccagcaccaccgacctgcaaatcctgccggagggcgaccgctataacccgacagtccgcgtgatgacgcaggagccgattgcgccgaaggatctgttttactggaataaccaccgctggcgcatcatcgacaaatcaccgtggaacgattatggctattacgacactctcgcgactcgatatgaaggcagtcagacgggtgatagcgaaggtttcccaattacctga

SEQ ID NO: 286566 - DNA, 396 bp, Morganella morganii
atggaaatcgacggcatcacctacgaacaccgtgacgcgaactttatcgccgcaaaaactgttggtatgaaactcatgcagttgctgaaaggcaatatcacactggccggcagcgaagtgaatatcgatattggcggcgcactggcgaatatcggcactcctgagttttcggatgtcgaaaagtttgttctgaagtttgtgacagtgaccgatgaatccggcgcggttgttcatatcgatcagcctgacgtatttaacgcccactttaacaagcacaaatcccattacttccaactggttatcgacggactgaaattccactttgccggttttttgcccgctggcctcgcatccaaagtaaatacgctggacttggacaatctgaatctggtgtag

SEQ ID NO: 286567 - DNA, 1698 bp, Morganella morganii
atggagatagaggaacttctggtcgccatcggtattgatacctcacaggcggcaaagatacaggaggtcgtcgttgccctcggagctgctgcggttgcgatggctaacgaggccaacaaaataaacggtgacctggacaccattggcgaaagtgcggcgcagggggcggaggaggctggtaaaaaggccgaagaagccgggcgcagtatgagcaaactgaagatgatcgccgtcggggtcggcgcggttatcggctttgtctccggtaaggtgctgggctttctcgacagcgcgattgccggggcggagaacctgtcaaaagagaaagggctgttgttcgatatctcgaagcaggagctacagcaggctgacgagtatcaggaggccatgaagaagacagggctgtcgattgagtcgataaagacaaagatagcccttaacctggtgccgcagctgactgctatcacgcagaagtttaacgactggctcggtgccaacaaagaactgatagccgcggggctgacgaaagtcatccagtgggcggggagatttttcagagtaataattaataccggaagggcaatatggaaggttattgacagcacgataggctggagaggtgcccttatcctgcttgcggccgcatttgcgatactgaatcggtcgatgctcatgagcccaataacatgggttatagctgccattgtcgggctgatgcttgtcatcgacgatttgatgggttacctggacggcaaagaatcgctgttcggtgaattctggggtgcgtgtatcggctggattaaggatgtcattgcctggtggaatgagttctacacaaacaataaagagataattgatggcataaccggcgcttttgtgacaatggttgacagtattatctcagtattttctggcctgttcagttactttaaaaatgtgctgaaactcatccttggaatatttaccggcgacactgatctgatgtcagaagcatggtcagggatggccgaggatgcaatgaaagtttttgatgggctaattcagttcttctctggcttttttgatcttcttggttctttgtgggcgggtctgttaaaaacagtctcaaaggtgtggtcatctatcatgcgcgtaatcaggcgtgtgtttgactggattaaaaacggcgttaaaactgctgttaatgcggttaaaaccaccttcctcgctgtcgttgattttatcgccgcaccattccgtaacggctggaacttggttaaaaagctgttcgatatctggggtaatgattcttcatcgttcacagacaaaatcaaagagacctttgaagctgtcgtgaaatttgtctctgaaccgtttgaaaaggcatttaaggccattgaaaaggcatttgatgcggtaatgaactggatcaggaacggtctggatgaaatcgaaaactcagagctgatgaagaaaatcagggaaaatccggagctgtcgatgaccggcgggatcaggagaatggatttcggtatgccacctcctaaatccgttgttaacggaggaaaccagaactcagcaacttacaatgtggatgtgaagcagaccattaataccaatgatgcagtgaaagccgccggattggcagttgatggattaaccaaggagctacaaaagacggctcgcaacacagaaacaacatttgcgagtggtatatag

SEQ ID NO: 286568 - DNA, 336 bp, Morganella morganii
atgacaatgaaatattgttctgtctgtgaaaaaaacgttgatgccaaaagaaaaattggtataggtagccttattgctgttatttttaccggcttcatttggcttcttgtgcttccgttttatagcaaacgctgcccgatttgccaaaattcaaacctttccgccccgaaatcgtcggctgagttaaaatcaatacggcaggaaaatgcgcctcctgctcaagtgatccatgcagcagacccgatatcgcaacttgaaaaactggcaaaactgagatcgtccggcgctttaactgacgacgagtacgaaacacagaagaaaaagattttgggataa

SEQ ID NO: 286569 - DNA, 246 bp, Morganella morganii
atgggtaaattatttcgaaccatgattaaagcgatcctccggcctgagagagtagtcgtaaaggcattttgcccaaatggccagaaagaacaaccagaggctaacaccactgataagtttttcgtggataaaaatggggcaatttctctaaatccaaatagtgttattgttaaagaagcgattgaaaacaacattaacttactgaaaaacgtacacgggaaaacaagtaagtgtgggcagcagtaa

SEQ ID NO: 286570 - DNA, 489 bp, Morganella morganii
atgaccattcttatttctgttggtaatactgtagaagctcaaaaaaataaccgctctcccgctaagagaattgaggggtttcgtgagattgcaaaagacaatgccatcgaaggaataattctggaatctcttgataaagtccaagacggattattactcctagttactttaaaatcacgtaaagtttatgctgggatggttgacgctgccagatttgagggaatggatacaaattctctggtgctgataccatttatgtcagggtatagagataaagatactctatcatttaaggttgagcataactatacttcacactacgccaaagaaaacatcacgtttgactcagaaccgctttcgttgtatcagtttagacatgttcttccttatgatcagatagaatctttctccttgtttaatgtgaatacgtatattaaatttcagcaagtgcctgatgactatgagtcacaagatgagatagaacagtaa

SEQ ID NO: 286571 - DNA, 780 bp, Morganella morganii
atgttctcagcggaatggttccgggaaaacttacccaagtacaaagaccttgcttggaacaatcctaccgttgaaaacgtcaggacgtttctctacttgcaacgatttgcgatagatcgctctgaacagttttcagatgctacagagctggcggttgtgggtgatccgttcctggatgaaattactcgacgtcctgcggccacgtttgcctcacaacaggttgatcgtgacgctggtaacgccaaaaacaagctgctcaagagcgtagccgaccgcgtagggatatttttcttttacaagtccgatgatgactacagtgacttgcaagcaccgctcatcaagatgttggaacaaggagaaggattctcgatcattcctgtatctatggacggcaaaccactctccagtgggcttttcccacattacaaaaccgatgaaggccatgccaaacaacttggtatcgtaactttccctgctgtttacctcgcatctccagacggtcagttcgctcctataggacaagggccaatgtctcttcctgagctgaatcacaggattttggtcgcagcaaaacgcaatggttgggtcacagacgaagagtttaaccgtacacgtccggtactcaacctagaaaacaacatagccgaacgcttggcctcaccagagctgggctctgacctcaaacagctatctcaagcgagcggtgataaagacaactttgtgccaccggaacaactctgttgtggtcaagtttttttggacacgccgatcagatggtag

SEQ ID NO: 286572 - DNA, 1512 bp, Morganella morganii
atgaaacaacttcctcctgacacaccagaacaatcactgatcactcagtacaaagggcctcgccttgtcgttaaggcctacgctggaacgggtaaaaccacgacactggtgaagtacgcccacaacaacctcgattcacgtatcctctacttggcatacaaccgggctatccgcgatgaggcaagagaaaagtttcctgcaaacgtagactgcaaaacgtcccaccagcttgcctacgcaactataggacggggctaccagcacaaactctccggcaacctaaggctcaccgatattgcccaagcggtgaataccaagaactggacgtttgccaaagatattctcgatacgctcaacgcctttatgtgcagtgcagacatgcggattctttatacgcattttgctcgcgccgatacgggtaaagtgcttacgtccaaacaggagagataccaaatccaggtggtcgaaggtgctgagctcatatggaaacggatgacaaacgttcaagatccgttcccgaccgtacacgactgctacctcaaacagtatcagctcgggatgccgaatctgtctcgccggtacaccaccattctttttgatgaggcacaagacgctaaccccgtaacaagtagcatcgtcctacagcagaactgcaaggtaatcctggttggagatcgccaccagcagatctataggttcagaggcgcaaacaacgcccttgatagcaaagagctcatgaacgccgaccaactctatctcactcatagcttccgctttggccctaacgtttccctggtggcaaacgcccttcttgaactcaaaggtgaaacacgacctgttgttggccgggggccagcagatcaggtagtcatgtttttaccaggtgatgtgggccatcgcgcaatacttcaccgaaccgtcatgggggttatagagaccgcgctctctgcgaccgaatccggagcgcaggttttctgggtcggtggaatcgacgcttaccagatcaatgagctccaggatttgtactggttttcgatggcagagccagaccgggtaaagaataagaaactgcttgatgagtatgaagactacttcgagtatcaagaagtagcgaaggcgaccaaagaccctgagatgatgagggctgtcaagatcatcaacagctacgatgaaatccctgaacgactcaccactctacgacgcaatacagtcaaagaagagtttggggctgacattacggtctcaacagctcatcggtgcaaagggttggagtgggactttgttcagctctatgacgactttccggatgtcctggacccagagctcgacccaatggcccgtgacgatgaaataaacctgctctacgttgcatccaccagagcgatgcgaatccttgcgttgaacagcgctgtcgagatggttatccgctacatcacccaaaaacgcatggtcgagaagcagatgaagatggccgcagaagcgacagaagttgaagaggacacgaccaaatag

SEQ ID NO: 286573 - DNA, 279 bp, Morganella morganii
atggcgcgaaaggctaaatattcagaagagtggcgacacagagctgcggctcttcaaaccaagattgaggaggctatgacactagccgcctcatctattggcgactatcgctggttacaccgtctccatagttgggttacagaggtggctcaaggtaaagccccagactggtggacagatctggattgtgaagtatccctcccccgagaagaaaagcggatcagcacgttcctctcgacacaaaagaagcgcatcactctccagatgtgtttgtcgtag

SEQ ID NO: 286574 - DNA, 1041 bp, Morganella morganii
atggcaagaaaattggttgagtttgacgatgtagctgctgcggcccaaaagctcaaggacgccggtaaacgcccaacggtcatcgctatcagagacatcattggcaaggggagctttaccaccatttcaacgtatctcaaacagtggtcagaggaacactccctcgatgatgagccggtagaggtagtccttccagaatcggttatgagtgatgctgagctcttcctacagaagatctatacggtagccaaagcaagcgccgatgagcagcttgagcgcgaacgtgaactgctacgacagaaagagcttgagtaccaggaagatatgcagcaagccgtggacatggcaaatgatgccaccgaacgggctgaactactggaagaacaacttgaagctctcaccaacaaaaaaacagagctcgatgcggcccttggtaaggcagaaaactcgctatccctcaagtctgcggagctagaacgctcactggctgacattgataagttggaaaagcggatcgttgagttggaaggcaagctggaggcgaaagccgcagatctgacccgagcacaggatcacctggagcaagctgaaagcgaaaatcgctctttgagccaaaaattggcaactacagagggtgagttggaggtgcaaaaaggcaagagtatagagcagacagaaaagctccgagccgctcaggaacaaaatacatcgttgaaagagcagctcgaaaatgtacaggccaaactggcccaatcacaggactcccttgccacagccaaagctcatggcgaatccgctgaacgagagtgccagcgcctatctggagaggtagaaaagctggacgccaaattatccagcgccgaagcagaagctcgcgctcttgttcaagacaaaggcatgatggctggtcagttgcaggaaaaagaccagcaggccaagagcctcgaacaaagactcaatgatgcactgaccaaaatttctgggttggagcaagagctcgttaaagctggtaagggagggaaaaagaaagaggaaaactga

SEQ ID NO: 286575 - DNA, 876 bp, Morganella morganii
atggctaaaaacttcatatcggaacaattctcggacatgtgccgcgacttaacgaacctgtcctcccttataaaacgactaccgccacggtacgcaaaagttgcggccatccctcctaccagaaaaggaatggagaacgagcccgtcaacaagattgtcgtaactgaacaaactggccgcgaagctcttgagctggcagcgcacagctacagagatcttcacatcaacccagactattcgcagaagtcagccaggcgcaccgtgggggtgctctggttctccccttccaggattggtgtagctgacgaaattgcggcgacggttgaacgcatcaacgcggccaaagctggtatcgaggagttcattatctcgacgtaccccaccaggcaagagaggtttgaagcacttcgagcggactgccctggcgtcatgactctccacctgtacagacaaattcggtgctattccaatggcgacatcgactctatccgcttcacctggcaacggaaggactccttgaaaaagccggtaaaagaggagcttttgcaacgcatcagagaggagctggagcgatctgggccagactatcaacttcccctagagcagcttatccagaagatcgccagcaccccggagccttatctccgggaacgaagggaagtaaaggttcagccggtggcaaacgtcatggccgcaggggtacttaaaaccgttaccgcgccaatgcccctgatcgtgctccaggacaaggaggttcagctcaaattgcttcgtagctttgactcctcggaacaacgcaaaacccgatctgataaagccgcatcggaaatccttggcaccttcggtggagtcactatcgaatccttccctggatga

SEQ ID NO: 286576 - DNA, 1152 bp, Morganella morganii
ttggctgctagcttttccgtaaaaatactcttgctcatatggggtagtattatatcaagcgcaatggctgccggcatgcttactgatacatcaataagcagcttattgttagccactttaatgtcaggaagcttaagctctgttagtgttttggctattctctctcctcttggaagactggttgaaagagccaggaatatttccaataacccattaagtcaatccctctacactgggcgcaccgatgagtttggccaaatagagtttgctttacgaatgatgcaagctgaaacaggcgccatagtaggtcgcataggtgatgcatcaaatcggcttagcgaacacacccgaggcctactaaaggatattgagtcaagcaatgtacttacagttgagcagcaggcagagacagatcaaatagcaacggcagtaaaccaaatggtggcaagcattcaagaggttgcgagcaatgcacagcatgctgcagatgcggccggaagagcagacactgagacggcatctggccagcgtctggtagcccacacaagccagtcaatcactgcccttgaaggtgaaattaggcaagccgctcaggttattcatgagcttgaaggtcaaagtaacgagatatcaaaagttcttgacgttatacgagggatcgccgagcaaacgaatttgttggcactcaacgcagcaattgaggccgcgcgtgctggtgagcaggggcgtggttttgctgttgtcgccgatgaggttcgcagtcttgctgctcgcacacagcaatcgacaacggatattcaaagcatgatcagcgctctacaagagcgagcgcaatccgctgttacagtcatggagcaaagtagtcggcaagcgcacacgagtgtagctcacgcagaggaagcagctacagctcttgatggaattggccaacgcgttaacgaaattaccgacatgaacgcgcaaatagcgactgcggtcgagcagcagggagcagtaagtgaagacataaaccgcagtattatcaatatacgcgatgctgctgataccaatgtacagaccgggcagaataatttgcaaagtgcgaaatctgtcgctcagttaactagcgctctgagcgaactggcaaaacagttttgggaaaaacgaggataa

SEQ ID NO: 286577 - DNA, 378 bp, Morganella morganii; identical to SEQ ID NO: 146978

SEQ ID NO: 286578 - DNA, 276 bp, Morganella morganii; identical to SEQ ID NO: 5786

SEQ ID NO: 286579 - DNA, 876 bp, Morganella morganii; identical to SEQ ID NO: 8102

SEQ ID NO: 286580 - DNA, 495 bp, Morganella morganii
atggataatgttccctatggtggctctgtggttgctgatgcttacctagatgagcccgagataccgacagttcctaatgtagctattgtccgcgcatctgacggtaaatcatggctgcatgttccggattatcgtggtttcgtggcgtatggcaaagaaacaaagcaacagactgaaatcacagagctgggtgaactgcctgataatctgacactggacgcacctgaaaccccgtttgataaatggaacggcaaaaaatgggtgaccgataaagccgagcaacaggcgcatgaggttgccgttgctgaaagtcagaaacaatcattattggcagaagctgaacaggaaattgccatgctggagcgtaaaatacgcctaggaatggcaactgatgaagacaaagcaaaattgaatgagtgggaaatttacagcgtgaaaatgtcgaatgtcgatacatccaccgcaccagatatcacctggccggttaagccttaa

SEQ ID NO: 286581 - DNA, 255 bp, Morganella morganii
atgtataaagttgatatgctgactaatagtttgcactccttacaggaggtctctttctgtagcctcggttttaccgaacgtggcaatctgcaggaatggctggcacaaaatcctcaagcgttaactcgcgataatgatgatgaattactgattatacagagagagttcgccggctttgacgatactaaaaagcgcctcgacctgctgggtatcgataaaaaaggtaaacgacattttagctatctgcttcattag

SEQ ID NO: 286582 - DNA, 1236 bp, Morganella morganii
atgagcactagagccgtcacgaacgacaatcatttaacagaatctcacgaagcgggattccgtttctatgagttttttgcgggcggcggtatggccagggctgggctgggaaaacagtggcaatgcctgttcgctaatgatatggatccgataaaagcatcgacatacatcgacaactggggcgacgaacatttcgacatacgcgatgtacgagaaatcacccctgatgatctgccgcgccacgctgatttaagctgggcctcgttcccctgtcaggatttatcgctggccggcaatggcctggggatcggcgaaaaagattccagtgcggataaaaccacgcgttccggcgcggtatggccgttcctcgatttaattggcaggctcggcgaggaaaaccgtaagccaccgattcttgttcttgaaaatgttcttgggttgctgacgctggatcaagggagccatttcgccgcgatatgccatcagttaagtaaaacgggctaccgctatggcgcaataatcattgatgcaaagcactttcttccacaatccaggccccgcgtctttctcgtggcgattactcgccatatttccattcccgaatatttggtttcagaagaaccgttgtcgcaatggcattcaccgtcacttcttcgcgcctgcgatgcgctagcggaagatgctcgtaacgactggatttggtggtctccaggcaatacgcccgacgccagaatgaaagaactgggcgacttaatcgattttgaagacaaaaacgtgttatggcactctgccgatgaaacacaacggcttatcagtatgatggcaccggcgaacctggagcgtcttgcaaaagcgcaggcatccggcgagacaataacaggcagcctttatttacgcatgcgtaatgaaaaaggtatcaacagacaacggaccgaaattacgttctcggccgttcttggttgtctgagaacaccgaaaggcggcgcttctcgtcctcgcattatcgttgtcaagggcaatcaggtgaaaacgcgtttgttgtcggtcaaagaagcggcggcgttaatggggttaccggatgattttattctcccagcagcgtatcagccggcatttaaagtgattggcgatggacttgcagttccttctgttcgttttctggccgaacgtattctggatccactggcgatgaccgttcaaaacaatacccacaggacggaggatatacacgaatga

SEQ ID NO: 286583 - DNA, 2565 bp, Morganella morganii
atgaactggacgtcgcctgttacgcccgatggctgggaaagtacactgattgattattttctccggttcggcaccgacggcgacggcgacgcgcaggatattcgctggtttgaagttacgccggcgacactcgctgaggcattctccgacagcggcgttagcgcagatgaaatagaagaagcatttcgaacctgtatgtcgaaaataagggatctgccgcagcgcctggaaagcggcatgatggaaaagtcgactcgtcgatcgccaggatattttacttatcttgtcatgacgctgcttatcagcagtcaattcgacgcgcaggacgaacgcaatgattttcgcctgaaactacagagctggctgcaggttactcatagttttcaaaatttatccggcatcaacaagatgtgggaggcattggacgaatggcttaggcaacgtattcaggaaggcgaaccctacagacgtcttatcttgccgccacgggatggctgggtccagattggtcacaccctgcgactggcattcccgaataaagccgatctacgcctgatgagcgaatgtcttgaaagctatccacaagctgccgctaatccacgccagttaattgaatactttcaaatcgttattcagaggcaaggcgtttctcatgcgctgaaggaggcttttgccgaattcagagacgcgtggttgttagggcgtcgcgcgctgtccgatatgcctttctggcgcctgcgccaacgagcagttcagatatcgtcctgtgtaacaccgcatcagaccatcattgatatgtacgtcgacttcgatggttcgcggtgctatttcagcgtcgcaggcaatagcggcgaaagcgtttttcatcctacattacccgaagttcttattgcccgtgacgccgagagcagcgaaaatctggggaaggcgacgcaggttggcctactctttttttacgagatcggacacgggcgctggagagctaaatcgtcacccaacgtagactcgcaacggtttcatatcgctttatccagtaaacattctatacagatgagtaagcgtctcaatggatatattgctgagggcgagtggattttaacgacgcagccgctgaacagggtttcagcggtggatttattccgcttaatacgatcctcttcagctattcagaatgatgacgttacacgccctcagctatatggaggaattcgtgtccctggcggatggctgggattaccggcatttttaccttctattgattcagatacgcaatgctacaaaatatattcatccgggaatgatgaagcaggaaccaatgtttctgtaatagatggtcgtttgacttcttctgtgccgtttaatggtgaacttttcattgagccagcccttaaggcgagtgaaaaaacaccgccgtggcggcgtcgcgcgcgctttttcacccgcgccgtaccgcacccgactttaggtgaaagcgcaaaataccggtttgagccgctttacgattggttgacgtcttcactaaagacaccgacgtttaatttcgaaggactgtttgagtgggaagatagcgaagcatgttgcgatcaccttctcgaagcgatttacgcgagcggagccagcggctgggaagaagccgagttaatcgagcttctcaggtatgtggccgacgatatcaacgtatggcatttgattcgttgtttacatcatgcaggtctaatcgagccacgcctgcgtcctggatggaaaggtcgggtatggacgctggttaaaccttcattacttcatattcgcaatggagaaaattctctggttgttgtggaaggcgcggtctgcgccagtctgatggatgattttcaaaaagcggtcaccggactgagcggagaaagtttccgccgtcgcggcataagcctctggtcgcctcctgtatttggggctgtactcgctaatcctgttacgttatcccggcgtttgggatggccgcttatcgaagcctcatcgtcatccggtacaacaccgctttcactggtcacgacggaacgcaccgctgaactacacgagccagcggcggtctggaactggcattcaggaagatttcagcagcatggttctctggataaagaatctgcgtcgctgtcacttcatattcatctaggtgggcgagatcatgatatttatcgggtcgtttccggacgaaaaacgacgcaatatctttcccgaactgccgctatcattgctgctggcgcgaaaaaccgggcccccatatttgaactcatcgccaaaaatcatcttctatgtcttgtcactgattgcggcctgcccgacgcgctggctacggggatacggcgtcatacactcagaaacggaggtccaacggattctggttatgtttatcctgtcgatgacgcctctttcctctggctgagaacgatgcttccgggatgtttctattctctcgcgccggacggtgagagggatgcaagtaatctggtttcctccgcttgccattccggcgggaaaatacgtctgacatggcgagacggtcgactcacgctggatctgagataa

SEQ ID NO: 286584 - DNA, 2088 bp, Morganella morganii
atgagcgaaattccctggtatcttggtcaatatgaccgcagaaattatcagtcctacctcaaagccgttgcgcaggaaaccccgaatggctggcgtacaatcgactcaaagaagttattccctcgtacgggagaagttgaatttaacgatgctgacgaattgaggcttcgtaaaggcgaatgggccgcttttcaggtggggcccggcacccgcagcaaggcgctggcaaaacgctcccgtcgtatttatccctattacgatttatctttcgggcagtcgctattggaagtacgtcgtcggttgagtttcgagggcataacggtagacggcgaaccaggggtatgggctatccgcttcgggtctgatgcgcttattctggctaatctggcggaatcgaaatcaggcagccttatcctgttcagaaaccagaacgtttacgaatatgatttcaacgaaaacagcgtaattatcgtatccggcatgtctgagagcgaaaaagcgttttatatgcccgatgtcgatgcttcgcctgctcagatccatgactggacgccggataagcagtacattgaaaacgtcattcagcgtttttcctgcgctgactcaacagcaatggtcgctggatggcttcgggaacatgccgacgaacaaaccggaaaactaaccttcggcatcaacaacatgctgactgccgctcagacactcaggtcaggagagttggcgaagaagttggaggaggaggattcactggcccgtcagttcgctgaagcggtattgaaggaccataatatcgctgacctgctcgaacgtcagatacaaagcatcgcggaagaagagcgagccgcgctgcgtacagaacaacacaaggtgctcgataaagagttttctgctgaacgcctgcaacgtcgtgaagctattgaagtggaaatggccacttttgagaagacaaggaaaagcgagctcgaagagcagattgcacaattacggcagcttgaagaagaaaaattacagattgattttgcagaaaagcaagcggatatagaacaaacgctcaaacaggaaaaagcgtatctcgaaagcgaattaagccgtttgaaagacgccaacgctgatttatgcgctcagaacgaaaaccagcgtcagatactggcttccctgtcctgcgagcgtgaagcgtttttggcgtctttaacggatgccgaggaacgtaccgctcaggcgcaaattgaactcgaaaaaatggatatcgctattgctgaaaaagcgcgccgcatggcttactctgcgatccccgaagttcgcctcccagtgcaagcgagagtcgtatcctgcgaagaattcggtcattccgttagagagaacaagttgctgacacccgacggaaagatactcatgacgcaatttctggcattgatgttggccggtgagtgtccgttgctatatggcccggaaacacaagacttccttgctattgccgaatcgctgatttcttcaggccgttccatccgactagttgccgatccaacgatgatttcctgcgaggatctttgggttcgcgcaggaaatcatctggcgacaccgctttaccagggattattactgagcggagcctctagtccccgaacgattctctccgtcattgagcgtgtcgaatgctctgctgcgcgtttctggttgccggcgctgaaagaccgtttgcgtgacggtgatttgccccgacgctttctgatttgcggtactattgaagatgaagattgcgaagaagcggaaaaagctaaagagcagcatcttcgtctacggatggaaaacgttatcattcaaaatgcaattgcgctgtctcccctgcatctttccctagaaagtcatagcgagctggctcccggcgaggcatcgcatggtgagataccggacaaactcgcgatcgcggctgatatgtcagctgggcgtctaaatctggcaaacacgctacaggcaatgagaacggcgcatgaagccgcgccgctctgcgatgataacaaagtgatgcatcagaagcggttagtcgatttatacgccgacttacagaataacgagctatgcgctcaatag

SEQ ID NO: 286585 - DNA, 5838 bp, Morganella morganii
atgttagatcccattggcggttttcgccgtatccaagacttcttcatttcatacatagaaactaacttccgaattgccgacccttcagtcgcgatttcaagacgcaatcttctaaatagtagcggtgaattcgctgcggaaccctatatagaacccgttttacggtatgagtcgtcgggtaaaatgcttgaagatctggtcgatatagacggcgggccgctgaatagcctgtctcctgaaggccgaaaggcgtttgtcgaattggcgttatccggtctgttcgattcgcgccctggcgacgcaaactggccgcgtcgttcagtccatgcgccttatagccaccagactcaaatgttggaacgcggtctgcgtcccggctgtcctggcatagtgacgtcgggtacaggttcgggaaaaacggaaagttttatgttgcctattctggctgcattatcaaatgaggctgtcaactggaacaggcctgacagcagctacctacaaaatcgatggtggcatggtgcagaaaagaactgggtttctcgtcgcgaaggtgaaaaacgcccggcggcggtcagagcgctggtgctctatccaatgaacgcactggttgaagatcaaatggcgcgtttacgtaaaacgctggattccgatgatgcgcgacaggtgatggaggatcgcttcaccggaaaccggatcttcttcgggcaatataccagcgctacgccggttaccggctacgccagccatccccgtctttccaacaccagttcagaaaaaagccgtcgcgtccgtaatcttgaaaaattacgtaaggcgttgaacagaattgatagcgatcaacaggctgcgtgcgcattcgacgaaaaagaaaaaccttcggaaaagacccggtatatattcccttctacagacggcggggagatggtttctcgctgggatatgcaggcaaccccacctgatgttctcgttaccaacgcctcaatgctgggagcaatgctttcgcgcgaagtcgaagacgatatttttagcgctacgcgcgactggctgatgaacaatgacgacgcgtacttctatctggtattcgacgaattgcacttaatgcgcggttcagctggcacggaaaccgccatgttgattaaatcgttgattatccggctcgggctggacgacccgaaacaccgctacaaattgcgtttactagcgtcttccgcatcgctgccgatggatggtgcggatggagagcaatcacggaaatacctgcgcgatctctttgcgcccttcggcacttgctgcgatgctttggatcccggcagcgataagccggatttctggcataactgcgtcattcagggaaaacctttcatccctttgaagccgtcaggaaaaatccccgtgcagccttttgccgcattaatgcgcgccgcccttacagagcagggcaatgtcgtacgcaatttgaatatgacggacgctctgaatcaggcgttacttgatgtattccaagctcttggcgtaaaagagcagaatgtcatgcagggcataaaacaagcggcggaaatcgccgccgcgttattgacgaacgcctgtattgaaaaagacggcgaaatgccgcgggcgatgccgcctggacttatcatcgataaagtttttctgaaggaagagctgggtaaaccggatgagtcagaactggcgttacgcggattaatgctggcgcgcgcgctgccggagtccgggattgattgcgataaaccggtcaacgttacgccagcctttcgcgtgcatacattcgtcagaaatattgagggtttcttcgcttccgtatcgccgggagagaaaaaggctaaattcgccgatttttgcttggagcgaggcttatcgcacgcaccatcatcagcctcagacggagaacgaggtcgccgtttattcgaaatgctgtactgcgaagcgtgtggcgacttgttgctcggtggtcagagaggacaagataatgaaggctctactgtagagctgctgccctcggcgaccaatctggaaaaccttcccgaacgaccaggcgcagaatactacgacgatatgacgctggccgaatttgctgttttctggcctaccgaaaggactccggcaaccagtgaaaaagactgggatgtctgggagaaggctgtgctaaaccccgttaccggaattgtaactgtcggacaaggcgcatcggcgacgaatgccgattcggttcacggatatctctatttccagaaaccaaccccgagcaaaaaaggcgaaccggagaaaaaaccttccgcacagcctttttgttgcccgaactgcggtatcgattactccagtcgaccagccagcaatcgttccagaacccccattcgcgcatttcgtacaggtgtgactaaatcctcccagttagtggcaacagagttatttgaattgctgcatgctatcggcgcggaagccaagagtattgttttttccgatagtcgtcaggatgcggcatcgatggcgctggaaatcgaacgattgcacttacgcgatctgcgcagagaaattttggtcgcagccgccagagagatgatccgagaggctgaaagtgagtatatttctgaagattatattgaagaaaaaaagatcaaagccttaacgaacaaagactatgccgaatatgaacggttgcataatctcaaaataaaccaggccggtattgccgatctttgtaggtatagacgggtaaaaatcgataaattactggaatcagaaggcgattccatcggaaaaatatcctccgaactagctgggctgggaatatcgccttacaaatatcgctcaagcgcagatggggatggcagcgatatctggcacgcaaattttataaaagataagaacatcgttaaatatcatgaaaaactttcttcatctgatcgattggatctcaaaaagaaaataattgatactcagtctgaattaattgatgacgtcattttcgccaataccttcttcgcattggaagagacggggttagcgtatccatgtatttcagatagagaggaaacgagtgagcttgatgcttggctaagggtattcgctggtgtttatcgtgtcaaagaaaataaatattttgatcccgaaaactctgtagaatggaatacaggacaaaatgttactaaagagaaaataaagcgtgttgctaaagctttatttggagaaaacaattatctggataatttaacgcaagtcttaaatcagttagctacccgagggcattcagctggtttattcaatatcggcaaattattcctcaaggtagccaaaccaggcgacccctattggcaatgcggcaactgcgagcggatccacttacatctagggtttaagcgttgtactcgttgcacggaactgcttgatatcaaaccccgaggcgtggttgaaatgctatgggaagacaattttcttggcaaacgtatagtgcgcggtgaacgggatggtgttaaacgattccggttgaatgtcgaggagttaacgggacaaacggatgatttctccgatcgattacgcaaattcaagggaattttcgttgatgagatgagtgagctcgaaaaactagatgcggaaatcgatatgcttgccgtcactacgacgatggaggtcgggattgatattggttcgcttcagtcagtttatcaggccaacatgccgccccagcgatttaattatcaacagcgcgtcggtcgcgcaggacgacgcggccaggccttttctttcgtgatcacattttgtcgtgggcgtacacatgatgcttactatttcgctcatcctcatgcgatcacaggagatccaccgccgccaccttttctggcggtagatcacgacgcaattccccaaaggcttttgcgaaaaatctggcttaagagtgcgtttaacgatatacgagaagaatgcaaaaaaaacaaaacgacatatcctggagataagctcgttccgccagatgttcatggtgagtatatttcaacacatgattactatcatgataatgaagctaattgggccaaacttttgtattgcgcgctggaagcaaatcagaacatacgagaacgctttattgaagcagcgacatttgatcctgatcagcgccgacgtctttattctacaattaataccgaaagaataattgaagaaatcgaaaaactaagaccttacgcgcctgacgacaatacgggacttgctcgttttctggccgagcgaggtctgttgccgatgtatggaatgccgactcgggtacgtaatctttatctgggattgcgcaaaacaaaagggacaaatggtcaggcggaatacgaatggtcaacaatggatcgcgaccttgatcttgctgtttttgagtatgcacccggctcggtattaattaaggataaaaaaaagcatcaagtaatcggttttaccggtaactacctagaacctcaagtccgagataatcgtgtttcagatctctcaacggtatgctcctggaaggaatcgagtcactatgttgcaatttgccagtcatgtggttccgctaaattagagaaaaatcagcctattaacaatattaattgtgaggattgcgatactcctatcggcccagatgaattcgaaatctatatcacgcctaccgctttccgtacggattttgaaccaaaagatgaaatggacaactttactcgtatgtcgttaaaaactacggcaaccgtattgcataaagatatcccagaaaattgtggtccttttaacgttcggcgtggtggcgttactattttgcgtcttaacgatgggccgattaatggggagaaggaaggcgaacgatttaccgttgatttagctactgaccaaaaggccccgattcctttagctacttatttctcaccaattaaagggaaccaagcgattgattcaaactgggctggattacgtaataactttaggtggcggtgtactggagagaatcaaaactttgggcttgtatcaagtaaagagactgagtcgctccacttagaattaatgcaatttgatgatcgccttaatctgaatatgatcgccagatacggtgaatacatgaatttgcctacgcgcgcggcggctatcagcgcaacacagatattgacgcataaggctgcgctttatctggatgtttcgccagatgaattcgaaacgcttgaaccccgactccatcatgagaaacctatattgcaaattgcagacgcattgattaacggttcaggattatgcagacgacttgccgagccagccgttgttgggagtctgcctttgatagtcacattattgaatgagattctggaagacaagtgtgtctggccaatggttgattttcttaaaaaggatcatcctgctcagtgtcaaactgcctgctacaagtgcatacagcgctatggtaaccgccggtatcatggtttactggactggcgtttaggaatggcatacttacgagcaatggttatacctgaatttgcctgcggtctgaacgatgatgactggagtcatccggaaatgatcggatggcgagacagagcatttgagctagcggaaaacgtcgcggcgttacggcctgaaacaatcaaattatcgaaagagtatccattaccggttcttaccgaaattcaggatggaaaagaactctggcgcgcagtcgttacgcatcctctgtggaaatggagagaacctgagcgaaatgctttgattgactccatagggctagctgatgggaaactttcactaaggttcattgatacattcgagctggaaagacgaccattgcgcgcgcttgctagccttaaacggagttag

SEQ ID NO: 286586 - DNA, 666 bp, Morganella morganii
atgaaacaggcccaagaagtaagaaagggaataattgataatgaaggattttcttccattatagagactatctctactattacagcaaggatttttgaattacagcaggaaaaagaaaaattagtaaatttagaaagagcagaatctatttatattgagagcttaaatagaagggatttaatattagacagaaaggaatccattgataaaacagttattaacctacctaagttaataaaaattaaaaatcaacttagggaatcttacataaaatggctagatataatgaatatctcaaatgtaagtagaaatatatcttttagggatgattttattcctatattaggaaatgaaacgatagagcaattaaaaggaagcactaaagtcagagcaatattagcttatagagcatcactaattgaaacaatagctattaattgtcaaaaaacatttgagtttattatacttgacaccccaaaacagcatgaaattcatcatgaagatatagataactttatgcgaaatatgaagctattatctgaaaattataaatttcaggttgttttttcatctactgaatatctattttcttgtgatgaaaatgattgtttatgggagccaaaatatccgggcgaaaaacataatatgttcttgaaaaataaataa

SEQ ID NO: 286587 - DNA, 204 bp, Morganella morganii
atgagcctagacaagttaagtcggctggtggaccaacagcgaaagacccaggatgaaatcgacaatgaaatcattctggccgtcaaagaggtgttggctacaaactcagtcggtttagcccgtgagcttgttgggggtgtcccgcaagatcatccattccatccgtttttactcgctatagctaagcagcttgacccgagataa

SEQ ID NO: 286588 - DNA, 606 bp, Morganella morganii
atgtctaattcaaatttcggctttctagctctggccttgcgccaacgcctgatcaaacgctggtcactgatgcactctgttcaaccggagtctgtgttggaacacagcgctgttgttaccctgctttcctaccttgctggcaatattgccattcaacaagggaagtcggtggatctggcagtcatgcttgctcatgcttcattgcatgatgctgccgaggttctctgttcggatgttgtaacaccggtcaagaaagcaaacgctgttttgcagcgtgagtttgaacgactggaaaaggccgcagaggacaaactcatccagactcttcccgaagaactccaggatgcagtcgccatagccttcgctcccggtggctatgaacaatcactggttaaggcctgtgatacctactccgcttacatcaagtgcaaacttgaggtggccgcaggtaatggccttgagttccaggatgctctcagcaaaatggaacgtgttgttgctcaggtgaaatcggacttcccggaaatcgacgctctggacaaatggtttggtgacggactcggccattcagtagataaactgctggcagggggtaacgatgactaa

SEQ ID NO: 286589 - DNA, 213 bp, Morganella morganii
atgaaagcatcactaaattctctatcaaaagatcaagttaatacactggcatgtaagctaggggaaattcaaaggcatttagccgaagatactgaattactctctgatttaagtgaactaggtattgatttgtcgtctgagattgatggctacgattgtgtgatagaagctctatttgagttgcaacagttcgccaatcaacatctgtcttaa

SEQ ID NO: 286590 - DNA, 162 bp, Morganella morganii
atgtccaagacgatccgatgtccagtttgcttttaccatgaagcactcctggaaaatgaaagtgcggcaccgaacacgccagagtacatggctgctgtttattgccccgcttgcgaatctggcattaatgatttagacgagcctcttaacgaagctctgtaa

SEQ ID NO: 286591 - DNA, 852 bp, Morganella morganii
atgattaagcagcattttcaaaacgaactggttaaatgcggatacccggatgatctgacaattgagtacagtctcgggtactgccagggtgatggaatggccttctatggggatttgagcgttgatgacgtcaaagctctcatgaatcgtctattcagcactgagcccggccaagtcgatgctgtcagtcgcgtgaagaacctgatggcgcagaaagacattgagaatatgctttctgtcctccgtgaatatggttcctgtgacctgtccattactcggaatagtcacggccatcactacagccactggaactgcatgaacatcgacgacaacgtggacttcacagggatcttccctgatgatgattccatgattggcaccggcattgaagggatcaaccaggatatggtcgagcgctggcaagacctctgggagcgctttgtgttggagctggcggatgatgtgaaaagtctttccaagaagctcgaatcggacgggtacacgctgatcgaggcctcgccatgcgaagatgaagtggtttgggaacgggccactgaaaactacctggtgcgtgttactgaactccctgagcgggatttcgatatgggccactgggatgacgaagtaagagaccaaacaatttgttctatcctggaagggaaagagcgagtgcttggcctacgtgttgaggtactttcccgtgaaaacgagattgtcctgggtgaagagagtctgtacggcttgaccgttgccagtgatgacaagagctacgctggctacagacgagaacttctccggggagccatccagcaaaccagggattttttctctcgccacctcaaagcggcataa

SEQ ID NO: 286592 - DNA, 387 bp, Morganella morganii
atgaaccaagtagctaaattggacctcgcccaaatccgtcaacaagccatcaatgatggtctgctggtggaccaatcttacatcggtaaacaagctggtttcctgaccaatgtggcagtgaccccggcaattgtcgatggagtatttggtgcagatggtaagcactcggtagaagacttccttttcatgttttttcaactttgtgttgctcaaacaaaggtcgcttttaccgacaacaagaactggggaaagattcgtctttattaccccatgcccactgtagatggctttttcaaacccactgaggttgtgattaagtcagatcctgtaaccgcagatgtcacaatcatgatggcctcggaagagggcactcatttgtgcttgtga

SEQ ID NO: 286593 - DNA, 1728 bp, Morganella morganii
atgtcttactacaaagctgacaccgttcgtgaagctgcaaacggaaactggctattcatcctggcggccctagcgccccatcttgaaccagctctccgtaaacctggtcgtcatgtttcttgtcctatccacggcgggaaagatggcttccgactgttcaaggatgcccacctgactggtggcggcgtatgcaatacatgcggtgccaatcatgatggttttgagctgctgatgtggctcaacaactgggactttaaacagtgcctgagcgaggttggtgattatctgggggttgagaaagagcaaccccagtatcaacaagccgctgcacctacacgagctcctgcccaagccaaagcgcctgttcagcaagagcctatgaaggtgaataacaagattctcgattccaagaatcgtaaaaaatccattgccggtactctgattgcccacggtaaagctccttatgagcataacgaagacaacgagctcagctactttgccttcatccgtgacaagagtggtttggaacgcaccatctggggcgtggatcttgaaagagccattggtgaaagtgaagccaagtatggggatgagatcgtcatgacaaacctcgggcgcgagcctgtaactgtcgtcgttgaagttaaggacgagcaggggaatgttgtgagagaacaacctatgcaaacgcatcgcaacacctggctggtggaacgtcgcggcgctacggtaacgcagttccgcgctcgctcgaacggtggtgttgagccggtgagtcaccatgttgagtcggcccctgtggtcaaccgcacggtagaagctccggcaccgcaagcacaacctgcggccacacaaccggaagagcaaagcagcgaaaacaagccgaaagttgttccgatgtttcgtgaacaacctaagccttggctgcttgagctccaagaagaaatggagaagagaatggagcgcgaacgcgcttacagtgctcgtctccgtgagaaaatcgagaaggtatggaacgagtgtttgccgttctccagtcatgtgactgagccaatgcgtctgtacttcaaaaaccgcgagctgctgttcaaagttgatgaagtagaaaaaacagactgtctgcggttcaatccggctatggcctactacgacgaagatggcaatgaagttgggaaattcccggctatcgtctgcgctatccgagatgtggaaggcaacctggtaacgctccaccgcacctatctcacccaaaacggtaaaaaagccaaggtcggtaacgccaagaagatgatgcccattccggaaggtttggatgtcaatggcgcggccatccgcctcggtgaaccgactgagggtatcctgggtgttgcagaagggctggaaacagctctgtcagcttatcgagtcactcaaatcccggtttggtcaacggtcaatgccaccctgatggagtccttcgaggttccagaaggtgttcacaccgtactgatctgggctgacaaagataagtctgtgactggggagaagtcagcgaacgtgctgaaagccaagctggagaagcgcggcattcgtgtgtacgtcctgctgcctaagctcccgatcccgcccagagcgaaagggattgactggaacgatgtcctgatgagtcagggaagcctcggtttcccgaatgctcgctacctgcgcgatttcattgcgagaaggagagctgagtatggccgtcattga

SEQ ID NO: 286594 - DNA, 279 bp, Morganella morganii; identical to SEQ ID NO: 25105

SEQ ID NO: 286595 - DNA, 240 bp, Morganella morganii; identical to SEQ ID NO: 49885

SEQ ID NO: 286596 - DNA, 726 bp, Morganella morganii
atgatgacactgactactgtctcgaagaaaacttctaataattcagcccttgtattctggcgcgttggtacaaaacggaaaggcatccttgatgttcgtattgattttgaccacgaggaggcagatcttttggctgagctcgtagccattcgctatctggcgctggacaaacaggttttttgcagagagccaggtgctggtgctggttacaagctggtggtatccaaaggtgcgattaaaaagctggcgcttggcaaatccaccaaggcgtttgctttcaagtttgcggcttgcctcactggacgtttaaagggcgctactattgaagtttcgcagagcatggagtttatggatgagccgggtgagggcaacgttgagctcctcgatgtggacaagcaagcctatacccaaacccatgacgaaatctctacaccggccattggtcccgtccttgttactcaacacgccatcgatcagtatcaggcccggataacctctggagaccctaaaaaaccgtgggcctcactcgttggccgcctccagcatccagatttacaggttcaaccctttgacgagaaagtggctcgccataaagccagaaagtatggccgcgtagataacgtggaagtctggggccatagagattccaagtttaagtacctgatggtgatcaacgacgacaaccaaaaacgtgttcttgtcacagtgtttgagcgaaatgagtaa

SEQ ID NO: 286597 - DNA, 3561 bp, Morganella morganii
atgagatcgagaccttcccttttactgatgcgaaacctgcggtcattggccgttgtggcgctcgcaactttgccgtgcgttgcttttgcacaatggcgggttgtagccgtgagcaccgaagtagacaaaatgcgcttcaataccatcatagacgcgcattccttcatgaagaattatcgctctagtgaggagcaagggaagggaacgcccgttggggatacgctttatccggttgccagttatggtgatggccgttatgtctccaggatctgttttaagtatctaggtgctactggcgattatgaccccactacctgcactggcgacccagctacggtctactggcgctcaacctacgttctgccgggtgagatggataaaacaccgttcctggacagggatctcggcttaccaacaacgaccatgtgtgtagggaaccctatccatcttggcaccggcaacaagttccaggctgaactggattatcaaagcggaggctccgaccctttcacattcaccagatactacaatagccaccttcctgatgaagagctcggcggctggcggcatacctactcgcggagcgtcgaggtcaacgcctcgaagtacggtgagaacatggttgtcctgcaccggccagaagggcaggaactcgccttctacaactcgtcctctgtctgggtgccaacttggaaaaccgatgataccttgacgaaggaggcaaccggctggcgctacacccaatctgacggggtagttgaggcctatgatgaaaccggacgactgaccggcatcgagaagcccaacggcaatcacatcaccctgagttatctgaacggagagctctcctcgatcactgacggctttggccgcaccctccagttccagtatcaggatggccgcatggtcagtgtcaccgatcctgctggtggcagtattcagtaccagtacaacagcgctggcaagctggcggaagtgatctaccaggacaatacgactcgcagctatctctacgatgacccgaacgcacctggtttgctctctgggctggtggacgagaacggcaaccgtttcgccacatggggatatgatgctcaggggagggcggttctaagcgaacacggcggaggcgcagagaagactcaggtaagctacaacgctgacggaagcgtctctgtcaccaatgccctcggccacgttcagcgatacacctacagtcgccacaatgggatgctcaagcctgatgtgattgagggtgcgccgtgtaccggctttgtgggcggcaaggaaacctacgtctacgacagcaaaggccttgtttccagcattactgaccgcgctgggcagaagcgcacgttcacccataacgaccggggattggaaaccacccagatagaccaggacgggggtaaggttacgaccgactggcttccttctaagtcgctcccggcaaaaatcacagaaccaacaaggatcactgagctcacctacgacgctcatctcggggtgataagccgcaaggtcactgatcgcagctcgggcgcttcccggacatggacctacacctatgcccctgttggtacaggaaagcccagcctgttggcctcgattgatggtccgcgcactgacgtcagcgatgtgacgacatttgattacgatgaccagggcaacctgatccggacaacgaacgctctggggcaggtgacgcagtttggtgactacgacgcgaacggtcgcgccggggccattcagggtgtcaacggtgtaacccagaccctcacctatgacgccagaggaagacttgtcagctccactggtccagaaggcaccacgacctacaactatgatgctgtggggcttctgagttcgctaaccaagccaaatggtgcaactgtcagctatgaatacgacgctgcacaccggctggtggcggaaacaggtggacagggcaaccggcgcgagcttgagctcaatgacctcgggaatccagtagaagagcgcctgctcgatgcgctgggtcagactcgttggatagagcacagggtatttaacgaaatcggctggctctccagtgtctccgacgcctatagcaatcagtcatcgttttcctacgatgtggtggcaaacctgatacaggagaccagtccatctggtaacgcgcactcctacaagtacgacggcttccaccaccggacacaaacgaccgacccccttgggaaggtcacgcaggtactctacaaagataccggcgatgtttaccgcgtctcagaccctcgttcgcgcctgacctactacagctacaacggctttggcgaagtgactcaggtccggagcccggataccggcaccaccgacattacctatgacgaagccggtaacgtggcaacgcgcaagacggccaaggggcaaaccacaagctacagctatgacgcgctgaaccggatcatcgaaacctccaccgatgtcgctggcgaatcgccaattctgtacgggtacgacgaagcaacctcaccatacggcataggccgcttgacctcagtcaatgatggcaacggtgtccggagatttggctacacccccgaaggatggctggcttacgagacctgggagacccacgggcaaagccttactacccagtaccaatacgatggtgcaggcctcatcacgaagatcacgtatcccagtggtcgtgaggtctcctacacccgtgactcagccggtgacgtcatcgaggtgacaacgacacaagcaggcaccacaacaagcctggcaagccagattgagcgagcgccctttggccccgtcaccagtatggtcagagggaacggcatttcagaaagccgcgctctggatctcgattaccgcgtcaccggcatcgacgctaccagggtgcattcgctggtctatcggtacacgccagactcgttgatttcagccatagacgacaacctcagctcgtcagccaatcagtcgctcagttacgacgcggttggccgcatcatctctgctgaggggctctatggcgttttgggctatggctatgacgccaccggcaaccggacatcgatcaccaccgatggcctgagccagagctacaccatcaactacatgaacaactggttggtaaaaaccgggcaaacctccagaagctatgacgccaatggcaacctgacgaagcagggggcggataccttcacctatgacagccagaaccggctggtggccgcaacggtcgcgggagtgacagcgagctacacatacaaccatctggatcagcgtgtaacaaagactgctaatggcagtatccgtctgttcgtttacgacctggcaggaaacctcatcgaggaacgggacgcggccactggagacgtgctggcggagtatgtctggctcgattggacacccttgggctttgttcagtcaggacagacctaccaagtccacgtcgatcacctgggcaccccgaaggcgctgaccgacaccagcggccaagtggtttggaaggcgagccatcatagagtcagtagagagagatacttttggaaatcaatagtattatga

SEQ ID NO: 286598 - DNA, 453 bp, Morganella morganii
atgaagaataagaatgtaatagctttgataatggccgtagccgtatctggttcgtcagtctacgccgcgacattaccgaccagtgaggtggacgcatacatacttgctatgaacaccatgtcacctatcactgcaaagtacaccatccagtacaagcaagcggttgagctgaaatgcaatacggccctgagcgttgagcagctcaactcgaaggcattcaccaatgttgtccaggcaatggtgagtagtgagaccgtcgatagaatggggctggatgctgctggtggatcactcaacgataccctgtctgtgatcggcaagaacgtcacatgcagtgacctgaacgcgccatttaaagcactcctggatgataaagacttcacccgaaagcatcagcacctgtcgaaggttttgcatacgtgggatgaggtggtttcgcagagcaaaccttga

SEQ ID NO: 286599 - DNA, 603 bp, Morganella morganii
atgtataagagccttgaagatctgatggcgggtatttacgagatggccgcgccagatggcatcatctgtaacgaggtttccaaattccttgcggccaaccaggtcaagccggaagacataagctctgggatctggtttttcctgtggctgaaatcagctcccaaggatgcgaagccaatccaaaaagaaatccccggatttggagttgttctcaacatgccgacttatggcggaacgctcaacgaagcaatcacagggttgatcgagaacgagtgccgtcaaatagagctcgctgagggacatccgagccttgaggcttgggttgaatcagtattagccggtcgagatgacggagaggaaaatgaagctgcggccaatatcgtggatctgcttaatgggtgtcacgacctactggatacagcaataatcaattacctttttaaagtgggaaaaatcaacgagcaagagattttgtcgcttatctattatggagagctatgtgaccactctcttgtcggtacgcctttttcaacgttacatatcccgagtgaaaataacgtccacgaacgtaacatcatccccattaaaaaaggagccagttag

SEQ ID NO: 286600 - DNA, 282 bp, Morganella morganii
gtgatttttgacgtaagagcgaccttcgaggtggcactccagacggacacccacctggtacttatcgatctggatcagggagcatcagttacgaacgatgctgatgcagtggtcgcctggttggccgcaaacctcgaaggtggaattgggaaacgtaaggtgtactaccgggacaccgatggacgctttgatgagctcaaggttaatgccggtgcttttgccggatttgcaccttgtagcgaaggccagcagaccgccttggctgggatgctcggccagtaa

SEQ ID NO: 286601 - DNA, 282 bp, Morganella morganii
atgttaaacaaaaacaaatttgaaaaggtgttggcgagagtcatcaacaagaacagcaaccgatgctctgtgtgcaaaaagccgtttcctgggccttgccacacatttggtgggttggatgcagacagcaaggtgcagaacgtcggtcagtgctgccgaagcaatatagtggacctgaggcatggtggcgtctataccactgctccggtcggtactgatgaaggtgagcgccaggcccgtgagcttatggcttctcatccttgtgctcgtcgcatgatgtag

SEQ ID NO: 286602 - DNA, 531 bp, Morganella morganii
atgaaaaaagtcacctttatcagccagtcagaggccgaaaggctggagcccgttgccggtgcggccatgatctccataactgacccagacaagtcccctgcctctctcggactgtgggagcaattgtaccgcgatagcttctatgatggcggctattccgagaacactatccacaccatgaaggcagcgttccggatgaattacgcctcctacattgactcatcacaggctgaaaagctgtccaccttcctggatggattggttggcagcggtatcgatcagatcttcgttcattgctattacggagaatccagaagtggcgcggtagcactgtacctccagaacaaacatggatttactccgaataagccgatcaccaagcccaaccggacagtttacgaattgctgtgcaatccaaccaagtttgaatcgctgatacaaagctatgaaacgcaacatgtagagaaggagttgcctcttcatctcaaaatatgggacttgcttctcgttgcggtcgggctcaggaggtaa

SEQ ID NO: 286603 - DNA, 1011 bp, Morganella morganii
ttgcacgatacgaacaacgacaaagaggggctaatttcacatgcgaaagtaaatgttccggcagaacaaaccgttcgcggtgaactgttgccgtcatcgagctcactccggaacagccaggacaaccctgccgtcgcctatctggtgagcctcgggtcaaagcgaagcaggcagaccatgagctcattcctcaacattgtcgccaagatgatcgggtttcagaaccttcgagactgtgcatggagctcaatgaggcggcaccacatattggcggtgctggaaatgctgggggatgcagggaaggcaccggcaacgatcaacacctacctgtcagcgctcaaaggggtagctcttgaagcctggacgatgaagcaaattgatacggacagcttccagcacattaagcaagtccgttcagtacgaggatctagactcccaaaagggcgagcacttgaacgccatgagattcgcagcctttttttcacatgtgaaagtgattcaagcgccaaagggcttcgggatgcggccattctcggagtgctcctcgggtgtggcttgcgccgttcggaaatcgttgctctggacatgggaagcatgatctacaaggaccgcgctctcaaggtccttggcaagggcaacaaagagagaatggcgtatgtgcctggtggcgcatggaaaagactggataagtgggttgaagaggttcgaggaacgcatgaagggcctctattcccgaggatcaggcggtttgatgatgtgactggagagcggatgtcggatcaggccatctaccacattttggagaccagaagagtagaagccggtctggagaagttcgcgccccatgacctgcggcgcacctttgcctcctcgatgctggataacggtgaggatattgtgaccgtgaaggacgcaatgggtcactcaagcattgcaactacccagaaatatgacagacgtggcgatgagcgcttgaagagagcgagccaacgcctcgatatagcggattaa

SEQ ID NO: 286604 - DNA, 870 bp, Morganella morganii
atgaatgatgaagaactcgaacttgccagagccgaagccatgacagccgataggtgcttttcaaaaggacggctcagggacgaatttcggatgaagcccaagccgggagtggaaccagtttcgttctacaaaaacgggtatggcggccaatttggagtgtaccggattgcagattgccaaccaatgcggagaaggggttgttcaccggcatcacaaaagcaaataagggcgcaatccatcctttcggtcaaggcaagaatgcgtagcaacctggcaaaggcctctgtcatggcacaaaggtgggtcgctctggaacctctggttctcgataccgagacgaccggacttggtgaaagagaccaggtgatcgagctggctgttactgacatcagaggcgcggttctcctctgcaccagattacggccaaccgtggaaattgaccctcaggcaatgggtgttcatggcatcaccgagactgagctgtcgaatgagcctacgtggactcaagttgcgccagctctcgcccggcttttatcgggccgtcatctggtgatatttaactccagtttcgacagtaggatgttgaggcaaacagccagtgcatttggagaccaactctcttggtggcaagagcagaactgtctgtgcgcgatgaagctggcggctgatgcctttggctcaaccaaccggcacggcacaatctcacttgcggatgccacctgcgaggcaggtgtgagctggaaaggtcgagcccattcagcagcgaccgacgctattgccaccgccgacttggtgacagagatagccaaagtccaacgtgacctcgtggtccagctccaggagcttcaaagcaaaggtaatttggaatga

SEQ ID NO: 286605 - DNA, 492 bp, Morganella morganii
atgacagaacaatcctacggcgaaagcctcaaatttttctcagactggcagaaggaccccgcgaaacgcaccggcctgaatgtgcaacacacgctaaccagaggtgaatatcctacggtcagcatcgagattgcgccgatcagggcatcggggtccagcccagactggaaaagcaagatcacggtgcagctcactcgcggcgaactgacggcgttttgcagcgttctctttggtttgcgtagcaaggctgagggttcctatcacggcgacgcgaagaataagagctttgcggtttataacaacggcaaggccggtgttgcgatcatcctgagtgagcgaggaaaccagctccagaatttcatcaatgatgacgaccgaatggagctcgcagtcttcgcagttcgccagctatccaacgcatggaaagtcaccccttctgatgccatcgcgctgttgcgtcaatcagcgtggatggaccgcaatctgtcctaa

SEQ ID NO: 286606 - DNA, 495 bp, Morganella morganii
atgagaaacatagccattgcactgatcgctctggctgtctctttctctgctggctggtgggccagcagtaccctgcatgacaaccggcagatgaaagggcagatcgccggtcagcagcaggatgagaaagatgtggccacaaatattgagctgcgccgggaggcagacgaacggcagcaggtaagcatcggggaatatcaggatggaaaaaagagtgatacgatacgcacagaggctctgcttgatcgggtgcttaatcattttgaccgcatgcagcagccagccggtaccacgaaagcagaagttgcagatctcggccacgccgatacctgcagaactgagagagacaaagccggtgaactttctcgacaacttcgaagcacacttgaaaagtatgggcgtgaagctcagcgggctgatgagaatacccggctccttaatctctgtatcattgacctgaaagcgaaagagacattactttcatcttatcagtag

SEQ ID NO: 286607 - DNA, 276 bp, Morganella morganii
atggggcattttgcactgatgtgctccatctgttccgcaataatatttatcgtgcattcgaagcatggcgtatttttatttaagtttagttttgatggtttgccatcacccgatattcagtatcaggaaaatggtaaatatgcgtacagagcctctacgattttactgaaaaaacaagcgaagaaaattaatccccacaaacgaacaattgtggctacgttttttattaaagacgttgacggtgataaacaggctgttgatgttttaaacaggtaa

SEQ ID NO: 286608 - DNA, 504 bp, Morganella morganii
atggaattactaatacttgctgctggtgtggctattgtccttatcttcattgctaaataccgccaaaataagaaatcacagtcccttatacaagatgctttttatgtacaaaaaaatttagcacactcaggttatgcattaacaaaccacggaactttggtcgcgatgtcaatcatagaaaaaggccattctcgttatgaagcattctcttggattgccgttcttgtatctgctcaaaacataaaaaaacatcgtgatgcaatcaaattagtacaaatatcaaatagatgtttatcattggcaaaagacataaaatttatgtacgacgaaggtgtgcttgcagaaaaatactatactaatgatgccggtgcccttggggcattgcttaatattgatgagcatacagattctgtcgctgaccacattctttcttttgatccatatgcaaataaaaacttaatcgccgagctaatagatgttgatgacccagacatgcagagctaa

SEQ ID NO: 286609 - DNA, 291 bp, Morganella morganii
atgaatgaagatattaaaatactagagtcagagtactatgatgcagacaatagcaaaaaatgggggatatatatttccattgctggtgttattgcatttatagccaattcggtatgggggtggtcagatagcccagtatttgttggtatgattatcggtggcggcttgactggtttggctgttagttatgaaaaaaccagaaaactcagaaaaagattagatgatatttgtatgtcaaaatatggtaagcaatataaagattcggttattgacatactgaatgacaagtaa

SEQ ID NO: 286610 - DNA, 1071 bp, Morganella morganii
gtgaataggaatgctctgctggatgtgtcaagagcaatcgctgtgatgtttgtcacaacttaccacatatggagggatacaggtcatccttcatatatgcttggcgattattttgatctgtttggctttatgggtaatgggtggattggtgtaggtatattttttgttatttctggctactgtatggggatctcgacagcaagagattttcactctggtgtttccttaaaaacataccttatttacatagctaagagattcatgagaattgcaccaccatattatattgccatagcaatatgggtgtttattattgataattatcacatagcgaataaaggaacatcattttttgatattataacccatgtgacattcagtcataacttttttagtgaaacattatttagtatttctggggtgttttggacaatagcagtcgaaatgcagttttatatattgcttcctttttttattgtttttatgaataattcgacgtttacgctgataatattctttatttctttgattgtttcgtttgttggttattattctgacattgactcaatttataagtggagtttaattatatacttgccattatttttatatgggtatattttacattcaaagaagatttacataacaggtgtgataaataaatttaagcttatatatttgtttttcccgctttttcttcttctgttgtcatataaaggtgctgggtacgataataatgtgaaaccgtacgaaataattacttcaattgtttacggacttttgatgctaaaaatgatatcagagagttggcgcaatgggtttataacgactttatcatttattgggtcggcctctttttctatatatttatataattatatttatatgtcattgaagccatctataggtaataaccctgtgtcttctgtaaccatgtggttatccgttatctcagtaggtatagtgatgtatttcactgtagagatagttagtgagaagttaagaagagttatttttaaaaaagatcaaagaaggcgctcaatgttattttctgcaggagaatcttcatag

SEQ ID NO: 286611 - DNA, 309 bp, Morganella morganii
atgaaaaaaactattgggttaataggactgctgttctgtgttaacgcttcagcttacgtaattggcgggtctaatatttacggtaattatcctgctttctctgactaccctccatcggcgccatacactgatgatcagcatgctatgagcatgtataaggatgaagtcgaaagatatgttgattcagcaaaagcatatgctgaaaatgcggacaatgacatacaaaggattcaggagcaaaaagctgccgctatatctaaagctaatgatgcagttgaagagtacaatcgaaaagtaagaggatattga

SEQ ID NO: 286612 - DNA, 249 bp, Morganella morganii
atgcagttcggcctgataaaatttcaggtcatttttgacatgcacttcatccagcagggttgcgaggacttccggcacggattgcttctgaaaaatacgactgtcctggttgagggtcatgatccacatttcggggcggatcagaaagtgataccaggttttgttgccgtcggtattgccctgttcggcagaggccagcagcccctgcacggtacggactttaacgccgtcacgggttacggtcagtga

SEQ ID NO: 286613 - DNA, 876 bp, Morganella morganii; identical to SEQ ID NO: 39017

SEQ ID NO: 286614 - DNA, 2886 bp, Morganella morganii; identical to SEQ ID NO: 25667

SEQ ID NO: 286615 - DNA, 1827 bp, Morganella morganii
atgagcgataattatttgcagcttagaaaaattttgttccgtggccaaaccaaagaatccgttttatctttttcatccggtattaatgtgatttgtggggcttccgataccggcaaatcattcctagcagaaactctggattttatgctgggtggaacggagctcagggtaattacagaattagctgcttatgcagaaataactctcgattttgtcaccagtgatggtcgaagttggcgtctacaacgtgcagttactggcgggaatttcaagttaactgatttggatgagccagactcgaaacctatcgtgctaaaacagaagtacgtccggggtaaaacggataatatctccagttttttacttgaacagattggcttgccgaataaggagattttgaaaagtagtaccaaagctacgactcagggactgagcttccgcaatctggcgaggcttgctctggttcaggaagatgaaattcagcataaaggctctcccttttggagtgggcagttcacaaccaaaaccgctgaactggcaacggtcaaacttctgctgacaggggttgatgattctgcggtcgttgcagtaagtggcgatggtgtaagcaatacgtctcagattatgttgattgatgagttaattgcggaattagccattgaaattaaggatatgggagaagagcgtgatgatctggcctcccaactgactcgccttgaacaatctattgagagtcaacgtgaatcgcttactgccgcacagcagcaactagagcggttattacagcaaaggggactggcctttgatgagcgaaacaaaatccagggacgactggatgagatatccgaactacttgccagatttacacttctgaatgagcattatgttatagatatcaaccgtctgaaatccattcaggagagtgggttaatcttcatgcatattaacgtggttccttgccctcattgtggagcgagtcctgctcaccaacacctggaacaaatatgtgatggagatgtagattcaatcattacttcagcaactgccgagatgcaaaagaccgaacgacttttggctgagctgaattgtacagtcagagatcttgtcagcgaaaagcaacgccttgagaagcaatgcattgtccatgaagaggattatttgcgtctggataaagccattcgggaaactattgctcctgaagttgacagtttcaggcattcgtatgctgaactgatcgacgaacgggccattgtccagcaatctattgatttgttctcaagattggaccggctggaaagcaggaaagtgaaattacaaagtgatactccggtaaaaaaagaaaaaagtgcggtgcaaaacggcattccagagtctgttgcccatagtctgtcgttaaaaatctcctctatattaaaagactggcattttcccggagcatgccaggtattttttgacaaaaatacttcggattttgtaattgatggaaaacctcgcggtagccggggaaaggggctacgagcaattacccatgcggcagtcagtgtcggactacttgagttttgccaggaaaatgggctatcgcatccgggattcctagttctggattcccctctactggcttactacaaaccagaaggtgaagatgatgtggctttgcaaggtactgacttgaaagagaaattctatgattatcttgtgaagcaccataatgaagatagtcagatcattattatagaaaatccgcatccaccgcaaagcatgaataaacagattactatgacggtattcactggtaatcctagggttggccgtttcgggttgctttga

SEQ ID NO: 286616 - DNA, 486 bp, Morganella morganii
atgaatcataaaaaacatccagagcccttcaatagtcctttcgaaaccggaatacgttcgcttgcgattctggttgcagccttccctgagtcttatgatttgcaacggctggttgaaatggattatctcgttgtgcattccggtgatgctgatggtcctgacagtttgcatgccccactaccgatgcgtgcgggcgaactactagtcaggcatggtttgattgaaaagggattgatgctcatgatgagcagggggctcgtgcaacgtgtttcaactagtgatgggttcaactatcttgctggcgagctcgcggcaccttttatctcttctcttacgactgaatattcatgtcgactaaaagtttgtgctgaatgggtaattggtgaatttaaagacctgcctacgcaggaaatacggaacattacacatcgcttgtttcagcagtggtcgagtcagttccaaagtattcagtcatctggaggatga

SEQ ID NO: 286617 - DNA, 1101 bp, Morganella morganii; identical to SEQ ID NO: 240886

SEQ ID NO: 286618 - DNA, 810 bp, Morganella morganii
gtgcatttcctgctggaagcttaccgtatcagcgtccggcggggttgcgggctgctgatgcagagcagaactgtttaccactggctgagccggcgtgatgatcgggcgataaccctgcgcatcagggagatagcagaaacccggatacgctacggttgtccacgcattcatatccagttacgtcgggagggctggcttgttagccacaagaaaacccaccggatttattgcctggaaggactgaatctgcgcagaaagcggccccgcagacatgtcagtgcagcacgccgtcagcagcgcccgacgctgacgcatgtcgatcagtgctggagtatggattttgtgtcggataatctgtttaacgggcgacgttttcgggcactgactgtagtggataattttagtcgggaatgtctggcgatccatgccggaaaatcgctgaaaggtgacgatgtggtcagcgtaatggaagcgcttcgggtactggataagcgcctgccggtacgtattcagacggataacggcagcgagtttatctcgaaaagtctggataaatgggcgtatgaacacggtgtcacgatggacttctcccgctccggaaaaccgacagataatccgtttattgaatcatttaacggtagtctgcgggacgaatgtctgaacattgactggtttttgtcactggaagatgcgcaggacaaactcgacaattggcgcagggaatacaatcatgaaagaacgcattcatcattaaatgacatgactccggctgaatttatccgaagtctccagaaagacgaagatctctga

SEQ ID NO: 286619 - DNA, 444 bp, Morganella morganii
atggttaataaaaatattgttttttcattatctagtactgatagcagacaagacttgatcagttattttggaatgatgtgcagcaacgccacaaaaataacaatttgcgataactatttttctgaaaactggatggaaaacaacaagttattctatcaagttcttcccagaaggaggttgcacattgaatatgccgaagttgcatctggaattagtgcaagagcaaatagctcagaaataactaatacatttctgcataccatatgcacagattggacatcaagcgtatcagcacttcaaaaatactcaaattgtcacgaccgatatctgttaattgagtcacctggaagcaaaatagaagttatgctatcaagcggttttcaccatctttggaaggctaatcctaaggagattacttgtgtctttacagaaatcctactgtaa

SEQ ID NO: 286620 - DNA, 135 bp, Morganella morganii
atgttacggggccatatctgttggtgtatatgttgtcgtgagattgttgtgggtggtgatcaacccccgagcgagggacaaagagtaggcaagatcattggtgttgttgtgcagatgatgatgcgctttgtctaa

SEQ ID NO: 286621 - DNA, 198 bp, Morganella morganii
atggaatggattaattgctcggaaagaattccggaagtcggacagaaaatattaacttacaccgcaaatgaaggtgaatacatgatgggggaatatgacgagccaggttgtgtttttatctatatcggtgatggtgtttatagtgggcactctcaatttacacactggatgccactgccacaaccaccggaggagtga

SEQ ID NO: 286622 - DNA, 213 bp, Morganella morganii
atggaaccaacggattttgaaaagtggtgtgccggggagatggggctttcggtggaattcattaaatttcagcgcagaaaacaagaatctgactatccagacatgtactttcacgaagagatacaaaaaagataccgcgcctacatggccggagttcgcagcagactgccgtaccagacaccgccaaaaggagatgaagatggaatggattaa

SEQ ID NO: 286623 - DNA, 231 bp, Morganella morganii
atggaagaaaagggaaaaatttacgtccgggagttaaggaaggacgacaaatcagacgatatgcgcacaaacatgcggatagggttattttcagataaatcaaattggaaaacggatatagacccgcacgttgtctgctggcctgatggtgaagttattgacgtgcaaatgacaaaaggtgatgcagagtcggttgctgcgcagttcaacgcgatatttcaggagccttga

SEQ ID NO: 286624 - DNA, 177 bp, Morganella morganii
atggagccaatcaacgatgagtatataaaattacttgggcgccagatgaaagagcgagcattacaggcacaagtcaaaaaacagacctggaaagaaattttatttttttacttcaaggtaattgcctgctcaatggtggcggtaattgctgcgctggttatcgacgggagattgtga

SEQ ID NO: 286625 - DNA, 411 bp, Morganella morganii; identical to SEQ ID NO: 24297

SEQ ID NO: 286626 - DNA, 261 bp, Morganella morganii
atgggcgacatgggcgatatattccgcgcaatgcgtgaagatgccaaagagcggaagcaacagagattaaaagaaaatacagggaagttatcagggactgatattccatttacacaggacggaagcggaacaattcatttttcaacaccagccggaaaagttctgttttaccccaccacaaataaaattcagcacaagcaaaaggtcacgcgcggcaatctggaaaaggctgtcgcactagccaaaagtcttggtgcataa

SEQ ID NO: 286627 - DNA, 195 bp, Morganella morganii
atgttcataattactgatggtgcccagtttatagatccgctgatcgtccggggttgcgacaaatatccgcttgaaaaaattactgatcatttcctgctctataccattgaccaccaggttattggtaaagtgatccccctctttaatatcaaactgcacttcaccgatctcactcacggatccgggcgctcttga

SEQ ID NO: 286628 - DNA, 1485 bp, Morganella morganii
atgaccgataccgccgccacgtcaccggaagaacagctgattgatgacatcgccatgttcacgcatgacccgctcagttatgcgctttacgcatttccgtggggcgaggcgggcaccgaactggaaacggccagcggtccgcgtcagtggcagtccgaggcgctgaatgaaataggtcagcacctgcgcaatcctgacacccggcatcagccgctgctgctggctcgtgcatccgggcacggtattggtaaatcagcattcatttccatggtgattaagtggggtatggatacctgcgaagattgcaaagtcgtggtcaccgccaacacggaaaaccagctgcgaaccaaaacatggccggagattgccaagtggcagcgtctttccatcacccgcgactggttcacctgcaccaagaccgctatctattccaacgacccgaaccacaccaacgcatggcgggcagatgccgtgccgtggtcagagaacaacaccgaggcattcgccgggctgcacaaccaaggaaagcgcataattctggtgttcgatgaagcatccaacattgccgatctggtgtgggaggtagcagagggggcactgacggatgagaacacggaaattatctggatcgcatttggtaacccgacccgtaacaccgggcgcttccgcgagtgcttccgcaagtttaaacaccgctggcgcacaaagcagatagacagccggacggtggagggcaccaacaaagagcagatcaaaaaatgggaagaagatatgggggaagacagcgacttcttcaaaatccgtgtgcgcggtattttcccgtcagcatctgaaactcagttcatcccgaccggccttaccgatgccgccatgaaacggacggtaaccgccgctgaggtggcacacgcaccggtaatcatcggcgttgaccctgcctattccggcgcggatgatgcggtgatctacatgcggcaagggctgcactgtaagtttttatggtccggtgccaaaaccaccgatgatgtgatcatggcgaaacgcattgctgattttgaggacagctatcaggcggacgcggtgcatatcgatttcggctacggtaccgggatttattccgttggcatgaactgggggcgcgactggcagttggtgcagttcaacggatcatcgactgacccgcagatgtataacaagcgcggtgagatgtataacagcgttaaaacgtggctcaagattggcggggcgctggacgatcaggaaaccgctgacgatttatctacagctgaatacaaagtccgcctggacggaaaaatactgctggaagacaagggcgatattaaaaaacgcataggccgctccccgggtaaaggtgatgcgctggcgctgacatttgcttatccggtcaccaaaaaagacccgcaattcaaacagaacatttctcacggctcagtggtagccgacaacgattacgatccctacgcctga

SEQ ID NO: 286629 - DNA, 423 bp, Morganella morganii; identical to SEQ ID NO: 200684

SEQ ID NO: 286630 - DNA, 561 bp, Morganella morganii
gtgatccttgaagcgggcctcgccgcgcagcacggtaatcgccggattgccctccaagatgccttcgtatttggcgtgacgcagttcatcgacgcggccttgctgctgggccagcagcgctgtgcgctggatggccggctcggcgaccgtaatgccactatcgaacggactttcccggcgcaggtgggcaatgtgggcggcacggatcatgatcttggacggcacgcagccgacattgacgcaggtgccgccgatggtgccgcgctcgatcagcgtgacgtgcgcgccttgttcgacggccttcagcgctgccgccatcgcggcgccgccgctgccgatcacggcgatatggagcttgccagcatccccgccagccttgtcatcactgcccagccattcgcgcaccttgccgagcaatccgccgcccgccggagccacgggcgcatcggcgagcgtagcccgatagccgagtccggccacggcagcggtcagcgtatccggcgatgtgtcggcctcgatggcgagcctggcgctgcccttggcataggaaacctccgctga

SEQ ID NO: 286631 - DNA, 228 bp, Morganella morganii
gtgcgtcgtggtgagcacgaattcgccgtccccttcaccattgatataggcgacctgactggcctgggtgtgttcccgcacctcgatgccttccatgcggaatgcggccgtgacggcttcgccgatggccgggtcttcgtggaagaacagcgtgttgcgcgccaggatcgtcaccttcgctccgagtcgggcgaacgcctgcgccagttccagcgcgacgaccgatga

SEQ ID NO: 286632 - DNA, 882 bp, Morganella morganii
atgagcacatcaattattgaatttgtacaacagcaggagacattgttcagcagcgcattgacagagcaaacaataacatgggctaaggaaagccagtttgctattcaggcattccagaaaaacgacaaactggcagaagctgcgttaaagaatcaggccagcgcacagaatgcaattatcaacgtcgcagccatcgggataaccctgaatccggccagcaagctcgcatatcttgtcccacggaaaggcgaggtatgcctcgatatcagttatatgggcctactccacctagctcaggcaacgaaagcgattatctggggccaatgcaaactggtgcatgaaaaggatgtttatgagtccaacggactggaacttccccccacccataaatataacgcgttcggagagcgcggagcggttatcggtgggtattgcacggtaaaaacagcggaaggtgactatctcacggaagaaatgacactcgaagatatcaaagctgttgaggcgacaagcaaggcaagtaacgggccatggaagaccttctgggaagagatggcaaggaagaccatcgtcaaacgcgccagcaaatactggccgcgccgtgaaagacttgatcaggctatcgagtacataaatacagatgccggtgaaggaaatgattttcaggcaccgaagaatcaggagcgcgacataacaccggccagcgaagaccaactgaaggatatatctgatctgatgatcaaagttgatggtgaatggagtgaggttttcatcgccttcatcagcaaaaaattcaaccgccctatctcccacccagaacagctcaccgtatttgaggctaacaccatcatcgacatgctcaggaaaaaggcaggcgaataa

SEQ ID NO: 286633 - DNA, 237 bp, Morganella morganii
atgaacgcatacgcagcacaggatgctcaggaagagcggcggctggagcatgcagcatggcgggatgccacggacacggaagtcagagaactgacaacggatgcttttaataaacttcctcagcgccttctggatgaagtcagtgaggaactacagaacgagatatggaattctctttacggggtaacagtggaaatcagggatcactatgctgccatttatcaacagcatctttaa

SEQ ID NO: 286634 - DNA, 450 bp, Morganella morganii
atgactgatgagcaatttgagcagtttgttcagatgatgcgaaacaagcgcaaccacgggttttataacagcatggaattcgccagaaatggctggggaacgaaatggaatgcatacggacaaagtgcagaaagcaactcagacacaacggttgagtttgaaacagcttggtcgcatccgctgccggtaattactgccctatcaaagcgttttccgaaagaaaaaataattgtcaaatatgcagacgaggacaccggaaacaattgcggacgatacaccatgcagaacggtgagtttgtcgagcaggatatcgctccttcttggcacgaccaatctgacagcgacaaaagaaagtggactgagtttgctttcaaattacgcaacccagacacagacccgaagacgtatggatataacgaaaattgggaatatatcgaagatgaagactaa

SEQ ID NO: 286635 - DNA, 621 bp, Morganella morganii
atgaacagtgaagatttaaaaaagattcttgatgaacatcgggtgtatttaacgtcatttggtgagcgcggatcaagagccaacctgagcggtgcctacctgagcggtgccgacctgagcgacgccaacctgagcggtgccaacctgagcggtgcctacctgagcggtgccgacctgagcgacgccaacctgagcggtgccaacctgagcggtgcctacctgagcggtgccgacctgagcgacgccgacctgagcggtgccaacctgagcgacgccaacctgagcggtgccgacctgagcggtgcctacctgagcgacgccaacctgagcggtgcctacctgagcggtgcctacctgagcggtgccaacctgcctgatcgcactttcgttattttcggcgaggagtacgcggtaacaatcacgaacggcgaatatgtacgtgccggttatcaaaatcaccacattgacgcatggcgcaaattcagtaaacgcgagattgcaggaatggatgggcgtagagcgttaaaattcttcccgcgcctgttagatatcatcgatttttatattgtgaaaggtgagcggccagagtggcttaacgagaccggcgctggcgaagaataa

SEQ ID NO: 286636 - DNA, 324 bp, Morganella morganii
atggaatttaaaggtacgccggggccgtgggtaatcactgatagtggcgactcaataatggatggcggtcaatttattatcgctaattcccaccggttagccatcttgtgcagatggcatgaaaaaggatttgagcactttagcgacgaaggtgccagtaaggatattggaacaattgccgcgaaggcgaacgccagactaatagcagcagcgccggacttacttaatgcgctgattaatttgattgaatactggaagctggacgaaactgcggaagctcatgcggcaatgatcgcaatcaacaaagcacttggccgcgaatag

SEQ ID NO: 286637 - DNA, 450 bp, Morganella morganii
atgactgatgagcaatttgagcagtttgttcagatgatgcggaataagcgcaaccacgggttttacaacagcatggaattcgccagaggtggctggggaacgaaatggaatgcatacgggcagaacgcagaaagtcactcagatacaacagttgagtttgaaaccgcctggtcacacccgctgccggtaattacagccctgtcaaagcgttttccggaagaaaaaataattgtcaaatacgcagacgaggacaccggaagcaattgcggacgatacaccatgcagaacggtgagtttgtcgagcaggatattgctccttcttggcgcgaccaatctgacagcgacaaaagaaagtggactgagtttgctttcaaattacgcaacccagacacagacccgaagaagtatggatataacgaaaattgggaatatgtcgaaggtgaagactaa

SEQ ID NO: 286638 - DNA, 393 bp, Morganella morganii
atggcaggacacccacatgctgaccttatggctaaggcagcagagatagcgaagacggataaagagtggtggaagcactttgaaataaagacactgcattttgatgcctggagcgagatgtgcaacgagatatttttcgacgatgacgaataccgcttaaagccacgctttatcgacattaacgggcatcaggttccggagccggtgcgggttccagtggctggcgacattctttatatcgctgatactacattaaagcccggcggcgcgctgcggctgctatggacagatcaggatgtgtgcatgggactacttaacagcggtctcttgcacacgacaaaagaagcagcagaagcccacatagccgccctgctctctttcacacagaagtaa

SEQ ID NO: 286639 - DNA, 171 bp, Morganella morganii
atgaagccaatcaacgatgagtatataaaattacttgggcgccagatgaaagagcgagtattacaagttaaaaagccaaccgggaaagaggtgttatttctttacttcaaggtgattacgtactcaacggtggcagtaattgccgcgctggttatcgatgggaggttgtga

SEQ ID NO: 286640 - DNA, 174 bp, Morganella morganii
atgaaaacagcgctgaaaataatgctcggaatcgtattcattgatgcggtgatgctggcgtttaaatggctattgagtatcgatattcatccatctgtctacatgcttaccgtgaatacttcgctactgctggggttgtacgttgctgaatttttggaggtcaaagtcaaatga

SEQ ID NO: 286641 - DNA, 1005 bp, Morganella morganii; identical to SEQ ID NO: 9478

SEQ ID NO: 286642 - DNA, 363 bp, Morganella morganii
atgcgggttaacgagttcgatatcacaccggtaccaaagccgcgaatgacgcagcgggataagtggcagaaacgacctgcagtgatgcgttacagggcattctgtgacgaagcgcggttacgccgcataacgttgccggaatccggtgctgaaatcgtttttcagatgccgatgcctaaaagctggtcaggagtgaagaagcgcagcatggccgggcagccgcaccagcagaagccggatgtcgataacctgcttaaagccctgatggatgcgttgtttgatgatgattgcaaggtctggagtgtggcagtttccaaggtgtggggtgagtccgggaagataacggtaaggttaccggaataa

SEQ ID NO: 286643 - DNA, 438 bp, Morganella morganii; identical to SEQ ID NO: 284424

SEQ ID NO: 286644 - DNA, 324 bp, Morganella morganii
atgtcacgatataaagtattgaagaaatcttttatcaatggccgcctgctttatcccggtgaggaaattgagttcgatggtgtgccgggaagcaacctgctgctgattgaaaccggtgagcgtatagcagtgaatgaagatgccaataccggtaacgataatcacagtggtgatggcggcagcggtgatggcggcgctgataatgaactgatcgcattgcaggatcagtaccagcagctgtttggtaagaaacctcatcacaatgccggtgccgaaaaactccgcgcagatattgacgcgaaacgtaaagagcttggggtttaa

SEQ ID NO: 286645 - DNA, 315 bp, Morganella morganii
atgaccgaaaaaatgtatctgaaacttaattttatcatcagtgcttttcgtgaccgcgaaactatcacagctgccgatgtcgcaacggctatgggatggactaataacaccgctaacacaaagatgcgcattcttgaggaaataggagcagcaattcaggtcagccctgaaaataagcgccccattctgtatgcggttacatccggcgcagacgcctgccttgattcatattatgcgatggcgggtaatcggttcctcaaaggctttgacgcgaagctgcgggaggcacgccgtggaatgccaactgtgcagtaa

SEQ ID NO: 286646 - DNA, 315 bp, Morganella morganii
atgaaagtagaacaatctcaagtcactaagcttgaaatcactgatgtaataaagcacgacccgatcagggtttatttagaagacaataaccagggaggcggacgattaactataactgaatggggtgaggcgtggacggcttattggtcctccatgtcaggctcattaattgatttcattataagaaacgataacggatatttaattagctatctttcttacaagccggtaggcccaagaagcgctgcatataaacgccttgagtccagattgaacgcagtgcgtgaagcaattaagcagattcaggaggggtga

SEQ ID NO: 286647 - DNA, 651 bp, Morganella morganii
gtggtggtttgtgctgaaaaaggggacaccaaagtgtatgccctggtctctgttcttgctcatagtgtgaatatttcaccggcgtatcaggttattttgccgggaaaatcttccactctcactgctaattcgctgaacggcggagatctgacctggacactggccgataacccgcagggttcaacactgacaaaagtcagcaataacgaatatacctatacagccggtaaaaagaacgcgaaattaaaactgaatctcgaacgtatttcagtgacggatgaaacgggtacaacgacggaagcaatgattctggtccggaatgtgccgttaaccggatatctccgtgtgtcatatgacaatgtgccggaaaacagtgtacagcttacctatttccctgaccctgatgatgcggaaacgacaataccggcagatgaaattgaatggacactgctggagtccggtggtgcaacgtttgatgctgaaaccggtattttatcctgcagtcagccgacagataacagttttgcggttatcagtacaaaatatcttgacgaggatataggtgtgctttatagcgtgattgcgatcccgctgccgctgaatacctataaagaaacaatactggcagtctattccccggaacaggaataa

SEQ ID NO: 286648 - DNA, 417 bp, Morganella morganii
atggcccacaccactggcggggagcagccggggagccggaaccagcggcaggcagggaggaatgaatattcaaacggctgcgaaattagccggatgggatacaccaacaacaaacaattccagcaatccgaggccaaaggacgctttgatatcaaaaagaccaaatggaacgaaaattcaaagaaagctacagcatctggctgcgattgctacaccggcccgactaacggctactggcgagatgctgactggttactctgccgggatgacaagtggcggccagttgaacccggaacattcccgctggctgatggggttgccggtagagtgggaaaactccgcgcctacggaaatgccatcgtctcgccggtcgcggaagagttcataagggcttatatgctgataacagaggaatga

SEQ ID NO: 286649 - DNA, 315 bp, Morganella morganii; identical to SEQ ID NO: 286646

SEQ ID NO: 286650 - DNA, 417 bp, Morganella morganii
atggcccacaccactggcggggagcagccggggagccggaaccagcggcaggcagggaggaatgaatattcaaacggctgcgaaattagccggatgggatacaccaacaacaaacaattccagcaatccgaggccaaaggacgctttgatatcaaaaagaccaaatggaacgaaaattcaaagaaagctacagcatctggctgcgattgctacaccggcccgactaacggctactggcgagatgctgactggttactctgccgggatgacaagtggcggccagttgaacccggaacattcccgctggctgatggggttgccggtagagtgggaaaactccgcgcctacggaaatgccatcgtcgcgccggtcgcggaagagttcataagggcttatatgctgataacagaggaatga

SEQ ID NO: 286651 - DNA, 216 bp, Morganella morganii
atgaaaaatagcataaaaaatgcaaatgaatatatagccaactctgtgcttgatattttatctatgtatgagaataagaaaataaagggtataagtgaaattaaagatataataaaaaagaataatttgtgtgaaggggaatctaataaattaaaaatagtattcgatacataccaatataaagagtctgtaaaactttctaaaaatggcgggtaa

SEQ ID NO: 286652 - DNA, 186 bp, Morganella morganii
gtgaaaaatgattttattttctatgcggtgtgcgatgaggacgggggagtagtttgcattaataatagcaaatacccatcactaaaggcagtgttttatttacgcgcagatgcagaaaaaatactcaataaaaataaaaatgaaaatcttcatatcgcagaggttaatattaccgaggtgagataa

SEQ ID NO: 286653 - DNA, 435 bp, Morganella morganii; identical to SEQ ID NO: 231108

SEQ ID NO: 286654 - DNA, 354 bp, Morganella morganii
atgctgtcggataagctggtggactcaaacgcattcgggatcccgtttgacgacatgctgcgtgattttaataaatacatggcgaagcggggttattacagcagtgctgagatgtatccgttccggcacccggtgcagtactggatcttcactgacctgagaaacagggtgcatgacctgcggctgactgagccggaagttgaaaagcgcctggcgaagatgatccggcagtgggctgaccgtgtagccaaaggcgagccgataccccgtccggttctgcgcgtggaagataaaacccgtccgcctccggcatggatggaaatgctcgaaagaaagaaacaacgatctgcctga

SEQ ID NO: 286655 - DNA, 204 bp, Morganella morganii
atgctgaaaaatctgcccgctgattacaacaatattattcatgccgcctattccggtacgctggcagaaatgaacctgctgcgcagacggggcccggatattgaacactataaactgctgcccgcagagcggcatgatgagtttattgccaacggcctgcagtatgtggaagagattaattactacatcccggtcatgctataa

SEQ ID NO: 286656 - DNA, 1083 bp, Morganella morganii
atgatatcacggagaagttttatttttggtagtgcatctgcgttgattgttggtgcctcaatattgggatataaatttttagataaaaaaggccgtggcctatatatttataaatggggtgctaagtctggcggtaacgattggtgttttgtcagaactcctgaaaattatacggagtatgggaaaaaacatgagtttgttgtgttaaatcacggtaatgggtgggtgatgaatggaactgaggctaccgctaatttcagtgggagtacacagtttggtgttgatcaacaaaataatggtgcttatttgaataagaaacgtgccgattatgttgagtttagcagcccacttatagagaagctcttgaataatggttacgttgtctgtggtgctcaaaatgacaatggaatgcccgatggagctagcgcaggatggggggcggacattgtaaggaataatattaaagattttgttttccatataaaaaataattttaatgttaccgaatattgtcatatggtcggtgcttcaaatggcggtttggctacattgaatgcggcgatgatcatgcctgaaaaaagtataaaaagtattacattgatgtaccctgtaacaaacttgtatgcagcatggaagtactcacatcgtgaatctgtggaggctgcttatggaattactccaaatagcttttatagctttttaaagaaaacttcaggacatgaccctatgtcggcttttacttcatatagagtaaatgacaaagagttaaataaaacatctgccattgagtacacttctgacattgagttaaataaaattatagtaaaaggaaagttgtattctgagcctgagtttgaaactgataggatatcagtaataaaaatgtctacattcacttggcctaagatattgtgctattacagtatgcaagatagaacattagatatggacatgcactggataccatttcgttctctattgcaaaatggcgggcataaatacaaggatattagggtgactggtgatcatggtggatggatgaatcatgatgatactgataccattttggcatggatgtcataa

SEQ ID NO: 286657 - DNA, 1014 bp, Morganella morganii
atgaagaatcaaagaagcgttgcgctaaatttaataaagctaattgcttgcataatggttattgtcgtccatatttcggcaactaacattgatgatataacatcaagtaagtggggagtttcgaatttttataactccatatcaagaatatgcgtacctttattttttatggtttccggtgccttactcataagagaaaataccagctttataaattttataaaaaaacgttattatagagtaattcctccagtaattgtttggagtgcaatatactatgtatatccaatgttctatgggtatgagcaaccaagaacaatcgccagtctgtttaattcaccaatatcggttcatctttggtacctatacgcaataataggcttgtatcttcttgtcccgtttttatccatgatttattttaaatcaacattatctgagagagtgttattcttagctatctggtttgtaggttcgtctttattccctacacttaacaacactggcgtgtctggtattagcgcatcattatttggtttaaattctttggctggatacattggatatatttttgccgggaaactaatatatgatcttccatacagaaaattctattctgagattattggtctggtaatatttattacttgctcttaccttacattttatttaacgaaagcatactcacattcatcaggcaaatttaatggtgtattttatagttacttatcgtcattagttgtcttatctgcattttctttattttatgtcactataaacataaatataaaatcaagttttattgcttcgtgtttatctgcattttcatcatgcgcattaggtatttattgtttgcaatcaatgatgattaaagaagtagcttacaagttaaatgtcagagctacacatgacccagctattatatggatacctatagcagttggcgttaccttcgtgtcttgttttgtaatttgctatattgcatcacgaataaaggtaatcagacagattgtgtaa

SEQ ID NO: 286658 - DNA, 711 bp, Morganella morganii
atggataaagcaaaagaacttataattacaatacatcagcctgaaagctacccatggtgtggtttctttaataaaatgatgaattgtgataaatatgtaatattaaatagtgttgatttcagaaaaaactactatcaaaatagaaataggatcctgacaaaaaataatagtatttttcttactataccagtaaataaaagtagcaataaaaaaataaatgaaatcgaaataagcaatgacttatggaaacaaaaacattggactacaatactacaaacttataacaaatcaccatttttttatgaaataaaaaacggccttgaaattcttattaatacctcaggaactaatttatcagaatttaatattagtattatcttatatttcaagaaattattaagtattgattgtgatataatattaagtagcgaacttaacctagtaacaagttcatctgaattaatattagatatatgtaaaactgtgggtgcaagtacctatattagcggaagagatggacgagaatatttatcagagaaagacttcattgataatagcataaatattatatatcaagattataatatagaaccatatacccaattcaataataagaatgaattcgtaccatatatgtcaataatagacttgatatccaatattggcatagaaaaatcaaaagaatatattaggaaaggttggagtctataa

SEQ ID NO: 286659 - DNA, 2397 bp, Morganella morganii
atgaaaattgaatatattgatatccagaactacagaaggcttaaaacttgcagaattcgtctgactgaggaagaaacactgctcgttggggcaaataacagcggtaagacgtcagcaatggatgcgcttattttctttctggatcaacgaggaagaacggctgcgagcatcacatcgagtaaatctccgtcttcacgaaaattaggcgcagccgatttcaccctatcaaattggcatcagcttaatcaatttggtcaagcatgggtgaacgctgaagaggttggcgaaaaaatcagtgactggcagcccttatgcccaacgctggatgtctggttaaaagtcgagaaaaatgaagtccatcgggtacggcacttaataccgacattaaaatgggatggtggactgttaggcattcggatgatttatcaacccaaagatcttgatgccctaaaagcagactttattgcccacttcaaggccgctgagcagcttaaaatcacggcagaaaaaaacgccgaaaaagctcaaggtggttcagcatctgagttcagtgatttcaaattttcagtctggccgggatcgttgcgtgaataccttgaaaaagaggtgtctaaagcttttgagataaaatcttacatcctagatcccgcaaaactcatcacggaccaaggaagtaaattcctgccccaggttcttgtcgaggggcaaattccgctggatttttatcctttcaatggactgttcaaagttgatatcattgatgctactcgtggattttcagatccctatgtggcaaccggctctcagtatggtacctctaatctggctagccagattaaccagtactacaaccgacatttaaaccctaccgaccttccttgtgatgaagatttggatgctctcgaagccatcgcctatgctcaatactcctttgatagaaggctcaacaaggtgtttaacaaacccttgaaagagatagagacgctggggtatccggggttcagcgatccccatatcagattatcgagcagggttaatccaatcgataatctggaccacgaagcggccattctctttgagatccagaaaaccagccacgccgcagggatgccgctgatgagtctgtcagagaaatataacgggcttggttacaaaaatctgatatccatggtctttacaatgatgagcttcagggatcaatggatgcgcgtcggtaaagccggcctaagaaagcctgaggaggatgtctttgttgagcctcttcacctcattctgattgaagagccggaagctcacctgcatgcccaggttcagcaggtgtttatcaaaaaagcttattcggtgctacgcaatcatgatgatttgcggacatccaagaggttctcgagccaactagtggtcagcacacattcaagctatcttgcacatgaagtgggattcgaaaagctaaggtacttcaaacgtaaacccgctacaggtccgcatgacgtgccgactgcggacgttattgatctgtcctgtacttttggcagcggtaaaatccgctcggatgatgtattacaaacctctcagttcgtggctcgctatcttaaaaccacacactgcgatctcttttttgcgaacgggataattctagtcgagggggcggcagaacgtatcctgatgccgcattttattcgtaataatcccaacgctaatacaagcttggacaacagctacatttcgattctggaggtaggaggagcccatgctcaccggctgagggcattgattgacatactcgggattcctacccttgtcattactgatacggatgcccaaaagcctccccttaaattaccggcagatgaccaaaaaggtagctcaggtactaaacccaaagccatcagacctgaatttggcaaggaatacattactggcagccataccatcaaaatttggctcgatgttgaggggaggctggatacggtccttagaatgccggagcatgagaaaattcgcggtaaggtcaggattgcatttcaatacggtattcccattaaattcggaaaagaggaggaggccgaggcttttccgtacacatttgaagacgctattgcattgacgaatcccgagttattcaaaaaaatagaaaaacctactggaatgatgaagaaaatgcaggatgctcttaacctcgatacgcttgaacagtgctgtgaaaaactctatttagcactcaaagatgacaaagccgagatggcactcgatttactgtactgtgctgaccccgctgaactcgccgcgcctaaatatatccaggagggacttgactggcttaaaaaagagctggaagtggcgagtagagaccttacgccggaagagccgaaagtcacctccgttccggagggggaataa

SEQ ID NO: 286660 - DNA, 1869 bp, Morganella morganii
atggagacaccatccgcgaacgaacctgcagtagaacagcttttcagttatcttgatctggacaatcctagaagttttctgctttttgctggtgcgggatctggaaaaacccgtacgctggtcagcgtgctagagaaaatgaaacaaaggtattcttcggaactgtctagatccggaaaaagaataggcataattacgtttacaaatgcagcctgcgaggaagtacaaagacggttattttttgatgccaatttcatagtttcaaccatacacagtttttgctgggacttgatcaacccatttacatcagacataaagctatggcttaaaaatgaactcgagaagagtattgaccaactcaaccgcgacattgaaaaaagcagaaaacctgatggtattacggcacaaaggaacagacggagtttagccagcaaaatgaaacggctgcaacacctcgataaaattcaaaaattcagctattcccctacaagtaacaggcctgaaaaaggggcgttaaatcatagtgaagtgataaatgtcactgcctatctcctccagaatgaagcgctactcagagagattttatttagcagattcccagtacttttgattgatgaaagccaggatacgaataaatatcttattgagtcgcttataatgacgcagcaggagcatcccactaaattctgcattgggctgttcggcgatatgatgcagcagatattcagtgggggaaaatctgatttggcttctcctttacccccaggatgggaatcaccagagttaaagattaaccaccgttcgccggtgagaattgtcaacttgatcaataatatcagacaatacaatgacacacatattcaggaaccgggtcctgacgcccagccaggaatcgcacgcttgtttgtggtcgacatgaacacccacaaggaaagagccgatattgagcgtcaggttgctgaacatatggctgagcaggcggctgatactgcatggaataacaaaaaatcagtcatggtactgacgcttgagcatcatatggccgccagacgcggtgaattcgaaaacttcttgttgccccttctagaggtcgaaagattgggtgatgcagcaatcaatggggatagccaagagataacattcctatcctcacaactatggccactcattgacgcaattcgcagtgatgatgattttaaaattgccacaattatgcgtaagtactcgcctgttttttcgagttcgcgcctcgaatatgcagacgatccactattgctcttccgggaagcacaatgccaaatagacaagataaaagtgcgtcttggcgagaacttggatttccccattctagaagtgtgcaaactgattcatgaaggggaattgctgatcctacctgaggctttcctgcttcacctagcgctggtgccacataaggatgatgaatccacggaggaagtggacgtcaacaaagagcatgaagcttggagtagatctctgagcgcatccatccgtgaactggaaaattacattagctatatttcacctacatcttcctacgacactcatcagggagtgaagggactgcagtttcctcgagtcatggctattctggatgatgaagaggctcgtggattcatgttcagttacgataagctactgggcgtcataccgcactctaaaacggatcaggaaaacgaaagtgcggggggggactcttcgcctaaaagatcgcgccgccttttttatgttatctgcagcagggcacaggagagcctcgctgtcgtcgcgtacactaaagcgccctatttagttgaacggaccgtaattgcgtcaggttggttcgtaaaggaagaaattatgcatatgtga

SEQ ID NO: 286661 - DNA, 648 bp, Morganella morganii
atggctgccggtgagtgctataaccgtaaaaccattgctgccagtctgcgccgacagggtctgaaggcgaaagcggcaaagaaatttaaagtaacaacggattcaaaacataagcgctccgtggcacctaatctgctgcaacaggatttcactgcatcagcaccgaaccaaaagtgggttggtgacatcacgtacttatggacggacgcaggctggatttatctggctgtaatgattgatttattctcacgggcggtcgtcggctggtcaatgtcagcaagaatgaagtcgggtctggtctgtgatgcgttgcagatggctctgagccgccgggaccatcctgaaggtgttattattcattcggaccggggcagtcaatactgttccgatgattatcatgaactgattaaaatcagcaggttaaaatgcagcatgagcgggaaaggcaattgttacgataacgcctgcgcagaaagcttttttcacagccttaaggtggagctgatacacggggaacactttcccgaccgggaaataatgaaagcggaggtgtttaactacctcgaagtggattacaatcagaaacggcgacatagcacactgggctatatcagcccgatggcatatgaacgacaagctctctcttag

SEQ ID NO: 286662 - DNA, 297 bp, Morganella morganii
atgaatcaatcgaacgatcgtaaaacaagcaagaatcgctatccggacgagtttcgtgagaatgctctggcacttgctcagcggattggcgtagcaaaagccgccagtgagttgaaccttcacgagtctcagctttatgcctggcgtaaaaagcagcaactggcgctttcctgttctgagcgcgaacagcagcaatctgttgaaattgcaaagcttaaacgtcaactggcagagcagtccgaggagttggctatcctccaaaaggctgctacatacttcgccaggcgcctgaagtga

SEQ ID NO: 286663 - DNA, 369 bp, Morganella morganii
atgtggtcgtttgttggcaacaaaaagcaacaacgctggttgtggtatgcatgggagcctcacctcaaacgtattgttgctcatgcttttgggcgtcggaacaaaaaagcgttgcgcaaattactgggattgctttcaggcttcagcatagttttctggtgtacggataacttcggtgtttatgagatgttgccagataaaaagcacataactggcaagctttacacgcagcggattgaacgtgaaaatctgaatcttcgcaaccggttaaaacgactgaatcgtaaaatactcgggtactcaaaatcagtggaaatgcatgataagataatcggcacattcatcgagcgtgaacattatctgcaatga

SEQ ID NO: 286664 - DNA, 2133 bp, Morganella morganii
atgtccaggctgactgatttaatagctaaagcgcaggccaaagatccgcaactggccgctgatcttgatcgagaaatcaagattctgtcgtcacgtcttccctttgggcttaattttgaaagacatagccctgaagttgttgagttgccattgcggcctattcgcaagggagataaagtccgcgtcctgccaaagcgtggatccactaagaaaggtgatcaacggttgtggcagattaaaaccatccacaaggtgaagaaggtcgctgatctcgtgttgctgggcgcggctgatattgagactcagactgtagcgctgaacgaccttgtagttatagctgaatttcgtgacacgatctggcctgggctggtcagtacgggaaaagtgcaacgcggtggagacaaacctttccactcagttatcaatggtgagaactaccatgtgttaaaggcgttaacctatacacacaggggcaaagtcgacgccatctatatcgacccgccttataacacaggggcaaaggactggaagtacaataatgactacgtcgaaggtgacgacatctatagacacagcaaatggctggcaatgatggaacgtcgcttgctggtggctaaggaattactaaatcctttagactcagtactcatagccactattgatgaaaaagaatatttgcgtctcggcttgttgttggaacagactttcccagaggcgcgtattcagatgatcagcagtgtcataaatccaaaaggtgcaacaaggagatcggcatttgcacgtacagatgagtacctatttattgtcatgtttggcgaagctgctccaattcctgtttctctaagtaccgagtggaaaattgtcagggatcgtcgagctgaggggttaaggtgggcggagcttttgcgtgctggctcgaatacccagcgcgaagatagcccaaatcaattttatcccgttttcattcgcaatgacgaagatggcccatgcttcgactctgttggagaagcctatttcggtaatgaccgaagcgaaataacacctccagatggttgtgtagcaatttggcccattagagcaaacggaaccgaagggaattggcagaatagtgcatcgaatttacgtgatttaattaacaagggattcgcgcgactaggcaggtggcgtgtagaaaaaactgctatcacctatttaaaaaaaggagagcagagtaaggttgaatccggtatttttcctattattggcagaagagcagataattcgatcatcgttgatgagtctgagtacgatcctgttttcattcccggaactcagtggcggattggttcccataatgcagagcagggaggaactaacttgcaaaaattaatgatgcctgacagaaaatttccatttcctaagtcactttatgcagttgaagatgtgctacgtttcttcgttgttaacaaacctaaagcaatcattctcgatttctttagcggctcaggaactacagctcatgccgtaatacgtttaaatcgccaagatggaggccacagacaatgtatctccgtcactaacaacgaagtcgcagccagcgaacagaaaaaactacgtgaacagggcttacgccccggagatcccgaatgggaaaaatggggtatctgtgactacatcaccaagccgcgaatacaggcagccatcacaggtaagactcctgagggcgaaccaattaaaggcgaatacaagtttaccgacatattcccaatgtctgaagggttcgaggaaaacgccgagttcttcaccctgacctacgaagctgagaagtcggttagccataacctagcctatgcacgcattgcgcccttgctgtggctacgcgcgggcgcacgcggcaatcgtattgagaaactgcctgctgaaggatgggcagtaactgatacttatggccttctatcggctgtggatcaggccacacctttcattgaagccattagccacgccagtgacgtgcgagtggcctttatcgttactgacgatgatcgccacttccaggctgtcaccagacgtctgccaaaaggtgttgagccagtacgtttgtacgaatcgtacctgaccaatttcagcttcaccagtggggaattaacagaatga

SEQ ID NO: 286665 - DNA, 288 bp, Morganella morganii
atggatactcgcattcagttcaggattgagcctgaaataaaaaccttagcgaagcaagctcttaaaaagaaaggtgtttctcttagcgatgcattaagatcttttgtttctacattagcgtcgacagaaaaagacatgacgaaggaagatgcatggttgaaggagcagatcgaagataccttcgagagagtggcgagaggtgacaatgtttattattcagaagatgaagctgaagaaagaatgaacgcttttattttgaaaatagaaaaacaagaacaattagcgtaa

SEQ ID NO: 286666 - DNA, 249 bp, Morganella morganii
atgatattaaagagtgctgatgccggcggcctgactgttgctgaatatatccggaggatcgcgctccgaagacgtatcgttccgaagcctgactatgagttattttccgagctgttacgcttgggacagcttcagcgtgagttactcagggaaaataatgggatgtaccgtgaagagtttactgaggttataaatctgattaaagatacgctgaaccgggtcggtaactcatcgatgaggacagaataa

SEQ ID NO: 286667 - DNA, 180 bp, Morganella morganii
atgaaactcacaacgcttgaagaactgcataacgaattcctcaaagatccggaattccgggctgcctatgaagctgaattgaaaaatcctgagccggattatcagatcattcgtcaccatgatgacggtacggaagaggtggtttttgatacccggaatgataacgctcaggacgaataa

SEQ ID NO: 286668 - DNA, 264 bp, Morganella morganii
atgatatctaccgtgaattggtcagacaaggctcaatctgacagggaaaccatctttgaatcaaattataaaatttcagggattaagtatgccaaatccgaaaatggaaaaattaaaaaagctataggtacaataaagaaaaataaccaaattggccgtaatgacctgcatccaattggatatttatatgttttacctaaaaaatacaaaatattatatcgcttagagagaaactgtatattcatagagcggatattttattaa

SEQ ID NO: 286669 - DNA, 396 bp, Morganella morganii
atgacatttataagccagcttagtaaatcaagatcttctgccagcagaaccggtggagcatcgataatagtaactcaatcatataaaccatctactgattcgcaggagttgtctatacgggtaacttctgcgcttcttggaagagcagggatcgagatcggagatacagttgatgttttacatgaccctagctccgaaacatggatgatcaaaaaaatagacgggggattgaaaataactggtaaagaaaacgcaccgacggggttgattcgttacactctaaaagagggtcatgctaggtttactgatgataaatcaatactgccaattcgaaaaacctcaaatgaggatttgttagaggtagatgacgataagattattttcaaagtaaaataa

SEQ ID NO: 286670 - DNA, 603 bp, Morganella morganii
atgggtgatatactatttgtagctataattaaaaaactaatatctcgaaacaaaaacaatataagaatatatttttcagcagccattattccagatgcagctatattcatatcaactggtgatataatagaagtatctcatggtgtaatccatccacaacatccgacatattattttttggaaaaaagaacaatgccgatagttgtcggaacacagcaacaaaaacaacaagtaataaataacggagttagtgaaaatattattatactaagtgacctattttttagatcatattttcattttaatcctgatgcccccaaagtttttatcggccaatttggctttagcttcgaagagactgcatcagaatttttagatgaaaatactgacatcttgataagatttcatccgcgttgctctgatgattttcgttgtaaatatgccaatagagagtataaaggaaatttagcatcatatttatattctatatccagttctatgctactcgatgctcaacttgcaggtataccatatagctttgtttattctaaaaataaatcttttgagaatgaattcttattttcaaggaatggtttattgtga

SEQ ID NO: 286671 - DNA, 345 bp, Morganella morganii
atgggtgcgagtgcgctggcaggcgggatttttatggcgtttgttatctggcaggcaaaaacttatgcctcacagattgccggagtcggggctgagggtgcattgcagggagcggctgctatggggcttaccgcaggcggttttggtatggggcgcatggtgtcaggcggtttacgcatgggaaaaaatgcgggtgtcggtgcaggtcgcggacttgtcgggcaatccggcggatttggtaaatcggaaggcttttccggtaaagcagggaatgtgaccggacaggcgacacgccgtatcggaaaagaggtcgcggcgatttataaaaaacggtttgaacaataa

SEQ ID NO: 286672 - DNA, 204 bp, Morganella morganii; identical to SEQ ID NO: 286655

SEQ ID NO: 286673 - DNA, 771 bp, Morganella morganii
gtgagctacatatattatgtaatttttggtgagacatgggggagtggtcacctatctagggcagttcattttaaaaattcattacctcaatctgaggttacaattgtcattcattttgagaagccatcagatataataattgcgaataattatttaaaaactccctatcatgaacctgtaattaaaaatagccagaataagatattaattaatgacaccttaggtaaatttacattacctggggaatacaaggaagtttggttattagattctttagaagaaagaccatgcaaggctaattttaaaaaatatcatatactatacccaacaataggtagtactgatttcccatttaaaaaacacactatgccaaagaaaaaaacctcagctcttatagtacagggagggggtgatgatcataaaaaaatacctgaaatccttcttgaaataccagaagaaatatatacttgggtatgcataggaaataattgccgatatattaatgagcttagtgaagttataaaaaaaagggacaacagcacattactcatagatgttccaatattacaaattctacctagtagtgattatattattacagctgccggcaatacactactagagataatggagaattccaataataaaaagattataatttttacgcgggaagagaaagagatgcaaacggccaatatgttttcaaatcacaaagatgtattaaagatatttggattaaccgaaaattttcgttggataaaaaatgattag

SEQ ID NO: 286674 - DNA, 213 bp, Morganella morganii; identical to SEQ ID NO: 278109

SEQ ID NO: 286675 - DNA, 546 bp, Morganella morganii
atgtgtttagctcatgtatacatgactggttctcgtagttttatattaatattgctattcctcatattttataaaccatgggtaacgagtaaattttctgttaagttactttcagttattacattaatatcttcactcattatattaggtatcgttaatcagcgcttttcaacctcatttgacacctcgtttggttctaactatagtcgtatggaattccttaatctaggaataaccctttggaaatcatatttttactttggcgcaggccctggtgaaagtataaattttcttattgccaacgtgacagagagccaaccagccatgcacttcgatattttattaattctaagtgaactgggtttaattggtgtacttcttttgtcattgctatttatacagttaaagaattctaaaaatattatcatactatctgctttaatatttctaagtttacaaaactctatatactatacaccatatctcatttttataatacttgcggtcgaaagtataaatatagataaaaattatataaaaaggtaa

SEQ ID NO: 286676 - DNA, 567 bp, Morganella morganii
atgagtcgtcgtggaaaaaaaagtatactttcaatttgcaggaatactatactaaaaaatgaaagctacgtgagcccactaactcgtattaatgattctatactcggtgaaaaaagctcagttggttggtttaatcaaattcagtataccaatatagggatcggtgtatctattggctctcattgcaatattggagcattaaatcatctttatcattttcctgttcaacgattttccaaacgatcatttaacaaaaaaatagataatactattattggacatgacgtttggataggatcccattgtacgataatgtcaggagtaaaaattggtataggtgcaattatagcatgtaactcttttgtttctactgatgtcggagattatgaaatcgttggagggacccctgccactttaataaaacaaagattttctcctgagatagtagcaaaactcataaaacttgaaccatggatgttggatgataatattctagttaaacttttttctgaagagaaagatatggaaaaaataattaatacgttaggaaatatacgtgcaaaataa

SEQ ID NO: 286677 - DNA, 213 bp, Morganella morganii
atgacaagtttgcagcaacgtgctgaattacaccgccaaatctggcaaatcgccaatgatgtccgtggctctgttgatggctgggattttaaacaatacgttctcggtgctcttttttaccgttttatcagtgaaaattttgtcagttacattgaagccggagatgacactcctgatgaggcctacttcggtaggcaaagatacgcagcatga

SEQ ID NO: 286678 - DNA, 351 bp, Morganella morganii
atgagctggatcaaccacttaagaagtcagcttatgtatccaaccatcggggtccacttctgttggttgttcaaaagcgcaagtgatggggttgacaagttgagtgaggaggccagaaaacaccctgagttttcagctaccggcggggtcaggtcgatggacttcagggtgccgccgcccaaatctgttgttaacggaggagaccagaactctgcaacttacaatgtggatgtgaagcagaccattaataccaatgatgcgacaaaagctgcaaataccgctgtcgatggtttgacaagggagttaaagcgcactttcaacaatgggggaggtgtattcaccccaaattag

SEQ ID NO: 286679 - DNA, 870 bp, Morganella morganii
atgaaaaagatacttaagtgggttggtgttatttttattgtcatcatcgtgattggtgttgttgctggcaaagatgacaaggaagatgcaacaacaaatagtaactcacagccgcctgaggcagcaagtgcagcgcccgcaattgtggctgataaagtcgatgagaacaaaccgtcaccatcaataagtttgacggaaaatgaaattgcggcagtaaaagcaattattaaggatgacataagagtaagctttgatgatggcgatagtttttatgattatgggtatacgccagttacagcaaaagaaatgttcaaagtgtactcagccaatgaagctcgcggcgacaagacatttaaaggcaagaagataattatatctggggttgtagacagcatatcgtcatcaataggtgatataccagtggttagcttgaaaacgggcgaaatgttccaaacggtgaatgttaattttgcaaggaaataccgcgacaccgccatcgacctgaataaaaatcaaaaagtatcatttgcatgtgttggcggtaccgtggtaatgggaatgccatctgttcgtgattgtgtgcctttaaatgtggcgataaatgaagtcgctgaagacaaaatgaaagatgtagaaagtgcattgcgtaatcacaaaacaacagctgacaagggcttgctccagatggttgtttttgccaaagcagctggaaaggccactgataactttaaatcatgcaaacctgatgatattaactgcatatcaggcaaggcaaaatcaatacctaaagcaaaaggtggatttgacgccttgatgaaagagtcggcgaaggagatggatattactttaccacctaaaggtgaaaaataa

SEQ ID NO: 286680 - DNA, 447 bp, Morganella morganii
atgaagaataacgtgattaatgatatcgcacagctaaaggcagagtacgcagaaagaattcagatagttgataaattatctgaggagattaatgcatactactttagcctgcttgaaatgagtgaaagccagattcgtgggagcatcatccaaaatggcttggatgaaaacaaggcctgcgagaatgccctgagaggttttgaaggagtcctgaaggtaagagttaagcaagctgacttaccaaaagaggagaggggggaaatgttgtcctatttgcattctgttgctaccgcaagacatgcaatcgccagactaaatgacctttcaaggcagttatttactatgccaaaaacatatgaaagtgacattaattttatagctctgagagaattggctgatcatacaactaacaagctaatttcaggggattattcttttactggctaa

SEQ ID NO: 286681 - DNA, 438 bp, Morganella morganii
atggatgaaattgaagtaactataaatgagcaagcaagagctcaattctttggtgagttattccaaaaacatcaggaccttgaatcttgcttaataaatgatttcaaaaaatataagtcagatggggtcgttcctagttactttggcagagatgtcgcatacgtacagccatactcggccttaaaagcctgtttaatgcatatccatttgaaaattcctccagataaatttccttctgatcgcgtccagtactacagaacgcataagacggatgactcagaaaatgacatctgtttagtgtacactcaggggcttatagaggatcatagatattcaattatcgccatattacatccagatgctcatgtgaaagcgcgagactacaaagtaatggatgccttagctcagttagcacaagacttcagagataacaactaa

SEQ ID NO: 286682 - DNA, 285 bp, Morganella morganii
atggaaaattttatccgttgcccgttatgtcattctgtttatacccatgagcggcatatcggcaaaaaaggaggtgcgatcctcggcggcgtatccggtaccttaaatgcaacagatactgaatcagaacaacctgttatcaatacactgtcagggtctcatatcgccatgctgctcagccgttttgtcgccggggctgctatcggtgccgtcaccggctcttcactggacggtatgctcttcgaccgttttaaatgcgcatcctgcggacatacctttaattag

SEQ ID NO: 286683 - DNA, 585 bp, Morganella morganii
atgcacataacagcgacggcttccccatgcctaaaatcggggatgatttctgtttttattacgaatttaggtaaatataacgaaggtgaactggttggtgagtggcttgagcttccggcaacctcaaaagagatcgaatactgtttagcccgtattggtattgatggcattcgctatgaagagtatttcctgacggactatgagtcctcaattgatggcctttcttcctatatttcagaatataacgctttagaggagttgaatgaattagccactcagttagctgcattatcgcatgatgaaatggatctttatcaggcagcgattgaaatcggtgactcagtgagctcaattcatgatttgattaatttaaccggtaatttagcggttattcagcgattagaccatgtgaataatgaatacgacctgggctattactggattcaggaaagcggctgttatgatttggcacaattcggtggcttagcacattactttgattatgaacgctatggacgtgatatctgcattgaacaagggggaattttttacggtggcggatatgtttatcatacggacgggtag

SEQ ID NO: 286684 - DNA, 678 bp, Morganella morganii
atggatgccaatttaaaacatgtttatgagcacatgattgttttgggtgctggctcactttctcatgcaaactacctagctcattttgttgactatgcaaacacaatgtggtctcaattgggcgttttacaggctgctcatgcttgcgaaattttccttaaggctcgccttgcacaagaacatccccttttgatttttgattcattacctaaatcaacagctaattgcgtgaataaaacgacaggactgctggatttcgagagtttattagaaaaagggcaaacgattacatattccgagttgcctgagaaagtttgggcatcgacaggtgtcaagataaacaatttagaattgtacaatgcctttggtaagctaagaaactctatccaacattttgcggcgcctaatagagatgtatccatccaaacgtcacaatttatctacgatgttatagatccctttatcaattctgagtgggggatgtgcgcgatggattattgtgatgactctgaggtatatgaatatttaatacccgtattagcggagcgggatattaattttattgtttctcaaaaaatagttggtgggttgagtgaactttcaactctcatcaaagatggaagtcagtcatatataaaagaaatgatgcagagaggacaaaatgctggtttgaagtag

SEQ ID NO: 286685 - DNA, 870 bp, Morganella morganii; identical to SEQ ID NO: 277673

SEQ ID NO: 286686 - DNA, 570 bp, Morganella morganii
atggataaattcaaacacctgatgattgaccttgaaactatgggtaataagccggattccgctattgtggctattgctgctgtgccgttcgacatggtttccggtgtaactgatgatgcacttttttatgaaattatcgacctgcgcagcagcgaaaaatacggcggtagtatcgacgcagacaccgtgctgtggtggctgggtaaaagcgataatgcccggagtgagatcattaacagcgaaaaagctattgatctgccggatgcgctgacccgcctgagttcgtttgcttcagaattctgtgaagaacgagtgcaggtatggggtaacggaagtaatttcgataatgtgatcctgcgtactgcatacgaaaattgcgcaatcactccattctggaagcactggaatgaccgggatgtgcgtaccattgtcgagcttggccgcaatgccggcatcgacccgaaaaaagattttccgtttgttggtgaagcacacaatgcactggatgatgcattgcaccaggtgaattacgtggtcgcaatccaccagcatttatttaaaaacctctaa

SEQ ID NO: 286687 - DNA, 261 bp, Morganella morganii
atgaaaactgaatacatttatatctgtgctcaggcgtactgcaatgaccagggcagcggcatcgaatattacaccgactatgagcgctttgataatcgaaatgacgccattaaaaatggctggaagcaacgcgaatcagacgatttcaacatcggcgttcttgttaacggccgccttgtttcggtcgactggatggctaaaccaattgataccgaaccagaaacattacggaaaatcgaagaccagcttgagctgtattaa

SEQ ID NO: 286688 - DNA, 447 bp, Morganella morganii
atgctggcgcaggataaagagagtctttattactttaatctgcgggagatcccgccgaaaacggacaaagccaacacattgcagattgccttacagacccgcatcaaactgttttaccgtccggcgggcttagtggtgacgcagaatgcaaaaccatggcaggagagtattaccctgacccggcagggaaatacatacacggtgaataatccgactccgtattacgtgacgatttcatccgcatctgccgcatataaaggaaaggatatcagcgggtttgaggcatttatgattgcgccaaacagcagtgaagttctcggcggcagtgccgtgtcactggggaatgcgccggtactgggttacatcaatgattacggcggccgcccgaaaatgatttttacctgtcagggtaatacctgccgggtgggcgaagtgaaaccgggctga

SEQ ID NO: 286689 - DNA, 603 bp, Morganella morganii
atggttacgctttggggaaattatgaggggatctctcagtgcaaagtaactaaaaacttcatgacacctatcgattattcagaaaacataaaaaacatatgtactaatcgatacaaaaaagcggttgattttatcaattcacatccaggtaaaaaaataatatggatgcaagcgtggtactctggtcgcgtcggtgaaccgctgagaaaagatgttgatagcgaaaacaatttcgttagtgagattggttattttcttgatgatataaaatcatcaaactcgaaactatatataattggtgatactcagggcagcaaaaaaataatgtaccaatgcctagcaagcaaagacctgcctatcaacagattattcacaaagtgtgaagaatttcaagaatttaaaccattcaaaataaatgaaaggttttcttcccttgctgattcacgtgatgatgttgtatttattgacccttccccagctctttgtgacgatgagaagtgtaaggtattggacggtgatgaacctgtgtatacagataattcacaccttacaataaaaacatcaaaaatcgttggtgagtatattttcgataaaattaaataa

SEQ ID NO: 286690 - DNA, 480 bp, Morganella morganii
gtgaagaagttactatttgttgttccttttctgctggttggttgcgtggcaaaagtaagtgattatcaggctgaatgtgaaaagcaatacagtaaacttagcgacatggctcagtgccttgaaatcagcctacaaaatgacgataggatgacatcatctccagctcccaaaatgtatgctcttgcggcaaaaatgctcggtcaggctgtcgatgaaggaaaaatatctgatgttcaggccagatttgaactgcaaaagctatatgtcgaaatccagaacagagaaagcgcagagcaattggcaagaaatcgaatattccagcaatcgctcctgaattatcaagcaattcaaacaatgcagacaatcaacaataaggctgcgcaacatccaatttacacgccaccgattcagcagcatggcaatgtttcaacaaactgctaccgcatgggaagcaacgtgcaatgcaatagctcatattaa

SEQ ID NO: 286691 - DNA, 1389 bp, Morganella morganii
atggcaacctggaatcaaggtgtaaactcaggcgggctactggctggtatcgggcagtccaacattaatgccccgcaggctggtgacgttaacgcaacgttaagtatgattcgtgagaacaatgatcgacagaggagcggtgctaacaatgtggggttgcaggcattacagggtttgcaggggataagtgaactttataaggctgaccagcagcagcaacggcagaaagatttcctgcaaaaatacggggaggccagagcagctggtgacatccccagcatgcgtggtctttttgctgaataccctgaaatgggtgagcaaatcggcaagggaatgacagggatatctgccgacacaaaagagtcgataggtaacttggcggcggggttccgtactgcggctgcaaccggatctggcgatcagttcgttgccaaaaacgcggcggagttcctgcgggttggggttgaccctgctgatttgcagaagaggttaaaggaagaccctaattcagcggtcgaattagcagattgggttggtcttagcgcggtaggtagtgaaaagtatttcgacatcattgacgctaaagaggggcgtcagattgaccgaggaaaactggccgaaacagttcgcagtaatcaggctggcgaggcgttaactgcccgccgcgatgagcaatctaatgcgcgtggttgggctggtattagcattcaaaagcaaaatgcagatatcgccagagaacgccttaacctcgaccgagaacttaaaggccttgaatataaagaaaaggctttagatcgccaggtatcaagagaaaccaatgaattaaaaagggcggaacttgaacaaaagcttgatggtattcgaacccaaaaagaagcagccaaggcagagcggtatgacactgttgcaagtcaggtggattcggcagacagggcaataaaaactgcacagagcatcattaattcacctggttttacagggtattttggtgtgaacgtaaacccgtttggcagccggttcttacctggtactgatgcatccgacacttcggccatggttgatactctgaaatctcagggctttatgtctggtattcagcagatgcgaggcatgggcgcactttctgatgctgagggccggaaagttatggatgcaattggtagtcttgattcaggcatgtcagagaagcaggcaaagaaatcaattgaggggattatcgaaactttcgagcaggggaaaaaacggttggaaagcagatatcctgatgaattcagtaaatactcaggcgaactcaaccagagtaaatacggcttgcctataggccaccaggaaggcgggtatacgtataaaggcggagacccttcagataaaaataactggagcaaataa

SEQ ID NO: 286692 - DNA, 921 bp, Morganella morganii
atgcaaaatttagacaatgcattacaaggatttataacatataacattgatgaatttaagaaaaaacactttcctgatgctgacatggtatcttactatggtggaataaatttctggtctaaacattcattccagccagtggtgtcttttcttggtaaagaagcaagaaaaagaagagtaaaaaaattggtgattctacttcagacaactgggggaagtgtagagtctgttgaaaaactagttgaaataactagatatttttatgatgaggtgtattttataatccctgattttgctatgtccgccggtacaatatggtgcatgtcaggtgataaaatctatatggactacgcatcatcgctaggccctatagacccacaagtcgccaacccagaaaaccaatgggttccagcgttagggtatttagacaaagttgaagaaattataaaaaaatccgagcagggaatggttactcaagcagagctaatgatgctcaaccgactcgaccttgcagagctacgaagatatgaggaagcaagagagttatccaaagaactcttgaaaaagtggctggttgattataaatttaaagaatggaatcacaaagagagctcaggtgaagctgtcagctaccaagataaggtcgacagagcagaagagatagctatactactatctgacaataaacgatggcactcgcatggccgctcaattggtatcaaaactataattgatactttaagattaaaagttgaagattactcagacgatgaagatttttcgtctggaattattaacatacacaatttattgcttcagtttgcaatgaaatcaaatcaagaaatagttgtcatagggtcaacaccgtttttcgatgatgaagcccaacaactggagacggaagatgaacaaggctactaa

SEQ ID NO: 286693 - DNA, 177 bp, Morganella morganii
atgaacaaggctactaactcaaaaatcattactaatgtcatgtctataagaaatagagaaataaatgaaagacaagtaaagatgattaatgatcttgatgctatgggattactggttaccccttctttcaatctcaaatgctctccatctgcatatttccagcctagaagtaactag

SEQ ID NO: 286694 - DNA, 225 bp, Morganella morganii
atgaaatttgaagaattgagtctggaatcacaagacgcagcgcgtcaggtattgtctgatatgttgaaaatgaagtatcacaatactcatgacctgccgggcggcacagtgaaataccttgggaaacgaattgttgaggcgttttataacctagaaaacgaaaagccagaaatgggagcgtgcgactcccattgtgacgaagggaaagccagcacagaaaattaa

SEQ ID NO: 286695 - DNA, 282 bp, Morganella morganii
atgccaagatacattgttagggttgagcttccgaatgctgattacgctgactaccagaatttgtatgaaagaatgaaagctcacgggtttgataaaaaaataaaaggtagcaatggtgtttggtactacttgccagacgcagaatataactacgaaggtaatctaaattctgacaccattttcgagcgagcaataaatattgccaaatcagttagaacaaaggccaaagtattggttactgaggctgtttctaggcgctggtacaacttagataaagtttaa

SEQ ID NO: 286696 - DNA, 234 bp, Morganella morganii
atggccgataacaacggttggattagcgttaatgagcgcctgcctgaaatcagagatgattctgcactggcttactggcaagggaatggcggcatggatatggttcatgttggagatttttttggtgacataaccaatggccgcgacgaaaacggaaaccaaaaatacaccaagctttatctaagccatggaataactcactggcaacctatgccagaggcaccaaccaagtaa

SEQ ID NO: 286697 - DNA, 168 bp, Morganella morganii
gtgaaatttaaggttggcgataaagtgaaaatgataccgaatggttttcttgggaatatcgtagtgagatgcaaccgggaatatttagtaagaaaactgaatggcagcgaaggatggtaccaagaagacgaactggagctggaggctgacaatgaacaaatatcgtga

SEQ ID NO: 286698 - DNA, 327 bp, Morganella morganii
atgaacaaatatcgtgacaaatcagactttgagattaataaggctgtgactgaagaattaggcgaacagtttacaacaaatggaaaaatcatatttgttgaagcagatgtgccatcaggaattgtaccgtattctgtctttttcgacccatgcaacaacccagctgacgcaatgccgattactattgagaatggcatatcaatgattaaaagctcagggggatggatatgctgtcatggtgcagccggtgtaattgagcatgaaaacttataccgcgccgctatggaggtattcctgatgatgaaggacgcggagaatgagaaatga

SEQ ID NO: 286699 - DNA, 708 bp, Morganella morganii
atgcagaaaaatattcaggcggctatttttgcacatgctgaacgtgaatatccccgcgagtgctgcggggtggtcgcgcagaaatcccgtgtagtgaaatattttccctgccgcaatgtcgcggtcacgccggaagagcattttgtattatcgccggaggattacgccgttgctgaggattggggtacggtgaccggtattgtacacagtcacccggatgccaccactcagccgtcagaactggataaagcacagtgtgatgcccttggcgtgccgtggtacatcgtcagctggccggagggggatctgcggactgttcagccgcgcggcgagctgccattacttggtcggccgtttgtgctcgggtttacagactgctgggggctggtaatgagctggtttcggcaggaacacggtattgaactgccggattaccgggtggattatccctggtgggagcagagtgagaaccgttacgccgataactggcaggaagcgggatttattcaggttgatgatccgcaacccagtgatgtgatagtgatgcaggtacaggcaccggtcgccaatcatgccggcattctgctggctgataatatgctgctgcatcatttatacgggcatttgagccagcgggtgccgtatggcggttattggcgtgatcgcacagttatggtactgagacacaaaatattcatgactgactga

SEQ ID NO: 286700 - DNA, 321 bp, Morganella morganii
atggctcacggaattattgtatatgatgaacatggtaataaaatattagattccggcaaaagactcggcagattcgtcgggtggcatgatgttaaccccgcacctgtcggtcagtttaaatacaactgggatcatcggaatttgctaccgatgggggagatttttgtctgggttaatccgagcttttggttcaatcataacggctggtgcgattgccgggttgaaaatggcgttattatttttgagggtaatttaaggcgaaacgacgaacagagagccagagaaacttatatgcgtatattatatggtgtaaaatcatga

SEQ ID NO: 286701 - DNA, 330 bp, Morganella morganii
atggaatatttgtttatattttcatttagagacttaattgcctttacgattcctgcttttattggggggcttatcttcattagaaggcgtaaacagaatgaaataagggtaaacagccttcttctttggctttttttaataataggctctttttcggatatatttttaaccatttacacagaatattcctacagtcacctatattataatgataggccaactactattttggattatgatcttgcaaggattgttttttttgtaattgtcatgcttgtttcagtcgttcttttttttcaggaactacgtttaaaaaaacacggtcattga

SEQ ID NO: 286702 - DNA, 600 bp, Morganella morganii
atggcgcaggatgtagtcagaagccgaaacgtcagtatacgttttgcctgccagctgtttgctgtcagcgaaagttgctatcgttatcagcctaaactgaatgaagaaaatcaggtcattgccgactggttgctccgcattactgacagtcaacgcaactggggatttggcctgtgtttcttgtacctgcgcaatgttaaaggtctgcggttcaaccacaaaagggtgtaccggatttactgcgagttgtcgctgaacatgcgcatcaggcccaaaaaacgactgaagcgggataaaccggaaccactgagagtacctgaaagcagcaatgaatgctggtcaatggattttatgcacgatcagctatcagatggtcgctctgtccgtttactgaatgttatcgatgattttaatcgtgaggcactggccatagaggtagatttttctctgccagcaagtcgggtagtcagaacactggagcaactcattgaatggaagggaaaacccgcagccattcggtgtgataacggaccggaatatacaggtaacatactgatatcatgggcggctcagcagaatataatgcttcgatttatataa

SEQ ID NO: 286703 - DNA, 870 bp, Morganella morganii
atggaagcattagtgcatgttaacgcttttttagacagagatagtgaaacttttagctatgtgattgctgatttaagctccggtgcagcggttattatcgatcctgtgatggattttgattataaatccggtcgtatttcaacgaaaggtgcacaagaaatccttgattatgtagagcagaaaacatttaatgttgaatggatacttgaaacccatgcccatgccgatcacctctctgcggctgcatttttaaaagaaaaactcggtgctaaaattggtatcggtgaacatatccgcgaagttcagacaatttttaagcagatattcaacttagaaaaagagtttttaccaaatggctcccaatttgatcacttattcaaagacggtgaagagtttaaagttggcagtttatctatcagggtgatgcatactcccggccatacgccggcggattcagcttatgtcattaacggtaaaatggcttttgtcggcgacacgttatttatgcctgatatcggcactgcgcgctgtgacttccccggaggcagtgctcaagtgttgtatctttcgattagaaaagtgctctctttgccgcccgagactgcaatctatgtatgtcatgattatccggctcaaggtcgtgagtataaatttaaaactacagttgcagagcaacttgagtacaatattcatgttaaccgtgaagtgtcccgagatgcttttgttcaaaagcgtgaagcccgtgataagacgttggatatgccaaggctgatatttccttcgatccagttcaatatccgtgccggaaagttgccgccaaaagaaaataatggccaggcttatctgaaagttcccattaatattctgtaa

SEQ ID NO: 286704 - DNA, 684 bp, Morganella morganii
atgaagctgactaaaaatgcccccctgactgaagatgaaatcgactggttggaagaggtgctgcttaaatacggtaatgatgactccatactctgtttctctgagctggatggttttctgacggcgattgtctccggcccgaatatggtttctcctaatatctggctcagcgccctttggggtcgaggtgattaccaccctgagtggacctccgaaaaagaaatgacgcgttttgtggggctgtgttttcagcacatgaatgatatcgcgggctgcctttatgaggctcctgagcagtttgagccgattttcaatgctcgtgaggtgaaaggcaaaacatacactatcgtggaagagtggtgtttcgggtatatgaaaggactgtcattggatgactggtccgctttgccggagtccttacgtccctcgctggaagcgatatccctgcatggcatcgaaaagaacttccctgtgcttgagaaaatgtcgccagcgcagtttgaacggagtattgcgcttattcagccggccgtgcttgccctgtatcagcactggctggcgcagcggatgtctgcggacgccgtgcgtcgcgctcccgtccggcgtgaggctggactgacggggcgtaatgacccgtgcccgtgcggcagtggtaaaaaatttaaaaaatgctgcctgcactga

SEQ ID NO: 286705 - DNA, 1227 bp, Morganella morganii
atgttgcctgagggctggaaagcttactcattaattgatatcaccaaatggtcttctggcagtactccatcgaaatcagaaaatgatttctggggaggtgatattccttggataagcgctgtttctatgaaaggtatcttttattcagattcagacctgaaagttaccgaaaaagcgttaaaacactctgcaaaagtggcaaatgaaaatgatattttgttattggtcagaggtagtatgctgtggaacaaaatacctgttggtattgctactagagccatggcttttaatcaggatgtaaagtgcattaaagctgatacaaaaaaagtagacgttaggttcctgctttactggtttttagcaaaagagaagcacctgcttggtatggtaactggaacgggtataggtgctggaaaactagatacaagtgagctacagagcttagatatttatctaccgtgtctccccgaacaaaaaaaggtcgctcagattctgagcacatgggacaacgcgatctcagccaccgagcgactgcttgataacagtcaacagcgtaaaaaagccttgatgcagcaactcttgaccggcaaaaaacggttgccagggtttgagagggaatgggaaaagttaaacttagggtctttgtttaagcgagtattaactcggaataatgggcaaagtggtaatgtggttacaatatcagggcaacacggtcttatcagtcaaaaagaattttttaagaaaagtgttgcttcagagattctagatggatattacttcctcgtgaaaggtcagtttgcttacaacaaaagttattcaaacggctaccctatgggagcaataaaacgcttgaatcgttatgaaaatggagtggtcacaacactttatatttgttttgaactgattgatgaatctaatgtttgtggtgatttctttgagcagtatttcgaatcaggaatactaaaccgaggtatttcacaaatagctcatgaaggaggaagagcgcatgggttgttgaatgttaaaccatctgatttttttagcttaagaattttcatccctgaattagaagaacaacgagccatcgccaaggtactcatcaccgccgaccaggaaatcgacgccctgcaaaagcgtcttgagcacctcaagctggaaaaaaaagccttgatgcaacaactgctgaccggtaagcgtcgggtggttgcagatgcggatgctgcgtga

SEQ ID NO: 286706 - DNA, 1557 bp, Morganella morganii
atgtcagaagaacaaaaacgcatattgcaacaacagctctgggcaatatgtaatcttctcaggggacgtatatcgggtgatgattaccgcgattacatactcggcttcatcttctacaaattcttatcagaacgtctttacagcattgctcaggaagccttatctgaagatgggctggattatgccttgctggatgaagacaatgaagaacacgctgagatcattgaggcgattcgtgaagaagcgattgatacgctaggctatcacctgatgccaggtcagttgtttatgagtattgctgcccgtattcaggacgatgccaatgccttcattctgtctgatttgcaaactgtgttgagtgacattgagaacagcacacgtggtcaggaatccgaggctgactttattcatctgtttgaagacctggacctgaattccactaaactcggtaagactgttgaagaccgcaacaagatcattaaagagatactggttcgtctggatgctatcgacttcatgattgacgatgtagaggctgacgtcctcggcgatagttatgagtatctgatcagtaacttcgcttctgatgcaggcaagaaggcgggggaattttacacgcctcagcgggtctctgagattttggctcgtgccgtatcactgggtaaggatgaactgaagtccgtctatgatccaacttgtggttcaggttccctgttgcttcgcgtggctaaacaggtgaagaaggtaggtcgtttctatggtcaggagtacaaccgtaccaccttcaacctggctcgcatgaacatgattttgcatggtgttcattacaaggattttgacatcaggcaggacgataccctggagcgtcctcagcacctggaataccgctttgaagccatcgtcgctaatcccccctttagtttagattggtcagccaatccgttgtttttaagtgatgatcgcttctcggcttatggcaagctggcaccgaaaaccaaggctgatatggcctttattcagcacatgttattccagttagatgagaatggaacggctgcggtcgttgtaccgcatggggtgttgttccgcggctccagtgaagggcatattcgtcagcacatcatcaaagagatgaacgcactcgatgcagtcattggtctgccgtctaacctgttttttggtaccggtattccggcggcaatcctggtgttcaggaagtgtcgtgaagacggagagcatgtgttgtttattgatgccagccgtgacttcgcaccagggaaaaaccagaacaccttacgtaaccaggatgttgagaaaatcattgatacgctagagcagcgcaccgtcattgataagtacagctacctcgccaccctcgatgaaatcaaggaaaacgattacaacctcaatattccgcgctacgtcgatacctttgaagaggaagaagagatcgacctgatggctgttcagtcagaacggactgccattgaagccgaaattgcacaactgaatgagcagatgaagggttatctgaaggagctgggttatgttgcctga

SEQ ID NO: 286707 - DNA, 204 bp, Morganella morganii
atgactgaatatacactgcttgaagacaagtttattgacatgaaatttattgtacaactgacagggttatcagataagtggttttataagctgatacaggacggtcagtttcctaagcctatcaaactgggacgcagctcaagatggttgaaaagtgaagtagatacctggctgaaggcacgtattgcggagtcccgtgaataa

SEQ ID NO: 286708 - DNA, 1173 bp, Morganella morganii
gtgaacaatgatggctgcgtgattgcccgatcggcagaggcgaaagccctcggcatcaaaatgggggcgctgtattatgaatgccgcgctttttgtcacaaaaataatgtgacagtattcagttcaaattatgcgttgtacggcgatatgagcagccgtgtgatgacgttgctctcatccttcgcacccgccacagaaatctattctatcgatgaagcctttcttgattttaccggcatgaccaggacattcagcccggaagattacggccgtgagatacaggctgccattctgcagaaaacacaccttcctgtcggtgttggtattgcaccgacaaagacactcgcaaaacttgccaaccatgcagcaaaaatatggaaaaaaaccggtggagtggttgacctttctgatcggctgcgccagcgtaaattactggatttgataccggtcagtgaggtatggggtatcggccggcgcatatcggccaggctgaacacaatggggatccgcacggcattagatttggcgaacgccgcaccggcaactatccgtaaaacttttggcgttatcactgagcgcacgctgcgggaactgaacggggaaccctgtatcgagctggaagaagtcagaaaggtgaaacagcagatcctatgctcccggtcattcggtaccaaagtgacggacattgtcaccatgagaaaggccgtatgtgaatatgccgagcggtcagccgaaaagctccgggaagaaaagcagcgctgccggatgatcgggctgtttgtgcagaccagtaaacacgccaacgggccgaactatgcgaacagtgtaaatatttcactcgagtatcccagctgcgacacgcgggacatcattaatgctgccatgagagcactggataggatttggtgtgatgggtaccggtattataaggctggcatcatcttgtcagacttcactgattcaaccgtcacccagttcgatatgttcgccacgcggcagccattcaaaaacagcgacgagctgatgaagactatcgacacaataaacaatagtgggctgggccgcgtgtggtttgctggtaaaggcagcgacagcaggtacaagatgaagcgcgaaatgctgtcaccggcatacacgacaaatttcagccagctgccggtggtgaaaagttaa

SEQ ID NO: 286709 - DNA, 771 bp, Morganella morganii
ttggaaattttcgatgtgttgctgcagtggctaaatgttaactggcgtgcagttatagccacgataagtctgattttatcagtctactttgcctatcaaaagataggaaacaagatcggtttaaagtatcaggtcgacattggtcgttactccgatgaacaaattaataacttggtcatatctaatcgaaaagacaaaacaatatcaatttggtcaattgatgctgtgttagaaaatgacattaaatttgaggtttataaacctgaagctcccttgattttgaagtctggtgagtctatcagtgtttctcccgagcaatactcgtatttacacttagacggtgataagtttgtacccaaattcttatttgggaaaattgatttctatgtaaaccttggaaataaaagggttaagtgtattgatgagaaaatctcagataaacgaaatagttcatatcgagttgctactaagtccagagtttctcttgatggacatctttataatgaaaatgtacgttttgttttgatctactactttgaagatcagaagcaatttgctttcttcgagactagtggctttatcggtcatgagtgggggaaaactccaaaccatatgggtggagaaaattatgatgttaatagcatcaaaactatgttggagcattacggttatgatgcaatgttttctaactatgtatgcctagaaaactgcggacctaaagacgggtttaaagtagcgtttcggaaaacaaataagtatcaaagcgtttaa

SEQ ID NO: 286710 - DNA, 864 bp, Morganella morganii
atgaattcttggcaaaaaataaagcttaaaatcatatcgtcagtaaacaagatacgtttaaattttcaattagagaaaacacctaagttttttcgtatcgtcatacacgaaaaagctaaacctttttttacgtggacgaaaagagttcttacagcaatcagtttgcttgccgcgttctatgtgtttgacaattccctttatgcttttctcttcggtgttggtgtatggctacttatcacttttgtcgaaaaaacggtttttatctataacagttttctcgttatgccacagttaacctatgaacacgacccagcaagattactaggcacttcatttggagttgcagtcccctcggatggtgagctagaaataccaattgtcggctttgtggttgcggacgaggaatatgggcgtcaaatgcatgaaactttaaaatactggactgataacaacactcgtgacgaagaggggcgtgtttgcttgagtgcaattgttctaaatccaaaagagtacgtatttctgtgttacccaaaccttgagcactgctctgttgaacaatttcataaagaagtcgagggtaagcgcaaagagaagagtttaacagatattcatataccgatgtttgctctaactattattggtaagcgatgtcaaattggtgagggttcttacttccccacgtttcgtgaaaaatatcgtgagggagtgcctgtcttatttcaaatatgtatgccaggtgagcaaggacaagttaaagatatagatggtttggatgattttgtgctgtttaacctaaaaattaaagacaaagatcagctgacaagaaaagaaattgaatacgactacttgaaagttatgggctaa

SEQ ID NO: 286711 - DNA, 669 bp, Morganella morganii
ttggacgcagtaataggaaaaaacgctgttgttttattgggagcaatgtttgcagcccttattgcgggatatttcgcgtttacaaatctcgtggcatcaaaagaaaataagatatcagaatttaggcaggagtggattaattcgctcagaaattctatcgcgcgatacatttcatcacttacatacctatcaacactttatattcatcattcagcgcgaccggaagaaaagcgagataaatttgaaatggctcgagatgtagaagaggtatacgcgagagtcaacgagtcatacaacgacataatttttcgtatcaatgacagtgaaaaaaatgcggaaggtaagaaactaaatgatgcctttttgtcggcgctttataaaacgagagaacactaccataagagcgaattgtcagaggctagaaaggcctgtgagcctttgagagaggcaagtaaaccgctcctaaaatatgagtggaagcgcgttaaatctggcgaactaaattacagaattgctaaataccttgccatagttgtcttgctaagcgggctattagctgcattttcaaatgcctattacatatggagtgaaggtaacaatcatcactccagtgtcgaagaaaagcctaacaaatcaacgcagccgaccactaacgcagtggctgattga

SEQ ID NO: 286712 - DNA, 1077 bp, Morganella morganii
atggcacaagaagcagcagatatagaaaatagaccaaaagaattattcaagcttcctaattatggttgcttaccttctggtagttttcaaatagatttaaatggtgctctcggggattttttgggtcatgacctatttgatcttgatggaaatcagccgatagagggtagcatactgaaattgacgggtggtctgattaatgtaaacccatcagatgaagctattgaattttatcgtgagcgtggtgacgattttcaaatgatcaatgtagtagtttgttgctatgcatttgaagaaatagatggtcaactttttggacttccataccatgtatcgctaagacctgcacaaaaaagaggactaccatcatccgtcggagttgattggatcgataaaatcgacttggagcgcattttagatggcaacccacattatatggggttcaatccgttttcaaatgcgtttggtttgtattgtgttggtgaaggaatgccagttaacgagcaaatgtgttcagatgtaatagggtttgtttataacacctattttcttgcatcaaaatacgataagtcagacgttttagatcccggtttgtgcacatcactactcggtgaaagtaaggctttgctcaatgattaccgaaaatttaggttctctcgatactttaaagcatttgataacatcgaaccggtaaaaatctgggggtgcgattctcctatagagcttttcttgcttcaagctatgcacagtttcgggctaaagcctacaattcaaacccacatcctaacagacggaactatttttccaactttgcaaacaatgtggaaaggtggtgttagaactaaagctttgagcaagacaatcacagaggctgatttttactttgctaaacagcgtgtggcgatttttgttgattctgtagctcatcattcttctgaagaagccattgctaaagataaagcaatagatgacaagctagaagctataggaatacgcagtattagaatttcgggtcccgatatcatgaactcgccaatagcttgtgctcagcgtgtcttcgatatcatcgaaaattag

SEQ ID NO: 286713 - DNA, 990 bp, Morganella morganii
atggagacaaatctttataatgacaggaatgggatcataaaaagtcgtgatcttcgggtttgttatttttattctgaatggctgaaaataaataagaagatagataacaccgctgtttcccggcaaaatgctgacagttgtcgtcagacgttaaatcagcttattaagcagtatttccctaatatacaagatcagattaatttactcgctgaaatggaggccggaagagaagaaaatatcttgcccactgaagattttgactggattaatcaggataaacgtgcggcattttggttatggggttacttgtataaaataagtgattaccagttaggtattaatccttgcgaaaatgccatgcagggtaataactggtataaaactctgaagctaagcttatcaccctcaagccatcaagaaagggttaaactcattatgactttttttgatagcattatcatttccacacctcccgtcaattatctaaaaaaacacaccctggaaaaattaaaagatacctggaaaaatatatacagcaaaccagcaccattaaaatggttaccggatgatgaaggtgccgtaatatgggcatggaatagtcttcaaaaaattcagcaggaaaaatccgagatgttaggatggtttactcatggatcagttcaacatccccccggacttacaacgtggtttactcctttaaataattcagaacgctgtctggctttacgtgcagcattagatttatgggatgaagaaccggatacaaaacggttatttttattaaatttaaataaatcgtggaatcagaaaaaattacgtcagtcacgaacagataaaaaagccttaaatacttatctgaagaatgaaaccaaaatacgtttagacatcatggcagaacacaatggtcttcgcatcagtgacatgttggaaaaattaatcaatgagcattataaaacgacctttgcgaaaaataataataccagaggctga

SEQ ID NO: 286714 - DNA, 441 bp, Morganella morganii
atgacgcaatcccctctagtttcaaatgacattgacatcattcacagcagtacggttccacttatgcagcgttctgatttttggcctgattattttaaaagcatcaagggctggcacaccttcgaagtcgttatattcaccatgatggggcagctttgtgatgattatgagggaggttattgggagtattgtactttatctaatggtggtacctttatttatcccgacttaaacaaagaaatccttaccctatttaatccccataatgggaataaagcacagatgagttgtcaggcagctggcattgctgtgtgtttgatgatgtacagcttatggtcatttcaaacggaaagtgacatcctcgtcgatcgcttttatcaattgcgtgattatgcggcgcaacacccagaacgttccgccattttccatctaatcgattaa

SEQ ID NO: 286715 - DNA, 837 bp, Morganella morganii
atgtctcgtttagcttcccgttttggcaatgcttgctctattcgtcgtgaccgcccgctaactaccgaagagctgtatcgtactgtacccagtgtttttggtgaaaacaaacacgaatccagaagtgaacgttatacttacatccctacgattaccttattggatagtcttcaaaaagaaggcttctatccgttctttgcttgccaaacgcgtgtgcgagatgacagccgtcgtgatcatactaagcatctgttacggctgagacgccatgaccaaattacgggcagcctagtgcctgaaatcatcttactcaatagccatgatggctcatcgagttatcagatgttaccggggatgttccgattcgtttgtcagaacgggctggtctgtggtgatacctttggtgaagtgcgtgtgcctcacaaaggtaatgtcgtcgataaagtgattgaaggggcttatgaagtgctggagacgtttgatgcggtggctgaaaaacgcgaacagatgcagtcactgttgttaccaccaccggcacagcaggcgctggcgtatgccgctatcacgtaccggttcggggatgatcatcagccggtcacggaagaacaggtgctgcaaccccgccggtgggaagataagaaagatgacctgtggacggtgtaccagcgtttgcaggagaacctgattaaaggtgggttgtccggacgtacagccaaagggaaacgatcacacacccgagccgtgaccggtatcgatggtgatatccgtctgaacaaagcgttgtgggtgatgacagagaaaatgtatgaacacttcactgatcgtcagcaaatctga

SEQ ID NO: 286716 - DNA, 1851 bp, Morganella morganii
atgccaaaacataataccagaaagagaaaatatctacttccaggtaaaaacttaataaaaggcaaggccgaagttaaaaccttacatttagccgatatggttatatgtgtaaacggcagtattcttcgttttgaaaggtttgcttttaaatcctgtccagtattgtttcgaggtttcagaaaggttgaaactagtcagttcactgacatgaaacgaagcagttttgtgcgtcaaatatactctttgctaagtgagaacgtcacctctaccacagcctctagatatgaaacgctaataaaatacgttaggtgggtggatgatagtaacgacactgaattaatcgataaagccatgtttcactgggaactaattgatggattcatgacatggtgtgggaggcaaaacagtaagggattactttctcgacctgtctgggggaggcacagaacaaatatttcatggcttttaaagcaattaaataggatgcaggataccaaaagacttcctaaaatatcaaatgtttcaggacacacgacaccccacaaaagtcttgatattgagagagaattaaaaccgatcacaaaaaggttgtttaactcgtactttaagcttttagaacactataatgctggcacaatgcctgaaaaacatccgctttatgataaagaattgctagaactaatagcccaaaaaaaagggataaaaggcagtgacagagttgcccattttgctgcgttttcaagagcagtacaacccagctcagggcataaaaacaaccccatcacaaaaatagcaatgatgctgtgctatttgtttacaggaatgaatacaacgcctttagctaagatgaaaatttcagacgttaatttcaaagaggtgcagggtggaaagtacattctggattccgtgaaaggtagagctcaacaccaagagcaagataacgcacttggtttcagtaaacacgcaaaggacttcattgaaagctggttaaatgtagctaaaagcatggcaaatggtgatagcaacagccctctcttcccctactatagtaaagatggtcagataaagctttactctgaaataggtagttccccccatgcaagcatcaacaaactattgaccagactggacttccctaaaataaccccttcaatactcagaaaaaccaaaatggacactctgtttcaagcaacagagtctgtttatcttgttgcaatgtcggcaaacaacagcattaaagttgtttcatcacagtatttacatgggacatctggagagcacgaaaaaaaattaaatgcggcaatggatgctaaattttccaacgctaaaggcgttgatatcaacaccgcagttgaagaggctaaatacaaacattcaaacattcttgatcattatgagtatgaagcactgagagagggctctaacaggtctcatgaagcaagaacccctacagggatacgttgtaatgataataaacaaggtgctgtaaaaaccataaataaaatgctagagcgtatcggagttgaaatgaattctgatgaagaagcttgcaccagctttcttgattgctttgagtgtgagcaccattcattggtctctgatgtaacagatatatggctaatgatgtcattcaaggaaacattacaagagcttgaagtaacacctgcaattaactcaatgccacctaagaaaatgaatacactattaaacaccattgaaactattctaggaggatttagagataaatctccagaaaattataagcaagcctatgagctacaaaaacaaacatcacaccccttgtattcgaatatctacagtctaaatgatctgcatgaggtgttttcatga

SEQ ID NO: 286717 - DNA, 1530 bp, Morganella morganii
atggcaatcgtatacgagatcaaaacaacagaaataaaaccattcacgtatagaacccctctaattacgcctgatgaaaatggtgaactatctattaaatactctcgacaacaacctaagcatattaaaaaggttgttttgttgaatttggttggtagaaacactaatggcgatatagtctcatacgaaccaatggaacaagttaatcgctttttactagcacaccacctaaatgacaataagcaagagtcagaacaatacagtaaaggcttagttcactacttttcattcttattagaattacagcgcttgtgggactctgaatacgacgaagacctttacgaagaatttattgatctgcctagacctagctgggataaattcccatttagaaaaagtgataaagctacgtaccaataccgagaggctctaataaaggctgtacttgagcctgacaccccaaaccatgcgatagccagaactacagcaattgcatatatgggtgctgtagttaagttttactctttccacatcagaaatggctacaagtttaacaatcctccctttgagcacgaggttgtttctatacaatatcagggaggcagtacaagcatcggtgcctacttgagtaaagatatacacacaacagatctgcggttgaatttaggaaaatctaaacgtaatgacggtggcgcactatcatcagctagacgagatttaaaacccctaacaaataaagaatggcttgccgtagaggatattctcaccaatacacgtcgagttatcaaaaaagttgctggtgaaacaactacttccaacttatcaattgaatattgcctgttctttcttgtcgcacgatacacagggcttagaaaggaagaagtggctagccttcacaaaggtcaagtggcaaagcctgatgaagataagaaagcaatgaagcttggtgttggcggtcaatacggctcattaacaaaaaccgctggatcaggtaataaatctaggcaaacaatcatccccacccgaattatgcaccttttgtacgaatacactagaagtgatagatataagaagcgtatctcgaaattcaaagaacattgtgaacttaagcgtcaaaaaggcgaactaggatactttgatggggaggatggagtagatgatacaaaagagtatttattcattagccaaactggtgtcccacttttcactaaacttcccgaggccaacgccagatggaatgaaattagagccactgtaaatatattgtctgggtttaacctaacagcaactatacacaatcttagagctacatttgcggtatcactttttaggctccttttgaggcgtgtaactcctgacaaagcacttgctttagtgagtgagtgccttgggcacggtgaagagtccgtaacgttaatataccttaaaatcgctcaagacgaacctacaggcgatgaaatttatgaagatatccttgaatttataggtgcatttgaagatgctgatataagtggtatggagagccaataa

SEQ ID NO: 286718 - DNA, 396 bp, Morganella morganii
atgccggaaaacttcgccccgtcaccagaacacactgaacgggcaaaaactgccggattggatgttcaggatgagtttggcaaattcagggactaccacgccagcaagggcactcaatacgctgactggaacgctgggtttaattactggcttagacaggctgaaggatttaaacgcgctgcggactcaaagaacatcgacaccaccgagtgcgatgaagtcttcagaaaaatgttctcatcctccaactggaagccagaaaaccgcgtgcaggaactggttcacaagcataaatcacatattggccggatgaatgaaattgccggacgcgcagcatttcgcgggtactggaaacaggccacagagcaggccgcaaaagaacgggaggctgcatga

SEQ ID NO: 286719 - DNA, 234 bp, Morganella morganii
atggccggatatgcgagcaaaacagcccctgagcacaaagacagttggcaaactccggagtggcttttcactgcgctggatctggagttcggattctatctggatgccgcagcgagtgacatcaatgcactttgttcccggtacctgactgaacaggatgatgctctcaaatcggagtgggtcagtcatggtgctatctggtgcaaccctccattcagcaacatccgtccatga

SEQ ID NO: 286720 - DNA, 357 bp, Morganella morganii
atggaaaccgatcttattctggtatctttaaataatgatcagatttccaaagcaaaggatgctaacggtaaacgtaagcaaattacgcatgcgcttgtatgcgggaaatacggcgtcatgtacggtacagagaagcagtgcaggaaatactattccgtctggaaagaaatatttaaaagtctatttggcagatgctatgagtccgatagccacgagctaaaaacataccaatgctctggaaatgtggtgatggagttaatagatgattcagacaaacaaaaaccaaaaattgacttcttagaagaagcaataaagagcgagaaaaaaggtttctggtcaaagctgtttggtggctag

SEQ ID NO: 286721 - DNA, 780 bp, Morganella morganii
  misc_feature (500)..(509): n is a, c, g, or t
atgaaattttataatggcacaatactattagtcttaattacttttctgctttcttcttgcagcaatattggttcgtcattatgccaaaatacaaatgcctttcctgctgcgctgaaagatgatattgaccatatcattgatcatgaggaggagggctggaaaacaatccataatagagatcctgatattttacaaaccgcacaaaaagctcaggccatcctgtcaaacaattcatactgcattcagtcatcattaaataatcgtcccagaggatatttaaacacagagcacaaagacaaatctaatggtagaactgggaagcaatacctagaatggtttgtagaaaatgctcctcaaatttatgagagaaaaaatttagttctcacaaaggaacgtgatcgaagagaagcaaccgcaatagcagagatggaaaaaagagaaaaattaagagataactttataaaaaatgggtacaccggcttagatctgcaatcagattnnnnnnnnnntagaaatatagctaatactaaaaatattgtttttcgcgccaatttttccggttacaaggttacccaagtgctcaaagacaccctcttgctagcccatgtttataccggaagcataatagctataaggatgcacccaaaagacccagaatatactgatggtatgaggctgcatcatgattatattagcctgctgggtacgtattcatacaggactgtaatgggtgctaccaagaaggtcttcttattccaatttgcatatcaagcacaataa

SEQ ID NO: 286722 - DNA, 441 bp, Morganella morganii; identical to SEQ ID NO: 7434

SEQ ID NO: 286723 - DNA, 1593 bp, Morganella morganii
atggaggaacgcgcccggcatattctggatttttaccggttcgtcccgcatgtcaaaggggcgctggcaggtaagccgattgagctgatgccatggcatacctttattctgattaatatttttggttttgtgatcccgctggttgatgaactcaccggcgaggctcagtacgacgatgacggggatccggtgctggttcgccggttccgaacggcctataacgaagttgcacgtaaaaacgctaaatccaccctctcatccggtatcggtctgtacatgaccggcgctgacggtgagggtggcgccgaggtttactcggcggccaccacccgtgaccaggcgcgtattgtgtttgaagatgcaaaaaacatggtcaaaaaggccaagagctcactcggccgcctgtttgaatttaataagctggcgatttaccaggagcggtctgcatccaagtttgagccgctgtccagtgacgcaaataacctcgacggcctgaatattcactgcggcattgtggacgaacttcacgcccacaaaacccgtgatgtgtgggatgtgctggaaactgcaaccggtgcccgcctgcaatccctgctgtttgcgatcaccactgcgggatttaaccgcgagggtatctgctacgaactgcgggattacgccatcaaggtactgcgcggtgtggtggaagatgacaccttttttgccgccatttacacgccggatgaagatgatgatccgttcgatgaatctgtctggataaaggccaacccggggctgggtgtctgtaagcgctttgatgatatgcgccgcctggcgaaaaaagccaaagagcagattgcggcccggcctaatttcctgaccaagcacctcaatatgtgggtgaatgccgaatccgcctggatggataccggtaagtgggacagctgccctgaaaatgcgccggatgatgagctgaaaaattacccggtctgggttggtgtggatctgtcaaacaaaatcgatgtgaccgcagccgttaaagtgtatgaggatccgcgcggacaactgcatatgaagtgcaaattctggctgccggaggacagagtagtgactgcaccgaagcatatcgctgacctgtaccggaaatggggaactgccggttatcttgaactgacggacggtgaggttgtcgatcacgacatcatcaaagccgacattctggcatggtgcgaaggtgaggatttacgtgaactcggttttgacccgtggagtgccgttcagttctcccgccgcctggcggaagaaggtattccgctggtggaggtggcgcagacggtgaaaaatctgtctgaatcgatgaaaaccgttcaggccgatgtatattccggcaaatttcaccatgaccacaacccggtaatgtcctggatgatgtctaacgtgacggtaaaaccggacagaaatgacaacattttcccgaacaaatcgacaccggaaaacaaaattgacgggccgtttgccctgtttactgccaaatcacgccagatggtgaacggcggggaacaggaacaaagtttgtccgatgttttatcttccaggggcttacgttcactctga

SEQ ID NO: 286724 - DNA, 996 bp, Morganella morganii
atgcaggaaagttcagaaaatccaaagagtttactcaataaactttccgactattataagagaaataaagatatatttagcaaaatgttgatacttgcgatagatgatgttgacctcctctcaggagagcaggtaaatcatgcggttgaacacttattgcgtagtatagaaattaattcagtaaagaaatggctaagtatccgtagagttacactggaaaattataatggtgcaacaaaaaagaaaattgaagagttttttcctgatccttatgaatttccaagcatccctatttatgatctaattgattatagaataaaacaaacgtgtgggaatcctgtgggatttaaaaatccatttaatgtaatgctatgtaatgaagtaatatcttctatatgtgaaaaaaatttgagagaatcactaggactttgcaaaacaatattagaagataatttacctggtaaatttaatagctcaactgacgaggtggttatagctaattatatacagacatcagcaataaaatctctttgctcgtcacaaaaacttattgatttacattcagattcgtatagattaactatattccctcttgctgtagatatcttagcatgtgctcaatttcatacagatgaaaatataatttttggtgccgttaatgattgttgtatgaaacgagcttttttagcagatattgcagaagaaggtcatgtatacaaaattcgaacatcagaatttaatgatgtaataaaaacgttgatttctcatggttgcatagctcaaaaagttacaaaagaaagaatatttttaactgagaaagggaaggtgacaataactttcgcacttagagaatactattatgagtattgtaagagagttaacaatgtattgttatctgctaatcattactgggctttaagttcaaaaaaaattgatcacaaaagtatagttgacttattcataacttggcgagagagaaaacgattatctaactga

SEQ ID NO: 286725 - DNA, 141 bp, Morganella morganii
atggaaccgcaaaatatccggcgcaccgaatgcggtactgtcaacctcaaaaagccggacggcattacccggttccagcttctggtagtcatttgtgatcatggtttaaatgcctgggtaaaagtgagagaaagtgaatag

SEQ ID NO: 286726 - DNA, 153 bp, Morganella morganii
gtgagtcacagcatccgcacgccgcgtcctgacagtgtgttaatccctgtcgccggtctgacgttatttgcgattgcatccggttatctgatgagcctgatcccgttatcgctgggtcattttgccatcgtaccgattacgcaggctggttag

SEQ ID NO: 286727 - DNA, 390 bp, Morganella morganii
atgtctgaattcttagagatcttaactcatgctcgtcgcttaaaagcttctgttaaagagttatctgttgctgaactaaaagatatgtacgaaaagttaggcaagatcgttgctgaaagagaagaagaagcgaatgctgaagctgaagcaaatgctgagcgtatcgctaaaattgcagaacttcagaagatgattgagtcagctggtttatcactcgatgatcttggcggtgttactgctaaagtaaaaagcacaagagcaccacgtccagctaaatattcaatcgtagttgagggcgaaactgtcacttggacagggcaaggtagaatgccaactattttcaaaaaacaaattgaaaatggccgttcaatcgaagactttttgatctaa

SEQ ID NO: 286728 - DNA, 729 bp, Morganella morganii
atgggaacaaatctaacaaacaaaagcttttcatgtttacatttgggtcaaacaataaagcaaaaaatactcagaagaatgagcaataataattctcaaaaatcaacaataaacgtttttggttcaaataatgatgccaaggttaatcaatacaatatttcaatttacgccaatgatgttctatcaatctctaaccaaattagaaaggaaatagttgacgttctagagaatgagctagttcattctgagcttaatgtttttttatgctacccaaataaactacaagataagtattttgactcatgtataaaaaacttaaagaccgaacttgttaaaatagatgcggtggtatatgagggaggaggaaaacagtctttacctgagactgaaagtctatatacacatatagcagagctggatttcatcaagaaaaaatgcgacagcattataatatttgttttggatgaattaactctatctcaaataactttaattagttattacaaagtaacaaaggatataaaaaaattagatttaatagtcatctttaatgataaaataaaaaaccttgataaatttttctcattaggagttattcagtactgtgatgacaacagtataaaaatatttgacataactgatattgaaaatgagaaaattgagaacattatcagacgcatcagaaataaaaaactaatctctaaggataaaggactcttaggagggtaa

SEQ ID NO: 286729 - DNA, 303 bp, Morganella morganii
atgtcatttggtagctacgattttgtgagtcttgcagaaacacgtgagaagcacagcaccgcccgtaaacaagttgctaatggcattgaagaacgaaaggctaaaaagatggcactgcaactctcaacagagaactcattcgaagccatatatcgaaaatggcatgccaacaaagctgaccgctggacagtggcctatagcgaagaaatcattaagacatttgagcaagatgtgttcccgttcattggtaaacgctctacctgtgaaatcaaaccgttagaactacttgaagtattgcgatga

SEQ ID NO: 286730 - DNA, 948 bp, Morganella morganii
atgaacaaaataaataatacattgatattgtttgcattatcagtaatttccccggcgatacatgccgctgatgatgttgatgacaaaatacaaaaagcaaaggacagcgcaataaactcaagtaaatcatacactaacggggaaataaacagactaacctctcaggttagtctggatgtccttaatgcaaaaaatagtgctatctctgacagtaataaatatactgacagcgtagtcaatgataaatttaaaaatgttcaaaacacgattaatgcatcaacaatgactgcaattaccatcagtaatggttataccgaaaacaaattcgcagacgttgaaaaaaatattgacaaggcaaagactgatacactaagtgccagcaatgactatactgaccagaaaaccagtaatgcgcaaacagccgcagtcaaaagcagtaatgactatacagatcagaaagtcagtgatgccaaaacagccgcagtcaaaagcagtaatgattatacggatcagaaagttgttgatgtcaaaacagaagcggtagccaccagcaatacctatactgacaacaaagtcagtaatattcattcagctattgatgattcccgcaaacaggcggtttcatccgggcaacagtataccaatgcccgttttaccgagcttgaaacgtccatgaacggccggtttaactcagttgagcagcagatgaataagaacgctgaccgcgctaacgccggtattgcgtctgttgcggcaatggccaacattccgtataccgacaacacccgtttcagcatgggtctgggtgccggtaattaccgtaacggcaacgccgtcgccttcggcggacagctgcgtatggaaaataatgttaatctgcgcacctctgtcagctggaacagcgaagacagcgccgtttatggtgcaggtgtcgcgttcgggttctga

SEQ ID NO: 286731 - DNA, 177 bp, Morganella morganii
atgtatttcatttttattttaaatggctgtggttatgtgaaactcattattccaccggattcagttaattctgaaaacacccggcggggtatctgcataaccggtaaaatgcagatggtaaatactgcccgttttcctgtcggtagtgaaaaattccggcattctcattacgggtag

SEQ ID NO: 286732 - DNA, 942 bp, Morganella morganii
atgacagctgacttaatcatcgggattgatttgggtaccagtaacagtgccgtcagtttatggcaggacggacgggcagtgctgatcccgaataaacacggaaaggtattaacaccgtcggttgtcgggtttgatgatgacggacatgttattaccggacaggcggcgaaagatcgcctgcaaagccacccgcagttaaccagagccggtttcaaacgctatatgggaaccgatgaaacgctggtgctgggacaaaattcattccgtgcggaagagttgtcagccttattattacgtcagttgaaaaacgatgcggaagcttggctgggtcatcccgttacggatgcggtgatcaccgtcccggcgtattttaatgatgtgcagcgccgggcggtcaaaactgccgggacaattgccggtttaaccgtgcgccggttgctgaatgaaccgactgccgcctcgattgccttcggactgaccgggaacagagagtgtaaatacctggcatttgacctcggcggcgggacatttgatgtctctgtgattgatatgtttgaaggggttatcggggtttgcgccagcagcggtgatgtgcgtctgggcggtgatgactttacggaagctgtctgtcagtggatgctggggaagtacccggaactcagtgaacatcagtatcagatccggccgttgctgctggaacaggcggaacaactgaaaattcagtttagtcagagcaatcagggcagtgctttcttgcggtggaatgacatggatctgcactggacgatgacagagctggagtttgccgcctgttgtcagccgctgctcacccgcctgcaaaagccggttttgcagtcactgaatgatgcccgtttctcccctgatgatcttgacgatgtcttgctggtcggtggtgcgacccgtatgccgctggtacgctag

SEQ ID NO: 286733 - DNA, 744 bp, Morganella morganii
ttgttcggccgttttccccgccatgatttgaacccggatgaagtggttgcgctgggcgcagggattcaggccgggatggtaatggcagataaagcactggatgatgtggtattaacggatgttatgccgttttcactgggtattgaaaccacaaaacgcaacgggctcaattatgaggatggttattttctgccggttattgagcggaataactttttacccgtcagtaaattacagacggtgggcaccgttgcggataatcagaaaatcattttactgaaagtctatcagggagaagcccggcgggtgcgggaaaatattttcctcggcgaaatggaagtcgctattccgccgcgtccggccggtgaggttgaaattaatatccgtttcacctacaccattgacgggttattagaggttgagtgtacttatcagggcaatccgaaagtattccgtctggtgattgaaaaagttccgggacagatgagtgatgagcaaattgctgcgagtctggcaaaaattgcaggattaaaacagcatccgaaagatatgccggaaaaccgggaactgttattgcagtgcagccggttgtatgaatttttactgggtgatgagcgggcaatggcggattatataaccaccgaatttgaactggcgctgaacagccaggatttccgtcgtatcagtacagtccggcagaacgttgtacaatttctggaacagtataaagggcgtactgagtga

SEQ ID NO: 286734 - DNA, 1407 bp, Morganella morganii
atggatatctgggaaatattagggatcgcaccgacgagtgatgaaaaagaaattcgccgagcttatgcccgtaaacttaaaatataccggccggatacccatcctgaagagtatcagaatttacgcgaagcctttgaaagtgcaaaacagtatgcggtgtattctgtttgttttgatgatgaaaatactgcagaagatgacgaatataatacagaagacgataccggttttttgtccggcactggtgttttttattcagaagatattccggcggaaagcggatttgagccggacaatacggatactcagcccgctgaaataccggtggctgaactgccgtatacacaaatgcaactcagtgaactggcccggcatatttctgatgcggataccggctggaaacaagccgtttccggactgtggatgcaggtgacagagcagggcagcctgcatgtcattcagcaatttcatactgatcttgcgcggacactggcacaatgtgagggactaacggaatcaccggtggaatatctctcttcatttttaggctggcggcttaatgagtatgattcagccaatattattccttacagtattcagcaggcattaaatgatcagcttcgtaatacagaggtcgcccgtgcctggaaacaatgtataacagaaagaacgcacggaaaatttaatacaaggatgtcgatgaaatatattaccggccagcagaaacgtattccgttgtggctgcattttgtaccgaattttattgatgaattgacacaacagtatgaacggataacacgggcgtatccggaactggacgacaaaattaatccggcagtcagaaagattatcagtgaaaaaacgttcagctttacccgcgaggagtattatatatgcgcatactggagtgctatgttgctcttcctgggtaaatttgttggtgtttcttcagctgtggttaccgctgccattattatttattacgtatttatacataacgttgtggtatttacagtcagtaagtatgaaaaaatatttacattttatttaatgatggactggattgtttcttcagtattaatcttactgatgatagtcacgggaacgcattctatggcagatcttggtaatctggccagaagcggcggcgacccgcatctggaatactttatttttccggttgttattgtcatcagtatattactgcttaaaaaattcataccgtataactgtccggggattcgcaagcccggtgttattatgtatatggtgatagcatgtccggtccggctgattaaaaaaatatcccctgatttcttttcagcagcgatgtttctgctgccttctttcttctacgccggactattctttgacatgatcaaaaaatttgccggatatatcagctga

SEQ ID NO: 286735 - DNA, 594 bp, Morganella morganii
atgaacagaatcttaccttttatagccgcagttcttatcttgttctcttttaattcggcagcagatacgctcgtggaattaatctgtaaagcagagaaaggcgatcccggtgcacaataccggctggggaaactttattttaacggtattaccgttaaacaaaatcacaccacagctatagcgtggtataaaaaatcggctgaacagggaaatactgatgcacaatataatttaggttttatatacctgcttggtgccggagcaaaaaaggattactccgctgctgcgcagtggtaccggaaagccgctgaacaaggaagccctgtggctgaactcatgacaggatttatgtaccagaatggttatggggttgaacagagttattccctcgcatctcaatggtaccagaaagcagctgcacaaaatgaagtcgatgcacaatacgctctcggcatttattaccagcacggacttggcgttgaagaaaatcagtccatagccaaatcgtattaccgacaagcctgtgataacggtcatcaatccggatgtaactactataagattttagaagaaaaaggtgttccggatatttaa

SEQ ID NO: 286736 - DNA, 2961 bp, Morganella morganii
gtgacttatctctactccgaagaaggtgatctttgtgctgtacgtgacaacagcggaaaaacacagcgtcagtttgaatataaaaatcatattctgatacagcagggtgtgccgggcggcgtggtatcccgttaccgctatactgaatattctcccgccggaaaagtactgagcttttataccaatctcggacaaacctggtccttcggatataatacaggcaacactgttgttactgatcccctgaacaggaaaacctgctatcagtttaatacgaataatcaactgacagcatttaccgatgccaaaaatggtacaacacattatgtccatgacaaaaacgggctgctaaccagcattatatttccggataaaacaaaaatccgctgtacacatgatttgcacggtaatatgacatcggtgactaatcctgccggaaaaaaaatatgtattcactatgataataaacataatccggtatctgttattaatgaaacaggaaagataaccaattatacctatgatagtcatggcagcctgaaaagtatcacgaatgcattaaaccagaccacggaatatatccgggacaaacgtggccttgttaccggtattaaagatccttccggtaatttgtatacctcagtatataacgctgccggatttctgacagaagcccgggattgttccggtgctgtgacccggtttacccgggatcaaaccggaaatattactgaaattattactccggatggtgcgttaacccggttatcttatgcgatgaacggtatggtatcggtcgtatcccatccggatggtacttcggatcattatttctacaattctcagcggcagttggtgggctttcgtaatactgccggtcagcaaactgtactgcaacttgctcctgacggattaccactgacgagaacggatccggccggagggatgttgtcctgcgaatatgatcacgcccgtcgtctgacaagtctgaaaaatgagaatggtgcctgttatatttttacttacgatgataacgataaccttattcatgaacaaaaatttgatggtattgttgttcgctatcaatataactctgccaacaaactgacaaaaaaatatgaatccggtaacggagccggagaaaataccggaatactgaccatattccggcgtgataaaaatgggctggttactgaaaaaataatcactactcacgacaaggacagtcaaatccggaactattatcactatgatgattccggcctgcttctgagcgccggcaataatgacagtcagaatgactatgtctatgatgctgccggaagatgcattactgaaatcactgaagtgctcggagataagcgtaagttacattaccggtatgacaataacggcaactgtatcaatatgatattaccggacaaaagtaccctggattatctctattacggttccgggcacctgatgcagataaacatcggatcgcaggtgttgtgcgaaattgaacgggatattatgcatcgggaaatcagccggacacagggcagtctgaccagctttttcgcctataataaaacaggaaaaatgctcagtcagacggtaataaatacttctgctgataatatgatctcatctcctctgatttcacgccgttattcctatggggaacacgggtacttaaaccgggttctggaactcaatggatcaaaaacagattatcattatgatatatcaggaaggctgactgccggcggtaatgaacgttttaattatgatgcagctggtaatcttgtcagtcctgagaataccggaggtgaaacgtctgtccgtgacaatcatcttaaaacgttcggtagcaattcatatcattatgatatatatggtaatttacaaagaaaaaccgagggtgacaagtctcttacgctgcattactcaccggaacatcgtatcctcagggctgaaaaaataatcgccggcaaacagcaggatacagagtacggctatgatgttttcggccgccggatttataaaaaatccggagggaaagtaacgacatttttatgggataaggaccgcttactggcagaaagcaacgacgaatgcacaacaacctatctatatctgcctcaggagtttattcctgtagcccggcaggaaaaaagaaataacccgcaaaaggaagtactgcactactatcatacggatcagataggcactccgcgggagatgacggatgccggcggaaaatgtatctggcaggaatatttttatgcatggggaaatacagataagcaaaccggagaaatatctcagccattgcggtttcagggtcagtattatgatgaggaaaccggtttgcattataaccggtaccgttattatgatcctgatatcggccggtttattactcaggatccgatgggcctctatggcggatataatgcctatttatatgcaccaaatccgaccggatgggttgacccgctcggacttgtcaataccagaagctccggaaaaattgatttgggatccggtaccaggttaactaatttggggccaaacgaacatcttctcgaaatctctaaaacacgttatccggagggagcagatcatatcagccttgcgcaaagtgagggacgcccgtctcgtttgacaattgacagaccgggggcagcagcaaggcgaaaccaaagccttgcaccgtacagaaagaaaaaggataaggataaattttgtcacacattttcagccgatggcacgcccaccaaggatctgcccggtaaggggatagataaagatgaatatcctctggcaatgacacgagaaggaggaaagggagcaagtgtgaagcccataaccgctatggataaccgtggtataggtaaaagcataagcaatgctctgcaaaatgttcctgatggtgacaaagttatattcagggttgttgattttttgccatga

SEQ ID NO: 286737 - DNA, 246 bp, Morganella morganii
gtggctgaaggaaacacggaaggcattctggttaatgaaccaaaaccggcggcagcaggcagtaataccaatccgcctgtggatatgaataatattcagaagattccctttgttcatacggactcttccctcaccccggaacaacagaaggaatggaatgatgaattagccagaagagcgcaatatgaccctgctaaactggctgatgatgttataaaaagtttaccggaagtcggagataagtga

SEQ ID NO: 286738 - DNA, 363 bp, Morganella morganii
atggctaaaaagctcggtgcgagaaaagacagcaaatggattattatcagtacctccccggatgtgtgtaaaacaccaccgttaaatattccggttccctaccaggtcacctctgatttgggagatgctcagggcaccattgaaactgtcaggctgaataataatccggcttttgttttcgataaaagcaaagcccccaaaacacgcggtgatgaagccggtaccggtggtggtgtcaaaagcggcactgtcggagcagactgctggccgaaagaaaaaagcgacacggtcagtatcaataagaaaaaaactatccgcgaaggtgataaattccatatgaacgggagatttaacggtggctga

SEQ ID NO: 286739 - DNA, 1146 bp, Morganella morganii
atgagcttaataaactacagtacattccctgcgatcggttataaaggcactgacacccataaaactgaatttcatgttgctactgtccgggtaacatatgatattaaaataatgtctcctgacggaaaaagtctgttagtcatttcatctgaacaggaagcattaaattatgcggatatccattttgatgatgatataaaaagaagtgtacgctatgaaagtgatttgtcaccttacaaaccaaaaacagatattgttattaatgccacggcattttcaccgggcaatcgtgcagcgtctgcttttgatgtcggcgtacagctcggcaaatatataaaaccgctgcgtattcacgggccccggagctgggtacacgggccgttcggctgggaattatcaccggcagaaccggtaaaatcactggatatccgttatgaatatgccaccggaggtactcatgatattcatgataaatcgttcagttctccgaaaaatccgctgggtatgggctggtatccgaaagaatatctgaagcaatgcggagaaatcagtctgccgggaccacaaatagaattaccgcagtcgcccgtgacgcatatcagtcagcctgtccggcctgaagggttcggatttttcggccgcagctggcaggcccggataaaatacgccggaacctatgatgattcatggacaaaaaaccagcacccgtttccgcctgctgattttaaatttaattactggtgcggagcgcacccgtcattacaaatacctcatattgaacccggaaataaattaccggttaaactatttggtcttatccctgtatctgagatagcaacacagaaacttttattctacatacctgttgaaacattatttgtttttgttatttcagaattaggtataacggtcaccaaagatatgcagctggatacggttattatagatatggatgcccgtaaagtattttgtacttatcgtgtaaccattccggaatcagtaaaagtctcggaaattcagctcaggtatatttccgaagacaatgtaaaaaaaatgaaaaaaacaccacatatacaatgccctgatacaaccgcttttattccggttcctctgagcctgaccaaaaaaggaatttattatggctaa

SEQ ID NO: 286740 - DNA, 2211 bp, Morganella morganii
atgttattatttgatgcaggaagaatcactacggtgaatggtgccgccattccattacaacaggatggaactccggcattaaaaatatataaaataagcggggaagaagaactttccgggctttattgttatcagattgatttaaaaaccagttcacggatgaatattaatgatgctgccaatatcaatctgttatctgctgtcgggctggaactgactgtcagtattcagctggaaggaacgaatgttatcacctctgattcagaatattccggtgataacatcggcaggggaatacgggaaatcagcggtatcgtaactgcagctaaattacttgagcagcataacacttactgtatttaccgttttaccattgaaccctggcttattctggcaaccaaacgttctgattataaaatatttcagaaaaaaagtgttatagatataataaatgaagtacttaacaaaaattatagttattcacacgagataagaataaataagtcctacccgctgattaactatgaagttcagtatggtgagactgattttgattttattcaaagactcatggaacgatacggtatttattggttctttgaacatgaagacagtgtccacaggatgattatcgtggatgatataaacatccatacatctgtaaaaagtaaagcttatcattgcttaccttatgaacgttctgaaaacagaaaagaacgtgaatttgtatcttattttgaagcacaggaacgccttcagtcaagtgtctggagaaccgatgattttgattttacgaaaccaaaagctgatttaagatcatccaaatcaattaaatatgagaaagaatcagatagattatctatctatgagtggccgggtaattatactgaccggggccagggtgctgtatattcacaaacccgtatggaagaattatttgcgcagcgtaatccgtctcatggccgtggttatatccgtaatatcgtctgcggtacagtatttgaattaaaaaaatacccgatgcataccgtcaaccgtaaatatctggttatccgctctcatcttgaaattgaagaaaccggagaggaaagtaataacggagaaacccgtattctttcggactttgacacccagccacagtccattgcttaccggccccggcgtgtgaccaaagcaccgaaaacaaccgggccgcaaaccgctattgtaacaggaccgccgggacaggaaatctggactgatcagtacgggcggataaaactgaaattccactgggatcattctcctgtccgtgatcacaactcctcctgctggatacgggtctcctatccctgggcgggcggtaatttcggcggaatcaatattcccagaatcggacaggaagtcattgtcgattttgaaaacggagaccctaattacccgatcgtcaccggacgcgtttataacgccggcacaatgccgccgtggggattacccatgaatgcgacccaaagcggcatgatttcccgctctatcggcggcctgataagcaatgcgaacgcacttcgttttgaagacagagccgggatggaagaagtctggttacaggcagagcgggatatgctcagcgagataaaaaataatgaggttcataaagtcggtgtaaacaggacacgctctgtcgggggaaatgagtcaaccgatattcagggcacccgggatgaatccgtcaacggtgatgaatccattaaattaatgtctaaccgcagccgctcagtgcagcagaatgactctctggatattggtcaggatcagcaaaccaaaatacagggaaaccagaaatatgaagttcagcaggatcatgaccggaaagtcggcggtgacgatacgctggatattgatggtgaacagaagagtaccttcggaaaaaaccgtgaaattaaagttaaggaggatctgaaagagtccattgacggggatcatcaggaacaggtcgggaaaacatacagcctcactgccaccgataaaattgaactgactgtcggttcatcatccctggtcatggaaagcagcggaaaaataacgctgaacggttctgatattacattcagcagttccggtccggtaaaagtaagtgcatccggaaatatcgatatcagtgcttccggaaatattgatatcagcagttcaggtgctgtacaggtaaacggaaatactattgaccttaactaa

SEQ ID NO: 286741 - DNA, 2421 bp, Morganella morganii
atgctagcatttgcaaacaataatgataatgcgaatagatatcatttgctttcaaataaagttaaccaaatgaaaaataaagataaattacttattgcagctattacaggcagttcattttgtagtttttatacacatgcagctcaatataaccccgataaccatattaaggttgcggttaaatcggatgcacacgcagagacagatgatcctctgtcgtctcaaacgataacagagcaggaaataaaggattcgccatcatctaatagtaacctgagtgattatttgaaagccgtccccggtgcccgtgtggagagtaaatcagaaacaggatttaccaatggtgaaattaaaccgctctctgtttccattaacggtgcgccttcagaacagacggcgtatatgatagacggggtgaatattaataacgatattgacccggcttcctccttatttgatggcaccatgggcgtcaatccgaataagagttcagagcaggcttatttctttgatgcgaaactactttcgggaataacggtttacagtaataacgttccggcaaacctgggcggatttaccggcggggcagttgtggcggaaacccggcagtacagcggggaaaatcacgcatcagtcagttaccgtaccacccggtcctcctgggcatcattaaaagcggatgaggctgtaaaagacgcgctggataaaaaagtccccaacggaatgaatgcagaatttcagcccgtttataaaaaagaattctttaatctgacggcggaatacggattaacggagaataccggtatggtattcggcttcagccgccgtgattctgatatccgccagacccggatgctgaattcgaaaggagagacggataaccgtaatcacacccgccgttccgataatatgctggtcaattttaactggacaccggataccggccggacactggaagccgggttccgcatgtcagattataaagagggtaaattttacgccaataatattgataataacgtcaatgatacccatcaggcttacggtacgacgatccggtatattcagtctgtgccgggcggtaaactgacatcaacggcagcatatgacaagttttccgataaacgccgttccaacagtaccgaagccagtgtggtgactgacctggataccggtcttgattttgaagaaggcggttatggtaacagtcagctgacgcaggaaaatatcaatttaattctggattataatactgcccccgtattcttcggaaatacagagcacgttttcaatacaggggctgattaccgtcatacggcatatgcgtttaagcgggatgaagatgttcactcaacggtatcatttattgacagtaccggccgggatgttcttttaagtgaactgactgcgtcaaaaggaaccgtaaatacctctcaccagaattatgcgctttatgctcaggacacgattaaaaccggtgatttcacattccgtcccggtttgcgcctggagcgggataattatttaagtaacacaaatattgctccccgttttacggcttactggcaggcattaccggacacccggtttaagttcggacttaaccgttattacggacgttcatttgccacgatgaagttatccgggaaaatactggaactgaatcaggatcgtacccgggattaccgttcactgacacatttaagtacgccgcattccgatgaattgaacttcggggttaatcaggactggaataactggcgtatttccgcagattatacatacagaaagtataagcagcggattgtggttaaacgcagtactcaggatgataagaaagttgattcattcaccaacggcgatgattttaatgctcagatttatacgctgcaaataacgaataaaacaccgtggactcttggtgcgacagagtggaataccacattaggtgctgactggctgaatactggcagagccgatcttgagaaaacattagatccggatgaggcggttattcttgatggccgtctgatgtcccgtgctcagatggaaaaagaagtcaataataatgaagaggagtggatggtccgtctgggtgttgatatgaagatcccggataataatattacctggtcgaataaattttatattaaagcaccggtccattcttatgcagaaaccaacagtacggatgatattactgtttataaaacgcagaacttcggaacacatactcaatgggataccagcctgagctggcagccggctatttacggttcacatcagctttatttccgtgccgaagtactcaatgtgctgaaccaggtcaggaaaatggaaaataaagggtacagttcaaatgagtacgggatttatactcctggacgtgaattctggcttgaagtcggttatgaattttaa

SEQ ID NO: 286742 - DNA, 549 bp, Morganella morganii
ttggaagaagcgggtattggcggcatagatgaactacaggagaagtttgttcgttgtaatggctcgcctgactgtgagcggaatacgcgcaatgaatatcgaataaaagaaaaagaagcaggagagaatcttgttgcgctctatcagtctggtcagttaacaagggatgaatttgattatctggtaacagagtatgcaaacagaatgttatctggtattgagaaaggtgaaaagttaagtgataccggattcaacctcgtgggtgatatttaccggttgtcagggagtgactggactcctatgggggaaatccggaatccttatttttccgcaatcagaagcagtgagcgaatagctgattggaaggcccagggattgagtaatgacaaaattaaggaactgatgttaaaggatgataccataagttcaattatggctccggttgatgtcaatggtatcatgaatttggtagataacggggctagtaaggaagagtttgctaagtttatgtctggcatgatctttagcaaattaacccaaggtaagtaa

SEQ ID NO: 286743 - DNA, 393 bp, Morganella morganii
atgagtatggaaaaattaagttggttagaaaaaattaaagactatctctatcaacatgatgggagagatttatatgatattgtttatttggttttatccttaaataaaatgagttttatcgcttttttaaaaagagcaagtgaaggatatggatgctccccatcagaaggatgtggttatgccttggatcaaaactgggatattcctgaagagtttgatgaagtaagctttatgtttggagattacgaaagttccacgttatctcctcaaaaattcgttgagctaatgcaggttatatcaaatagttatatcaatgaatatccaagtgataaagaatcgataaaacaatttatggttaggctcaaagggcgttatcagcagttttgttgttga

SEQ ID NO: 286744 - DNA, 1641 bp, Morganella morganii
atgttttcagtagatgtgtcacctgatatgaatatgtatacgttacttgttaaccaagcctatgattcctcattcgcattatgtgaattcattgataacgccatacatgctcatctgatttctaaaaaaactgttcctttgaatatcagtctagatttttactccaatgaaaatctggagtctaacatgcggaataaaatagttatccgagataacgggccaggtataaaccgtactttattagaaaaagcattaaaacctgccagcaaacctgtaacaaaagggttaagtgaatttggcataggaatgaaagcagcagcagtctggtttgctgatgaatggcaaataaaaacacatcctttgaaagataatagccagtacacttgtaactttaacctaaatgaacttcttcaaaaacaacaatctcagattactgtctttgataatacctgttctgattcctggacaggtacggaaattacacttataggtgtacgtcgagatattagccaagagcgctaccaggccattactgatgatatcacgcatatttatcaacgatttattaatgatagcgatccgcgagtaataattacatctagttataatggctctccaaaaacattatcatttacacctttcagccctttaactctccgctcaccaaaacacgttaaaaaaggaaataccgttactgctgtaggaccggaacatttatggaaagttccagtagactttcagtacctaggtgaaagaattcatggttttattgaaataaaagagacaggaagttacatcaacaaccctggtttagtaatgtttaggcatgacagagtcatctgcggcattcctaccaaaaaatatctccctccacgtttgttcaagacctccaataaacatagggcactgagagtgtatggggaacttaatcttgattcatctccggtctcatatactaaagatcgctttacttttgataatgatgaattctgtgacgctcttattgaagccacacaagggttgaatgaacttcttagccaagctgatgcttatagagctaacatcaatacactttcatcccctacaagtccaacttctgtaaatgttccagtaccgactcaaacactgccctctattcaaatatctcctccttcctcggcagttccagcaccgacaccgagcctaacctcatatccaagtgtggcaccatataccccccccactcttactaaaattcagagatcacctgctgtcgaaatgaaactaaccgaacttaattcgcaaaaactccagcgaatatatcattctttatgtacagtttcttgtgctgaacatgcagtactagtatacgttggtgcgtggtcattttttgaaactatggcaaagcttctcggcgcgtcaagtaatattaattttcccgatttctttaagaatatgatggacaaatggcaattcaacagggaggataaaaaatctgctggaagttcactttcaaaaattcatgaggaaggaaacctcaataaacacgatagtataaactttaatactaacgcagctcagttagtcatacactttcaagtactagaaaaaataattattcgttcagtcgaggaaataataaaaaaaagtgtagataagtga

SEQ ID NO: 286745 - DNA, 1404 bp, Morganella morganii
ttgcggttctcttacgagggattactaaaattgcctcgggaaagtgagcatccaatggaatataacagtaatgtaacatggtcaacagccccttcctccgtattcaagagaagcgtcccttatctttacaaaaaaccttttcccacagaactaaaagttgggtttcgcttcattgaccttttcgctggcttgggtggatttcatactggtttatcccgacttggaggcatatgtgtttttgccgcagaacttgatgaaaatctacgtaacctttatctgaagaattatggattaaaaccggaaggcgatattcgcttcgttaatgaaaataacattcccgatcatgacgtgctatgtgctggctttccttgtcagcctttttccaaggcaggtaaaaagaaaggctctgagtgccctgagtcaggcaaactgattgatgatgtactccgtatagtcagaaaaaagacaccacgttacgttatgctggaaaatgtacccgatatactgcgcgttcagggagggttattctgggaatatattgtaaatagcctagttaacgaaggatatacggtccaacataaaatctatacccctcaggacttcggtattccgcaaaaaaggaaacgtatttttgttgtggcatcaagagataaaaatatgtgtttcaattggcctcaaccgagtaatacgtcattatctttggcttctattattaaagataatcctttgaaagtcagatttctcgaaagacaaaaagaagaggtattagaactctggtctgattttatcaaaacaactaaagagtattcatccctacccatattagcgcctgaattcggtgcaacataccccttccacatatctatgacagaactattatttgcaaaacagttcaaaggggctttcggcagagacatgtccgaagtaaaagatataggagatgtgattgagtgtcttccaagatatgcaaaagaaaatataggtaaagtcagttttcgtatagcagaagcaatacaggcatctcgtgaaatttatgcaaaacacaaaaaatttttagatatgtggaaattgcggctacaaaattttcctcttagctggcaaaaactagaatggcagggtgatcgaaacggaactgagctatgggaacatcttattcagttcagagcttcagggatccgcataattagaccaacatcggcaccatcattggttgcaatgtcaacgacccagacaccaataattggtactctaaggcgatatatgagcattagagaagctgctgcgttacaatctcttgacaaacttgaatacttgccggaaacagatagtagagcctacaaagcacttggaaatgctgtgaacgcgcatattgttcatgaaatcgccagaaaattatttttgtaa

SEQ ID NO: 286746 - DNA, 315 bp, Morganella morganii
atgttttctaaatcattatgggcccatccatcactaaatcaaaaaataaaatttaacggtaaagagaaaatagaaataggaagcatgacatttaacttaccgatatgcatatactttgataacaagtatgaaatactagactttggttatgaagatgggattaaagaaagatgcgaaaatgacatatcaaaaggtgtcgatgaaggaataataatagctgaaaaatgcgataataagctttgcacaaaagtatataacaatcaccataaaacagaaaaaataataaatgcgggtgaaactcttgtgatagaataa

SEQ ID NO: 286747 - DNA, 1572 bp, Morganella morganii
atggcatcaacaagtaaaataaccccatccagcccaagactggcatcattactgtcagatgtagaacgcggaaatataaagatacccgtatttcaaagggagtatatttggaccgatgaacaaataattagtttactagactctatatataggggatatcctgttggttctctcttgatgtggtcaacacgagaagaattacaacatgaacgtaatatcggtggatttattttacctcatacccctgaagattatcctgtcaattatatactggatgggcaacaaaggcttacaaccctatatggtgttttcaattcagataaaagaacatctgatgcagaattagctgaccgatttaatatttgtttcctacctgatgaagatacattctctcattatattgctgctagcggaaaaacaaaaatacatttaaactctattttagatacaactaaattactagttgaattacctaaatttaacgatgaacaaaaaaataaaattgcaaaattaacagagtcatttaaagattatgaatttcctgttgtaactattagagagcgtagtaacaaagaggtgtgtagtattttccaaagaataaattcatctggaactcctctaagtaatcttgaattactagcggcatggacatggtcagatcagtttgatttacgtagagaaattgactatctattagataatctcaaagataaaggatacgaagagatagaccagacaatgttaatgagaatgttatcttccctaacttgtaattcaattaactcagacgaccttgttgatgtacctccggaagatttagtaaaaggaatggaaatactaaaaacctcaataactgctgctgtagattttttggaagggcaactgaaagttaaaaatgttatttttctgcctttccctataatgcttataccaattgtaaatttttatgcgttaatttcaagaccaaatgccacccaaattaaacaactgagaaagtggttttggcaatgctcacttacactacgatataaagctgggacaaatcgcttagttcttgaagatttaggaaagatagaaagagtatcaaaaggagaaacaccatttgatgactcccatccaacggttaaaaatgatttgttcaatagtacatggcgaataaattcaaccgctgctaaagctgcattatgcttaatggctcaattaaggcctaaatctttcttaacaggttcagaagtcgatctaggaactgttctatcctcttataacgcaagacagtttcaccatatctaccccaaagcatatcttgcatcaaccggaatatcatttcatgaagcaaatattatctctaatatttgctttctttcggctttcgagaataactcgattagtgatgaagcacctatcaattactttaaaaatattcccgatgagcacagagaagatatttttgatgctgcattaataccacatgaagctagggatggcaccttaccttttgaggatttcataacccttagaacaaaaatattgttagaaaaagcacagcaactaatcgtgactggctatttataa

SEQ ID NO: 286748 - DNA, 1008 bp, Morganella morganii
atgaatatgactaaacgcctctttttctgtttgtatgccggtctgtgttctgctcaggctgacgcttttaccgacctgacctatatgaccagcgtcacaatcgacagtgctgcgcaacaacagcctgtcggtaccgctgtcggcgcctggcaggacttagtagtatccgtaaaatgtgagggaagcataacgccggattcttaccgtttcaataataacggctatgccacaaccggaataacattttctgacgacggtaaacgatatccggtatttaagacctatattgaaggtatcggtgtggctcttgcgatacgtgaaagaggcacttcagcctggcatcctgtctctgcaagtcagacaaaagtatcaaccaccggacagagtggtagtattgcatttgaagtgaaaggcatttatgtgaagactcaaaaaacattagtgccgacaaacgcttcacaggaaataagtctgttaaaaaacgaatgtctgtattacagctcacccatcgatgtacccaatgaattatctgtacgcagtaacggtgccaaacagaaagcagaaacctgcaatgtcaccaataaaacccagtctgttgatctcggcagccatgagctgatggtggtcagaaaactgaaagtgggtgagaatttcggccacgcccgcgccggacttaccgtgaaatgcgatgccgggatgaatgtctattttacactcggtgatcatctgcattccggaaatattaataccaataccctgttccttgaaaatcataataccaacccgggattcggggtgcagatatttgaaccggaaaaatcaaagccctatatgttaggcggtgataaaaaaatcgattctgaacaccagtatccgttttataagaccggtaataacagcgcggagaccatcacaaaatatctggattttaaatatgtaaagctgtcggatgatgtaaaagcaacggaaggaaatgcgcaggcgacaatgacccttatctataaataa

SEQ ID NO: 286749 - DNA, 150 bp, Morganella morganii
atgtgtcagacaacgataatcgacatttttgacgaaacgggaagggaaatattgccggaaaaatattgtgctaatcagcagcatgacgctgaatgcggcgacatcagcttccggccggagtggacagtccgcctgaagaaaattatctga

SEQ ID NO: 286750 - DNA, 141 bp, Morganella morganii
atgatgaacaaggcggtaattttatatttaatttatataatttcactcttgattataaataaagatgaacttaaaaatattatttatctgcaacataaatcctttatgctaaataacctccatacattaattcatgtctaa

SEQ ID NO: 286751 - DNA, 300 bp, Morganella morganii
atgacgactaaatcttgtagtgctgcgttatccgggaataaacgtgctacagacataacggtatcgtctgagtgtccaggcatatccccggaagatgtgattaagaaatgttattccgtgtatggcggatgtgataaccttatagcttcatctttcaggaaagaattaacgaccacaaccgtttccggagagtcggtgaaagccggggaagccacctcagttaaccggggagacaacccgccgggtaatggttttgatctcattttgaatgatagtgacctatacattctgatttattga

SEQ ID NO: 286752 - DNA, 669 bp, Morganella morganii
atgtgtaaaataacagaaattcttcgcgggagtgagttgtacccccggcatttatcatcaattatggccccgcctcgtgtcatatgggctatgggtaatttgtcgctgctcgaaaggcccggcattagcatcgttggagcaagagagtcgtcaaaaaccggattaataattgctgaacgaatcgggtcgtatcttgctgagcggggaataactgttgtatcaggactggctctaggtattgacgctgctgcacacatcggcgctgtcaaagttagcgggccgacaatagctgtcctggcttccggggtggatgtgttcacgccgaaatcaaattccgggctggcaaacgcaatactggaaactggcggacttatagtcagtgagcaacctccgggatcacctgcggcaaaacaaaattttgttccgagaaatcgcattcaggtcgggttatcttcagtatccgtcattgttgagtgcagtgaaaaaagcgggacaatgaggcatgcgaacttttgtcttgatgaaaaacatccgatttatacagtgatgcctgaggatccgagagatatgaatcttactggcgcgcgtaaactcataggtatgggggcgaaggttattgcatcgaaagacgattatgccgcactactgaaagaagtaagacctgaatag

SEQ ID NO: 286753 - DNA, 528 bp, Morganella morganii
atggctgaaatatattcgttatctatataccaaccgtaccgtggtggacaaaacccaaactttgataaatcctccggaatgcttcttgactttaaaaaaggtgagttaaaagctgtcaattactggtacccacaggtttcaagattgatctggtctctggcaggagatacgccattttcaatagcaacagtaccgtcaagtactaaagggaaaaaacatcccggtttcactatgttagtaaaaagattggcgagtgagttctcaataataaattcgaacacaaacctgattgggcgaacagaatcaatagataaacttgcaacaggtggaaacagagaggtaagcgtccacttgcacaccttgagggtgccaaccactacaatagattataaccctgttattttgttggatgatgttacaaccactggtaacagcataacggcagctgtatcaaaattggaagatgccggttacactgttattgcggcaattgcattaggtaaaacagcagaaaaaacagatgtgtaa

SEQ ID NO: 286754 - DNA, 936 bp, Morganella morganii
atggaactgaatgaagcagaaactgacgatatgaaatttagagttgtttatgatgggcccgccttagacaaccatgaaatggatgtaaaggacttggttccagcactgatatcgatgtcagcattgttcgaagaagctggcagggttatctatggcgacgatgtcaaagtttctgtcaaagttaaagcttcctttagatctgggtcattcggcattgatttaaccgctgttactagctggctcaacactgcaatagagtttttttcaggaaagcccggcacggcaacagcaaatcttattgcaatagttggattttctacatacgcaggaaagcaatcatacaaagggttacttcagttactaaagtggacaagaggaaggcccataactaaaatttctcctataaaaaatggtggcgtaaaagtctttatcgatgaaagtgaggaaatatttgaaagagaagtaattgagttatataaaaatattaatattagaaaatccctgaatgagataataaccaaaccgctagaaatcgatggtataaccagctttgccgtaacgctggatgaaggaagcacctttattactgtcagcaaagaagaatcatcatacttttcaattagttcaattgaagaagttaagctatctgaatctgaatcagaaaaaatcctacaaatcattaatctatcattcaatgagtctaacaaatggcgatttagtgatggctcatatccattctttgccgacatatctgaccctgaatttataaacaaaatgaacactagggagcttaatttttcaaaaggtgacatgcttcttgttaatttaaaaaccacacaggtattaagtgatagcaaaataaaatcaaaatatgaaatcactaaggttataaagaaaatagacccgcaagaacagatcaagattccattaaactaa

SEQ ID NO: 286755 - DNA, 417 bp, Morganella morganii
atgccacgctgggtaaaagcaatagtatccgcaatgtttttcacactctcattagctgttagcttcctgatgtatgattatattatttctttattaaaaatgcgaaatgaaattatattttccgcaaaaaacttaatattaacattcggacttccatttacatggtacactcttttcggaatgacaattgaactttcatttggtgataactctatattttacaaggtcattacaaaatataaaaacataataatgaatattacatattacttatttcttattggccttattgctggcattcctgtttcctttttggtaaacatctaccttctcgataacggctataaaacatgtgacaaaatctcatggatgtcaccaaccacctatgtaaaagacctgtcgctttgtggcaggtaa

SEQ ID NO: 286756 - DNA, 1611 bp, Morganella morganii
atgaattttgaaaaaagtggaattattgttgaaaatccttatcaagatgcaagtaacaacgtgtgtcttgaactttttcaattactacttgttgtcgaaaaaattaaagcgtcaaaggcaggtgcgaatgcgttagagaaccttgtgaatttgcaagactttcttagagaccaagaaagcattcgaggatatttctctcggagttggtatataccgataactcaggaggctgacgaaattttttcgacggtttgtcgagttttagatacaaagcagcagcctagcttcaaagacttttctatagcagctaattcatatttaaagcaatttagaggcatgtcaaaccatccacaagataagcaagtcagggaacgtcaagaagaattttggttaaccatcgcgccagaattgattaacgaacatggttatgactttataagcctacaaaatgatgctctgggttattctcatttgagtattgtctatgcttacaaagaggctgcacagattttgggtgtaattgagaagcttcaaagtattgatgatagcaagattgtagaagaagcgattgaaaaatatgcaaatgagatccaactcgatcgctcaagtatttttaaaaaatcagaatgctctcttcattttaggcaccagataaaccaaaaaatttgtctcagttttagcaaaaaattttttcagctagtaaagttcgtcaaagaactttttgccatagataactctccatacgaaaacaattcccctgacgtaacaattaaagaagaagaatataatcgacgttttcaaaaatctgagacttgtgaagtcgtgaccatgaagctaccccgagaggtttttaatcaggctaaaggctcaggtactaccatgctgcttaacagagttattttggcaaaaatttgggatactgtagaaaagagtcataattatcataatcatgtcgatgatcattatcatcttgagggcttagctgaatactcttattgggctagtaaccaaaatgaaacgttattaagcatcgagttgagcaaaggaagaaagctatcaatttcagcgatgatgcgaggattgaaattctcttattggttttattcagcaaaagcaaaacagcagaaaagattgaatattggggaagcggttaagctatacgttgaagaaaaaggacttaaagacagtgcaacaacaatcaagttttcatttgaagccatcaaacgagttggaaaaacagagctaggtcctctgatttgtaaacagttattctggcgtcttaacaatgacctcccaagcattaggtatagtttctgtcctttaaacgattctttttatcaaaaggttaagtacacagtatccgagatagaaaatatcttagattttcaagtagatatagaaaattatagttctcttcttaaggagatcaatcagatagaagtacttttaaggaaatctaatgggacagactatagagactctgatctggagtttccgtggcaaccgaaagatcctcaagacgataagatatatagacgccgcttaaaagagtcgatcaaacataaagacgtgctctttatcttaaaaccaaattgtgacggtagagtatga

SEQ ID NO: 286757 - DNA, 291 bp, Morganella morganii
atgaataaaggcctatatttcccttccctttgtcctgcaagtaaaactgccacaggcgaagcgctgaaactacatgatgccgaaatgaaaattttagctagtggacccatgggtatgcaacgactcgcagcaatgagagcactagacttgcaagaaaacattccagatctttctaatgaagatgctcaaaaaatgggggctgggtatgtgattctgaaagtgcttggtgtaaatggtagcttaacggtttcaactcgaaatgaagttcaaaggttagaggctaaggagtaa

SEQ ID NO: 286758 - DNA, 255 bp, Morganella morganii
atgaggagtaagttttattctcaacgtcataatgttggtcagcatattcctcgagccaaactctacgttggtatgttaatccaccttagctataccaattttggctgtgtgtggcgtattacagccatagaaacaccaaatgcaaacggtgaagtttggctcaagttggtagcaccgcgctcagggaagacaaagcgttcaaattcgatttatgctacttacattcgcaataacgagccaattcggcgatcctaa

SEQ ID NO: 286759 - DNA, 654 bp, Morganella morganii
ttgcgcaaggggttttttatactgactttgatatactggagcttttcagttttccatgatctgattggtatatatagaaaagtatatgaaacagcattgggtaaaggagttttaatattaggaggtacgctttgtttgaatttttccttatgtctttcaggtgctgtgatcaataatgtaacttccgtttcaccaactaattttcctcactctttgatatttatttcggctgcgatgattcctttgatcgtacctcttggtatgatcttactgctcgcggttattttagtgtcagcacccatatggagttggttttttgtttataacgataaacttaaaaaaatgttaataccaggatatgaacctaatcaacagaggtttttacacaaaactactttaataatcaagattatatatttgataatctattgttcatttatttttcattttgcgcaccttaaaggtgaacattatatatcctatattaatagtaaatctcaaagtatgatttacacgctcgaaatgtttgataaaaatccatgtgccaacattagtagtgcgaaggtttcatttttaggtgatagcaatgttctggttgcgactaagaataataataaatacttattcttagtcatgaggtgcgagataaaatag

SEQ ID NO: 286760 - DNA, 861 bp, Morganella morganii
atgaccaagatcctccgttatctcagtgtgctgaccacactccttttatttgtgctgcccgcacaggcaacactgtacagctatattctccgttcggagggtaaaccgacgagtgcctcatactactacagaattgctgcctggaccccgccggcgccgggcagtatgcatccctgcctgagagtgggtctgacaaaaagctgttacgtcaatattaatcaccgccatacaaacgcagaccggggcggtgtcgcttcccgtaataacagcgagttccaggcacgctgccgcctgaacctggcaacactgccggatgccaccgccgtttataactatatcagcaacagctgtttcagcgggctgccgtttgacggacagactgaccacaaaggtgatcctatccgcaacgaatgtgtgacgctctttttaaccgacgacccgaaagacggacacggttatatgtatccggattcaatctgcggcgtggcaccaccgccgggcggaatttgcagctttacggctgactatccgaacgccattctcgatcatggccgtgttccggataatgaaattaacggcgatcaggccagtcagtatctgagaatgaaatgcaataaagataccgccgtccgaatctactcagtgagtgatactgatgcccggctgaaactgaaaaacaatctctacagcagactgacactgaacggctatccgctgaactcctccagtggtggtgtaccggtttatgtgcgcggggattatgaaacaaccgccctgctgaaaagcacactggaaagcaccggaccggtggaagccgggccctttatcggtaatatttccattattatgaccattgactga

SEQ ID NO: 286761 - DNA, 327 bp, Morganella morganii
atgacaattttagtcatggttgcagctgttggtgatgaactttatactgaaattcccaaaaaacgcgggcgcttatttaccaggtgttactccgcattcagaacagcagtccgcagggcaaagatagaacctccggcaagccagttatctcacgttttacgacatatgtttgccagccactttatgatgaacggcggtaacattctggtgcttcagcgcattctcgggcacaccgatattaaaatgacgatgcgttatgcacactttgccccggatcatcttaatgatgtggttatgtttaatcctttgattagatttaggaaataa

SEQ ID NO: 286762 - DNA, 1962 bp, Morganella morganii
ttgtgtgccctgggacgcgccgtcggtgttgagtttgatggtgtgactgttggatttatccccggtgttgccggccagatcctgcacctgcacatagtaggtgtagtccgagccgctcgccaggccggagtcctcgtagctccaggtcaggccgtccactttcacgtccgcgcctttcagcagttcgccgttgcgccacaccgtcaggatctcgcccgcaccgagtgccgcgctcagggtgccgtgcagggtcggggtgtcgtcgttggtgtacgccccgtcctccacatccccggtcaccggatccttgttgtcgacgatatgcgtcagcaccaccgcctgggacggcggtacggtgtcgacgttgatttcatagcggttggaggtcgcgcccgggttctgcgccgcgtcctcgacatgggcggtgtagatgtgctgcccgtccgtcagatccgtgctctcgctgtaggtccatgcggtgccggtcaccacggccctgccgaccgccacgccgtcgcgcatcacgatcagcacctcgccggcgccgagcgccgcactcagggtgccgctgacatccggacgggcgtcgttggtccagcccccggatttcacattaccggtcaccggcagcacatcatcgttcaccccggtgatctgcacggtctgggacggtccctcgaatttgacataaatgtcgtagtcggcggcgtacgccccggtgttgcccgctttatcctcaacccgtgcggtgtagacgtagtggctgtcgttggccagcccgctgtccgcgtaggtccaggcggtgccggtcaccaccgctttgccgaccgccgtgccgtcacggtagacggtcagcacctcgttgtccgccagcgctttgctgagttcaccgcgcagctccggcgtggtgtcgttggtggtctcgcccggtttcacattgccgatccccggcgcctggtcgtcatacacggcggtgatggtgaccacggtgtccggggcggtggtgtcgacgtggatggtgtagccgccggagaccgcgccgctgttccccgccaggtcgcgcaccagcgcggtgtaggtgtaggtgccgccgtccgccaggccgctgtcgtcaaaggtccacgcggtgccggtcacggcggcgtgcccgacctcgacgccgtcacgcagcaccacgacaaattcggtgtcgcccggtgccgcactcagggtgccgcgcacctgcggtgcggtgtcgttggtccagccgttgtggtcaacgttgccgagctccggcgccacgtcatcccacactccggtgattttcacactctgggtcggggcggaggtatccatatggatggtgtagctgtcggattcgtgacccgtattaccggccgcattacggacaatcgcggtataaacataagtattaccgtcagtcaggccgctgtcggtaaaggtccagttattccctgtggtcacagcaaaaccaacttcagtatcaccgcggaaaataacgactttttcaccggaagccaggttttcactcagtgtaccgttaagggtcggggtatcatcgttggtgtaaccaccatttttgacggtttccaccagcggcagtttgtcatcctggatatcggtgataatcacagtctgagacgggaacccggtatccacaataatgctgaattcatcagacaggtggccttcgttaccggctttgtcgatcactttggcggtatagatataggtcgcatcattggccagattgtcagtgaatgcccactctgtgccatgcaccgtggctgtaccgaccggtttgccgtcgcggtaaaccacaacacgctcggtggcatccagttccgcatccagcgtaccgacaacggttggtgttttgtcatccgtcacttcaccggacagaatgtttttctgaacaacgccttcgtcatcaataacataagcaatagtgaccgtttgtga

SEQ ID NO: 286763 - DNA, 2544 bp, Morganella morganii
atgggccacatcaaccaccgccactttgtactcgtaggtgccgtcgttggccagggtgtcggtgaacacccaggttctgccggtcaccacggccccgccgacgtccttgccgtcacggaacacgcgcagggtctcacccgcccccagctccccgtcaagggtgccgtgcagggtcggggtcttgtcgttggtgctgccgccgttggccacctcgtacaggcccggcgcctggtcatcggtgatgccgtcgatcaccgccttctgcgacggtgccgtggtgtcgaggtacatcacgtagtcattcgacttcgccccctcgttgcccgcctcatcgcgcaccagcgcggtgtaggtgtacttgccgtcggtggtgatttccgcgtcggtgtaggtccacgcggtaccggtcaccaccgcggtgccgacctcgctgccgttgcgcaggataatcaccttctcggtgccggtcagcgccgcggtcaccgagccgttcagggtcggggtgcggtcgttggtggactcgccgtttttcacggtgccggtccacggcagctggtcgtcggtgatgctcaggatttgtgtgccctgggacgcgccgtcggtgttgagtttgatggtgtgactgttggatttatccccggtgttaccggccagatcctgcacctgcacatagtaggtgtagtccgagccgctcgccaggccggagtcctcgtagctccaggtcaggccgtccactttcacgtccgcgcctttcagcagttcgccgttgcgccacaccgtcaggatctcgcccgcaccgagtgccgcgctcagggtgccgtgcagggtcggggtgtcgtcgttggtgtacgccccgtcctccacatccccggtcaccggatccttgttgtcgacgatatgcgtcagcaccaccgcctgggacggcggtacggtgtcgacgttgatttcatagcggttggaggtcgcgcccgggttctgcgccgcgtcctcgacatgggcggtgtagatgtgctgcccgtccgtcagatccgtgctctcgctgtaggtccatgcggtgccggtcaccacggccttaccgaccgccacgccgtcgcgcatcacgatcagcacctcgccggcgccgagcgccgcactcagggtgccgctgacatccggacgggcgtcgttggtccagcccccggatttgacgttgccggtcaccggcagcacatcatcgttcaccccggtgatctgcacggtctgggacggcccctcgaatttgacataaatgtcgtagtcggcggcgtacgccccggtgttaccggctttgtcctcgacccgcgcggtgtagacgtagtggctgtcgttggccagcccgctgtccgcgtaggtccaggcggtgccggtcaccaccgctttgccgaccgcagtgccgtcacggtagacggtcagcacctcgttgtccgccagcgctttgctgagctcaccgcgcagctccggcgtggtgtcgttggtggtctcgcccggcttcacattgccgatgcccggcgcctggtcgtcatacacagcagtgatggtgaccacggtgtccggggcggtggtgtcgacgtggatagtgtagccgccggagaccgcgccgctgttccccgccaggtcgcgcaccagcgcggtgtaggtgtaggtgccgccgtccgccaggccgctgtcatcaaaggtccacgcggtaccggtcacggccgcgcgaccgacctcgacgccgtcacgcagcaccacaacaaactcggtgtcgcccggggccgcactcagggtgccgcgcacctgcggcgcggtgtcgttggtccagccgttgtggtcaacattgcccagttccggcgccacgtcgtcccacaccccggtgattttcacactctgggtcggggcggaggtgtccatgtggatggtgtagctgtcggactccttaccggtgttgaacgccgcatcgcgcaccagcgcggtgtagacgtaggtgttaccgtcggtcaggccgctgtcggtgaaggtccagccgaggccgtccgccttcacggtggcggtgctcacaaacacgccgtcacggtacaccgccacttcctcgcccgccccgagtttcgcgctcagggtgccgttgagggtcggggtgtcgtcgttggtgtagccgccgtttttcacggtctccacctgcggcagtttgtcgtcctgaatatcggtgataatcacagtctgggacggtgccgtggtgtcgagtgtcatgccgtaaacattggattccgccccggtgttatgggccgcatcaaccaccgccactttgtactcgtaggtgccgtcattggccagggtgtcggtgaacacccaggttctgccggtcaccaccgcgccgccgacgtccttgccgtcacggaacacgcgcagggtctcacccgcccccagctccccgtcgagggtgccgtgcaggatcggggtcttgtcgttggtgctgccgccgttggccacctcgtacaggcccggcgcctggtcatcggtgataccgtcgatcaccgctttctgtga

SEQ ID NO: 286764 - DNA, 630 bp, Morganella morganii
atgcattatgaaatattagttgaaggacagtgtgaattaactgtactttcaattcttatgcctaaattagctggggattataatacacctaacacatggaaaattcataaacatagaggtataggttctttacctagtgatccgacaaagccaccaaaagccagtgatacatcattactaggacaattacctgcgaaattacgtgcttattccagcaatcctatttcagaacgaaaagttattgtattattagatcttgatgataaaaacaaacaacaatttcattctgaattaatgacgttactaaaccattgtgaaaatgattttcctgttttcttctattttgctgaagaggaattggaagcctggtatttaggtgatcaaaatgctcttgtggcatacaatcccaaaatatccttttcaaaattaaattcttatgtacaggattccatatgtgatacttggaagttacttttagaggcagatgatcctactttggccaaactcaataaccgagatagacgtcttctagataaaaaagtatattgggcaaaaaaaataccacctcatatggatgtaaatgtaaatctgtcaccaagctttctagaatttaaaaatgcattttcctaa

SEQ ID NO: 286765 - DNA, 1263 bp, Morganella morganii
atggccttaatagaaggattcagaatttctaactttcgatcactaaaagatgtgactttaggtagaacttggaatgataaaacccaaaaaccactgaccccattaactgttgttattggacgtaatggctcaggaaaaagttctttatttgatgcttttgggtttcttgctgattctttgacatttggtgtagaagaagcatgtcataagaatggtcgaggtggctttgaacgattgcgttcagcaggttcagagggtaatattgaatttgaaatatattatcgggaatcgccaaaagaaagaccaataacttatgaattatctataggtccagatgattccggaagaccaattgtaaaaaaagagcgactacggcaacgccgatcaggacaacggagaggatggcctttctcatttttagaactttatgacggaatgggtaaagtatggtccggcgattctttatcagaaaatacagaggataatattgatgctcttcttcaggaagaatcaaatggcacagtaagaattgagctagatagcaggcaaatgctgggaattgcgactttaggcaatttaaaggaacatcctcgtattgctcgtttcagaaaattcattgaaggatggtacctttcatattttactccagatgctgcaagagatttacctcgagttgggccacagaaacatttaaatagaataggtgataaccttggaaattttgtacaatatatggaaagggaacatcctaaaaaattcaaacaagtattatttgatattgcacataaaatacctgggattattaaaattgataccgaggcctctcctgatggacgtttactgttaagattttttaaccgtggttttgagaaaccattctatgctcagcaaatatctgatggtacattaaaacttttcgcttatatgcttttattagaagatcctgatcctgcgccatttgtttgtatcgaagagccggaaaatggattataccacaaattattacaatctttagcatcagaatttagaagtcatgctacagggaaaaaaggtgactctcagttatttgtcactactcatcagccctattttgttgatgctctagatcctgatgaggtttggatccttgaaaaagaaagtaatggttattcagttttgagccgcgcatctgattattcagatgttgttgcaatgtatgagcaaggattacctttgggtagtttatggtacagtgaccacattgatagcaaggatttcgactga

SEQ ID NO: 286766 - DNA, 324 bp, Morganella morganii
atggcacggaacggactatcaatacgcgcccctgatggtattgaaataatcagcgaaacagaccgtgttgcccgcgtggttggttcgcacatattgccgccgataggacgcaatggatattacagaaaagaatatcaccattctgaactggaagggcagggtgagctttttgcatggtttgatgccgcagggttctggaatatatcggcagagggaagggttgttgttagtggctacacaattattgttgaactgagaacgggtagcggcggctcggcagaaccggtaatacccggaacaaaagtacactacggggtcagataa

SEQ ID NO: 286767 - DNA, 663 bp, Morganella morganii
atggcagggtatggatttcagttacggggaagccacggaaatttacagatagatggccggtaccaaaacatgaatgtcacgataaaagagaatcttgtgtgtccgggaggatattcagaaaacaattcttatatgcaaaaaggagcgattaccacaatcaagcagccgttcccgccgacaaccaccattgttgctctcgattccgataattgggtcagagctgaaaatagcagcgtttatcaggctgcaggatcaggtaaagcaaatgtcactttctttggctttggcacaaacagactaaattggtttggttccgggtatggattgagtgtatgtaatgaaaccggtctggaagtttataattctaattgggcagtgatgaaagtcatcggattcttcaatctcggatttgttaaatactggagttacaaaataccgtccggcaagcgatatgcagttgtcgtcaatggaggtcgggtggaatataacatgtcttcttacgatgcggtgggaatgtggcacgaatacaggcgtaacggagacacaatagaaatcaggtataatgaggacgcaatgtggtggttcagagatgatgacgaattttcctttgttgctcagagtattgatttatcagtaattattgttgatgtgacgggatattaa

SEQ ID NO: 286768 - DNA, 2019 bp, Morganella morganii
atggataataaaattaatgcttataagattattggtgatactccttcgatttatgctgaggttgatgagacccggggtaaatttacgctggcattacagaaagatgataagactatcaaagtcctgacggatattgtatgcggtcaggtttttagtattacctcaccaggtaaatatactctttctgttacttacaaagacgatgtgttctattccgacagcatcgatttttatgattatgaatttatcagaaaaatgtccggcatgagcaactcgtcgggtgaaacagtaaatcttaaaacagaggagtcagtatcacctgatattaaaaaatttactattgaagtaaaaatcaataaagggaaaaaatccattctggataagatcctcaaaaaaaataaagatttttttgatttgcagaaaaaaattattgacctatcgacattctctgaaaatcactcaattcacaattttgaatattacagcttaaaaacaaatctatcctctgtcgaggctgctgtaaaatgccacaaaatggaacaggaaaacgatattatttatgtagcagtggttcctgatactgagtattttgtgccggcaggaactgacattgcccgggattcagatgtaatgagcagtaatgctccattaacacctgatttctctcacttacaaacatacctggatgaacctcatggtatgaatgtaagaaaagcctgggaacttggtaatacaggaaaagacgtaagaatccaccatatagattttggcctttttgcaaatcacgaagaatttcgaagcggcaatattacagttatcagtaaccccacaggtcaaggggatcacggtacagcttctgtaggttgtatttcagctcaaaataatgggtttggtattactggtatatctcactcatccaatctattttcctacgatattaatgataccagtgctatcatgcaacatgtccgtccgggagatattgtaagctatgattttgaatatttggttggcgaaaaacatattcccggaattgcatcaaaacatttttgggacatttgccggaacctgacagaaaaaggggctattgtcataatggctgcaggtaatggtgaattaaatttaagtaatgaaccaacttgccctgattatggtgactccggtgcaattttagccggagcctgtgataaggatacaggcagaaaactgtatttttcaaattacggacattatacatctctcgttaattcagtggggcatcatctcgtaacaaccgggtatggcgctctgtataaacggaataatgaccctgatactatgtatactgacggatatggaggtacatcaggttcaacgcctttatgtgccggtgctctcgcattgctgcaatcacatgctaaaagtatgggcgttatgctcaatgcacaaagtatgcgtaagttactcaaaaaatcgagttatacagaaggtgttattgatggcattggtgtacggccgaatgtggctcagttaatgcatgaactggataaagaaattttagcgcctctggctgatgtgaatccgtttacacctgcctcaaactacctgaattttcttgtatcatttaatattgatgaatataagtttgaaaatatcccattcaactatcaatatactgatttatactctaacggtattattgcacattatcctcagcagggtccgactcagctgatatggtggaatcaaagtaaggagctcacccctgttacaattccggtaaaagacagtagaggtaatattaccgtcgtgtatcttactgcctgtaaatggaatgatgccggacttgccgatatgaattcggcggccagcactgcgggggctaccggtattaatttcagaatccggttaatatatgacccgaagaaaaacacacatttaagaaaggaaaaatacagcggaatactccctgtttatattaaatccatggaatataaagaatataaaatccctgtgaaaattaaaattcttattggatag

SEQ ID NO: 286769 - DNA, 915 bp, Morganella morganii
atgaaaaccgacttatttatttcgtatgcttggacatctgacacccatcgtgaatgggttcgcttatttgcaagtcagctccatttgattggttataccgtgaaaattgatgaagctgttgactatggttcaagcctgagtggttttatgaaagaagtaataaactctgctcatgtattactgattgtagatgaaaattatattgagcgagcaaacaacaaacctgagtcaggggtcggtatagagacaaaatggataagtgaggtatttcaccaaaaaccagcatcatggctatcggttgtcttcgttcggaaccctgaacgaaagttacctgattggcttaaaaatcataatcctaagggatttgattttaactcacagccggataaaaatgaatttcccggagcgactcaaattaattcagtatggagatggattgaaggcctgcctgctgatacaagtcatgctactccattatcagtgctacgaaaacgtacagcaaggcttgagtatattgatcttctgcgtgaccccggaaactatacaaatccggcactcaatggtatcgaaacttttcgttatagaaatcactctgcttatacaattggcaatggtgagtatcaatttaaaatagcgttcagcggatgttctccgattagtatttatctttatactgatgggggattgaaagcagtaggtttgattacagatcctgattttgatccagctactgtcgaatcatttcttaccgaagggcgtactattacacctaaagtgggacaaaaagcggtgcttttaaataattatggagcgctctgcattataaccatcaatgaagtacaggaagaggttaatactaaagagtatactccggggcatgtaacattttcatatgagatattgaccacgtattaa

SEQ ID NO: 286770 - DNA, 336 bp, Morganella morganii
gtggcatataaaattgaagatgcatttagttctgacagtatttcaaaatatggtgcaaacgatgaaaacacatactggttttctttgaaagacatactaacgattgtaactgtggcaatatcaaagggtaaaatggcagggcgtgatggctataattttaaactcagtcactatataaaaacgcctcaacaggcagggccttatcgtccaggtcgccaatggggagatgataaagcatacgctttacatcaagctgtctctgctatcacccattattatgatatggccattgaaaacggtgataaaccatcagaaaaatggttgattaaagcttaa

SEQ ID NO: 286771 - DNA, 975 bp, Morganella morganii
atgctagatagacaagaaaaatttaatcaactcagtttagctttttcaaattttagtagttatgtggagtttaatgcaaaagcgggtttttttgatgtacataaggcaatggaaactgtactcatttcaattcttaatataacttacaataaaagctatattaatctcaatgtaatcaagcacaatcatcccgcaatagatttaggatgccctttaactcgaactgcggtccaaattacatctgacggctcttcaagtaaagtgaatgatgcagttaaaaaattcaaagagtatgggctggatcaaaattacaattcattttcttttatgattattaccactcgatcgtatactacgtcccagaactacgagaaaaaaaatctgactgatttggtaaatgatatttttaacttaccggacctaaaatttcagcaggtctttgagtatataaaaggtgagttttctaatttttggcctaaaaaaagtcaggagaattccttaatgatggctacaagtacttctgttgagccttcacaatgtattaatgatttcattgaatcccagatggactgggctgaaaaagaaggttattcacatgataaaattcgtgctgatctgattcttcttaaaaatgacctggctaatcttagtctacaggaaagaaatattatctttagagttctatatcaggggacgtcaggtgattattcatattcccttccttggaccgtattatcccataatctagattgctattctattcagcagttaagggatgtttgtaactctcttacgcataaaaatattctttgggttgatgatgatgagtatcccaatcctgtatctgtaaacttccaaacggatatagacgatttaaattatttaaaagaaattgctgactatatgaggaaaaaaggaatgttagaaaacttaaaaaatgtcatagttaattgtgattttagttttattaaatga

SEQ ID NO: 286772 - DNA, 1371 bp, Morganella morganii
atgaaaacaaaatcactctttcttctgataccgttattactgtccggttgtgaccagacagtggtaaaagagatcggcattgaagaattgtcggagaacctgaacaatccggaatacattattatcgatacccggccggacagtttatatttcggctttaaagataaaggcgcggcccgcggtggccatattaaaggtgcgatgcagtttaccaccggctggctggattttatcgatgagaataagttcgatactttcgttgaagaaaaggggatttccaaagaaaaaaccctggtattttacgacagtgacccggattcactggaacgtattactgctgaatttgcggccaaaggttttcaggtcagggcatttaaatcctttatccagtacagcaattctgatctgccgatggataaatacccgaattattttctgagtgtttctcccgcctgggttcaggctgcactgaatggtgaaaaaccggaaagttataccagtgatcaaaagccggtgatatttgaagtgtcctggggggatgcggagcaatcaaaatcctatacaacgcatattaaaggcgctttccattttaataccgactggatagaaaatgcgccggtctggaatttatccgaacctgacgttatcaaaaataatctgctgaaaaacgggatccgcaaagataccccggttgtcgtctattctgaaaatcagatggcagcattgcgggtattatgggcgctgaaatgggccggtgttgaggatgtccgtttcctgaacggcggcttaaatgtctgggcggatgcggaattaccaacggaaaccacactgaatattccggtgccggttgcggatttcggtgcggaaattccggttaatccgcaggtcactattgctatgccggcggaagccatacagggtcagaaatccggccttaaacttatcagcaaccggacatgggatgaatataccggcaaaatctccggttatgactatattccgcgtaagggtgaaccggccggggcaatatggggatttggcggtaaaaattcgaatgatatgtccgattactatgacccggacggcacattacgtaatccggaagagatttttgctttatggaaaacgcagggtattgaaccgaccgatcaggtcgcgttttactgcggtaccggctggcgggcaagtgtttcctggtttatgacccaactggcgggctgggaaaacagccggatttatgacggcggctggaatgcctggcagatggatccgacattaccggtattaaataatattcagagccaaaaaccggcagcactgaatgattatggtgaaataatcaaaaaaccgggacaatcctgtaaaagctga

SEQ ID NO: 286773 - DNA, 1182 bp, Morganella morganii
atgaataataatcttgacatcatatttaatggtacagaaatcaataattacttatcgaataaaatcgatacccatattgaattatcattatttttatctaataacatagataaagaaaaaattgatagctttctaaactccattagtgacctatataatttttgcagtaaatccaaagttgatttaatggcgacttgctcatattcaatgaaacttaacttccctagtgataaatgttctcttgaggattttatcggttcatatttaatattaatcaggtatataaaggaatattcttatacatatccggataattccttgagtggagagatatctattctcatagatcagtttgaagagcaaagagattttttcttacaccttaaaaataaatcacattgttacacacagtatttttatattaaaaatatttttgaccgaaagatcgctgagtatcacacatcaaaactaaatagcgatattagcacaacgaatactttatttaaggaattcaatgagagctatagcgagttcgatttaaaatactcccgaatatctactatggtagagtataaagataatgttattgagcataaacaccaagaatttatagaacaggttgaaaatgatataagcgccagaatgaataggcttaaagaacttaaagaaacaattataaaattaacatcagaatataattttgctgctttaaaacaaggttatgctaacttagcaagacaaaaaattcgcgaaaaaaatatggctattttttgcatgttgatttttgggtcaatggctattatggctgcatcaattaaactactgaattttcttgatttccttcctgttaaaattgtttttcccgaaaaagaggagaaagtaattttctacatatcaattattggccttacaattttatttttatacttttttaggatttcaatgattaacttcaataatataagaacagagttgaatcaaataagcctaagagtaaatttgtgcatgttcattgaatcatatatagatttcaaaaaagaccaagaagataaagaactaatgaataaatttgaaaatattgtattttcaaatatcagctctagtaataaaaataatatcagtgcttttgatgatttagataaactggtaaaactaatacaggcagtgaatcctcaaaaatga

SEQ ID NO: 286774 - DNA, 1830 bp, Morganella morganii
atgtacctgaaaactttgaaagtatggaatttccgaaagtatggctcttcggaggagattgatctaaacaaaccaaatttatgtttgcaccttaaaaaaggtcttaatgttttaataggtgaaaatgactcagggaagacagcgataatagatgctattaaactggttttaaaaacacatagttttgaatggatcaaagttgacgaaaatgacttttataaaaatacagaccgacttagaattgaattaatttttgacgacatggaaaaagaagcccatcattttaatgaatgggtagaataccatcgtgacggcgataggatacatccttctttgacgttatcttacgaggtatataaaaagaatggaaggataatacaatcagatataaatgcgggaagttacaaccaagggaaagcacttaaagctgaagcaaaagagtatttaaaaacaacatatttaaaaccacttcgcgatgctaactttgatttaactcctaaacaaaactctagactatcacaaatacttaaaactcatgcagcctttaataataaggacaaaaaccatagactccttgatctttttatagagttcaatactaacgtatccctttattttgaagggaaagattctcaaggtaatatcattccagatgacagcaaaggtaaggaattaaaagataaaattgaggggttcgccagggattttattgatgaatctatatcgactaattttgaagtaaccccagctaacatcaaatcgattttagaaaagttagctctgaagatacaagacggcattaaccctggccttgggacattaaacaaattatttatggctgcagagttacttcatttagaggagagtgattggtctggattaaaactatgtttaattgaagaactagaagcacacttacatccccaagctcaaatgaaagttattgaatcattacaaaaacataatgacatacaaatattaattacatcacacagcccaaatctcacatctaaagttcacttagaaaacttaattctttgccattctggaaatgttttccctttagggaaagagtatacaaagctagatgtagaaaatggagattatctgtatttagagcgttttcttgatgtcacaaaatcaaatttattctttgccaaaggaatattaatggtggaaggttggtctgaagaaattctcttaccagcgatagcaaaacttctaaaaaaacaaggggtaattacgaaagattttactgatgcgggcatagctgttgtcaatgttgctagcgcagaattcatacgttttagtaagatatttcttagaaagaaggaaccgctgattccaatacccgttgcaataatcacagatgttgatgttcgagccttcgaaagaaaagtaattaatgaggataaagaagataaagcaaagaaaaatgagtatgattatataaaaatagatgaggaaataattgaagaagaatcaacaaggaaagtaattgaaaaagagaatgagttcaatagtcaaaatgtcagagtatttgtaacaaagcactggactttagaatacagcctcctaaaatcgccaattttaggtaaacactcaaaaaaagtcctttgcgatatgcacaaaaatatcaacaaagatgatattgaaaaagaattagcaataaaattattcaataaaagcctatgtaagacagactttgcatataaactagctcaaataattgatccatcctctgaaaaacacgatcatagaatagtcttacaagaagatgacagatatatctcttcactgattgaaggagtaaaatatgtctgtaattaa

SEQ ID NO: 286775 - DNA, 747 bp, Morganella morganii
atgaattttctatggaaaccaatgccttactacatcatgagagattgcggtctcttaaaacaattaaaaaaaaaccaagtatctcaaggtatatcggcgttgaaaatcttcatgttgatttgcttaaaatctgagattgatgaaaatggtatttacagtgctaacctcacctatgatcagatttcgcaactctgttcattgagcagaaagttggttagcgatggattgcgtttcttggaacactctgaagctattgaggtttctggtgatcggaagaagaagtatattttgctgaattgtgaacggaaagatgggctccgaagggttgccaggttcagctctgccaatggacactggtgtaagctaccgtttaaaggggtcattgatgaaaaaaatagaatcacggcctttgagtctatgactaaccgcagccttcacgaacttaatgcgctgaggttatttttgtacctactcatggtgcgttcccgcggatgctcgcattcctctgtaacattaaaaacaataaaaacaagactatcaataaattaccaggaagtaatgatagcaattgggtatcttcagtctcttggtttggtggttaaggttgacgttggaaccaacttaatcggaaattatgatgagcgatttgcaatttcctttttagtttgtggctgggaaggtctggaatggaagccacgatatctctctgaggatcagtggaagaaccagataactgatgttttctaa

SEQ ID NO: 286776 - DNA, 537 bp, Morganella morganii
atgcacattattaatgctgaagaacagcatattaccgcgatacgcaatatctatgctcaccatgttctgcatggtacaggtagcttcgaaaccgaacctccggatacgcaggaaatgcttaaccgactgaggagcattcagtctcgaggattcccatggtatgtcgctctgcatggcgatacggtcatcggctactgttatatttcccgttaccgcgaacgccatgcctatcggtatacggtcgaaaattcgatatatattgattcggcttatcagcgacagggcgtcggaaaaacactgctcgatcatgcattaaaatgggccgagtccgaaggctatcgccagatgattgctgttgtgggtgacagcgctaacgtcgcttctgtagcgcttcatatccgcgcaggatttactgaaataggtacattaaaggacattggtttcaagcatggccgctggcttgacacggttttgctgcaaatgaaacttggtgaagggaatagtactctgccagaagattcagatcttatgctctga

SEQ ID NO: 286777 - DNA, 534 bp, Morganella morganii
atgaacaattcacccttactcaaccattaccaggcctggctggatgattttacccgcgtcagtctgttccacggtttatgccagcagcacatctcgcagtggcacaggctggcgataaccgcctgcccgatgccaggcagtagcgtaacagaagtcgtcattccacagtgtctgctgccggtcacccgcaccggtcgactgggatcatgtactgccgcccccggtctgactaaacacaccgattatgcccttctgcccggtgtgctgctcagcgaatgttatcgactggggaaaagtcggctggcagaccagttacagatgttattccggcttaatgtacagcccggtatgcgccaggcgctgaccctgctgtgctggtgtgagctggcaacaggtaaggatatggaggaatggtatgcgctgcatctgccactgcctgacacgctgacgcaatggttggcagtaaaacagcgggcataccggggactgaagacgctgactgacggttacattcgtgccacccagccgatgtga

SEQ ID NO: 286778 - DNA, 213 bp, Morganella morganii
atgaccagtaaaccttccctgtctgaagaccagttcgtcgatatggcttttatcacccgcctgctgggggtcagtgataaatggatttaccgactcatcaaggatggactctttccaaaacccatcaaactgggacgaagttcacgctggttgcaaagcgaagtcgaaacctggctgcaggcccgtattgatgcatcccgtcctcagcgctaa

SEQ ID NO: 286779 - DNA, 582 bp, Morganella morganii
atgaaaagacattacccacactttaaaaaaatcactcccgatgatttcctgctgaatctgattaatcaccatcttaatcagctcctggcatgtcacgctaggatactggcctttcgaatggattttgattaccagcgagctaccagccggttcattcgtaattcctccgcagaaatacaggatgatctcagagagctgactcaggcaatgatgaaccttccgggtgttatcggctgtttctgggtactggaatggacttcggaaggagaggtacatgcccatgcgattttttatcttaatggtcgggaacatcagaaatcattcccatttattttacaggcgggagtgctgtggcaacagattacccatggcgaaggtaaataccagagatgcaggccgaatgaatatcatcaggacaatattaacaatgttgttgaatatcacaacaacgaagccatcgacagcctgagacgtatagccagctatctggcaaaagaagaccagaaatacggattacccatctggggatgcaacgaaattccttcctcagccaggcagggcagaccgaggaagtttagttag

SEQ ID NO: 286780 - DNA, 921 bp, Morganella morganii
atgagtggtgaaatactgtcgcgcgaagtgttgaatgaaagattgaatgcgtattattcttcttttctgtccagatacggcatcagaatcatgccatcagatccttttgataaacccgaaaattacattgcctacatcaaaaaacatcgcgaggatattgctggcacccggacagccctggaacttaacgaattaatcgggaatatgatcataagatctaaaagagaactgatagcgacagagagaatatcatggataggtagcagtgaaagggcctgtctttttacatggtatcagctcatgatatttatcagggagaatcaaaactcagttttacagaagctttatagtaaaaataaacttgttatccgggatgattacttacaaactcaatgttttccctctgattcaagagctcagatcattcagaccctgaaaatcatagacttactctcggatgaagaattaattcatatctggctggagagagtaaaatcagaatggataaaagcctttaaaagccggagtccattcagttacctcaggccggagaacagtgatgactgcatctggacctggcagtatctgaaggacagaaatattgcctgtggtgagcttattgattttcctgattctgctgatatttatcacgcaatatttctctcgtttgatgtctggataaccagacttatgacttccgatgaagatgttaaaactttcagacaaacatttaacaagaaaaaagccagccggaaatataaaaaatcacaggaggaaaacattaatattcagttttatctcgatgttaacacaagagagaaactcagggcgttgtcgcgatcaaggcgtctgaataatggtgaaatgctgaaggaactcatacttgaagaataccagaggtacaaaaaggtaaagttctga

SEQ ID NO: 286781 - DNA, 876 bp, Morganella morganii
atgcaaaaatctgacggccttcaggccattgagaaacccctggcttctctgccccacgctatccgcagccacattcttgaacgccttcgcagtcttacccggtacgagcctgtgataggcattatgggcaaaacgggggccggtaaatccagcctctgcaatgccctgtttcagggggaagtcacgccagtcagcgacgtgaatgcctgtacccgcgacgcgctgcgcttcaggctccgcaatggcagtcacagcctgatgatggtcgatttacccggtgtgggtgaaagcgcgcaacgcgacgaggaatataccgcactgtaccgccgcatcctgcctgaactggacctggtactgtgggtaatcaaagctgatgatcgcgcactgtcggtggatgagcatttttatcgaaaggtcatgctggcgtaccagcatcgggtactgttcgtcatcaatcaggctgacaaggccgaaccctgccacacatgggagctcgccgacaacacgccttctccggaccagcagctgacaattgaggcgaaacgacgcgctgtacaccacctgttcctgccacatcatccggtctgtgtggtgtcagccagaaccgggtgggggatggacacaatggtggagaccatgatgtgctgcctgcctgaccgggcctccagcccgctggcaacacagctgcacggtaagctctgcacggcaccggtaaaaaagcaggcccgtgatggtttcggtagtgcggtgggggacgtgtttgatatggcagcgtcctcctcttttcttcctgcctccgtgcgagcggtgatccgcacggtgcgggacgctgtggtgtcggtggcccgtgccgtctgggactggattttcttctga

SEQ ID NO: 286782 - DNA, 474 bp, Morganella morganii
atgcgtttatctcacacctctctggcggtggttatgctggcctcagcctccgttgtacaggccgtccccaatatgtggagcagcggattcgcccagggcgtgaccgaatacatcatcaccagtccggagaaggtggtcttcaatcttaactgcaccaccagccctgatgagcagaatgtgctgcagcacagcgtatacctgaccctgcccgacggtaccttgctgaattctcacgatgacggaaccgacatcaccgtggtgatgaatgacagccagtatccgttaccgtcatccctgggctggaggaatggcgataatgcctgggtgtcatttattgacgcgctgggtcagtcgtctaatttcgatgtttatgtcaacaataacaaagttggctccttcagctcgggtctaaagaatacgcaaaaagagttgtctgacctcagtgagtgccggaccacacactacagcgattaa

SEQ ID NO: 286783 - DNA, 444 bp, Morganella morganii
atggatacacaacaccctcagttcgctgagcagacagcaattactgcttcagtggtccctgacgagttacgcaccggcttctggccgaagcactttggctccatccagcaatggataacccttgagccccgaatctttgcctggatggaccacctgtgtaccgattaccatggtggtatctggaactttttgacgctcagtaacggcggtgcttttatggctcctgagtcagagcacgatgaaaagtgggcattgtttaacaatatgaatggcaacggtgcggaacttactcctgaagcggcagggatagtcgcctgcctgatggcatacagccaccacgcctgtcgtaccgagtgtgacgcgatgaccgagcattattatcgcttacgtgacttcgcgttgaaccatccagagcgcagtgccattatgcctctcatcgactga

SEQ ID NO: 286784 - DNA, 357 bp, Morganella morganii
atgaacaaacaccttttatccagcaccacgtcggagaatacctcctgccagcaatgggggctgaaacgcaatgttacgccctgtcttggtgcccgtctggtacaggagggcaaccgacttcattttctcgctgaccgggccgggtttaacggtgctttcagcgactatgacgcgctgcacctggaacaggcctttccgttgatattcaagcaactggagctgatgctcaccagcggagaactctctccccggcatcagcattgcgtcacgctatatcacaatgggcttacctgcgaagccgacacccttggcagttgcggctacgtatacatcgtcatctatccaactcaacgctaa

SEQ ID NO: 286785 - DNA, 324 bp, Morganella morganii
atgaaaactctacctgcaacaactccgcaggcggcgaagcaatgtctgtcgcccgtggctgtctggcaaatgttactgacacgcctgctggaaaaacactatggtctgaccctgaacgatacgccgttcagtgatgaaactgttatacaggaacatatcaatgccagtgttacgctggccgatgcagtaaatttcttggttgagaaatacgaattggtgcgtattgatcgcaagggatttagttggcaagaccaatctccatacctcaagattgttgatatcatgagagctcgccgcgatctgggtttactaaatcgcaattag

SEQ ID NO: 286786 - DNA, 906 bp, Morganella morganii
atgaatcgtaaaatacttccaattcttacctctttgttttctttcttgtttatgtccgatgctcttgcttcaaaaatgtgttcagatgagcagagaagcattaacaaacagaatacttatataattaccggtgatattttttatggtcccgtaaaatctgtaaaagccatccacacaagacctgaaaataaatacggcaaaaccgataatgaaacgactatttatcaattttcggattgtaacgaactgaccgaattcagctggaaatcacaaagcgttatatcaccgtcaaactcagtaaccttcgttacagaaggcgaattaaccggtcgtaatccttaccatgttaaagctgtttctgacttcagtgcaccaggtaactccaggtataccactgccagcctcttttattacactgacagcaatgggcgaattatcaaaaatgaggaggcactcctgactaagaacagagtcttttctgatgccgatgaacaaaatcaacgccgtgaattgtcagctgactcagacaataccctttctgtttcagctattaactggaaagatggacttattgatacccgtgttggcgagcaatatggtgccaaaatagcatttcaatatagctataatcacctgaatcagttggaaagtgttattgattctgcatcggataaacctgtggatgtatttttacaaaagaaaaaatatagctatgattcaaaaggttttcccggtgaagcagtgactgagttgtatgaaaatggtcagcttatcaactctgacacgattaaatgtcaggaaaaagattcatatggaaattgcctgacgacaaccaccacgacaactaagggaaaatttaagcctgaaatcacaaaaaccacacaatatatctatacctattactaa

SEQ ID NO: 286787 - DNA, 177 bp, Morganella morganii
atgtcggaattaaatagcagtgaagcgttgattatcagcggtgagaccaagaaaggcatttttacgctggataatcagaaaatcaattgtattggtgataatgcagatgggctctggcatctggctctttttatccgtcctgatgatgttcagtttcatgccagtattattgagtga

SEQ ID NO: 286788 - DNA, 585 bp, Morganella morganii
gtgctggcaattgaagcagatgtacgtaaactgagcgattgtaagcaaatggtgagcacagtgttagataaattcggtgctttacacgggttggtaaacaatgccgggatcaccgggccgcatggcgtgaagattgaggattacgattttgaggcctggcaggatgtgatggatacagatgtgaccggcacatttctcgggatgaaattcgctattcctgccattatcaaaagcggcggcggggcagtggtgaatttatcagcctgtaacggcgtcaccggtattgcggggattgcaccttataccgctgccaagcacgcagtactcgggctgacccgcgcggcggcactggaatatgcagaacagggtgtgcggattaatgcggtcggccccggctatgtggcgacaccaaatattctggcgttaccgcaggatgtacaggcaatgatggcggagagtcacccgatgaaacggatggcaacacgggaagaggtggcaaaaatggtggcgtttctgttatcagatgacagtcgtttttgtaccggcggtttttatccggtggatggcgggtataccgcgcaatga

SEQ ID NO: 286789 - DNA, 390 bp, Morganella morganii
atggctatatccccgatttatcttaagcaatcttgtattaaaactttaactgcagttgaagctaatcgagatgcctcaaatcaacatgagtttaatggtgtttttcagctaaaacagatatttggtaatgtcagagttactaagggcgtagtattttctattagaggaatggatgtatcctgcgaagataccatcacttggtatgatgccagagagaattcacctgatagaagcgagtttcgcctttattttcgagataacgatgttatggaacaggcggaggaaggtgataatataattgtaggaattgataaagatgataagattcatatcattttgatcaaacgaaataattccggctatcaaggtcatatacctaattggtgttaa

SEQ ID NO: 286790 - DNA, 1437 bp, Morganella morganii
atgtctgaattagtaattgcgcatgatctctttcagaaatcggctagtgaaactaaaaataagaaaaacagtgatcgacaactgattgaaaaaattttggaaatttatagtcaaaagcatgttgctgagtcacttaggaaagttggtgataatgactggagcagggaaactcttaatcgctggattaacgataaatgtgaagcgaaactgttaactgcaggggaagtatatttacttacaaagatgctccccgaaccgcccaaaaatcatcctaattatgattttcaattcattgatctctttgcaggaattggcggtattcgtaaaggcttcgagactattggtgggcaatgtgtatttacaagtgaatggaataaagaagcagtgcgtacatataaagcaaattggtataatgatgaaaaatcgcaccagtttaattccgacattcgtgaaattacattgagtaatagagatgacatttctgaaaatgatgcttatgaatttataaataaaagaattcctgatcatgatgtgcttttggctggtttcccttgtcaacctttcagcctcgctggtgtaagtaaaaaaaattcattaggaagagctcacgggtttgaatgtgatgcccaagggacgcttttctttgatgttgcacgtattataaagtccaaaaaaccatctatatttgttcttgaaaatgtaaagaacttgaagagccatgataaaggaaaaacttttcgagtaatcatgaatacccttgatgaacttggttatgaagtttctgattcttctgtttcaggctctttagatcctaaaattattgatggaaaaaattttcttcctcagcacagagaacggattgtattagtcggatttcgtcgtgatttaaaaatagataaaggatttacattaaaaaatatacgtaatttctttccgccaaagagaccttctcttaaagaacttcttgaccacaataatgatattgatagtaaatatattctttctcctaggctgtgggattatctttataaatatgctaaaaagcatgcagaaaaaggtaatggttttggatttggcttggtgaacgctaataatgttgatgcggtcactcgtacattatctgcgagatattacaaagatggttctgagatcttgattgaccgtggatgggatcatgaactaggtgagatagattttcataatgagaaaaatatgttaaataggccaagaaggttaaccccgcatgaatgtgcccgcttaatgggatttgagaaaccaggagggaagccgttcaacattccagtttcagatatgcaatcttacaaacagtttggaaattcagtagtcgttccagtatttgaagctgtagcgaaattacttaaaccctatattcataaagctgtatctataaaaaaatgtagtaccataaaaaattaa

SEQ ID NO: 286791 - DNA, 459 bp, Morganella morganii
atgagcgggatgatggaaatttccgcccctgtattcactctcctgctcaccacgctgttatccacggcaccggctgccgcagcggcggataacaccggggtatttctgcatccgcaggggtatctgacggcgcaggccggggcgtatgagtgcccggtgcagcagaaaaacggcgcagagacacctgtggtcaacattctgctgcgggatgcgggggaggagatggaatttgccgcggaggtggacgggaagattatccggccgcggttattaccaccggaaatccgcacggcgcagcgcagtgtctggatcaacaggcgcagtctcaccaccggcgtggtgatcgcggaaccggccggaatacggatcattctgcgcacccgcgggccggggatgctgcatctggtcaccgggacgtgccggtttattccccgtcatctgtctccagattacggataa

SEQ ID NO: 286792 - DNA, 927 bp, Morganella morganii
atgagccgccgggatgaggtacggtttgtcctggtcacacagaaaacccggttacaggagctgatcgcccgtttcaatacctggccgcaggcgaagttttatctggagcataacggcatctccgtgagtgattatcttgcggagcatgatcgctaccaggcgcagctgacagaggcgaaacgtattttgctgcaggcgggacaggtacagattccggatcgcacgctgctgccggggtatcagttttctgaccgcgatattgtggtgattatcggccgtgacgggctggtggcgaataccctgaaatatctgaacggccagccggtgattgcggttaatccggatccggaacgctgggacggcatactgctgccttttgaactgccgcagctggcctctgtggtgacgcggacactgaacctggatatgccgtcgaaagtcctgagttttgcacaggcggtcaccaatgacggacagaaaatgctggcggtcaatgatctgtttatcgggccgaaaagtcacacatcggcccgctatattctcagtcacggcgggctggcggaagcgcagtcttcctccggggtgattgtctcaacagggctcggttcgacggggtggttacagtcggttctggccggtgcgctgggcgtgaccggcgggagttctcatccgctgcgcgccgggatcggctgggatgaaaagcggctgcagttcagtgtgcgggagcctttcccggggcggacatccggaacctcactggttttcggggcggtcgataatacgatgacattacagcttgaatcacagatgccggaaaacggggttattttttccgacgggatagagtccgattttctgcatttcaatgcaggatgtattgtcacaatcggtattgcggatatacagggaaggctgatgtatgaataa

SEQ ID NO: 286793 - DNA, 207 bp, Morganella morganii
atgaacaataatgaatcagattattttctttgtgcatactccttaaataaatcaaccggtttcccggtagtcataagatataaaagtgaagaattttcttgcaataccacggggattttaaaacaagttctgaaagatattctgacttcccccgaaacagcaatggctatggctaacttatttaatggtaaagaagcttattattaa

SEQ ID NO: 286794 - DNA, 204 bp, Morganella morganii
atgagtgataacgacgacatcctgaattcaattagaagctcatttcagagcgcattagatattgtagagataaagagagatattgagaatgagataactaatataattggtttgatcagaaaatcaaccgatgatatcgtgtatgctgaaatagaatcgcctgaagtatttaaaaacgcacatttttttataaccgattattag

SEQ ID NO: 286795 - DNA, 753 bp, Morganella morganii
atggtgtgtttctcggctacagtaagggaacacaccataacttttagtgatgacattcctgtgaaaaatcccattcaaaaacaagactttcctgagtttgcccggcgaaccctgaaacaccttttgcaccgttccggtgaagtgatttacaccagccacgaaaccctgagcaaaggggatatctatctgctgggactgaatcccggcatgggggattttacgacgatcggcagccatatcgatcggatgctgagccggacaaaaaattcatacctggatgaagattgggataagcagaaggatgaggcaataccagatcctaaattagttccgctgcaaaagcgtgtgatttccctgctggatagcctgggttatgacgctcgcaacgtgtgcgcatccaacctgatttttacgaccaccacgtcggcagatgaactctgtttcggcctggcaggattatgctggccggttcatgaggcggtactggaactggtgaaacccaaaatgctgctggttttcgggaatggcgaaacggtatcaccttatgcatttctcaaagcccttttttgtccggcagaaaacgattttacgttttgtgattccgggcacggggactggaaatgcaaaggcttttatgcggagattaacgggcggcggacctttgtcgccgggctgccgcatttaagctggtacaacccgatagggagaaccgaggttatcgactggataaaacgcgggatagcgggcgtctga

SEQ ID NO: 286796 - DNA, 1116 bp, Morganella morganii
atgacagtatcaacaacactaaaaatagctttatctgcgggattgctaatgtcctcgttatgttctcaggcggttatggtcaccgacattaccggacgtcaggttgatgtaccggataatgtaaagcggattttactgggtgaggggcgaatgatatatccgctcgctatactggaaaaagacgcgccatttgaacgggttgcaggctggcagggtgattttcgtgatctggatgttcagggttatgccgcttttaaagctgtcttcccgcagatcgatgccgttcctgtggtgggtggcggttcagaagataccttcagtgttgaaaaggcattagcattgcagcctgatttggttattttaccgatgacaggcggacatggaccgggtgcgggcagtgaagcggccaggttattaacatcagccggtattgcggttattcatgttgatttcagccagcatccggtaaagaacacacaatttagtatgcgtattctcgggcaggctatcggaaaaacagctgaagcggaacggtttaatcactattatcagcaaaaaatggatgatgttattgcccgtatcccggtgaatattccggcagacaagaaaccggtgatttttgtggactatttacccggtttacaagagtgctgcggttcacccggcaaaggtagtctgacggatatgattaatcttgccggcggcacggcgattggtgaaaccattattccgggcgctattggtaaattaaatccggaatacattttaagccgtcatccggatgtttatgttgccactggtgtttttcccgaaggcagccgcggtgtaacactgggatattttgcaacgccgcaggcggcacaatccagtctgaaagtaatatctcagcgtaacccgatcggtgaattatctgccgttgaaaaaggccgggttcatggtttatggcatattttctatgattcgccggaaaatattattgcacttcaggcactggcgaaatggttgcatccggagctgttttctgatttggaccctgaagagacccgtaaagaattatatgagatgtttatgccgatccctgcaaccggtgtattttcggtgacactggaaaaataa

SEQ ID NO: 286797 - DNA, 882 bp, Morganella morganii
atgactctgtacataacacgtaaaaactggctcaggttacatttctggccggggattgttgccggattctttatttcactgctcggaatatctggtgcggtgttattactgaagaaaccggttctggaatgggaaataggtaaggcggtgctttatgcaccgccggtaaccggaactgctgtttttttaccgccggaagtctggcggcagaatgcacagatggcttaccctgaactcactcgtgtgatgggggaagcggtgcccggaagtggctttattcctgcaacgaacgcgatggtttttggttccgtttctgattctgaaaaactgggaattgcctttattgatccggtaaccggtaagccaaaagggtttattatttttgatgacctgattttttctcagattgtgtctctgcaccggactcttttattgccgccggtttccggtggttggctggtatcactatgcggcattattttggccatctctgttatcagcgggattattttgtggtggccgcgcaaagggtggcgtcagtttatatctgcgctgttcttattccgtccgggattacagggcgcggcaaagtggcggcagtggcattacttttttgcagtctatttttcgctgccgctgttattgatcgcggctaccggtatttttctggcacggtctgatattttatcagtcatacctgaatataaattactgattactcagttacacagaaatataggtatcggaataccgggccttattatcgcatttatttccggaatattactgccgctgctgtatatcagcggtattgttatctggttgaaaaaaagaaaacatcagcataattatacttcttctgtcaacaggaatataaaatga

SEQ ID NO: 286798 - DNA, 2172 bp, Morganella morganii
atgaaaaaatctgttctttattatccggttatctcaggtcgtgcattttctccggtatgtattgcactcttgccgctgttgttttcctcagttgctgcgtctgaaagtcagtccggcgaaaataatgatgaaataatcgttactgccaaaccggcacaatcacctgccggtaaaatagacggctatattgccacccgtagtgtcagtgcaacaaaaacagatacaccacttattgaaacaccacagtcggtcacggtattaacccgtgatgaaatgactgcacataacgcacagtctgtcagtgaagcattgcgttataccgccggtgttttgcagacaaacgatgccgcatcttcccgttttgataatttaagtatccgtggctttaatattaccagcaccggaatgctgagggacgggctgcgcagtacaacggcacaggcatggccgaaagcggaacaatacggactcgaacgtattgatgtgatccgtggtcctgcatctgtattatacggtcagaactcacccggcggcattattaatcaggtaacaaagcgcccgttatataaaccctttcatgaaattgaggtgcagggcggtaattataaccgcaaacagatccagggtgatttaagtggccctgtgggtgacagtgaacactatttttaccggctgaccgggcttgtccgtaacagtgatacgcagattgatcatgttaaagatgataaagtctatatcgcccctgcactgacctggctgaatgacgatacgacactgactgttttggccgattatacacatgataaatttggcgcaccgcgcccgtttttacccctggcaggaacgctgttacctaaccccaacggtaaagtgaatccgaatgttttcctggatgaaccgggattaaaaaatgaccgcactcaggcttctctggggtatcagttagatcatacttttaatgatacattttccggacattcaggtgcgcggttcagccatactgacttaaataccaatattgctcaggggttatatctgtcaccggatatgcgcacacttaaccgtgcggcttatcattttcgtattaaaggtgatgtgttcagcctggataataatataaaagcagactggtggctgaaaaatacagaaatgacatcgttggctggcgtcgattatcgccatacaagggaagattatttactgatgtccggaaaagccgcaccgattgatatttttaatccggtttacggcggtcagtacgggccggtgaataatatgatggcgaatacgcttcagaccagtgatcaggcgggtatttatttacagcagcaggcaaagtttgataacggcatcatactggttttaagcggcagagaagactggtctgacagcaaaacaaaaaaccggaaaacaaacagcagcagcgatcagcgtgacagcaaatttacctatcgtacagcagcaatgtatcagacagacttcgggttagcgccgtatgtcagttattcaacctcatttaatccgcagttaggtgttaatttctacggagaaacctataaacccgtaacagccagacaaacggaagctggtcttaaatatcagccggaaagcggtgatattaatgccacactgacggtctttgaactgacacagcaaaatatgctgacgacagatcctgataataatttaaacagtattcagacggcagaagtccgctcccggggtgttgaaatacagggaacctatatgccggcggaggggctgaatctgacggcagcttattcctttaataaactgaaaaataccaaaacgaccgatccggaagagaaaggacagcgtcctgtcggtttaccggaacatacggcatcagtatgggcagattatactattcagagagggtacttgcagggattaggctttgctgcgggtgcccgttataccgggtcttcaccggttaataacgacggcactatttccaacccgtcaaataccttatttgatatggctgcacattacgatctgggcggaatcaatcctgattttaaaaactggcgtgccggtattaacatcaataatatcacggataaaaaatattacaccagttgctcagccgggggatgttctgtcggttttgacagaacaattatcgcgtcattgcgctataactggtaa

SEQ ID NO: 286799 - DNA, 846 bp, Morganella morganii
atgcacggtggtaaaatgaatacattgctgcccggcgcggattcctttttttattgcggaaaaatgacaccggatgccggacgctgggtcagcgagccgttatggaaagggctgaaactggttctgatgatgaatggtgaactggaatgtcagccggataataaaaacagtatttcactttccggggcttccttatgtgttattaccaataaccataatgaacaggaaagccgccagcgctttttacagcaggaagacatccgctttgtgtcagtctgtttatcagacagtctgatggatgcatttaaaattgcaccaccgcctttattaacagcggctgtatcagccggaccacaattactgtccggaaaagcgggaaatgtcttaactgcactgggaaatcagattctgaataatccgcttggcggcgcgccgggtgagatgtatctgacaggcaaaattcttgaattatgcgcaatatcgtttgagtacattcagcaaaatacccgcacgatccaccatcctaaactgacggcaaatgatatacagcgtttgtatgatatcagagactgtattttagccgatttggccaatccgccgggggtatatcagctcagccgccagtccggtctgaatatgcgtaaactcagttttggttttaagcaactgttcggtttgtctgtcgcgtcatttattcaggaagagcgcttacaatcagcgcatcgcctgctgtgtgccggtgacagacgggtatctgctgttgcctggcaggttggttattcaccggctgcattttcaaccgctttccgcagacggttcggtttttcacctaaagatttatgttag

SEQ ID NO: 286800 - DNA, 519 bp, Morganella morganii
atgccaactccatgttatatctctattgaaggcaaaactcagggcaatatcaccgccggagcttttaccgctgagtctgtcggcaacatctatgtgcagggccatgaagatgaaatgctggtacaggaatttgatcacgttgtgactgttccgacagaccctcagtccggtcagccatccggtcagcgtgcgcaccgtccgttcaaatttaccgttgcgctgaacaaagcggttccgctgttgtacaacgccctggctgccggtgaaatgctgccgaaagtccagctgaaatggtaccgcacctcggttgaagggaagcaggagcatttcttcactacctcgctggaagatgcgactatcgtgaatatcgactgcaaaatgccgcactgccaggatccggccaaatcggattacacccaactgatcgaagtgtcactctcttaccgtaaaatcgactgggaacataccgttgcaggcacctccggtgctgacgactggcgtgcaccaatcgaagcgtaa

SEQ ID NO: 286801 - DNA, 417 bp, Morganella morganii
atgaattatatctgtcaggaaggttccatagtattgccgtcgtcagactaccgggataatagtgtgcacattattaagtttccggagaaaaaagccagtttatcactggcccgtgactccctggcagacaggcagactgcggaacaatacctggtatcgcagattgctgtgattcgcaaaggggtaaaactgcatgctatgacagacccggttgcgtttactacagaatctggtgtgaaagggtggtccttctactgtgaaccggaacaaaaaggaattcatttgtatcagtacattgctggttatgaactggacagcaccattctggtgatgacgtattgccagctccacccgtttactgatactgatttgcaggactggcagacgctgaaattgcgttttacccgtacagtctga

SEQ ID NO: 286802 - DNA, 477 bp, Morganella morganii
atgccgccaccggcagtaaagtcctcagtggtgatgaggaactcgattttgtgctggaaggccgttacccgctggtctggcaccgtatctatcagagccgtaatacccgggaaagccgtctgggaacaggctgggcgctgccgtttgatgtcagtattgaaatcgattataccggcggctctattgaggatgcaccgctgtattaccatgataagtccggccgccgtctgtcgctgggagaactggcgctggggcaggatgcgttctatgtggatgaaggcttccgggtttatcgcagcctgcagaatatctttttgctggagtcagataccggtgattatcagctgtttgaaactgacccgcagcgcaacggctggttacgccttgcgcagtcacacgatcgtcacggcaacaccctgttttaccgatacagtccggaagggcaactctgcactattcaggataacagcgggctga

SEQ ID NO: 286803 - DNA, 204 bp, Morganella morganii
atgtacaatatcaccagcctgtcccaagacgaaaaagacaaaattaatgccgatttagccaccttcgatttcacttacaaagaaagattcggattaccatatgagctgtacgaaaaaaatcagcagcaaggacatttacacccgtacttcaaagagaggttggaacactacaaggaggtcaagaaaaggtctctgcacgcatga

SEQ ID NO: 286804 - DNA, 798 bp, Morganella morganii
atgaatgatattattattagcggtgagcagtctgtttcattagatggtgacgagcaggaaatcatgattctgggtaaaaactgcacattggctcaccgtggtaaaacgtgcatgatcaaaaatgtagattacacatctgatacacatggcgaaaattcagtgattatgtgttctggttcgcgggctcaaataacgtatgccggtaaattgacggcgttcactgcaggtgcggattctcatctggcggttggtctcggttctgatgataataatcccattattagtgatggtgccaagtattttgcggcaggtgatgagactggcgcatttgtatatgaaggtgtaaaaaattcactcattgttatgagtggtgaccgggcgtcaattgaggatacagtaacgacagacgcagcctttccgcgtgatgaacgtaatacgattatcctgacaggcaaaaacagcgatgtacgaacagggtatcccggtgacacgctggttgttatgggtaatgaaactgaagtggaaatggaaagagaccggtatgaagaaacacccggtgtgcagggcggcttggcatttattggtggtaaagattgccgcgtgatgacaggaactgattctgctttttattgcgcgtatacaccggctgaaatttcctttgaaaaaaacagtatgattgttatcggctggcatgatggtactcgtgaacgggcatcaacgttctatgaaggtgaaaacggtgttgaagcgggcgtgaaatacactatgaactcactgggccaactcgtgaaaatctga

SEQ ID NO: 286805 - DNA, 1224 bp, Morganella morganii
atgaaacagaatctaattcttccttcggaaattccatggggcgatattaaaggcgctgatcttgaagaacttttgtattggttatttgactctatgggagcaaaagatcttgaatggagaattggagggaaaggatctggtggttcagatcaaggaagagacttagaattggtatttttcacaccatcacctgatggaacttttgcaaaacaagtatggtgggttgaagcaaaaggcagaagtggtactgttgaacctgttgctgtacatgaggcggtattaaattcagcggggaaaaaaaatgttgaagtcttagttatcgcaactaattcaaatttttctaatcaaactcgtgattgggttaaacagtggcaaatagataatgtgagaccagttgtaaaactctgggaaagaactgaacttgagaatctttgttctaaaaatcctctagctgtgattcgcctccattctaaagtgcttagtgctcaaggccgtattgaagtaacaaaatctaaactgtggaactatgcaatatttgtcgatgaacctttgttggataagatttggtcagaaaaagatgatattaatttggatgagcaatctttatttgcactgattgcttctgaaatagcgaatggaaatatttatcagcgctcatgggggatggttgtttcagatgatatattagttacatgtttatgccatgggttagctaattttatatatttgttattaagggttagtgagaaaggctctcgacaagaacctatcattcgtacgatgtcttatcttttattattgtgtataaataaattagggagtgagatagttaataacatcattgatataactttatgcagtaataatggtgaaaactatccagaggaagttaaattattcatacttaaaccgataataaaatatttgcaaatagaaattaaggatgtttgttcaagaaagtgtctcagggtgtcaacaagtttggaaattttaaaggataaggacgtggattcgttttggaatattttttataaactggatgatattaagaaaaaaaccaatactatattaaccattgaatctcataggataccttgtaatgtaggatttgacctgaatgaaaagaatggctgtccgctttttaatcaagaagaaccacacaaagatataggctcttttttagatattatacaaaagattataaaaaattataatgtggtgtag

SEQ ID NO: 286806 - DNA, 4569 bp, Morganella morganii
atgagtcaaaatattccagtcgattttaatacgagcttagaaaaacttaaggccgctcttttgtcactgaaggctactgggaaggacggttttgaagggatactacgccttgcgcttaccaaactgacaggtattcagtttcgacttgctgccagtggtctacagggcggttttgatggtgactcagcactgccaaatgatggtgttagctttgaagctaagcgttacgccgataaaattgaccgagaaacagtcctaacaaaattagttgaccttgctcgtcgagaaagcactgctgatcgactttgggtattaggtgcgacaacagaggtttctgctcagttagcggaagcgattaggcaagccggtgaccaacatgatatctcaacttttatacttgactggattcctttacctatacctcttctttctgtagctatagttttcagtggagaggaagcaattgattttctgattacacattttgatgaaaaatctttacagaaaaagataagtcgagatgaattgagttctcttttcaaatctatttctgcgcatccgggttatgcaaattgtcttcattctcttagagaaaatttgaatatttcgaagttggcattttcccgtgctatcaatttgaatacccagtggagacaagagacatttagctctgcaccccttgcaagagaacgctttgggcaagcgcttgctgttgtaaatacttctaactttcctgtaatgagaacagcaattcgaatgcatttaaccagtgaattacaggctggtaattgtatgatcctttcaggtgatgaagggcatggtaagtcgtggttagccgctcagatatgtgctgagatggatggaatggctatatttattagtgcagagcagtttgatggagtgaccattgataaacttgatgaatttttgatttctattctaattaatcaaacaggtgatatcgcagacgaaacacttaaaagtaggtggcggcatcgttttaaagcatggaaaaccactccgttatctacttcactattggttgttgtggatggaatcaaccagcgacaaagtacacgttgggacagacttatcaacggaatttatagcaaattgagggaaattggtgggtgtctaattgttacggttcggccagagttttggaaaaaagaagtagctaacgggttatctttcgtacctaagatcattgatgtacctgtatggcagcctaaagaacgcaatgaaattctcaagtactataaaatttcacttgattggcttgatatcaacaccttaaaaacacttcagaatccacggttactcagtgtggccatcgcaacgttgccccctcaacaagcggttgcatggaaggggttaacgacagaccggttactgatggagcaccttagggcttcacaacttgaaaactttgagaatgaaacgtttataagtttaactaaccgtcttagcgaacatgcggcgcaagttctgaggcatgtacaggtatcgccaaatgagccacctccggattttaagtcagattctaaagctgtaattgaaactcgattctttcaccctatagcagggccaggtgatttgtatgaactacgtgatgacgggataattcttgcactcggatttacgctggtagatcaactttggcaaacacaaagagcaaaacgcgacttagttgagcgtattgtacagcttgttgagccgattaaagcaatggatcgaacatctgatgttcttttcgctgggttgttggtatgtgctctagataatattcgtttcgacaatgcaattttcgcatctcttttggatgcattttctaatttgcaaaatgtgaatgaccggagatttgaagagtttgttgagattgtcagacatcaaccgagtgtttttttcgatgtattgaagatgttttgtctcgaaaaatggcggcgtgtaaactatgactggtttattcatgctgcacatgaggttgttgccactcagcagggatggaaagctgcagaattagctcttcatcattggttacattgctataatgctgatgcagaagaacaatttgctcgttttccagtttctagttccaatcattcagataacgagagacgattcaaggaattgaaggatgatattgacgaagtattagctaacctttcgccttatgagaaacaattgcttgaacatatggtgacggtgtcaggagatctggattctttatttactttagcacttcaattaattgcagggcggccacttgcaaactttgctgatagctttatttctatgggattagcatttgcgcttgatacacatatgccttctgcccgcaaggcatttcaacaattaacgaatttcaatagagttgatcgactagagtcaaaaaagtctttcattcttgcgattgctcctcttcgagattcattaacttcacgatctggtcaatggactatcgtacgtatgttacatgccacaggtgatgaagatgcagcaattgaagcgatagctatagccgatagattacaagaagataattataactttgaatttcaaatagacagtagctggcgggatataaaactggcaaatcctgatgcagaaagaaccattgaaattgataatggattagatcaattttgtaacattgatcctaaaaagatgatgttgtcgagagtcagagggagtgaggaatataattatcaagatcttttaccactagcatgtcgttttgaaccaaaacttgcctatgaaaagactcgatgcttactcagcacgttgttaataaggacaggatttccattacgacaagctattttaaactgtgaaaaacatattcctttggtcgattcaaattttgcgtatcaattggctaaaaaatttaaagaaaatgtgatagttaatacgctccctgagcgagataaaactgtgtgccagatgtttatatatagctatatcgctaataaattatcagcagaagaacaactcaattgtatgagagataaagtatttggagaaagctatcttttctcagttattcctagttttaagtatcaacctacagaggatatagttaaagcacttaaaacaacgttagaggataaagatgaagatgccgcatatcttataattattgctgcactttatggtgatactcatgtaacaccagaactagaggagcttattttatactgctgtaatggagatacatctaaacttcgttctgctgcttatgagtttgcagtatacaaaaacttaaacattgtccgaaggttacatgttaaaagctcatggtcagcacaacatgctgatgatgaatcacatgaaggttggtttggttctattctattaatggaagcttttgctaatgatgagatcgtaattgaggacttattcaaacgaattgataaacggacttggttctttgctattcatcggctaggagataggattactgagagattaactgacaactttattaatcaacttcatgttagtatcaaaaacattgataaaatatcacttccaacagccgatttcacgatctcagaagaaaatagagtttcttatccattaatatctatagatgaaactaaccgaaatggaggaagatttaaggaagaaaaaaacctgaaagagttatttttagattttagcaatcctgataatttttatgaaaaacgagatagacttcgtgtggttatggaaaccttcttaagagaacttaaggttactgatctagagtacttaactcaaaatattactttagagaatatttctagccttgttaaagttaggcctgaatttctttttgatctgatagaaattatagagaaagcttgtgatagcttatttatttggctaagaaatcttgcatttattgttgcaaatctcatttctgataactttccggaacgcgcagtagctatttttgaaagagctattacatcccagagttttttaactttatcttatggcgatgggttaacacttgaacatagagctgtttgggcgagccaagaaagtaaaccaataaaagaattatggcgtaagcgtttgatgtcctcaggcaatgatgagattctctttagggaagttcttgctgctgagcgttttggtgcatcatcgtttattaaacttttaataaatgaattagcaatgagtcaagatagtctttatcaagcttatgcaattacaatagccggatattccgagcgatatatggagtttatatctcttattgaaaagcatactgatgataaagctttatcaggtgacgcagctcgacatgcattaatagctaatgagaacgcacgatggggacagtactggatcgataaaatgtgggatgcctctacatctgaggaattttggaggtaccttatgatttctgaaacatgtatcgactcacgtataagcaataaaccaaaaataaacactcattggaaatgctatacatcggtatttcaacgggttcgtcaaactgcaattaaaaaccataataaggaaagggtgaaaaaatttcttggtcaggaagttccgcagaagttttttgttatttaa

SEQ ID NO: 286807 - DNA, 1218 bp, Morganella morganii
atgcatgatgaaaaaatcgttttcagtgatatcgttattgacgaagatgacacggttcatgatgtcaggttttacggaaaatccggggaatatttcaaaatatggatagtcaatcttctcctgacaattctcactctcggaatatattctgcctgggcgaccgtcagaaagcgccgctatttttacggtaataccgatatcggcgggtcacactttgattatcatgccgtgccgctgaatctcctgctgagccgtattattgttgccgggtttatactcctttatattgtttcaggtttggttcatccgatattacaatttggttttttgctggttttacttatattatcgccgtattttattctgcgggcctggcggtttaatgccctgatgtcctcattccggaatatccgttttaattatcattgccgttttgctcagggatattgggtaatactggttatgccgtttttattaatggccttactggtaatttctgttatttcagtcggggtgggtgcaaccctgttacggtgcgccggatctgacggatgtgacgtatcaggcagtttcacacagagcattattcagatgattattattctgattggtgtatttctggtgttctcagtacaggctaagaaaatttatgatctttttttcaatcagttattttacgggactcaaccctttgctgttcagacagagctcaaaaaatttcttcagttttacggggttgcagttctgatattcctgccgttcatctgtttaagcggaagtattatgtggcggctgatgacgacgctggcactggcacattattatcagctgtcggtttcaccggtatcgttagtggtgaatatggcatctatttatctgatcttcctgtgcgggcttattgtcacttctgtttatctgcgtgttgcggttatccggtatgttgctgctcgtatttctgtgggaaaaatgctgcgtttccggtctgatatttcgcttttcccgtattttttgctggttattaccaatagcctgattgttatttttacgctggggttcggaacgcctgttgctcagattcgccatgcccgttatatggcagaaaatatgaaggttatcggtgatatgtctctggcaatggtcagtgctcatgatgagaataagagcagtgctattcaggatgaaattgtgagtgcctttgatatcggagtctctctgtga

SEQ ID NO: 286808 - DNA, 1275 bp, Morganella morganii
atgcttgataaaaaaagatgggctatattcagcctgttagttctgtgcggcggtactatctataaattaccatcactgaaagatgcattttatgttccgatgcaggaatatttccatctgacaaatggtcagattggtaatgccatgtcagtaaactcaattgtgacgaccattggtttctttttatctatttatttttctgacaaattaccgcgccgtctgacaatttcattctcattaattgcaaccggtttgctgggtgtgtatttatccacaatgccgggctactggggcattttatttgtctgggcattatttggtgtcacctgcgatatgcttaactggccggtattattaaaatcagtcagcctgctgggcaacagctcacagcagggccggatattcggcttctttgaaaccggccgcggtgtggtcgataccgtggtggccttctccgcccttgcggtctttgcctggttcggcagtggttatcttggatttaaaatggggatcttattttattccggtgtggctattctggtcggtggtattatcttcctgttcctgaaagatgataaacacgccgtcactgagccggtgaatgaatccggtgaaaataaagagaagaaacccggtgtcagcgcggtattaaaagacggcaccgtctggctgattgccctgagtattttctttgtctacgccgtttattgcgggctgaccttctttatcccgttcctgagtaatatctatgcactgcctgtcgcactggtcggtatttacggtattctgaatcagtattgcctgaaaatggtcggcggccctatcggcggattaatcgcagataagattttaaaatcaccgaccaaatacctgttttatacctttattatcagtgtgattgtcctggtcacctttatttttctgccgcacgaaagtatgccggtttatctgggaatggtctgcacactgggctttggtactattgttttcactcagcgcgcgattttcttcgcgccgattggtgaagccaatatcaaagagtccagtaccggggctgcaatggcactgggcagctttatcggttatgccccggccatgttctgcttcagcctctacggccatattctcgacagctatccgggtatgaccggttacaaaatcgtgttcggcctgatggcgttgtttgcctgctgtggcgctttcgcttccggtattctcattatcagtattaaaaaccgcaaagcccgcgctgatatgatggcatcttcccgctaa

SEQ ID NO: 286809 - DNA, 1128 bp, Morganella morganii
atgttgcgaagctctgccttatttttattaaaaatattatctaccttcattcctaaaaataaaaaccaaatttgctttaaaagctttcctgattattcagggaatgctttaaaaatatatgaatatataaaagaaaaggataactataacttagtttggctagtagacaacaatataaatattaacttcccgtcaataaaagctaaatctttatctggattatgggtactgctacgttccaaaataattgtcacaacacataatgaatatgtctcaattgccacgaagaaacaaaaatacataagtttatggcatggcatgccattgaaaaagattggatttttggcaaaaaaagagcatacctatatgaaatcgataagtgcatctcgaataagcacttctgaattaacaaggagcttgatctccgctagtttccatgaaaaagcaaataatgtatatatcaccggccagccagtatgtgatacacttttctcgaaaactgatctacaccaatacttcactatccctcccgatgtaaaaaaaatattattttatcttccaacatatagacaagacataaatgaactaactattgaaggccggaaaactactgaagataacatatttaaaattgatgattataatcatgaggaattattacatatattagaagaagaaaaattatatctcataataaaactacatccgtccgaagaaaaattaatcaaaaatattaaagaaaatagctatctaaaattaatcagatctgactatatgccacacatagatacatatagtattctttcttctactgattgcttacttaccgactactcctctgtttatattgactatctgatattgaacagagatatagccttcgttatcccagactatgatgaatattatcagaatgaaaatagaggtggttttactcttgagccatatgatgaatggactccaggcccaaaaataaagacacagaatgaactcattacatatctaaaaaatatagaagaaacccaagattcttttaagaaagaaagagagaaagtggcaaaaatattacataaacatatcgatggaaatagttcaagacgtgtttatgaaaacttaattaagaattaa

SEQ ID NO: 286810 - DNA, 465 bp, Morganella morganii
atgaagaccatcattacatatggaacatttgatctttttcatgtaggtcatgtccgaattctaaaaagattaaaacaattaggttctcgattaattgttggtatatcaactgatgagttcaataatattaaaggaaaaaaatcttttttttcttattctgaaagagcagagattgttgaatcctgtaaatatgttgatgatatttttcctgaaaataattgggcacaaaaaagaaatgatatcgttaaatacaaagcagacattcttggtatggggaatgactggttaggaaaatttgatgatcttaacgatatatgtaatgtcatttacttagatcgaacagatgatatatctagcactgatataaaaaacaagcttagtaaagtaacatcccgtgacatatcaaatattgagcaacaaatcacactaatgctagacgtcataaaaacacttaaggtaaaatga

SEQ ID NO: 286811 - DNA, 234 bp, Morganella morganii
atgaaaatgaaagtggtacagattgccaacagttatctgaaagaaggcgagcggctgcaacaggtacaatcactgattaaactaccttatcataaggatacgaacccgaataataaccggctgattatctttactctgagccgtaccggtgaatttacagaatatcagcgtaagcattatgttcgcgtgttaaacagttttacaccaaattcaacctttgggttattgggctga

SEQ ID NO: 286812 - DNA, 372 bp, Morganella morganii
ttgctgtccggcattggccatctcgcgcccggtggcactgaccagctgataccgcgtgtcataggtgtatttgttttccggcaccactttctgattatgccagaagcgcgtctcctcggcgctattggtcacacacagtacattaccgaccggatcgtattcatagcgcagatcctgaaatatttttttccgtgccggatgttcggttttcacggcgatcaggtgctgggtttgcggttcataagtgtaagtggtcactacgccgttaccgtgctcctcacgaagtttctgcccggcagcggaatacgtcacagatttgataatgattttttccgccccgcctttcaccatcacccggttggtgcgcagtaa

SEQ ID NO: 286813 - DNA, 441 bp, Morganella morganii
atgaataaagaattttttatcaaggaaataaatgagctcataagtacattaaccaaaaaaggtatgaatgttataggttgtaccgaagaacaaattatggaactggaaataaaatatggagtgcttccttgtttttataaaattttcctaagggaaatgggcgttcttgctggggattttaaggaaggtacttggtttttctttaatgagttgcaggatataaatgaagaaacttataatttaatgaaagataataatattacgcctccattaaaaatgtttgcatttttaatgcatcaaggatatacgtcattactatttgttgatgtaaccgaccctgatcctgccgtctattgttatacggaaggtgagagtgtaactgatattaacatgactttcagccagtttatgaaagctgaaataaataattatctttcctga

SEQ ID NO: 286814 - DNA, 561 bp, Morganella morganii
atgttgaatatcaaattaaccgcagatatagatgatttttcacaaaagaatgttatagggcgtattggtggaaatattccagattgtttgatgtcatatgataatgaaattaaagatttttatttttatgttacattcgaacacccagaaaaaaaaggtgtttttttaagtgtatttataccaaaaagctatgatgttatggttgataataatatttatccaaattgttcaataaaggttatttctcatggtttttctaatgaaagtgatagttgtaattatacaaataaagggattaataaaaaagaaattttagggtataaagagtctaaggatgatggtttcattacagtaagtgataacctggattttattcaggatgaggtttttttctatgagaacctaatttcggatggatataagccatttattaaaatagatgaagattattattctgatgaagtaatttccggttcatatattttggggtatggagcactatatttatataaacatactagtagtggtgagattattgctggattttggcaaatgtcttga

SEQ ID NO: 286815 - DNA, 606 bp, Morganella morganii
atgatgaaaaataaattatatcatttatattactcaggcatagatgtatttgaccttgacaatgaatggttgtgcgataacaaaatttatttttgcaatacatgtaacagattaaagcttcctgctggggaaattgattttgttacagcaagtaagataaataaaagattagatatggctatggttgggcatattttattccctggttgtatgtctattagattgttagatttacttggtgaaaatgtaggtagctatttaaatattggggcggtgtataacagaacatcacacggtatcgagagtcaatcatttgtttcctttaccggtaagtttgactatataactcttagagggaaaaaagcggatattatagatggtaaggttataccagaaaatgagagggtagtttgttgtcctgagtgtggatttaaatcaaggagagagcgtgctccgtggtttttatataatgatgagatccctaataatattattagttgtacagaaatggggattttaattcatagtgatgtttttaataaatttagttcaacgaaattaaaaagcgttcgtatagaagaagttgatgtattgactaaagagtga

SEQ ID NO: 286816 - DNA, 279 bp, Morganella morganii
gtgaagcatatcaaaattaaacccggtgaaaaaacagccttacagttgcactatcatcgcgcagaacattggattgtggttcagggtacagcaaaaatagtcattggggatacttccgttttaataagcgaaaatgaatctcgttatattccaatcggaattcctcatcagatagaaaatcccggaaaaatagatttgcatctaattgaagttcgctctgggacttacttaggtgaagatgacatagttcgtctggaagaatataatcctggtaaataa

SEQ ID NO: 286817 - DNA, 513 bp, Morganella morganii
atgtcccagcaggttcgccgcctcatcatacagaaacagctcttcactgaacccgttcagacgccgggtcagctgccccagcggatcataacggtaggtttcataatgccagtgaccctgagtggccggggaatcggcctgtccgtaactgacgctgcgctccgtcaggttattctgtttatcccacgtataacgcttatcaatggttgccgccgtgacccgcgtgctgtttgccagccgtgctatctgcgcggtgatgcgtccgctgctgtcatactctgtccgctggtcaagcccgccggagagccggttggtttcccggtgcagccggtcacggctgtattccgccagtaccgtctgttttccgcgctcccgccagttcatctgctgaaggtggccggagccgtaatacagataactcagcgcctgcccgtccggcagttctgtgctgctgaggttaccgttatcatcatagctgtgacggtataccccggcactgttctgctcggataa

SEQ ID NO: 286818 - DNA, 513 bp, Morganella morganii
atgtcccagcaggttcgccgcctcatcatacagaaacagctcttcactgaacccgttcagacgccgggtcagctgccccagcggatcataacggtaggtttcataatgccagtgaccctgagtggccggggaatcggtctgtccgtaactgacgctgcgctccgtcaggttattgtgcttatcccacgtataacgcttatcaatggttgccgccgtgacccgtgtgctgtttgccagccgtgctatctgcgcggtgatacgcccgctgctgtcatattccgtccgctggtcaagcccgccggagagccggttggtttcccggtgcagccggtcacggctgtattccgccagtaccgtctgttttccccgctcccgccagttcatctgctgaaggtgaccggagccgtaatacagataactcagcgcctgcccgtccggcagttctgtgctgctgaggttaccgttatcatcatagctgtgacggtataccccggcactgttctgctcggataa

SEQ ID NO: 286819 - DNA, 513 bp, Morganella morganii
atgtcccagcaggttcgccgcctcatcatacagaaacagctcttcactgaacccgttcagacgccgggtcagctgccccagcggatcataacggtaggtttcataatgccagtgaccctgagtggccggggaatcggcctgtccgtaactgacgctgcgctccgtcaggttattctgtttatcccacgtataacgcttatcaatggttgccgccgtgacccgcgtgctgtttgccagccgtgctatctgcgcggtgatacgcccgctgctgtcatattccgtccgctggtcaagcccgccggagagccggttggtttcccggtgcagccggtcacggctgtattccgccagtaccgtctgttttccccgctcccgccagttcatctgctgaaggtgaccggagccgtaatacagataactcagcgcctgcccgtccggcagttctgtgctgctgaggttaccgttatcatcatagctgtgacggtataccccggcactgttctgctcggataa

SEQ ID NO: 286820 - DNA, 753 bp, Morganella morganii
atgaattttgaatttgtaactgagattttcgagtcaaatggaattcaatgcaagattcaagaagataaattatatttacaaatcgacgacaaggatgtagaagtaaaattcaacgaaggatatgatgaggtaataccgaacttcgtaaaatctcgacaatatcgatacgatcttgaaaaaaggaccatggttggatatagaacagttgaaattttagttcagagattaaaccaaaatatctttgagataccgtcatttgagttcaaatcaaattcatcaaaaacagtgcaattatcaagagcaagcaaagagttttctcttagccattttaaatctgaagactacaagaatttcattgaaaaaatcgttaaaagaagattgattaatagaacacgttttggttatgtctatttccatactcttctttggaatccaatcacaataaaatacaaccttaagaaaaaaatcgaacaggaaaaaatgctagatgatgcatcaaaatgtttcgatagctgtttattcaagctagctgttgattacggccaagcttgggaattatataaacaacgtcgttctttaaatataacatatacttcagaagatgaagttgaacttaacattcctcttgcaagttatgatataaatttagttaactattataaagttgctgttagtagtcagttccctagtcaatcattcctatcatattatcactgtctcttatacacatctccgagcccacgagactcctga

SEQ ID NO: 286821 - DNA, 426 bp, Morganella morganii
gtgggttttgtagtcaatgccgctgtcctcatcggccaccagcaccgccgtgccgccgaacggataatattcctcctgactcagcaggttaccgtcgccgtccgtttccaggccgctgctgccgatcagattgtcataactgaaccgctggtgatcttttttgccgtccggccagtgcagcaaccgcacctgtacccgcccgacaacaccagcacagatcacctgatagttttcttttccgcttcgcagttccagccccggcagatagatcacctgctgtgtctgtgtgctgttaccggttttctgcacggcggttttcagaatacgctggctgcccgcgtcataacggtagctttcgcggtcaccggcggcaccgttacgcaccaccggcgtaacctgtttcagctcaccgcgcgcagtccatga

SEQ ID NO: 286822 - DNA, 1677 bp, Morganella morganii
  misc_feature (376)..(385): n is a, c, g, or t
atggcaaggcaaccagttaacaaagatacatacgcatataaacaggatgatttaaaatctgcatttgcattagctgttaagaatataattaatttcggagatacagatatatttccattcccttatgaaacaagaatgtttgatgatatatttaaggaactattagattctcttgaagaaacacataaagactttaataacaaaataaatgaatgccctccggtaaatattagtacttgctctactgttggctataatggataccgatgggcaacactaatagacccatattggaatgcttactttttaggaataacacttcttctcgcatcaaaaatagaaattgatagagtaaatgcaaatcatgtatattcgnnnnnnnnnnatgtatattcgtatagattttcaccagattataaaactggatctttattcgacaaaaatatcaattggagaaagtttcaagatgatagtttaaacttagccaaaaatgatggtggtataaattatatagtcacatgcgatattgctgatttttatacaagaatatatcatcacagattagaaaatgccttagaccgaattaatcctaataaagatgtatcatcaaaaattaaaaaattaatacaaattttctctggtacaaattcttatgggctacctgtaggaggaccagcctcgagaatactagctgaattatctttagatagtctcgaccatatcttactgattaataaaattaaattcaaaagatacgtagatgattttatcattttttgcgataccaaagagagtgcacattcaatactaacattattgagccaaaaattaatggagaatgagggacttacattacaaaagcataaaacaaatatattgtcaaaagatgaatttatatcgctaactcagtcaaaattatttggtagtgaagaagatggtgattcaccaatgaaagctaagtttatgagccttcctattcgatatgatccttattctcaaaatgctgatgaacagtatgaagaaattaaagattcaatgaaggaatttgatcttcttggtatgttaagtgatgaattacagaagtcaaaaataaatcaaccttttagtaagcaactggtgaaatccttaagcatagcaagcgacaaaacattatctggtgcatttaagataatgtttaatagcattagtgagttataccctatatttaatacaattattcaggtagccattgttaattggcaaagatttgattccgccacaaaggaaataattaactcgaaactaatagaattaataaataacgattcatttattctaaaaatagaattaaatctttcctacacgataaggttattatccaaagagaacaccgtagaaaatcaaataatatttatcgatctatataagtcaaatagtaatagcatgctgataaacttactaatcacacaagcaatggcaaaatggaatgtattttattggttatctgaattaagacgaatattcccaaccatgtcaccatggcaacgacgattatttatcacctcatcgtatttacttggagatgaaggtaaacactggcaagaacacaacaaaggcaagtttaattttatagacaacttatataggacatggggtgcaaaacggaaggaaaataaaaatctcggagatgcactatga

SEQ ID NO: 286823 - DNA, 933 bp, Morganella morganii
atgaacgatttctatgaaaagcaaaatgagcctcatatgctcaaacttcttgctgggcagcgtcagatctattctgatgtcaaagctattctaatgaaagtttttttggcgggggttgttgtcccatcaatactttcattaattttctttgtaatgagtttttatccaggtcatacggggccttggataaaaacacttcttactatctatggggtagtatttttcattgttaaccacttcataatggagcatgtaagtaactgtaagaaaaaggcagcgcgtattcaggaggagtatgataccagtttgtttaacatggaatggaatgatatcgttactggtaaaaaaatacctatttctgaaagtctagagtatgcccaaaaacacttagctactgaaggcgatcatcgcctccgcaactggtaccttaatgctcccatgagcgtttctgctccgttaatggtaatgctctgtcaaagtaagaacatgggatgggatgcaggtctaaaaaagaaaacttcaacattcctgcgtgttattttagcgctgaacataattatgcttgcgataatatttattttcaccaatccaacatatctacaatttgttgcatttgtagcaatattgcttccgatttatcaattttattatcgatacgttagtgataataagaaatctgttgcccgcgcagatgaacttcgcatacttgttgagaatgcgctaaggcaagtagtaaaagagcgcgcttacgacaaaaaagcgctagataagcagtcgcgtttagttcaggaccaaatctttaactacagggcaacagggaatccggtacctgattttatgcataaaagtaatcgggctaaagacgaagaacgatacgatcggattttcgaagaatattcttcacaattaaaaggcattgcaacgccatcttag

SEQ ID NO: 286824 - DNA, 1005 bp, Morganella morganii
atgccttatcaggttagtactgctttcgatagcctcatgaacaactttgtcaatctagacgcagatgatacacgcaacggaagaagaagccgtgactggttagtcgatgagcagctgaccagttttccagataaagatgataaattcccactgttaagcagtacgcctaaaatgtggtttggttcattctccagaagaacaaaaattcgtgaacttgatgacatcgatatgatgattgtcatgcatgctgaaggcagcacatacactcaaagcggtaaaaccttctatataactccgggaacaaattcccgtttccaaaactatttgaacgaaaccggtgagtgggtaaattcacgcagaatcgtcaacaaattcgtttcttcgctaaaatctgtacctcaatactccgccgctgatagtaaacgtcaaggagaggcagccactctcaatcttaaatcctatacatggaattttgatattgttccagccttcatcacagcaccagacagctatgggaacacattttacctgatcccagacggcaacggtaactggaaacagaccgacccgcgtattgataaagaccgtgcgactagagtgaatcaaaagcataatggtaaggtattgaacgtaattcgtttagttaagtattggaagcgtaagcgcggcgtacctgcaattggctcatatttgctcgaaactattatgctaaaccactatgacgaacttaataaagattccatgtcagaatatctcgatgtcgaattttcaaatgctttacaagtattagctactgcaatcgtcggttatgttggcgatcaaaaaaaattccagggtgatataaatcatttaagttcagaagagcagaaaaaggtgcaagaaatggcacttgaagatgccaacaatgcgaaagaggctctatcgattgaattttctgatcccgaaaaatctggaaagttatggcagaaagtgttaggtaaagattttccagtaggaaacgcataa

SEQ ID NO: 286825 - DNA, 360 bp, Morganella morganii
atgaacaaatatcgtgacaaatcagactttgagattaatttagcaatagcgcatatttttcttggtaaagataactacgattggtgtccagataaaaaagaggtgtatcacgctggaatggatggcggagatttccttccatgcgcttacttcgacccctgcaacaacccgactgatgcaatgccaattattaaagacaacctcatatcgctggaacatgacggaatagcatggcaggttagctgtgtgcgacatcctgaaataagcgtatgggatggatgcgaaaactacaatgataatttttatcgcaaagctatggaattatttttgctgatgaaggatgcggagaatgaaagctga

SEQ ID NO: 286826 - DNA, 195 bp, Morganella morganii
atgcgcatagataatatttgccgaaccgttaccatcaatatccgccagataaaggtttgcagggtcaaaatgctctcccggaatgaaacccggaatatgaacaggatggccaaaatagccattacctttattcggccaataataaacaccatccatattaatccggaccaggtgctgctgaccggtccccggtaa

SEQ ID NO: 286827 - DNA, 216 bp, Morganella morganii; identical to SEQ ID NO: 5123

SEQ ID NO: 286828 - DNA, 378 bp, Morganella morganii; identical to SEQ ID NO: 146978

SEQ ID NO: 286829 - DNA, 1257 bp, Morganella morganii
atgagtgagctgagttatctggaaaagctgctggatggggctgaggttaagtggaagacaattggagaagtaactcagaggacaagtaatattaaatggcgtgaggtcactcgttcttataaatatgtggatctaacttctgttgatatcgaaacaaaaaaaatcactgaaacgacagaaataacagcacgcaatgcccctagtcgagcacaaaaacttcttaagaaaaatgatgttatttttgccacaactcggcccactcaacaacggttttgcttaatcgatagtgagtattcggatgaagtagccagtaccggatattgtgttctcagagtaaaacaaaaagaagtgctaccaaaatggattttgcattgggtttcaacgaacaatttcaaaaaatacgtggaagaaaaccaaagtggatcagcatatccggcaatttctgacgcgaaggtaaaggaatgctcaattccaatcccttgcccccgcatcccagaaaagtccctagcaatccagtctgaaatcgtccgggttctggatacatttactgcccttaccgctgagcttaccgacgagcttaccgcacgtaagaaacaatacagctactatcgtgaccagttgctgagttttaatgatggtgaggtggaatatcttcctatgggagataaaagagttggtgaatttatacgcggaggaactttccagaaaaaagatttcactgattttggtgttggctgtatacactatggtcaaatttatacctattatggaacctatacaaatacaacaaaaacatttatttctgaaagtctggcgagaaaatgccgtaaagctgagtcaggaaatttaattatagcgaccaccagtgaaaatgatgatgatgtttgtaaggctgtcgcctggttaggatatgatgatattgcagttagtagtgatgcgtgcatttacaaacataaactaaatccgaagtatgtttcttatttctttcagaccgaatgttttcaacatcaaaaaaaacaatatattacgggtgcgaaagtccggcgtgtgaatgcatcaaatttggctcaaattttgatacccgtgccatcaccagaagaacaagctcgtattgttgctattctcgataaattcgatacattgaccagctcaatcactgaaggcttgccccgtgaaatcgagttgcgccaaaagcagtacgaatattaccgtgacttactgttcagctttccggaaccggaatcggtgaacaactga

SEQ ID NO: 286830 - DNA, 363 bp, Morganella morganii
atgaacaaatatagtgacaaatcagactttgagattaataaggccgtggctgaaatatatttacacggaaagcattcgatctcagaggaagatcgtgaagtttatttctgtggaatggatggttttgacttcttgcctaatgggtatttcgatccgtgcaacaacccagcggacgcaatgcctattgttcttgagaataagatatgtatggcatatgacgcattcgcagaagaacgggatggcggcaattgggtggcgcaacctgcttatggtttttctgatgagcgggtgagaagcgacaattactaccgcgccgctatgatttgcttcctgatgatgaaggatgcggagaatgagaaatag

SEQ ID NO: 286831 - DNA, 690 bp, Morganella morganii
atgaataaattaatcaaaaaatcacacggccagccggtagtaacaactgacgtgatcgccaatgagtttggccggcagcataaaaacgttcttcaggatgtcaggagcctggtcgaaagcgggcatttaggagagcttgatttcaagccctcctcatatatctcaaagcagcggaaagaattaccttgttatgagctgactgagcgcggattccttatcgttatgccgtttattggcggtgagaaagccaaagacgggcaggttcgtctggttgacagtttcatccagtttcgtgaaaaagccgcgaaagaagctcaggtacagattgagcgcaacgttgccagagtggaatataagccgatgactgatgctgttaagcaaagcaaggtggatgaaggcaaagatcctgctccgtaccatttcagcaacgaagccgacctgattaaccgcattgttctcggcacgtcatccgcaaaattccggaaggataaagatatcggaaaaacagacccgatacgggattatctctctcaccagcaaatcagggcaataactgagcttcagcgtgcgaacacggtgtttatcacgatgggctgggactttgagcagcgcaaaggtacgcttaccggcctgttcgataaaaaccacaagaaagcattgttggaagaaacgcatctgctgaatgcgtaa

SEQ ID NO: 286832 - DNA, 498 bp, Morganella morganii
atgcttacaaacgacctgacagagaacgaaatcattgacctgctggctgactttcttgagccgattattggtaattgttttaaatcgtggggcaacaaagttccgatggaacaggggcagtttgccatgttgtcacctctgaggtttatccggcacacaacaacaaaagaaacgcgcctgagcgatgcgacggaaggtctgtcagttgtaaggcagtacgacgtacaggtcgatatctacggcgatagcgcaggagacagggccgttgctttggaaaccgtgtgggcgagtgattacgcctacaggaaaatgaagttggatgggagggttgtcccgctgtatgcgtctgatgcaaaaccacttccgtttgtcgatgaatcccgtcagtggcttgagcgttacaccatcacattatccatgcaggttcacatcacgataaccgtcggtcaggactactttgccgatgtcgaattttcaactgtacaggtgaataaatga

SEQ ID NO: 286833 - DNA, 723 bp, Morganella morganii; identical to SEQ ID NO: 277940

SEQ ID NO: 286834 - DNA, 123 bp, Morganella morganii
atgaaagacagcaacatggatgccagtgcggtgttatttatttttagtgtcggaatatttgtagggatgacgctggcagcaacagcggcatatttcggagtattttcagcctgcggaggctaa

SEQ ID NO: 286835 - DNA, 354 bp, Morganella morganii
atgaaattatcatcaatcagcgacattgatgcgttcttggtttcggttgataagaagaaatgcccttggtgcgatggaaataattgggcgataagaattacacccgaaactgacctgcaatcaactgactcaataaaaggaatccgcgggctccctgaattaaagatgtttactgaagatgataaactgaaaggggagttatcgcttggcgtggctaatatcctccccttaattattgttaggtgcaatacgtgtggacatatttatctatttgattactttaaaataaatgaaatacttcacgagaaaaagcaattagactcagcccaagttgacgaggttgcccatgagtga

SEQ ID NO: 286836 - DNA, 357 bp, Morganella morganii
atggatgaaacagaaaacgagttaagcaacgtagtcgcatttccttccggcactgaccccaacctgaaaagcaaaatatcatttgttcatgaagacaatgagccgagtggttgctgcctgcactccggatacctggtcaatgaacacgaacgcagagttaaatgcagggaatgcgggaaggttctcgatgccttcgatttaatgctgaagatggcaaaaagagaaactcggctggtcagtgatatcgaggaattgcggcaggaagaaaaataccggcgtgaaaatatcgaaaagcttatccagattgagcgcaacgcaaaagccagaatccggagagccaaaaaatcaggaggctaa

SEQ ID NO: 286837 - DNA, 1206 bp, Morganella morganii; identical to SEQ ID NO: 129164

SEQ ID NO: 286838 - DNA, 516 bp, Morganella morganii
atgttaaaagatataaagaatttaaggcttattgctccatctttattccctgagaattcttggagtgaagctgaagttttcggtgccatggtatggctttggaataaacattctaaatataaattaacagctatagatgttgctagtgaaagtctacttgctattattaggtcaaataattttgcacttgttgtgatagataataagcctattggttatattaactgggcttacatgaatgataatgagtcaaatgattatataaataataggatgacctatatagaagcagtaggaaaaatagaaaaatcagaaagtaaaaaaacatgggtattatcttggtttgttcctgaatctacaaattataataaatcagtagctaaaaataatcttctcatcaaaagaatagctaaagaagttattttttctgaggaaatagtatatgtaatttggcatcatcacaaaaaaagaaatatagtaaagaaatttaaggggttgagtgtgaataaaatttaa

SEQ ID NO: 286839 - DNA, 3036 bp, Morganella morganii
atgataaaatcatccagtaatatacgaagctttgtatcctacaataatagtgagcattataaaataacccatatctgtcacccctacaatcttaaggttttaacatctgcaataattatttctctttttgctgttggtaataaatcctatgctcaagaatgtagttctagtacaaatggtagctatattcctactaatttagctgcttgtactattaatccagataataacccaaagtttgatagtataaatggcatcatcaatctcgacaatactggtttctttattatgaatagaaaccttagcaactcagataccaatgtgaatggtgatttaaaagttagagcattgaatgagaaaggacaatttgctgcaatagctaatcagtatcgttcaaataaaaatttgaatcttaataatgttgatattgaatataattccaatggtaattcagttggtttagatacaaacacactgaataatattacagccaacgatgttactcttaaggctcatgtacagaagaatagtaaggaagtttatggactattagctggttcatcgataaattctggtgagaaagatacaagtaataatggtaaatattcatctattaaagtcaataatttaactattaatcaatcagctgaaaaaggaaaagtaggacctactctgaatgcaggccttcgtagtattcagggagcaactgatgataccaatggtagtgcaggaaagattattattaatggtacacttaatatgaatctgacgggcgagcgtatggaaggaatctatgtatctggttcggcggaggacaatagtgggaatgaagccgtttctcaggtagtgcttaaaggtgacagtaatattatactaaaccagattaataattttgataatcaaagtagtgcgataaaaataggtaagagtcgagctgtcggtactggtaaaggggctgtttattcggaagggtctatgaatattgactcctccgctgctgttggtgatgctattaaattatatggcagtggttcgttactaaaagctgattacgccaacagtaagatacaaattaaagcaaataagagtgcaattattgtaggtggaagtgattggcaagaaccagcaaatcatcaaagttctgataatgctgtctatttgaaagatgcgaaactggagtcaatcactagtactgcttctcttataaagatttatgataatcaaaagaactttacatttagtgttgtgggtgatgaaactgatattgtagcatccgagaatggttggttaatggaaattggagctggagaaaatattaaaatcgaaggtgacacgcatgctttattttctgggcaaggctctatgcgaggaatgacgacaataaatggttctcggcttgatatgaacctgactgatggttttacatggaatctacaaaaacgagatacggatacaactacttcttttagtactttgtcgatgcaaaatggtgctattgttaatgcttttgatttattaaatacatcggaattcactatgaaaggtgatattcattcatcattttctactattaacatgagtaatggtattattggtgatgaattaacaatcttgggtaattacactggtgataatgctcgtttactgatagattcccgttgggataatcctgatcttcagcagactgatcacttaattattactggtacctcaagtggtatgactgttgtatctgttcctgagggaattatcggggatgtaacgcaaggcgatttaccaaaaaatggacaatggcaaacacctgtagtgtcagtacggggtgatgatcagcagaaaccaaaaactttttctggggtagcagaaactactaatgctggtcaggctcaattagtccaacggaattctgataatggagaaagtaattattactggacattggctgctatgcctccgagtccgaatccgaatccagacccaaatccgaatcctactcctatctatactctaggcacatctggctatgtacaaatgtctcgcataaaccgtgaaatggggctggatcaattgggtaagctacatgaacgtattggagaacgccagacatgggtctgggatgactgtgggcaacgctgcggtcaataccgacaaaaagtggtggatagtgagcgtccttatccgatttggggtcgaatgagttattctgacctcaaagaacaaggtaataaccgatttgggtatactaccaagagaggcttttttcaatttgggacagatcttagagttaatactgatgaagatagtaaccatcagcatttgggaataatgttcagctatagtcatggtaaacatgatttttatgataagtatcgggcacaggatggggtcgtaaccaatcaaaaacaggtaggtagcggtactagtgatatgtactcactgggaacttatagtacatggtaccaggccaacggtacataccttgatcttgtaggcaatatctcaggcattcataacaattacgagagtgctagtggacagaccagtcagaatggctacggagtaggcgcttctgcagagattggacgcccatggcagttgggagatagtcactggcaaattgaaccacaagctcagatatcttatcaatacgtttacttaaatgattttaacgacgatgttcgtatggtcgatggacagagtggtggaactatgcgtggacgaatcggggctcgcttggcatataaccaaaataatgatcaagaacggacgaataccttctatgtgacagctaatatactacatgacctctcaggtaatgaatcaaaagccaaaataggacgggatgatttgcgagagacctacaaacgaacctggggagaattaggtgcaggagcacagttaccattaggtaaagctacctatttatttggtgacatgcgttacgcgcattcattcggtagtagcacccaggtgttccgaggtaacgatacagctcgcgaaaatattagtggtcatattggacttcgctatagttggtaa

SEQ ID NO: 286840 - DNA, 519 bp, Morganella morganii
atgagatatttttttaagttcctacgaattaccggtatcattggagtaatacttatgctgaccgcctgtgctgacttccatgacgtcgatcacagatggtgtccaccaaaaagctcagaggtagaatcagtacaagaaatagtcaatttgaaagtagatacattatttagctttgatggagccaagtttgaaaatattcaaccttctggtcatgaacaactcaatagtttggttgcacaattgattaatagttataccaaaattgataatattgtagttgaaggttatacggatcgactaggctcagaggcttataatcaaagtttatctcaaaagcgtgctgaaaccgtaaaatattatttgcaatctaaaggtatcaatacatctataacggccgttggtcgcggagaaagcaaattagctataaactgccaaaattataataatatggctcagttaattgattgtctacaaccagatcgtagagttgtagtacgtatttcaggtgcaaaacgctga

SEQ ID NO: 286841 - DNA, 243 bp, Morganella morganii
atgacagataaaacaggtggagccacgtttccggcaagtggtcgcccagggaaacagcacttatcgcaggaaggaatgacgctgcgcgactactttgcagcaaatgctatgcagggtgattgggcaagagatcagtgtctatgtgatgtttttgactcagtcgattttccagatccatttgtgaagtcagctgaagtttattaccgcatggcagacgcaatgctcagagcaagggagaaataa

SEQ ID NO: 286842 - DNA, 189 bp, Morganella morganii
atggatattacgattttgtgctcatctgctgattgcagttcaggggttggaataatggaggtaaaggtcatcgatgtggctgatatttcaattccagaagaataccaaaatgaagtgctcagaaccgctattagtgaagaaaatataattaaataccttaaaagtcagggttatttagttacttgttaa

SEQ ID NO: 286843 - DNA, 438 bp, Morganella morganii
gtgaaactcagtgagtgggcggtggtcgctgcagtggtcattattagctggcaggcaatccggattgataagctgagaggtgaacgcaattcactgaccagtcagctatctgaacaagtcgccatcaacaaagactacaaatcccgcattcagtcacttcacgaactcgacaccatgtacacgcaggagttaaccaatgccaaaactgaaattgatagcctgcgtgatgccgttaggtctggcactaagcgggtgtacgtccgcgccgagtgtccaaaggtcggaaccaataccaccgaaagcggaagcaatgaagccgccccgcgacttagtgaagcaactgaacaagattattggcgtctcagagaaatgatggctgagaacgaaaagcagaccctgtatctgcaggactacatcagaacggagtgtttacgatga

SEQ ID NO: 286844 - DNA, 861 bp, Morganella morganii
atgaggggatctctcagtactttgcacccttcattacaaataagactgctcgataaaataaatgaatacgctaaggcatataaaatacaggttttctttacgacccatagcttaactttattagaatatgcgttctccaagaaatttaatgttatatatctaatgaataacatgagtaaagttttctgtcttgaagatccagactacctcaagatatcgatgttcttgaaaaatcaaaatagagatgaaacatatacccgtaaaaagataccactcttcacagaagatgaagaagctcgtttctttctcgaagaaatattttctttttggatacacagaaagcctgaaatggcaataatacgaagttatttccattttgtagaatgctttattggggctgataacctaagaacgattttcagagatccacatttatcagaaacttcattgaaatcgatctgtattctcgatggcgatcatcaaactgatttaaacctaagtactattgcacttccaggctctttagctccggaagaattattttttgaacattccgaattaatctataaaagcgatgatgaatctttttggattaaccctgatatatattctattgagattgattacaaaaataaaaaagaacttggtcaatcgactaaagggtttaagagagagcgaaataaggctctttttaatgataatataaacttctttcgtatggttttacgcaattggttagagagggaggagaactataaagctaacgaagtcttttataaaggattaagaatcttattccaaaaagtttgtgctcaaaatggtatcgatagaaacacatggaattttgaattcaaagtgtaa

SEQ ID NO: 286845 - DNA, 129 bp, Morganella morganii
atgtgcattagccagtccctgatgccggttttcaaagtcggttttcagccgctcataggcatcgtctttcaggtactggtcagtttgcaggacaccgctggttaccgcgccgttcccgaacagacgtga

SEQ ID NO: 286846 - DNA, 480 bp, Morganella morganii
atgatcgtggtgaaatttcccggaatacacatcggcctgaacaattttcatcgcttcagacaggtttttcaccgtctgcgcaacttccaccaacgggataccctcttccgccaggcggcgggagaactggactgcgctccacggatcaaaaccgagctcacgcaagtcctcaccctcacaccatgccagaatgtcggctttgataatgtcatggtcaacaacctcaccgtcagtcagctcaagataaccggcagccccccacttacggtacagttcggcaatatgcttaggtgcggtgtctatccggccttccggcagccagaatttgcacttgatatgagtctgtccgtgattgtcttcgtataccttaatcgctgcggttacatcgattttattcgacaggtcaacaccgacccagaccggatagttcttcagttcatcatccggcgcattctccgggcagcagtcccattttcctga

SEQ ID NO: 286847 - DNA, 198 bp, Morganella morganii
atgaaagaacctcacatacaccagcttctcaccaatgacgaagccgataacctctgtactcactacaggcgcaaaggatataacccggtgaagtcactgaatatcaatcctcagtatttcgacgtcaccgtgtatctgccggtagtcaaatatctgaaaccgacaccacgagcaatggttaacaggatgtggcgatga

SEQ ID NO: 286848 - DNA, 477 bp, Morganella morganii
atgacggatctgcgtcatattcccggcacgatcatagatatagttgcgggtgtaattggtacaatctgctttattaaacggggaaatatcagggagggaacagctttgttgtccggcattggccatctcgcgcccggtggcgctgaccagctgatacagggtgtcgtaagtgtaccggttttccggcaccactttctgattatgccagaagcgcgtctcctcggcgtcattcgtcacacacagcacattgccgaccggatcgtattcatagcgcagatcctgaaatacatttttccgtgccggatgttcggttttgacggcaatcaggcgttgggtctgcggttcataagtgtaagtggtcactacgccgttaccgtgctcctcacgaagtttctgtccggcggcagaatattccacagacttgataatgattttctccgccccgcctttcaccgtcacccggctggtactcagtaa

SEQ ID NO: 286849 - DNA, 261 bp, Morganella morganii
atgactgaacaggaagctgaactgaatgctatccgggaaatcaccggatttttgctgatagatgataaaaaacggtatttaacccgtctcgggctggtgatgacgttcttctttaaaaatggttataccccagagaaaaaaaacgccattctgcgctgctactgccggtttcgtgagctgtatgcaggaaaatataaggaatggataacttatgacgaattggagaaagatgattcgggatggcggttttctctgggttaa

SEQ ID NO: 286850 - DNA, 1110 bp, Morganella morganii
atgagtaaaaataattcaatagatagtgtttcaaaatctaaattcccaaatgctcatgccttggtaatagctatctctgcttataaggaagtgaattcattacctccagaaattactaatgacgccagtgcaataagggcagtactcaccgctccggaatactgtggatatgaccccgaaaatactacattactattaaatgagcaggcaactctcgaggctatccgtcgcgagcttgacttattagcccgccgatcttcaagttctgatactgtatgcatttatttttctgggcacggtgccagccttggcaatcctacagaccctagtagcgccttgattcccgttgactgcgaactttccaacatattaaatactgttctaatggaggaggagttttcagccaccctcactaaaataaaagcacagcgactcctggttttcattgatgcatgtcattctggtggagctggtagcttaaaatctcttgaagctaatttaggctttagtgataaaacattaagtcgattagcacagggaacaggtcgagttataatcgcctcttcaagggcttccgaaacatcactcattttatctggcgcaagtaatagcctttttaccgaatatttagttggtgcattgaaaggtgcggcatatacacagggagatggcttgattcgtgtatttgatgttttcaactatgtctcagaaaaagtaaaggccgcagtaccaaataaacaacatcctatatttaaggccagtggcctagaagataactttcccattgctctatattgtggaggtattaaatcaaacacctctgctgccaatatcagcaatacaaacaagcctacagtatggcgacaacttgaagaaatctttgcagatctatacccagctgggccacaggaccaagaaatatggaaccgagcaggtggtgatatttcccgtcttcgtttaaatggaacagggcgagtacagtggttttcagcacttcggactatgcgacaaggtggcggtggtcaagctataaataaacatgctttaattttggaagctctacaagattaccctcatcatcaggagcttaaacatttattggtaatatag

SEQ ID NO: 286851 - DNA, 2472 bp, Morganella morganii
atgaaaatcgagcaagctatttatggagaagtccgcagtgggcatgccgtgaggctagcgagctctcggagtgaaattgtcgatgaactggcatcacgtctcgacctaccagatacagcaccaccaggagttaactggtctccctacataacaggtttcccttatggagataaatatgtcttggcacggacattcgctgacccacatgcgactcgggctggcatggttatatctcatgcgcttatcgcacctcttgatgaaattgtcacaacggctaacctaaaatcgctttttgagaacttaattgttacgccggagccccccggtacccttactacattagatatccagagatcattcaccgccccaactaatacgatagatttagcagcaacagctgaatcattggtcacccgagggagagggccctcagtaaaattgggtatcgatggatttgaggatttgattgttgcattatggttccatctttggcctgggcttcgtgcaactttttcgtttcgcctgagttttggcccacatgatatagtcgataatcctccaccagcgcttgtctgtaccccctcgacattggaaacccgttggacaggatataatattattagtgtttctggttcaaagaatctaacacgagcagcatcaatactgtgcgacagtacagaagccaatccaatactccaatttgctgatgagattggtatatacatagacagatttacccgccttccaatgcttataagtgcatacgaatccagctctacttctggttttgaagcgtgcgttaccacgataaggctggtaaacacgctatctccagatccaatagcaggagccgtgggtaaggaaaaacttatccataaactttgttcgcagatgtgtgatgttgggataacaggaattctccagctcagaaaccttaatataataggcttccatggagttgagcgtatttgggaaagtctaagagctagagttgctacttatcgtctagaggaagtggatgatcgaagcctcttggatgcaattggcgatgccttgtcagcagaagctgtctcaccttggtgtgacgctattcttagtggcattaccacttctgtatgttcaaagtcatcaactttcccatcagccttctggcgctgggtccatatgcagccatccgtgcttatcaaattattcgaccatctaccttcagatcatagcttggaaactcgtctcttcaaagttgcaccacaagaaatgaacacaagtgtgggtaacacggtcatgatactcgcacgaacaaagaagtggttactcctgcatggcgttgctgctgcggcgtgttttgaaccaagggaagctgttcaccaacaattaattatcgatacagcgctaacacatttggatggtatcaaggcagccctatcgcgtgcgacaagtcaggagctggtcacgcttgcgctcgaaagcaacgagacccgaattttatgccttgcagcagaaaaagtcgcatgtgatccacaactgcttaaggatactgattttcgagcgctttcagcacaagagctctgggctagagtattggctattaacatagatgcttggcaagggcctgcagatcccaatcactccttacgtgttatctttcaaactcttctcgatggccgtaaggtaaatttcgaattacttggtgagttatctaccacacctgttgccaatctttgtagctatgaatactgtattgagatctggcctaaactccctgaacctgctcgcactcattttttgaaggcaacggcatcaggatggcttgaacaaacagtagtggaaaatgttattgtgccagatccgctattggaagccgccattcttgctggtcaagctctagatcagaagcttagggctttaacgttaacagatgtaaaattagtaatacgattgattgatgtcttaactgaatacggagagcctcgttttcttcaatggctagaatactggttgtttactaaacgttctatgacagattctgaggctaaattactcggcgaccttattcataatcgatattggcggcgagccgtggatcgattagttctggctgctagagatggacagaatgaagttaagccagttcttagatgttgtggcaacatggtaggtttctttgatagatggcaattaaacttatcagtcattacaagcgatgaaaagtggcgtgctctggaagaaattgtagtaaatctctatccagaaggcccggatgatggtgagctttgggatcgcgccggggggaaaaatggtcatcttgtattctcaggagtcggacatgcacgatggcactatgccctctcacaaattcgtaaaggaggtggtctcgaacttcctcggttattggaagaaatgaagagagattttcctgcaaatagtcagcttagttatttagctaatgactttataactacgggattcaggtaa

SEQ ID NO: 286852 - DNA, 834 bp, Morganella morganii
atgagtttcagtgataactcgattttgctcatcggggagtcagatgtcggcaagactcattatggtgcccaattattgaagcgcctgatgaagagggattgtcaactcagaatgaatggagcagcaactaatctagagccttttgagtccgccatgagttgcctggatgaaggcatagcggcaggccataccgctgcttcaacttacgtcgatagtatctggcctattgtggatgtgcaagggcgctcagctgatcttatttggcccgactatggtggtgaacaaattaagtcgatctctgacacgcgccgtattcctaagacttggcagtctcgagtggtttcagccccagcctggctcttccttattcgtttacaaaaaacccgtataaacgcagacattttttcgaggccattacacgatctgccggtcgattgtgcagagagtcacaatattcaaatgtcagatcaggccaagctaatagagctacttcagatacttctttacatccgcggaatggataatacgaaacccttggttagcccccgcctttgtgtactccttagctgttgggatgaacttggggtcgaagaaactccaccggaattattgaagagccgattacctatgctatcgagcttcatccataacacatgggcaaaaccaagtgttctggggctatcagcacttggacaagcattgagccctaaagaccctaatgacgagtactcaaatcgtggaccagagcagtttggctatgttgtacttcccgatggccaacattcgtcagaccttactctgcctatacaatatcttttggatgacaacctctga

SEQ ID NO: 286853 - DNA, 954 bp, Morganella morganii
atgagcgcatgttctcgagctacttgttttgcccctgagtccacttgtagtatgggatgcatggaccatactaaatgccaagagtggattggacaggaaggtgaggctgcttcgcaagaagagggggctccccacgaactggtgcttccgtggtcaggaggtgccttggggctagttgaccttggatttgttgctggccgagcaaaacctctggttgtggggatcatcggacaccagaatgcaggaaagactacattgcttgcttcatggtatttgttgcttggacggggtttgatttgtggcgatcatcagtttgcagggtcctactcactcgcaggctgggaggccgttgctagttcacttcgatggactccaggtcattccccaagttttccaccccatacgaccagtcgcggaggaagaacacctggattactccatttggactttagatattctgaaggtgtgtctcgcgggtatatgtttgcggatgcgcctggtgaatggttccaaaaatgggctgcgaaccgtgatagtgctgatggggctggcgctcgttgggttgcggagcatgcagatctattcttgcttgtcgctgattgtgaggctcttgctggtccaagcaagggctctgctcgtggtgctttcgtgcgtcttgttgaacgcttagcctcagaaaaagggaggcgcccagttgcacttgtttggactaaatctgatgtcaaggtcgctccagagatggaggaagtagttagacaagccgtctttagctctatcccagacgccgtcgagtttgccgtcagcactgttgtggatgacggtgatacattgggtaagggcaaaggcttcttggagcttcttgattggacactgcaagttagacgcgggcgtgttgtcttaccatctgttgatacgacgagcgctgatccacttttcatgtttggtaagaggtga

SEQ ID NO: 286854 - DNA, 1323 bp, Morganella morganii
gtggcgatagacgtgttgattcgttttttgggtgtcgggctcttagatgttaaaggcgatgacacaaaactagaaaaattacaaaccactgcggcagacctatctgctacgttaaagaaggctccctcaaagtctgctgcatttgctctcatagctttcgacccgtcctcgcctgcaactgatccagtgattcaggaggccgttgaggcacttcagaatcgttggccaacttacatcaataccttctctgatacgccagttacagtaatccgagctttgttgttggatgctctttttaaagcagccagcgaagatgaccacattggcattgcctttgtctcctatgcacgtaatgcacttccttttatggaagctgacaatgaaagcgaaatttggggagatgtgatcacacaaattgaaaaacaggttaacatccgagctgaaactgagtggacgacccccgagtcaattagtgtgtcagaaatcgattatttagcacctacggcgattgagattcacagtacggaagcgaaccttgataaggaagacctagtaggaaaattttttgcagcagcaggacctacagatgatgctgggcagcctacacaaggcaatcaatgttggccaaaccagaaccaatcttgggttaacgagtttgttcctcgcattgccgatgccatttatgacgcacttggagaagtcatagaagggggaaggattgcaccagtagatttgtccgcacctctgaaagaactcacagatgcagtatcaacccatgtggataaaacgttgcaagcggtgagcggtgcgacagcaggcctccaacgtcgcaccagcttaatctggtggaaggaaacgctttactctccaagtgttcaaagtagctaccgtgatatgtctccattcatcgcagctgccttgatggcctttgatctccatcaacaaatccccacattttctcctgcaagtgttgcagccttcttacacgaaacagttttgagcttaccagatattgagacacaagatgaaaaatcaattcgtgttctactagaagaggctctacaagctgaggaactggcaccattacgtgatgtctcctctcggttgctcccagaacctactggtcgaggccctctccttggaattttgggacatgggtttggccgacacattgatgatgactcgctccgtaatctgataagcattcctactgagtcagcacttactattccccaatgggctacgtggatatttagagagttgcaagctgcacgagccatgaaagaaggaaccggggcaaagaagcgagggcgtaaatcctga

SEQ ID NO: 286855 - DNA, 150 bp, Morganella morganii; identical to SEQ ID NO: 279073

SEQ ID NO: 286856 - DNA, 486 bp, Morganella morganii
atgaagaatgcaggcatgacagtagttcaaatgatcaggatgctaaaagaaaaagttccggattgcccttcatggatgcttgatgaatctcgtatggacaataagacacctacacatcaggaattaatggaattcgcagaatgtattattaagcgtcagcgctctattcaggcctcaaaatatctgacttattgcaaggagcgatttggctttgattctgacgggaactatcagttttcttataaaagtgtcggagtttatttggatgtcgaagttattgaaaccttattaattcatcaaattgagcagccgctattagaggaaaacccagaggaaaaatacattgccgtgtggcgtttttatacaaataacgaggccaaagaggctgaaaccggcatcacatggttatttgattttatggatgacgtttttattaaaggctttcagcttttaaattcgccagtttcaggcaatttaattcactag

SEQ ID NO: 286857 - DNA, 150 bp, Morganella morganii
atggcaaaaagtaacctgattacccgtgaaggatgggatgcgctggatcaggagttaaaatatctctggaaaacagaacgtccgcaggtcactcaggcagtgtcagaagccgctgcacagggggatcgctcggaaaatgccgagtactga

SEQ ID NO: 286858 - DNA, 2052 bp, Morganella morganii
atggccgttttgaacgatttagatcacaagttgttagagcactttcgaggctatgtggtaaagaaagacttagtgcgtatggtaaaagttggtgccaacgtaccggtgtttgtattggaatatttaattgctaattcctgctctactgatgatgaagaaaaaattaaagtaggcatggaaaacgttaagaaaattcttagcgagcactacgttaaccctgaagaaagttctctaatacattctaaaataagagaaaaaggtcgatttaaaattatcgataaaatatctgttaagttagattcgaaaaaggatatctattgggctcagcttcaaaatagcaacattaacaacggtaatatccgtgatggccttgtgaaagagcatgagaagatgttgatgggtggtatttgggccattattgacgttgaatatgaccccgacataagaatcggtcaaaacatatatccgtttgtagtgacaaatataaagcctattcaactgtcgacttttgataacagtaagattatccagaaaaggaatgagttttcgagagatgaatggctgaatgtattactacgtagctgtggatatgagcctgatgctgaagggatgacaacccgcgtaaaaatgctgttacttgcacgtctgctgccaatggtcgagagtaattttaactttgtagagttaggtccgcggtcaacaggtaagtcgttcgtttttaaagagcttacaccttatgccgtacttatatctggtgggcaagggacagttgccaagctctttgttcacggttctactggcaaagttggtgccgttggtcaatgggatgcgatatgttttgatgaggcaacggacaagatcttcaaagaaaaggacgctgttcctttaatgaaggactatatggagtctggctcgttttcgcgagctggtgcaggaggtgaaattactggtgttgcttcaataatcttaaacggcaatataaatcaaccagttgagacggtattacaaacatctcacttatttagtcctctttctgatgaagtgaataacgatactgcattccttgatcgtattcatttttatctacctgggtgggaaatgatcaagtttgctcctaagcacttcacatctaattttggtttcagtacagactacttctcagaagcattgaagtcgtttcgtcgcgttacatacactgatgctatcgaaaactttttttcactaggttcacacttgaaacaacgtgataccaagcccgtgaaaaaaacggtatcgggtctgattaaactgcttcacccgaatggtgaatacaccaaagaagatgtccgtgaatacctcgagatagcgcttgaaatgcgacgtcgcgtgaaagaacagttaaagcgaatcggtggaatggagttttgggatacgaatttttcttacatagataaagaaacgcaggaagagcactttgttggcttgcctgaggaaaagggatctcacttaatcgaaaatacgccactgccgcctggtgtttgttacaccagtactagtgatagtgataatgtcgcgctcgtgcgtattgaagctgtaactacctcgggttctggaaaactcaatatttctggtgtgagtaacaccggagtaaaagaaaatatcaagaatacctaccagtatattaaagctaatgaaaaaacaattttaagtgaacagcattcgcttaaaaattacgatatcactatccaagtaaccaatatgctaggggcttcaatatcaacgggaattggctcggcggtttatatcgcaatcgtgtctgctctgtacaaaaagaacctaaaggctggccttgcagtgttgggtaatatatccgttggcggtgcgattgaaaggtcgattaactttgcagataagataactatgctatcagaaaacggtgctaagacggttgttgtgcccatggataatttagtggaactgacaaatgtaccaccaacggttcttggcaatacagatgttcctttctaccaaaataatcaaatgttaatgcagaaagcaattcttcttgagtaa

SEQ ID NO: 286859 - DNA, 2304 bp, Morganella morganii
atgattgatacttggtttaaagaggatttagcgcgcatcttggaacagcaccctgtagccgtgtttattgatgaaagcggcgaggcggagtttctaataaagggcctgaaaggacactgtgaggtgtacctcaccaatggcgaactcgacgagctggaagcgaaatatcgcattgaaaaagccctgcaagagcatcctaaatctgagcacaagtacgttatctatacgcaaatcagcaaagaagacctaacctttgcacgtgagtactgtgagaccaatggttgcatcgaaattcgttatttgcagaactacatcaaagataaagttcaccggaccttaaacttaaatattaacttgccgaaagacgagttgatcgctgctgcaaaagtgagtgtgggtaaagaccgtacctactggatggacttaagccacaaaggggcctctgaaatctttgatttagacaaggaactgctgccctttgttcatgaccccgaaaactatgtcactgaaaaatacgattcacagctgcgtgaaaccttttaccgcaaggttaatgagctgctaggccaagaatatatcgataaacctgcatctaccctggcgtctgaagttgtatctgcgatgttaaagggcttggcggataatgactgtgataaaacgttgttatcggtttacaacagttggcttgattcggtgagttatcgcaattcatttggctcatacctcgccaaacataagttggattcagcgtttattaacagcagtgctatctggcagatcaatcccgaccacccatttaggccggtggatgaagcttggttaaaggaattaggcaataaactggctaataaatctttggctaaagtagagtcagcacaactagttgctaggctgaaacaacgccatcaaagcaaacaggcacaagcgctgggcattgtgttttggaacgacattattactttgctcgactttgatcagaaggatatggcctatttaagcagctttgctgaatgtgttgagttttacaaaaagcatttctgcccgcttgatactgccatacgtaatttgtacaccgaatttttgcaacaacgtgacagccttgagcctttccaagaactttacaaagaatatgttacgttgtttttagataagtggttccagtatttcagtcagtaccgagaagatcaaactggcattttacaatccattattgaccgtgatatccaaattgatcgcccaggaaagaacagcaaaatagccgtgattgtaggcgatggcgtagcctatgaaattgcagagcaggttgctatcaaggttaagcaactgggtagccatagtacacttactcgccgtcatatcttagctgattgtccatccgaaactgaaaacaacatgagtcatatttacatggcaaatggtgtgattgatgccgtgcaaaataagcgagaaaagtatcttgcagcccaaaattcacacattgatatcgattacattcgtcttgatgaggtaagtgataagcctctatcgggtcaggtgctaatttgtacctataaagatattgatgacatgggtgataagctcaatcataaggcgctgaaatacttcccagaatctatcgatttttttgctgaaaagattaatcagttgctcaatatcggctataccaaagtgtatttaatcaccgaccatggtttcgtgttgactggcttgctaagcgaagccgataagatagtggttaagccttcagggcaaaactacattgacgagcgctttatctggaccagtgacaagcaagaaagtttaatccctcagtttattgaagtagcaaagacctataaagattacaactatctttacttcgcccgcagcatgaacccgttcaaaacccctggcacttatggctttgcgcatggcggtttagcacctcaggagttggtgacgccttatttttgttgggagcaagaaagtgatgttatgggagagctgcctgtaaccattgcgaacaagcatgacttggtcagtgtaactggagagctgtaccagctaaaactgcgggctgaatctggtgaaggaaatatgttcacgcttgaccgtaaagtgatgttgttgttctttgctaacaaaacccaagtgaataagagcgatgttattaccgtgcagagtaatggtctcgttactaaagagtacacctttgatggccatgaagagttagaagtgcaactggtagacgcgattacaaaacagcagcttgatcgtgttcttattaaaaagaataacgaccgagaccttggcggattattttaa

SEQ ID NO: 286860 - DNA, 3756 bp, Morganella morganii
atgaaattagctgaccatgtagatcatttaagagagctgattgaagccgccttcgataagcaatttgctagactgggttttagtaagaccaagcaaatggacgccattcaggtagaaaaactacctgagggagttaaaaccaagcgcgatcgcttcgccgtgatgctggagaaccatatcggtgaaaccggtggttatgaaagtgcccgagaaaagctactggatgaattaacctttacgttattcaaccgccttgccgccataaaggtgatggaggcagccagcttatttccgcccatcttaacaaagcaaaaggagcatggtgatcgttcatttggccataaagcctggttagaaatgaatccgcacatgcgtgatgaagagctggaaggtattcgcgattatttaaaatcagcgtttgacgaacttggtcaaacgttgccgctatatagcaaagcctacccttatgcgcttttacctgatgccataagtttaaacgatattattgacgcctttaatgtggttgatactgacgcgcaagctaacgaatcatcagaagagaccatctggcaaagtgatgatgttctaggttggatgtacgaaagctacaacaacaagaaaaaggcaaagttcaaagacgagcaaaaaaataacaaagcaaaaaccgaatacaacaaggtatcactgcaatcacaggtgtatacgccgcgctgggtggtacaattcttggtcgaaaactctctgggtaaaatatacctcgagatgtacccgcactctgagataaaacagcgctttaaaattgccaatgcaccaacaacacaaatacgatcacctaagcctttacatgaagtgcgcactattgatccagcttgcggatcgggtaactttttgttgtatgcctttgacttctattacaagctttatctcgaccaaattgaaaactatggtgcagactatgatgaaaaagacatccctaaactcatcattgaaaataacctgcatggtatagacttagacgatcgtgctatccagttagcacagcttggcttatttatcaaagccaagaaaaagcgccgtacagtcggcgagctgcatttcaaggtggtatcgtccgatttctatctgcctgagtatgcagaagtgaagcatatcttcgaaaaaggcaatttggtttcggctcaccagcaagagtttattgagaaagtatggtctgatctaatgcaagcctataagtttggctcgctgattcatattgataaagagttaaaagaacagctatctcaagtaaaagaacgtgcgcttggtgaaacgtttgattcgacacaaaagttaaaaaggaaaattgttgaaggggatctctttgcagcggcagattatgccgagcaccaagaattcgcagaaaacttctttgcaaacttgtttgcagcggtggagcagtatgctcgaacagaacgcaatactttcttaagcggaaaaacgcgagatgcgattacattcttagagctgttaaccactgaatatgatctggcgactgctaatccgccgtacactgatagtgcggactttgggccagacctaaaagaattcatcgaagacaactataaaaaaccatacaaattcaacaccaacttgtacgccacatttatcaagcgttgttacgaacttacaggaaaggatggcaaggtagccatggttcatccgccaacatttatgtatatcaagacattcgaagatgtccgaaaatatatgattgagaaaacgagcatcgatctattcgtggagtggggctatttgggaatgtttcatcagtcagctcgagttgatgccgcgatgtatgtccttgataaaaataaacaagagaaagactcaacctttatcaagttgaaccacatttatgaaggcaaacgttataacgcttttgttgaggcatatgataatttgatcgatggtgtagcttaccaaaataattacaccatcccgcaatctaaactaaaaattatcaaatcatggccgtttatctattggatttctgatgagtttaggggaaagtttgagcatagtagcttcgatgatacagcgatggttgtttcaggggtaaaaactggtgataacgatagattgttaagattctggtgggaagttgacccgtctgatatttcagttgcctatttggaagacaagaaaacatgggtaccatactcaaaaggtggcgacttcaataaatggtttggtaatatttggttgtgtgttaattataaaaatgacggacaggaaataaagaagagcaaaaactataatcttttactgccaagtaaatcttttaaaaaaggaattacatattctgctacatcaaccaaaggggtttctttcaggcttttagaagagcattgtctctttgatatgaaaggttcttcaattattttctccgactcaactaaaacagaatatgctcttgctttattaaattcgaaacttagctcatacattgctaactgtttaaatgggacagtagaaacgcaagttggcgatataaagcgcataccttatgcggaaaaaaataaaaataagatagagaagctgtcaactgacagcatcaatattaagaagcatctacaaaaatattcgctggttgagtatttatttaaagctagtccattcgatatttacgcaagagacttagattataaaaaatcaatattttcctatctaatctatgaaaatcacttgttagcacaggttctaatcaacgaagctatcatgaatgagttgatctttcaggtttataatctaacagagcacgacaaacttatggtgctggcaaaagaaggtcaaagtataggaggtcttcctgtttcgaacgaagcgagagatgcctatctggcggaagaggctaccatagagtttcctatggatgcgattcgagattttgtatggtcacttcaaaccagagagttttctgacgaagagcgagagttggttgaaagcgaattcttaaacctttaccaggacaataacgatctggaagcgttttgtattcgacatcagatcaacccaataaatgtttgttattggtttaagcagagcaataaaattcctcttcagcggatgcgtaagctggctatggagtttcttgcaaacatgatacgcgaaattctaactgaagatgaagatggaatcattccgctggtgcctaatgctggagagaaagtcctgcttgatcgcatcgaagaaaaatttttagaaaaaggctttagttctgctcaatattcgagctttgacacggtaattggtcgtcccatacatgaatacctgaacagaagtttttttgcggaactatccaatcacttgaatatgttcccgaacctaccaaaaaccccatttatctggcatttaaccagtggcccagagcaaggcttcgattgctatatcatcatatacaaatggagtcgcgataacttgctgcgattgcgttctgtttatatcgaaaaccgtgaacgcgctttgcaaaaccgccagagtgatattgctggcaatgaaagcgcggaagcgcaaaacgagaaagatcgtatctttaatcaattgaaagaaatcgacgcctttaaaaagaaaatcgacgaactattggctgaaggttacaacccgattcttgatgatggtgtaggcaaaaatattgcgcctttacagaaaaagaaaatgctggcttatgacgtattgaatgcaggccagctaaaaaaatacttgaacgcggattggtaa

SEQ ID NO: 286861 - DNA, 3690 bp, Morganella morganii
atgacaatcataaatgacatactaacgttagatcttaaagaagatattaaaaacgttattgaccttgaagaccgttcagagacagaaattcaacacgaaatcgagtcatacatcgtaaccgaaggtattgggcggcacctctacgaatttacaaaccaattcacctctaatattaaagagacaggggtttggttatcaggtttttatggctctggtaagtcatatttcggaaagatgctgggttatataatagataaccagattataaatggtactcctgcacgtgagcgttttataccacgcttaaaaggtgtaagtgatgcaggtcttattgaaaacgccctacgtaatcttgacgcaattaacagccgcgtagtgttccttgatgttgctaagcaaaatactgaacgtggattggctttcaccttgtttgctaatctgcttaaaaatcttggttttcgtgatgatatttacggttatatggagtttgatctgctcctagatggtaaatacgacgagtttaaaactattgtccaaaaactagagtcgaaggattgggatgagctaaagaaaagtaatcggcatgtcgctagagttatgcgaaaggtctttgccgaaatggggtacagcgagtcagattatgaagataccaaaagcgtctacagtgcttcgatagaggatttttctgccagtaaatttaaaacggaactggaaaaatatcttaagtttaatgcagaagaaacactagtctttgttttcgacgaggcgagtgaagctattagccagaagaaatttacccttttagatttagaagggattagtgaatcgctatcgagtataagtaataaagtttggaccatagcgattgcccaagaaaagctcgacgacgtgattaataatgctaacgtcagtcgcagtagtttgaccaaggttaccgatcgttttaaaaccaagattcaccttgagtctacagaagtagacgttatcattcgtagtcgattacttcaaaaaacagaacaggcaaaacaagatttagttgcttattaccaaaagaatgaaggcctaatcagcgacgccaccaacctaaaatcatcgttccctacgaaaacggaaacagctgaagactttgcggtctattatcctttccacaaatatcaattcgatattttgcaaaagttcttgtttagctcaaacgctttagttgctacccaaattgcagctcgaggcatgattatcacaacatttgacgtactacgtaagcaaatgcgtgacaaagagctgtatagctttacgccagggttcgcgatatgtgatgaagcccaaaccgcgccgccagttggattggtcaacaaatacgatacaagccgaaaaatattaaaggaaaatggcagcagcattgacggcgagaaactgctcaaaaccatgcatctattagccgactctgaagtagtcgcgccaacggttgaaaatataaccaaaagctatattactgacattacgtcttactatgaagtaaagccagcaattgaagatgcgcttaagctactgcttgaatctaaagtactactactatcaaacaacaactacaaaatcacatcagatcttgaaggcaaaatgctcgaagaaatgaaagattttgatgtcgaacttttcagcaagaaacgtgagttaattaagtatctgaaggactacaaaacctttaacgcagttgcatcctacaatgatggcagtgatgcattcaaatttagcgtgctgtcggaccaagacgatgagttagcacctgtaggaagcaaacacttaaagatcacagcctatagcttgttcaatatcagtgatgatcgtcaggattttattgaacaactgaagcttgatactcagtatcagaaagagcttattaccttggtgccagatacttcagagttctcccagattgataaattgataggcgaagttatgcgctacgcctacatggaggaaaaatactcgaatgaaaaagatgccgataagcgtcaaattattcgtgaatttgaagttatacgagaagagaaacaacgaactttaagagggctaattcaagacgcatatcacaatgcatccctgatctacatgttcgacgagcatctgttgaacgttgatacatttaagggaaccattgccgacaaccagcgaaaaatggtaaaaaacatctacaccaagcgtttatcaagtcaactttctgatagcctggtctcgaagattttcagcacacataaagaaagcctgaataagttatttaccgctaatgattttgcattcttcgacggtcacggcaattttactggcgatcaccttaaaattgttgaagaaatcaacgctaagataaagtcgcgctatatggatggtaaatctctagaagctgacttgtcaggtgctccatggggctatagctacgggacattagtaacgactcttgcagtactattccgtgccggtcgactatcggttaagtttaacggcgacacctatttttctcatgagcaaaaagcggttcacgatgcctttacgaataccaccaagtttaaatctgcgtcgttcaaatcgattactgcaacgctaaccgctgtgcagaagaaccaggcagtacaactgcttatggaactggaaacacaggaccatatcggcaaaaaggtagattggaatacaaacgattttgacttggctgacagtattcgtttgatggctgaacattttatcagtgccattaccaatctgagtgatactgttcaagattttgaagaactattccccaaagtggcaggtttaaaacaagacttgcaaggtttcgcgggtaaagttaccgagagtaactatatcgaaaaggttgagtatctacttaataacagcgatacgttcagcaatgcggttcaagccatattaaaagctcagaaattcattaaaaagaactttccaaaagttaaagaatttaagcgctttattgacgatgttcgaagcgagctgataaaagctgatcgcagtgacaataacattgatgaagcctatgaagaattcgagcgcttattcaaacaggatatggtgaaaaactttgccaatctcgagcaccaagtacaagttgtaaaagatgcctattacaagttagttaagacagcatctataggtatgagtcacgagtacaagatcctgagcggtaaaattgaggctgcttttcgtgaacttaagaactaccccgcggcgccgaaccgattaaatcagcaaaagcttgatgccttaaaagcctacgcagaaaaacgagtagttggtgaaccagtacttgcgttcagcattagttgctcaaatagtggtttttctctctccgatattttgaattacacagctcaagcaccgctaaaagatagcgagctgcttatcgtgcaaagtagttttatcacagaagagccgcagcccgagcctgtacccacaccgcagcctatacctaatcgtggtcccgatggtggcgagcctgcaccggaccagactccagttccaacaccagcaccgaaacaaccccgcaaagttgcttttaaagtttctagtaaggtgatgacagtgcaagagtataaaaccttgctgactacgcagctaacggcgcttgctgcggccaagcccgatgaagaaatcgaactaactatagatattaatagcgaaggactgtaa

SEQ ID NO: 286862 - DNA, 549 bp, Morganella morganii
atgccctttatagctgatcataaacaaaagtttgctgacttagacttccatatcaaaaaccaagatcagctacgtcggcaagcaaatggcggtaacagcatattgttctcttactgtcccgatgaagagaatcgctacattgacaaagcgagagatatttatggagaaaaagcagaattcattgatattagccaattactggttcgctttatagatgccgatggctggggtgctttttccgagtactacagagatttcattaacactccacatgttgttttcaaatctgacgatccagaacaagacctttttgacatgattatttcagccattaaacaggcttgtgaaaaggataagattccatttcttattcgaagtggttgcttgtatggcacgggtatagagaatgtaaacataatggagcacaaagatgttatgcagctaaagcatccccttgtcattttctacccatcaaaaatatcagaagacaacattttattcttgaattttagaccagcatcaaagtatcgctgtacgttagtgagatag

SEQ ID NO: 286863 - DNA, 804 bp, Morganella morganii
atgacaaaacaagataacagctcaataaaagagattaataatcaatcatataatacaagtctcaaggatatcgctggtcttgctgattacacagtagtcttcgactgcattgctgactacttcaataagttagaatcagccgaggatttaaaacagcaccttgatatcagaactgaaaaaactaaaaataaagtaacatgggcactaaataaaactgtgcttcaatttcttaatagtgatcataaagcacttattcgttcgatttatcagagcgaaatacctgttcaagataagaagtttgcctttttgtggcatctttgcctaaacaataggcttatccgtgaaataacaataaatgtgtttgctaaagtatactcttctgggcgagctcagatctcacaagatgatatcatcggatacatacgttcaatttcaagtaaggctaatccaagtaagccattgtggtccgaagatactctttacaggcttgccacaaagtacttgagtttgatgactaaatttgattttgtatcatctggccgagtgaaatattttaatcatattcgtccgacatctgaagcaatagtgctttttatatacatctcaaatttgttctcgcctgatataaaaaacatttttgaaaatgaactgctccctgcaagctttatagctaaagaagatgttcatgaaaggctaaaaaaactatctattaaaggtttttttaacattaacttcaatgggatagagctaaatatcgaattaactcatacccataaggatatatgcgatgccctttatagctga

SEQ ID NO: 286864 - DNA, 927 bp, Morganella morganii
atgacccgctatgcatttattggtgatatacatggccagcatgccaaactacaggcattgttaaccgttctaaaaacagagtcttctgactggttttatgtctttgttggcgacctcattgataataaaaatgggatcactgacagccaattagcaacactggaaaccgttaaagccctcgttgatagcaaaaaagccatttgtttgatgggtaaccatgagtttaatgctatcggttgggcaatgcgccaccagaaaaccggtaaaccgctacgcccccataccgagaataaccgcaagcagcatcaggcttttcttgatgcggtggccgaagactctgcattgcaccaacaatggataacctggtttcaggggttgccattatatgctgattttggcgcaatcagagctgtacacgcctgctgggatgaggcgattatccaatctattcagccctacctgaaggccaacaatgccatagcagatagtttctgggaaacggcctttgagaaaaatgctccgttatacaacatgacagaaacgctgctaaaaggacccgaactggctctgcccgaaggcatcagttttaacgataaaaccggccagccacgcaaaaacattcgggtgcgctggtggcttcctcaggctgaaacttatagagaactggcgcaagttcctccggatgctgaatcacttatccccgatattccgcttaataacggttactcgccattacctcttgatatcccggtggttatcggtcattacacgcttcacgatcagccgcaacgactttctgagcaagtcatctgtaccgattacaatgcagccaaagctgatcatcctctggtagcttactgctgcacggtagagggtagacacttatcatcacaagggtttatttccagtaccggaaatagtgtttag

SEQ ID NO: 286865 - DNA, 1254 bp, Morganella morganii
atgaaacaagatctgctaataaatcgagcaaagggggcactgctcggccttgccgtaggggatgctctgggtaccacactggaatttcagcccagaccggatgagtcagtaattaaaggtatgatgggcggcgggccatttggcctacgcgccggagagtggaccgatgacacctctatgatgttatgccttgccgacagcttaattgattacaatcgtagcgatcctgcggaccagatacgacgatatatcgcctggcgggatgacggatatcagtcctgcacgggtacctgttttgatattggctctaccgttgcccaagcgttagacatttttgaagaaacaggctctgcgttagcgggcagcaccagtgaatacagtgccgggaatggcagcctgatgagggtagccccagtggcgctttttacccatcatcatccacttcgtatcgcaatgtcattggcgacagagagctgcctcacgacccacggcgaacagcgctgcattgatgcctgccgctatatgacatttcttattcatactctgttagctgctcagacgcagccgcttaaagccgacctactgtctcctgataatagtgaattatcgccttatcttagtgaaatgcatgcggatacgttacaggttattcagggcagctatcgcactaagaaacgggatgaaattagcagctcgggctttgtgattcactccctggaggctgccttatggtgcttttggcacagtgataactttgctgagggggcactgctggctgctaatctcggcgatgatgccgataccgttgcagctatctacggccagttagcaggcgcgtactatggttatgacgccattcctaaagactggtgcaacacactggcatggcgcagtgtgattgagagccgagcattgctcctgatcaatcggccttctcaacaagttattcgcgaatttattgacgaatgcatgccgaaccctgaatacagctttgcgatgacctctgatatattctataagcttatcgtcgtctttgactggcaggagtggtcgcgagttttcgccagacaacgatacattcagaatcgacacaacattgccagtgcccctttggcggattgcctctgtcttatcactatgattgtacgcagtgaccgtttttgtgacggtattatcaggcagtgcacatcggatggaacgataggtgccctgttaaaccgactggagcactttgcagacaaggagccatcatga

SEQ ID NO: 286866 - DNA, 369 bp, Morganella morganii
atgaaaaagattttagcattggtgttgttgacgttatctgcaacggccacagcagatacctttaaatgtgatgcagtatctcagcttaatcgccctgcacctgatggtcctcgttcagtgttgcctgtgacctttgagttcagcaaatacggtgcgtttgagcaggacagtaataatgggtctgaaacccgttatggcgaagcggaatacgacggtatcgggtattaccatacgtcggaggatgggcgggttaatctacgtcaggaagtcgatcccagtaacaaccgtccaattatcattgcctatgttgtcggcactgatgccgctacggtctacagcaactgtaaactcacggtagcagaagactga

SEQ ID NO: 286867 - DNA, 567 bp, Morganella morganii
atgcgtattacccctatccctgaattacagaagtcattacatcgtcaacagtcagacctgtttgaatactactcgaaagttctgatgataagaacggacttccattggtctgataatagcgaccgttctcattacgaagatgaacatcaatttagtcgggatatgagtatcctgatgttacgtctctcagaatatcctggtgttattggatatgcttgggtactggaagaaagtcggagtggtaaattacatgcccatgcagccatctacgtgaatggtcagcagcattgtaagaagtggggctttcaggatgtgatggaaagcttatggcgtgagactaccgacagggagggttattgttatcattgctctgataaaaagaagtattggcatgacatacgtcgccctatttcctttcatgatgataagggccataaggccatgcgttacgtggtgaactatttagccaaggacgagcagaaaccctttgacccgatttaccatatctcccgtctacctgatgtgaacaataaaccggttggtcgtcctcgttctcttcatcgttaa

SEQ ID NO: 286868 - DNA, 858 bp, Morganella morganii
atggcaaatgaaaaaaacactaataaataccaatttaatactaacgatataaatgaatctcgttacattatcgagatgatatacaggtatgtattagatattagaaagcctcgggatagaatttatgaaatgaataatgatgaactttctgaaaaaataaactcactctctttagataaagtagatcctggtaaaataaggatgtattcagaaaaatatcgagaagaaatgcaaacattccgaaagagaaatctatcgtggatcgaggatgacttttactcagctctctacctatggttttttctttttgtgtatagtccatcaagacgttcggtttttgaccgaaatgacatctcgtctcgagctaaaaaagcaacaccagaaataataaacaatataataatagatattttagagtattcttcatcggagtttagccagttagaaagaatagagaaaaaaataaaccgtgcacatgaaaagtatcaagatctaacaggtgtcaaacgacttagttggctgaagaatgatgatgaacaaataacttgggcatatcaatacctcaaagaaaaggatcgggatttttcaagaaactatgcaattgatcatgtacattcccttgtctgtatcaaggtctactatgatttacacataaatgacaatgcagtacggtatatcttcctagaaatgagtaatgcctggaaccaaaaacgatatcgtgaaaaaagaaaaattgataacaaaaaagcattgagcggatatatcagcagtgatgcaaaaaaaagactaagagacattgcggaaaaggaaaatatttcagaaagtgaaatgatagaacttcttattatgacttactaa

SEQ ID NO: 286869 - DNA, 489 bp, Morganella morganii
atgaattatcgcgatgaacacgttcaggctttcacactcgcgcccaatgagcagcgagccatcaaacgggcactgaccatactggataagcatctgagtgaacccggtattgcctttacctctacccagagagtcagagactggttacgcctgcaaatggccgggctggagcgggaggagtttatggtgttgtacctcaatcagcagaatcagttgataggctatgaaaccttgttcaccggcaccatcagcagtaccgaagtgcatcccagagaagtagtgaaacgcgcattatactttaatgcggcagccgtcatttttgcccataaccatccttcaggagaaatcacgcctagtcatgcagataaaacccttactcaacatttggtcaacatcttacaactggtggacatccgtgtgctggaccatctgattgttggtggcaggcacagcttctctttcgctgaacacggtctggtattaggttaa

SEQ ID NO: 286870 - DNA, 222 bp, Morganella morganii
atgaatatcatcagtaaatctgctgcaatgaaaattcaccggcagcatccacagtcccgtctctttcgttactgtcggggaaaatacaaatggttgggtcatagccgccattatctcggtaaagaggtgatggattgctcgggtgtcctagcggtttatgttgagcgccgtcaggacggtcatggtccttatgcctgcctgatgagtgtcaccctgaactga

SEQ ID NO: 286871 - DNA, 321 bp, Morganella morganii
atgagaaccctacctgtcactcatttacgggaagcgaagtgctgcccaatacccacgtctgtatggcaaaccttgctgacctgtttgctggataaacattacggcctgagcctgaatgacacctcattttgcgatgaggcggtgattcaggaacatatcgatgctggtgtcactttggtggatgccgtgaattttctggtggaacgttatgagctggtacgtatcgaccgcgagggttttacctggaaggagcaaagtccctttctgacagcaaccgatatcctcagagccaaatttgctatcggtctaatcaacatctga

SEQ ID NO: 286872 - DNA, 471 bp, Morganella morganii
atgcagacagaatccgacctcttaatagaacacaatgaacttattctctcgaccagtattgaacggacggtgacagggcgaaatgcagccctggctcaaattgagcaactgatccagcagcttgatacagtatcccgactcactttagaagtcggcggcggaacggcacaggactgggccatgaagtgcgggcaccaatatgacagttggctaaccgaaacgactgagaaagcgatgcccgccattacgcgtaatattgaccgcagcatctggcgtgacttgatgctcaagtccggtatgcttgccttgatggatgcccaggcccgtgaccagtggcagaaaaacttggaagagggtgagcttcctgtcattagcgaagccaatatcctcactacctttaagcagttgcatctgaataaaagggatgtctttgagcgcggtattatcaatgtattcaaaggcctgtcatag

SEQ ID NO: 286873 - DNA, 306 bp, Morganella morganii
gtgacgcataaccgctggggattcagtcttaactggggctggcggcgcgatcagctggcagacctggaaagaatgctgtatctgctggatggcaaaccgatccctgataaccggggtgatatctctacccggctgatggagcatattcgtgataatccgacgaaagcagtctatgaagatgcgttctttagtattcgttactttcagaagggcacagcacatctgacttttaaacgtccggaactgattgaggaaatgaacggtattatcgctaagcactatccgagaatgctgccgaaaaaatga

SEQ ID NO: 286874 - DNA, 549 bp, Morganella morganii
atggccgcgttggccgcactcagaaatccgggtcacatactggtgtatgctccccggatttcttcctttgccgccttgccacaaattgaaatctatagcgtaaaggcattgtgccgcggttccttctgcttgctgccttgctgcaaaccgaatgatttagccttagcatccggtatcacattgcccgtactcagagatccgggtcacatactggtgtatgctccccggatttcttcctttgccgccttgccacaaattgaaatctatagcgtaaaggcattgtgccgcggttccttctgcttgctgccttgctgcaaaccgaatgatttagccttagcatccggtatcacattgcccgtactcagagatccgggtcacatactggtgtatgctccccggatttcttcctttgccgccttgccacaaattgaaatctgtagcgtaaaggtattggccccggagcgggtctgtcaggcgttttcttcccgcattttcagggttttcttcacttttttctcaatgcgctggcgcttcagcggcgagagatga

SEQ ID NO: 286875 - DNA, 762 bp, Morganella morganii
atggctaaccaattaaaaacccagtcttttaattttgattccgcgatagcaattagagccatttctattaacggcgaaccttggttcattgcctctgatgtatgtaaggctctacagctcacaagcccatccatgtcactgaaagcattagataatgatgaacggtctaagttcaacttagggcgtcagggtgaagccaatataatatctgaatctggcttatataccctgatcctccgctgtcgtgatgccgtgactaaaggctcacttccataccgctttagaaaatgggtcaccagtgaagtcctgccatccattcgcaaaaccggaaaatacgatccgaaaagcgagggcgcaacactcggtgacttggtcggtaccggcatagaaacaacattaggtgtgaaggatgcggtgcgcagtattaaaaatgccaaagccaacgccgctaatgaaatcgctgaaaagtgcatacctgtgatcataagtgcaatgaggaaacatcagtaccattacacgaatgaaaatattatgcctgcagatatgctgcctatattggttaacaactcctacgataacgtatcaaaaaaactacagatatacgctttgttaatcgaactcgctgaaaatggacatgccgtatcaggtgcattccgtgaagttgaaataatggctcacactatccgtgagtgtcaaaaacgactggccagcattgaggtacacgctgactatatcctggaacagtccaaacctgtattttaa

SEQ ID NO: 286876 - DNA, 597 bp, Morganella morganii
atggttggtgttgggtcattatatttaacctaccaatcaacaaggtcagctaaaagagctatagatacatcaattgaattatatgaaaagcaaaaactagatgctgaacaggcagaggaggtcagtaagataaatcaaatgcaatctctttgttttttaattcaaaatgaagtatctggaaacataattcaaatgagtaaattagttgaattctgtgagtttgtatggaataaggagatagtgacgtttgactataatgatttaggttctgagccttttgtagaatacgtaataaaaaatggaaacaaaattggttttctttttgcaaggcaatcccatcatgtaattgataagtatttgcttgaggtatctaaaatagatagtaagttgattgctgatttattaaagcttaggttcactatagagcattataataataagtttttaattagccttgcaaatttcatacaagcaaaaccaactgtcgatgagttaaataaatacatcaatgactctaaatattttataaccgaatgtcaaaggcagtctatggatgttatgaaatattgcactgataaagtaataggacttagttaa

SEQ ID NO: 286877 - DNA, 279 bp, Morganella morganii
atgatggatatatcacgacagcagtttgaagaatacattaaattgcataccgacccggcagagctggagcagaaattaaaaaaagcaaataacggattaaattatgctgaccgggatgtcgattcaatgtggattggctggcaggcttcgagaaatgcaatggaacctgtaggttacacctcacgcaaggagttacgcgaaatggcttgcggcatcgttggaatagttcatcgaaataaaaatgtagttaattatatacctgtttatattaacgactaa

SEQ ID NO: 286878 - DNA, 414 bp, Morganella morganii
atgaaaggtaaaataacaataaccagaccatcatatggtgatggccgtaatgtcattaatattcaggttcgcgatgatgtatcaaggattaaatttcttgatattgagattgattgcgctgacttcgccagggcagtaactggattatcagaaacagactgtcggctctctgttcgtggccttgattcagtcggtaaagtaaaaattaccgaagcccgtaaagcgctttgtccaatagatattagcggaaaagaaaatatggcaaagtggcttcatgataataagcaagaagacggatggatacttgattcttaccttggtaataaatcatctgtcgaatatacagagaatggatacattctcaagtatcgagtaataaaatacattgaggctgacaatgaacaaatatcgtga

SEQ ID NO: 286879 - DNA, 339 bp, Morganella morganii
atgaacaaatatcgtgacaaatcagactttgaaattaataaggctgtggctgaaattacaatctacggtgattggtatttgtcaccaacggatgaacaacctttcacattcttcaattatggtattaattcaagcaaaacagtagagctacctgattattgcaacaacccggcggacgcaatgccgattatcctggataataaaatcgacctaactcatctcgtcggtgacatggtgtgcgcaaagcacaaagaatattggtgtattcgtaaaaatccataccgcgccggttgcgaggtttatttgctgatgaaggatgcggagaatgaaaaaatatga

SEQ ID NO: 286880 - DNA, 360 bp, Morganella morganii
atgaacaaatatcgtaacaaatcagactttgagattaataaggctgtggctgaatatataaatataaaaataggacataaatttattgactttgatcaagacggtatttttgtacaaaattatgacaatataagtagtccatatagtgatggagagccagaaagaatagaattcgacccatgcaacaacccggcagacgcaatgccgattatcattgagaataaaatcgacctaactcatctcgtcggtgacatggtgtgcgcaaagcacaaagaatattggtgtattcgtaaaaatccataccgagccggttgcgaggtttatttgctgatgaaggatgcggagaatgaaaaaagttga

SEQ ID NO: 286881 - DNA, 414 bp, Morganella morganii
atgaaaggtaaaataacaataaccagaccatcatatggtgatggccgtaatgtcattaatattcaggttcgcgatgatgtatcaaggattaaatttcttgatattgagattgattgcgctgacttcgccagggcagtaaccggattatcagaaacagactgtcggctctctgttcgtggccttgattcagtcggtaaagtaaaaattaccgaagcccgtaaagcgctttgtccaataggtattagcggaaaagaaaatatgacaaagtggcttcatgataataagcaagaagacggatggatacttgattcatatttgggtaataaatcatctgttgaatatacagagaatggctacattctcaagtatcgagtaataaaatacattgaggctgacaatgaacaaatatcgtaa

SEQ ID NO: 286882 - DNA, 360 bp, Morganella morganii
atgaaaaataaagtagcacttggctgtaattatgctggttatgactttggcgctcattatattgatagccagtgttttgacggcgttttgtatgacatggacgattgcgacgaaagcggcaatctgtatgaaccgctgcaatatatcccgtgtccaaaatgtaacactcaggcgtggttagataattaccgttctgagtttattgaagatggaataagccacggccttaatggaaagccatttaataaaatacgcactgtccatattcctgacgaaatcagaaattcaccaggcttgttacgaaaaataaaccggctattgcggcgcgggtattactacggattaaagaaccagcattaa

SEQ ID NO: 286883 - DNA, 1446 bp, Morganella morganii
atggaccagttaaatcgtgaccagaaaattgagcttctccggctccttgaagaaaaagcccgccgcgccaccgtctaccgctataaaacctattacgacacccgttacccgtggcagaagaaattcattgccctcagtaacgagtattcacagatagcactcattgcagcgaaccgtgtcggaaaaacagacacagcgacatacatagatgctattcatgctatgggtgattaccctgaagattgggacggatacaagtttgaccacgctccgcttatctggtgccttggctactccggcgaaaagtgtcgcgacctgctgcaggctccaatccttggtcgtaaaacagataacggctgggaaggcggattgatacccggagacagaataatcagcaccgaagccgctcagggggccgcaaatgctgttcgttccgcatacatccgccataaaagcggggatatagcaaaaatacagttctggtcatactcgcagggtcagcatgctctgatgggtgacagtgttgattggttccacatcgacgaagaaccgaaagacccgacgatttacccgcaggtgcttacccgtaccgctaccggtgacagggggagaggtgggcgcggcattctgacatttacgccagagaacggacgtactgatctggttatcggattcatggataacccgtcaccggcgcaggcttgcatgaatgtcggctgggatgatgctccgcaccttagcgaaaaagtcaaagaggatttgcttgcctcgtttccgcctcatcagcgtgatatgcgaacgaaaggcattcctatgcttggtcatggtcgcatctatgactttggcgaggagtttataacttgtgacccgttccctgtccctgaacactggattgttattaatggcatggactttggctgggatcacccgcaagcacatgttcaattggctatcgaccttgataatgatgcctattatgtcaccagggcatggaaggcaagcaagacatcaccatctgaggcgtggggagcggtgaaggcatgggctaaaggcattcctacggcatggcctcaggatggtttgcagacagagaagggttcaggtctgcaacagaaagaatattacgaagatgccggttttaaaatgcttaatgagccagcgcagtggccggataaatcacggtctgttgaagctgggctgtttgagatatacgacctgatgagaaccggcaggtttaaagttttccgaggattgcgcgattggtttgaggaatacagcttctaccatcgtgacgagaaagggaaaattgtaaagacaagagatgacctgcttgatgccacccgctacgcatacatgatgcgccggttcgcaagacgattcggtgagattggcaaggttaaacagaaagtaattcccgccccgattaagcctatcaggagacattaa

SEQ ID NO: 286884 - DNA, 513 bp, Morganella morganii
atggaaaacttcattaaagctttagatatgtccataaaaacaaaaaattggtactccgttttatttatatcattagcacttccagatatatgcggaaaaatagatgaacccaataaggggtcaaaagcaaggacgataaattggttcaataaataccttaaacccatttatagcatgggggaaggtgaagatatgcacgttttcctgagcggctccgatttttacgccctgcgttgctcatgcctacatgaaggtagtagtgacataacatcacaaaaagcaagagagacgctggatagattttcttttatcgaaccagcagaaaacgtgagagtccacagggttcaggtaaataactcacttcaccttcaggtagaccaatttggggaagatgtcctttctgcggtaaagatctggctaaatgatatttctaatgacaaagaaaaaataagcaaaatagaaaacatgcttcacatgagagtcttagacctatctaagggcttctctatataa

SEQ ID NO: 286885 - DNA, 420 bp, Morganella morganii
atgaatgacgaacaattcaaagtatgcgttgacataatcagggcatgtcgcgatctggattctttcaccaatcacgaggccgggctgcgcactgggaactcagcagagttcattaagtggttcaccaacaaaatgctgtatatcggatgtttgagaaaagtcggcaccgtcagacacaaccgccatgtgagtccgttatttgcaatatcgccggatgctgtcaccaggctgtatcgctatgtacgggaatccagaggtgagttagttactgacggcgggtctggagaacggcagcacattgaattttgcgggaaagtggtcagtaaggcgtacatcactccggattttggccggtcggagataaccagaattgacgcaatgctgcgggaggtgcgctgtggaatgccaactgtgcagtaa

SEQ ID NO: 286886 - DNA, 177 bp, Morganella morganii
atggaatggattaagtgctctgatgagctgccgcttgttagcaagcgagttcttatcacgacgatttatggcaatgtcgtcgaagcgtgccggaataagggttgtgaatttaaccgcttcggtcagaagtgtaccgccacacactggatgccactgccacaaccaccggaggagtga

SEQ ID NO: 286887 - DNA, 210 bp, Morganella morganii
atggaaccaacggattttgaaaagtggtgtgcgggtgaacttggttatacgcctgagttcatcatgatgcagcggaaaataaattttttcggcaccgctgggtacaaggtgagcgatattgaagtcagatatcgcgcatggaatgccggagttctcagcagactgccgtaccagacaccgccaaaaggagatgaagatggaatggattaa

SEQ ID NO: 286888 - DNA, 1335 bp, Morganella morganii
atgaagcggctgcggttctcgccgaggagcaccttttcgcgctcgttatttctggtcattttcctgttgtttgcaaccataacaacaagttacctggccgttgtgaacttcattgtgatgcccagcctgcagcagtttaaccgggtgctggcctatgaagtgcgcacactgatgagcgaagagatggtgctgaaggacggaaccgcggtacgtgtttctccggcgctgcgtaagaaaatttatgaagagctgggcattaccttttttaccgaaaagaccgccgatgagggcggactgcgctgggcgcgtcattttgaatccctcagtaaacagatgagccattatctggacggttatgcggatgtccggctggaagtcagccgcgattatcccgtgctgtggctgaactcctatatcgccccggatgtctgggtgagagtgccgctgaccgaaatcggtcaggatcagttctcgccggtcttccgttatatttttgcctttctgctgattgtctttgcaggtgtctgggtgtttatccgctatcagaaccgtccgctgaccgagctggaatccgcagcccggcaaatcggtaccggcggtccgctggttccggtacgggaagccggggcggcagaagtgcgctcggttatccgctcgtttaaccagatgtccagagatatcaaaactctggagcaggatcgcaccgtgctgatggccggtgtcagccatgatctgcgcacgccgctgacccgcatccgcctggcaacggaaatgatgaacccggatgacgattatctggcggaatccatcaacaatgatattgaagagtgtgacggcatcattgagcagtttatggcgtatctgcgcaccggccgtgagatggagatgatgcatctggaactgacatccgtccttaatgaagttattgaagcgcacatccactcggatgtctcacttcagaatgatgttattcaggccccggtttatctcaccggtaacccgattgcgattaaacgcgcactgggcaatatgctggtcaatgccacccgctacggcaacggctggatccgtgtcagcagcggcagtgatgagcatttcgcctggttccaggtggaagatgacggcaacggtattgacgaggcggatattccggatctgttccagccgtttgtgcagggtgaaaaagcacgcagtaataaaggtaccgggctggggctggcaattctgcgccggattgtggatgcgcatgacggcaaaatcgatgtcggccgcagtcagcgcggcggattccgtatccgcgtgatgctgccgctgccggatgacagagatgattaa

SEQ ID NO: 286889 - DNA, 705 bp, Morganella morganii; identical to SEQ ID NO: 10437

SEQ ID NO: 286890 - DNA, 489 bp, Morganella morganii
atggcaattcggttttcaggcagatttgaagaatttcttcatggcagtttttatgttcatctctatcgcttctctgtcgatgggtttgattttgtggttatttttagtccggtcgacattactgatgcggcatattcggcgttccggagtgcagaggcggggttcaggcttccggaacgatgctatgacctgaagtttgatcgcgaagataattttttaaactcaacgttctatcaggtaccggaaagaggaatgtgttcgcggcgttatggatttgttcaggatctggctgttgccctgcaacgaattgtgattctgcattgtcagcaatatgctgcgaaggtttattttatgattgcagagaatgataagttaaaacgctactatgacagaattttacagcacggacatgataacgtactatcagaaataaaagcgggccttggtgaaggggggaaagggtatgtactcaaaacgcgacatttctga

SEQ ID NO: 286891 - DNA, 378 bp, Morganella morganii
atgaactggaaagaggcggtaattgccgcgatgtttgttgttgccgcgtggtgggtatatgacacctaccgggataaccagcaactgaaggtgaataacacaacgttgtccggacagctgtcagcacagcggacgataaataccatcacgctttcagccgttaccatcagacaccgcgccgcactcgacaacatcaaagccaaagaaacggagggcacggagaatgtcaaagttaaaaccggcatcagaacggaatttaaagacagtgagtgcgctgttactcctgtttcccctggcattgttgggaagttgcagcaatacgaaagagacattcgtgcccgcgccggtagtgccgatcccgccacaactgacggctga

SEQ ID NO: 286892 - DNA, 351 bp, Morganella morganii
atgccaccacgcataccccgcgcctgccgcaaacgtggctgcgcaaagacaaccaccgaccgcagcggatactgcgaagagcaccgcaatactgggtgggagaaccaccagcagggtaagagccgacacgaacgcggatacggtaccaagtgggatcggttgcgtgctgtggtgctgagcagggataagcacctgtgccagcaatgcctgcgcgaaggacgggcaaccgaggcgaagacagtcgaccacatcaccccgaaagcacatgggggtaccgatgcggaaagtaacctgcagagcctgtgctggccatgtcactaccggaagaccgcaacggagagaacacgatga

SEQ ID NO: 286893 - DNA, 633 bp, Morganella morganii
atgatagtcgtttcatcatttgagattaccgaatcaggcaggcgaacccaaccgtggggtgttactgttggccacgaatataaagaagggcgatactataactttagagaatcacctgaactgataacaactcatcttgaggactttgttgagtattcagatcaagaagctgttcagatattttattcattaatcaggtggattaatggtaatgacagcatatttgaaagcactgattgccttctgtcaggctcgccggaagaatcacctgatgctgcattattcaggtgtagccatataaccaaaggccggtttgaatttttcatgcgccagactgaattaaacgccaataaagattcaatccaatgggtttacgataagctatctatatatcttcaggtagaacggcccgagtttagaaaaggcaccttccgtatcgctcccctcataacggactacatcaccactgacggggacgagctcaccggatacagattctgcgtttatttttatgcttatggtaatggggtcgtggatacctggggatcgctgtcgtccatgtttgaaagtctcatgaaagccacaaaacgtgtcaatgccgaagcgctcagtggcgaggcggtacctatttag

SEQ ID NO: 286894 - DNA, 237 bp, Morganella morganii
atgacattcgtagttgagtatgaagacggcaaggagccgaaaatcgaaaaggatttggacgtgatgggtggtcggctgactgccgcggcattttacgattaccgggatgacttgcttacggaagatgaggcactggcaattactgaatgcctcgacaatgaggaattcgaaattgcatgtgaaaggtttgtcgttaacgcagatgccattctttcaaaaataggttcaggccaataa

SEQ ID NO: 286895 - DNA, 270 bp, Morganella morganii
gtgccttataccgatgtgtggactttcccgccggttcagtattatcccggaaagcacccctgtgaaaaaccggccacaatgatggagcacatcataaaagccagcagccgtgaaggtgatttggtcgctgatttctttatggggtccggagcgacactgaaagccgcactgaagcacaatcgccgcgttctgggtgtggagatggaagcggagcggtttgagcagacgaagactgaaatagtattgccaggtcttgaaagtttcacgtga

SEQ ID NO: 286896 - DNA, 264 bp, Morganella morganii
atgtatgctccacatggtgctgtttttatttttactgatattaaatttctgaagtcactccctaaattcgaatgttttctgtttggagaagaaatatttattgctgaagaagccagaataaaaaataaaacaataagttatgaaccggcattagtgataaacgacgaaagacatgcatcaatatctttaattggtaaagaaaagaacagacaattccatgctgatagtattaaatatatcatgaaccagtattaccaaaaatga

SEQ ID NO: 286897 - DNA, 426 bp, Morganella morganii
gtgggttttgtagtcaatgccgctgtccgcaccgaccaccagcacagctgtgccgccgaacggataatattcctcctgactcagcaggttaccgtcgccgtccgtttccaggccgctgctgccgatcagattgtcataactgaaccgctggtgatcttttttgccgtccggccagtgcagcagccgcacctgtgcccgcccggcgacaccggcgcagatcacctgatagttttcttttccgcggtacagctccagccccggcagatagatgacctgctgtgtctgtgttctgctaccggtttcctgcacggtggttttcaggatacgctggctgcccgcatcataacggtagctttcgcggtcaccggcggcaccgttacgcaccaccggcgtaacctgttgcagctcgccgcgcgcagtccatga

SEQ ID NO: 286898 - DNA, 495 bp, Morganella morganii; identical to SEQ ID NO: 20174

SEQ ID NO: 286899 - DNA, 348 bp, Morganella morganii; identical to SEQ ID NO: 6026

SEQ ID NO: 286900 - DNA, 450 bp, Morganella morganii; identical to SEQ ID NO: 278176

SEQ ID NO: 286901 - DNA, 915 bp, Morganella morganii
gtggtggaggatgacacctttttcgcggcaatttacacgccggatgaagatgatgatccgtttgatgaaagcatctggataaaagctaatccggggctgggtgtctgtaaacgctttgatgatatgcgtcgcctggcaaaaaaagccaaagagcagattgccgcccggcctaactttctgaccaaacacctcaatatgtgggttaacgcggagtcgatctggatggactcaggaaaatgggactgctgcccggagaatgcgccggatgatgaactgaagaactatccggtctgggtcggtgttgacctgtcgaataaaatcgatgtaaccgcagcgattaaggtatacgaagacaatcacggacagactcatatcaagtgcaaattctggctgccggaaggccggatagacaccgcacctaagcatattgccgaactgtaccgtaagtggggggctgccggttatcttgagctgactgacggtgaggttgttgaccatgacattatcaaagccgacattctggcatggtgtgagggtgaggacttgcgtgagctcggttttgatccgtggagcgcagtccagttctcccgccgcctggcggaagagggtatcccgttggtggaagttgcgcagacggtgaaaaacctgtctgaagcgatgaaaattgttcaggccgatgtgtattccgggaaatttcaccacgatcataacccggtgatgtcctggatgatgtcgaacgtgaccgtaaaaccggacaaaaacgacaacatttttccgaataaatcgacaccggaaaacaaaattgacgggccgcttgccctgtttactgccaaatcacgccagatggtgaacggcggggagcaggaacaaagtctgtccgatgttttatcttccaggggcttgcgctcactctga

SEQ ID NO: 286902 - DNA, 648 bp, Morganella morganii
atggaagactgggttgctgaggccggagactatgcggagcaaaccgcatctgcggtacagagcgccatgggcggtatggtgaataacatcactgacatgctgaacggtaacaaagccagctggcgcgactggtctgtggaagtccttaagtctatccagaaaattctggttaacgctgcgattgtgaacagtattaagtccatgtctggtgtcggtggctggattggtgctgtcggtgacttcctgggaggtgctgcggcaaatgccaagggcggggtttatgactccccgggcctgagtgcgtacagtaatcagatagtcagcaccccgacttattttgcgtttgccaaaggtgccgggctgatgggggaggccggaccggaagcgattatgccgttaacacgggcggcggatggctctctcggtgtccgggcgatcggcagaaatcagaataccggttctgcagcaccacaggtgtttattaccattgacagtaacggcggcagccagacgcagtcgtcagctggttatgaacagtttggccgggagattgggcagtatgtagaccagcgttaccgggcgctgattaatacagatctgcggcccggcggtgccatctggtcggttgcgaaaggggcccgtcaatga

SEQ ID NO: 286903 - DNA, 159 bp, Morganella morganii
atgccacggaaccctttaacactgatcatcattgctatcatcctgctgactactgctctgttggcgggttgttatctgtattcactcccgaatcactgtaagccgcttccgggtaatccgctggatggtgtgatccattatgagtgtcaagcgctatga

SEQ ID NO: 286904 - DNA, 441 bp, Morganella morganii; identical to SEQ ID NO: 22297

SEQ ID NO: 286905 - DNA, 150 bp, Morganella morganii; identical to SEQ ID NO: 193044

SEQ ID NO: 286906 - DNA, 270 bp, Morganella morganii; identical to SEQ ID NO: 286895

SEQ ID NO: 286907 - DNA, 315 bp, Morganella morganii
atgtctgtcagcaataagactgtttattctgtatgctccagattaaccctgatggttatgaagctgaccggccttgagcgggcaacagataaatcactccttcagcgactgattgaagaaaacagagatctcagcacaccgttctcagcactggataagacaaacaaggattgcaaaattgagctgattgaatatctgaatacggcaatccgtgaatacgctgcatccgaaataaaggaaaactacgctgcactgaaaaacggtaatctgctggttgtaaaaacattcaatacggttatgcaaaatcacgcttaa

SEQ ID NO: 286908 - DNA, 708 bp, Morganella morganii
ttgcccgcaaaaaccggcttttatgatccgctgacaccacaggaaaccctggcggatctggtcagtcagacagaagcggattttccgcccggtacccgtcatgattacagtaataccggctattttttgctgtctccggttattgagcaggtcagcgggcagtcatttgctgattttgcccgtgaacggatttttgcaccgctggaaatgaaccatacttttattgttgagcaatatccggcaccgcagaccattgccaccggctacggcaaaactgccggtcagtggcggatttctgaaagcccgtggacacacaccggcgacggcgcggtacattccagtgccgctgacctgatgaaatggggcgaaaactaccgcactgcccgtattggtggtactgctctgatacaacagatggcagaaaccctttccccgctgacagaaaacggcacgcctgtcacggattatgagccttatgccgccgggttacatacccttcatcatttcggtgagctgagtctggaacatgccggaggctggatgggtaccagcacttactttatccggctgacaaaatcagacaccactatcgtcgcgttatccaaccgcgaagagtgcgataccgaaacgctggcccgagccgctgctgccgcctttctccgccctgcattccctgcgatgatcactgttcgcggggacgaagaataa

SEQ ID NO: 286909 - DNA, 1398 bp, Morganella morganii
atgtcattgtcccgcgcgtttgccaccacactgcttgctgctgcctgctccgcttatgctgccgacccggcagatctgatgataacggacggcactgtgctgaccatgaacccggaaaatacggtgtttgaacacggtaccgtggtggtcagtgacggaaaaattgtcgccgtcggcggccctgagctgacagcgaaatatcaggcaaagaaagtgctggatgtaaaaggcgatattgtcatgccggggctgataaacacccacactcacggctcaatgacggttttccgctctctcggggatgatgtgccggatcgtctgcaccgctatattttcccgctggaaaataaactggtttcccgcgatatggtgcgcaccggtgccaatctggccaatatcgaaatgattaaaggcggcgtgaccacctatgcggatatgtattatttcgaagatgaggttgcgaagaccgtagataaggcgggtttacgcgccgtgctgggtgagaccatcattaatttcccggttgcggatgcacagacgccggaagaagggatcgcgtatgcggtacgctttatcaatgaatacaaagatcatccgcgcatcacaccggcattcgccccgcatgccccgtataccaataccactgaaaacttacagaaaatcgcggcactgtctgaagagctgaatgtaccggtgatgatccatctggcggaaacggatcgcgaaaaagaagagatagccaaacgcaccggcgggaaaagcccggtacagtatatggcggatatcggcgtgctgaataaccgcctgctggcggcacatgtcattatggccgatgataatgacctggatctgctgaaaaaatatgatgtcggggtggcacacaatatcagtgccaacaccaaatccgccaaaggtgtggcaccggtcacgcaaatgctggaaaaagggatccgcaccggtctcggtaccgacgggccgatgtcctccaatacattaaccaccatgaatgaactcaatctggtcggtaaaatccataaactggaaaccaaaaaccgcgcggccatgccgccgctgaccgtggttgaaatggcgaccaagggatcggcccgtgcactgcatatggatgataaaatcggctcgctggaaaccggaaaactggcagatatcattgtggtggataccaaagcaccgaatatggtgccggtgtatagtccgtatgccgccctggtttatggcgcaaacggcgccaatgtccgtcataccattgttgacggtgtgatcctgatggaagaccggcagttactgaccgtcaatgaaaatgaaattattcaggatgcacagcgttttgcggaaaaagtccgtgaaaccgtgcgcgcttcaggggaagaggtgaaatga

SEQ ID NO: 286910 - DNA, 477 bp, Morganella morganii
atgtcgatcataatggatattatctctgttattggttctggtgtttcgatatctggtattaccctgaaggatttaatcaagaaaaaccctaataaagttgaaattgaacgttatataaaatttcttgaaccaaagaaagtcttaacggctcctcttgatgaggaaattatttatgcagttataaaaagcctggaagaaataaagaaagagacggaaaatgttaggctgaaatgcaatgatgagtcggtttcattagttttattaaatttggttttgactatgagtgaagaacttatgagtcttcataagatttctaattccgctgatgctaatgtgaagatgtataaaaatctgcaaaagataagaataaaatttgctcaagcacttgctatgttatgcagcgcatatgatattgatataacacgttcagaactttcaaaatttatcctggatgttggttataaacctcgtagctga

SEQ ID NO: 286911 - DNA, 945 bp, Morganella morganii
atgtcaggtagaaggatagcttacgcgtattatgatccggaatgggatcgggctgttcatagtattgcccaattagttcgtgaggaagttgaaccccttgactatcaggctatgatgaaaaatcatctaatatgcccgcaatgttacgaacccttgattcgtgttccgacagaccctgaattgacggttatggctgacggtaaagatgctctcttcaggcatttaccatcagatgatgcaccttattgcctactcagaagtggtgctaccgtcgggcgaaaatatagtactgaagaagatgctcgaaaggctgtggaagatgaagaatttatagtcgtttcggggtttatgcaagatagaccggaaaataatcctcgtgaggattttgatggggaagaaagtcctattgaaacacattacgagagtatagccggaagagaagttgagctacccatttcccgacataatggtcagacatttaaggtgccgagtaaaataactagtgtacaatcgctatgtgccaattttcgacagaattattaccgtgaaattcatattattgatgactcagggaaagtaacgaaacatattttatgtaattccttgaataatatcaacgatattcgtgaagaatcagatagtccgaatttttatttcggtgaaattacatcaatagataaacacatgaatcacactacaatttggttgaaaatgaacaacccaaaaccatattcagacttccgtctcagggtttggaataaagttgctgaacctcgtagaattgtgaagggtgttgcagaaggacggattattgttttctacgctaagattgattcagtaggttcgggatattggactgaaaaattaaattggggagaagttgctttgttgccatcaaaatacaaagcttttttggaagacgattatctggctgttaaaagatga
